United States Patent Application Publication US 2004/0214272 A1 - sequence listing, part 42

SEQ ID NO: 175546 - DNA, 543 bp, Zea mays
  Clone ID: MRT4577_91686C.1
atctgcaagagcattagagtacctacatgagacttgttcaccctctgtggtccacaagaatttaagtctccaacattttattggatggtgagctgaccccccacctctctgattctgggtttgcaggccttcttgcaaaccaggaattccaggtacttctagtacatctgtgattgacttctctgcagaagaaacgcttttcatcattatttctttgtggaagtacctagtgtttctaatcacatgtgaagttcgtagtattcaattacaaaatgctacttcaagtcatcaagaagtaaagtagcaagcatagattattactacagtaacagaactgaagaggttcgggattttttttttttttgaaagggagaggcaaaagatttgccgctctaatatattagaagtgaaagaaactgtacaagctgatacccactaacagaataaaagaagtgaaaactacagaataaaagaagaggttcgggatcatatggctagcagaatagttgtgcatacctaagctgcaagctgagctttgatcaa

SEQ ID NO: 175547 - DNA, 400 bp, Zea mays
  Clone ID: MRT4577_91687C.1
aaaaaaaaaaaaaaaaagttaacccttcaagggatcagggaaaacagttatgcttaaaacggaaaaagcactcctttgggccttgatattttaacagcaaaaattaacaaaccctgcatggggggggaggaaacatcggctatgctaacattatttaacaaaaaaaacaaattgctagggcgggcaaaattttaaacggccccctcaaaccaaaaaaaaaggacctctcgaggaaaaagggggggcaaaggccatggcctcttcggataaaccagggcggggcccgggtatgcctgccaaaatcagggaaatcaagggaaaaggggcttgattaccagcgcccataggaagggacacctttggtggggcccaaaaaagggaacttcttagggggaccccc

SEQ ID NO: 175548 - DNA, 338 bp, Zea mays
  Clone ID: MRT4577_91688C.1
ctagaccctgccactttatttaattaccaaacgtgctgcgcttggaaagacttaaaactcggacgggggacccgacggacagggtcaccccaagcattgtcttcctcattcgagcccgcaggcacgcacattacgaccccttctctgggggcctcacgccctttccgatccataacacacacaaaggcaaccacccctgcggggttgattggggggtacttggcccttgataaacctagctccttgggggttgggcctgtcctcgcccaaaagtaggtccattttgcgggggggaccaccactttctacttttcgtgcacaatatccttctagacctg

SEQ ID NO: 175549 - DNA, 589 bp, Zea mays
  Clone ID: MRT4577_91689C.1
gctagctggttttttaaccgataaatatttagatccacgtaataaataaaagagaaactacaaaaaatcgccgtatacagttcttgcaggttacaaccacgtatattatcggttcaaaaacagaacctctgtaatctatgtacacgctgtcagcgtgcgctgtagagtcctcctgtcccgagctgtctatcaacagaagcgcctaacaaaaatttttacacggcacgaagccgtcacaggacgaggccgcagtttgagttgacctgcaagcttcatccgcagcccctcagaatctcggcgagccccttccgctgctcgtccgtgaggtcctcggggaacacgacgtcgaacttgaccacgaggtccccgcgcgcgcccttggccccgccggcgacgggcatgccgccgcccctgacgaccttgacgtacccggggcagatgacctcgtcccggaacgcgcaccggaacctgtcgccgccgagcagcctgaacgagagctgccaccccgtgagcgcgccgaccagcggcacccgggccctgagcaccaggtcgtcgccgagccgcttgaaccgccggtgcctcctctcgg

SEQ ID NO: 175550 - DNA, 404 bp, Zea mays
  Clone ID: MRT4577_9168C.1
tgacggacgagctggctggcgtgccaacgtcgctccttcaggagctagcctacgcatcgacgacgtacagtgtggcccagtaatggcgatatggcgaccagctaccaacatggaactcttcctctccatcaactaccagttcaagaatgtgggacaagagctcaccaagagcagatgaggacctggtgggcctagcaatggcagcatgacgcggtggcgacgagctgctatatgcagctcttcctctccactaactaccagttcacgacagtgtggtaggagttcatcaagatcggatagggatcacaagttggacatgttttttttgtctatctacatactgtgtttggagatgtacttctttattctctacaatcggttaaccatggattgctcgtttcgag

SEQ ID NO: 175551 - DNA, 293 bp, Zea mays
  Clone ID: MRT4577_91690C.1
accgtatgccatatagtactagcgacgcagaccacagctcttgccatgctctctgataaaagaaaaaaaaaataataataatacacagaaaaatatcatcggggatcctttagcaagcccttgtggacacttcatacccatggctaaagatgtgaaagctgtgtaccatacccgtatatgctgtgggcatagcgtttcacggatgactatttgtagaccggaggaatactaatgtaacggcgtatatatgagagacaatctacaaggaattaatgtgatcattgatccctgtt

SEQ ID NO: 175552 - DNA, 1370 bp, Zea mays
  Clone ID: MRT4577_91691C.1
cattgggtacctcgaggccggccgggagtcctctctgtcgcggagccgccgcaacccagcgtcttcctgaccggcgcctgagagagagaccacaactgcctcgagacaccacaagggtaagggaggcgcggtcctctcgcctcgtgtcgcctcccccgggcaatagtaggaggagagggagctgaccagcacccgcccgacgcggcaatgctcgccgccggcgggcgggacgacaaggaggtgctccggaagctcaagagcatggaggcggacaagctggagaacgggggaggaggcggcgacgcgaaaagcccgcgccccgtcgccaagtaccacggcatggaaggccatgcccttcatcatcgggaacgagacgttcgagaagttggacacgctgggcacgtcggtcaacctgctggtccccctgacccaggtgttccacggcgggagcgtggacgcggccactctacccgacgggtgctgctcgtcgacgtgctgctctcctggttccccaacatcccctggggccgccagccctggccgggccctgcgcctccccagcgaccccttcctcgccctgagccgtgtggtcatgccccccgtgttcgggcgcaagctcgacctcagcccgcttgttgcattcatggctattgacatcatcatcatgatcctgcgcccgcagccacgcatgtgatgactccctgcagcagtggtacgggttcacttgctctgatgatttcacttgagtacgagtgcacaagttatgctgtcatgctgtgaaagcttattagagcaattgaccatgttatgatgcctctgttattgtcattatcttcacattttgcattaagagtgagttagattggtcgtgctatgtatggacattaacttgctggttgcttgtgcaatgatataacatgaattcatcttgtcatgccaggttgcattttttaatgctacaacagggaacatgtcatttagacatttagttcatgataaagtgatagccataccaattgatatttcttgttcggtaaattcacatgcttgtgcaatgtgtaaactagatttcgtgtacaatgctaagtatttgagaatagcaatgtaaactgcattgaaaaatgagtgtttatgtgttaacttgggggtatgcaatgaatttggtcaggtcttgtggtaaaatttgtttcttgatccggcatgtggataacctcactttcatgctgtacccaatagcttgtagatttagggaaaaacacccgagtggaattttacccatgtgctaacgggttgtattaaaatgcttgaaaaattctttgtaatattttttgccaaatgacttttggaaatgaagtaatttgtatattctt

SEQ ID NO: 175553 - DNA, 382 bp, Zea mays
  Clone ID: MRT4577_91693C.1
ccgggagcctttgcagaacagagaaggagaagggggagctgtaatcctacctaagaagcggcgatggggcggtcaggaggcggcgacggggacggcgacggcgaccggctcctcctcggcaagcccttggagtcgtcgtcgtcgtgcagctcgtccgacgagagcctggtcaagagaaccgcttgccggtgtttgttgttgtgcacgcgtgtgcgcgggggggggcaggcacggtatggacggcgatggcgcacatcatcacggcggtgatcgggtccggcgtgctgtccctggcgtggagcgtggcgcacctggggtggatgggctggaggttcagtgatgcgtctgtccatagtgatatcaagctgtggcctcttcaagg

SEQ ID NO: 175554 - DNA, 300 bp, Zea mays
  unsure (1)..(300): unsure at all n locations
  Clone ID: MRT4577_91695C.1
aaaaccccgggggggggggggggccaaaaaaaaaaagaggcggggggaacacccgctccacgcgggaccgcgccgcccccttcttttcgcgcgactcgggcggcgcgtacaaccgaaaaaggggagttttcgggtgggtttccgnncgcgcaccttttttttgggggggggggggctttttctgcngccccctccttctctccagggggggggggggggcccccctgcgcaaacacaaaggtgntttgggcggggggggagcccagacgacccgcgaggatccccgccccgggggccacc

SEQ ID NO: 175555 - DNA, 470 bp, Zea mays
  Clone ID: MRT4577_91696C.1
catgatcccgaccgccatgatcgaaggatacgggcatcatgggttaccagatgtgggattccttttgtgcccacaaagatctttctcactttgcacaacttgtacttggcctcctcaggtgtaattcgatgaacagcaaagcgacccttggtgtcatagatcagacggaagttctctccagtcttgtcaatgctgatgacatccataaacccagcagggtaggttatatcggtcctgactttcccatcaatcttaatgaatcgctgcatgcaaatcttttttacttcatctccagtcagggcatacttaagtctgttccttaggaaaatgatcagagggagacactcccttagcttgtgggggccggtggatggacgaggggcaaacacgccggtcagtttatccagcatccaatgttttggagcggctacgcttcagatgtacaatgtgaccacgagccatgctgcgct

SEQ ID NO: 175556 - DNA, 671 bp, Zea mays
  Clone ID: MRT4577_91697C.1
ccggccggctccatcttttgtgtcatgcccgcagcctctgcatgttgagccagccgtcgcggtgccttcgccgcctccctggccctgggcttcgccgccggtgagccaccttacctgagctcgccacgtccctcccctcctccctgtgtcactggctcactgctcgagtcccctgctcccacgtggcattgcgacgccacctcccctgctcgcgctcagcaccgccgctgccttgctttatcagctcgccgcctccctgcgtcgcgggctcgtggccccgagtcccctgctcccccgcggcggcggccctgcctccctgctcacactcagacccgagtcacctgctccacgccgcctgctagagccccctccctgctctcatcctcccctgaggtgctctgattttggttctttgcagactgaaacggcaagcagtagtgatgctaatgcatggctgacagtcagagtgatagctatgatcctttaaaagatccagcaaggaggccaaagtctgatgattgagtaacgcttgtgtgcttgcagttgtgggcattgtattccttgattttgtgctacgtttgtggttgtggaccactggacatttcattccactttgttttgagggtggcgacttgctagttgctattagttgaacacttgaaacctgggcg

SEQ ID NO: 175557 - DNA, 185 bp, Zea mays
  Clone ID: MRT4577_91698C.1
gggactctttggcccagctaccacgcaattgaaattgtttaaaagagacccatcaatctgcagaggtaggctcttgccaagcagactggtcggaagtgcacaggagggaaggctcccacgaagcacggagcctccaaagctgcccgtaagtgtgcccaacaccactttttttttctagaaggggg

SEQ ID NO: 175558 - DNA, 230 bp, Zea mays
  Clone ID: MRT4577_91699C.1
gatgtaacttcctctaacttggtgccatgtggactggagtcaccgatgtgtgctgccaagtgtctggcccaaccgttgaacacgtggagagatgctctccatatctttagaggaggatataaggtgatttgatgattaaaaaaaataaacaaattaaataaaataaaaaataaataaaaattttaaaaaattaaataaaaaaataataaaaaaaaaaaatatatataatt

SEQ ID NO: 175559 - DNA, 182 bp, Zea mays
  unsure (1)..(182): unsure at all n locations
  Clone ID: MRT4577_9169C.1
ctcntttatacacaaggcaagaagacaggaggagtaattagaaagggacagggtgcagaatgacacatatttaactaacgtcatttgcaagatcctagggactagtgatgggtccattctggtcccaagatactgcagagcgtgtgttcaatgcgggcagtcagggatccccaagtggggga

SEQ ID NO: 175560 - DNA, 398 bp, Zea mays
  Clone ID: MRT4577_916C.1
ctaataagtgacataaataaccatttgcattatgtcactcgccacatgctggattactggaaatacagatgaaggatgagtaacgctgaaaaggtattactggcaacacatgtcctggaagcctgactacagctacgatcaaccatggagggcacatcacttccactgtatttccagtaatccagcttgtggcgagtgacataatgctaataagtgacataaataaccatttgctgatatgctgtaaatacagatgaaggatgagtaacgctgaaaaggtattactggcaacacatgtcctggaagcctgagttcagctacgatcacccttgggggcacatcacttccacttcttgaacttgccgccgccgaacatgccgtgcccgtgcttgcatgct

SEQ ID NO: 175561 - DNA, 201 bp, Zea mays
  unsure (1)..(201): unsure at all n locations
  Clone ID: MRT4577_91700C.1
tcgtctcggaccctgcccnttgcagctcgtcatgggaagaagtcatggtgccctcacgtatggccccttgtgaaaggggtcgtgtcgtgaggggctgctcaaagtctcatcgagaaatngcatgccgtctcaagcttctgcgtgcccttgcctgaggacctgctgactcaggcccctgattatgtnncaagctgnngtgaa

SEQ ID NO: 175562 - DNA, 347 bp, Zea mays
  Clone ID: MRT4577_91701C.1
cagaagaggggttttgggaacaccggaacttttttttcctaaaaaaggttccaaacgagtgctaatgagaccgatcatatagtgtttatatacagggcgtccacaaatgaccaaaaggggggatggactaacaacatctaaaacaatccaccagaatgattgcactccaatttacgtgcaacaaataatttaccccctcgatgaatcaatcacctttctccggtccacaattgcaccctaaaagatgctcccataattcgttcttcgtcaaaataaaggcccctattggtcctccccaaagcactgcatcggccattccaaaactactatggcacgcaggctcccca

SEQ ID NO: 175563 - DNA, 454 bp, Zea mays
  Clone ID: MRT4577_91702C.1
cccacgcgtccgcacatgcgttcgccatgggaggggacatgaaagggctgataaagagagtgataacgagggtgatgagaccaatgaaccaaccatggaccgaatcaaggacgacctgaaagacgacgtggagaactatgaagggatcgcctcaagctgcgagacaagcggggatgaggatgttcatgttgaagtgcacatgaagagccttaaggtgaggaataccatgttgactgacatcaagggtgagaacacagcatcgtatacagcaacagatgaagatgcagatgtccaggtcaaagttgagtacaaaggactgtaccatacagtgctgtatactacacagcatattacagagcagacttacggacatactgagagacatagagtgatagcaagagtgaacccatactagaacgcatactacacagcattgtttgcaacattgggagct

SEQ ID NO: 175564 - DNA, 199 bp, Zea mays
  Clone ID: MRT4577_91703C.1
accgatacgtcaaaccatcaacttccattttctttatagaaataatataacctttgaagggcagggcgcttcatcggtactattaactataactactctaactaagtcaaattcattcatctataaatagcgacctgctcaaatcatatctacactccccacatcatttttacctgtacctctctaactaaaattattc

SEQ ID NO: 175565 - DNA, 574 bp, Zea mays
  Clone ID: MRT4577_91704C.1
gaaaaacaccatcatagttcttaaaaatcgtcttaccaactcaacaacataaaatcccagataaatccaatacaaacgaagaacataaatcagaaaaccaaaatctttgcctagatataagagactttgcgatgacgagagcatcattactgactagcgccaagccacttggtgaagttatcgaactcggggtagtcactgtctgaaatcatagtctgataccaagccttgcctgctgctttgatcgcttgggcctcctccttagtgacgactttcctcttcttctcgagcttctccttcttagccttaacccttgaagcttcagccaacagagacattctctttgcgggcttagcataaggattcaacttgaacatcacattaagggtcttcaatggattcttcttcagaaccgctctcttgggaccatccttaatcgggttcaccacactctgtacctcatcgggagtaataatcctagcaagatcagcattcaccatcttcgcacgaggcaagacgtaacccttcttcttctctgaggggttctcaaacgagccctagaaagattcaagct

SEQ ID NO: 175566 - DNA, 664 bp, Zea mays
  Clone ID: MRT4577_91705C.1
gtcttctgacaactgccatatctttgcaggggcttgttcttctgtgttgcaattggtccgtgggctggtctgattattggttttgtcacagaatactacactagcaatgcatacagtcctgtgcaagacgttgcagattcctgcagaactggtgctgccactaatgtcattttgggtcttgctcttggatacaattgccgctcttggtatgctgagcacaatcgcaactggtcttgctattgatgcttatgctcccatcagtgacaatgctggtggtattgctgagaactgatgctgttgatgctgctggcaacaccactgccgctattggaaagggatttgccattggttcagctgctcttgtgtctctggcgctttttggtgcctttgtcagtagagctagagtcatggttgtcgatgtcctctcccccaaggttttcattggtttgattgttggagccatgcttccctattggttctctgccatgaccgtgaagagtgttggaagtgccgccctaaagatggtggaggaggtccgcagacagttcaacaccattcctgggttgatggagggaactgccaagcctgactatgcaacctattggaagatctccactgatgcttccatcaaggagatgattcctcctggtgctctggtcatgct

SEQ ID NO: 175567 - DNA, 924 bp, Zea mays
  Clone ID: MRT4577_91706C.1
ccacgcgtccgcccacgcgtccgcccacgcgtccgcggacgcgtgggtgattattggttttgtcacataatactacactagcaatgcatacagtcttgtgcaagacgttgcagattcctgcagaactggtgctgccactaatgtcattttgggtcttgctcttggatacaatgacaatgctggtggtattgctgagaactgatgctgttgatgctgctggcaacaccactgccgctattggaaagggatttgccattggttcagctgctcttgtgtctctggcgcttttttggtgcctttgtcagcagagctggagtcaaggttgtcgatgtcctctcccccaaggttttcattggtttgattgttggagccatgcttccctattggttctctgccatgaccgtgaagagtgttggaagtgccgccctaaagatggtggaggaggtccgcagacagttcaacaccattcctgggttgatggagggaactaccaagcctgactatgcaacctattggaagatctccactgatgcttccatcaaggagatgattcctcctggtgctctggtcatgctcactcccctcattgttggaaccctcttcggtgttgagactctctatggtgttcttgctggtgccctggtttctggagtgcaaccgtcgttttctcttaacagaaaagaactataaaaatgtcgccgctgtcaaaacccagaaattacgaggcgcgaaatggaaagcttccagcagattaacgatcggctagatttgattcattccgcccgcccactacctctcacggtcacggccaatccggccaacccagaaatcacgtgtcagtgctattttgtgtacaagtactacttaatatatgtttgaaaacttttttaagtgatttccaaacttgaacgggaatcattcttt

SEQ ID NO: 175568 - DNA, 2019 bp, Zea mays
  Clone ID: MRT4577_91707C.1
gcattgtttatattaatatatgaaaagttggtgtgattgattaaccatagtcatgcgtgctaattagctgtgcattttatttgcttatacagcggcatgtacaagttcagttgaatgaatggcgctctggtgcactaatgagcggatagcgagagaacctctaacatagtatgcaagattttctttcctgatagaatcttccagagtacaaagctaacacaatacctttctaggataaatttgggagtatcaactctaatattttactttaccttgtctcgaggtgtgctctccactcaaaccatttcagtaatttgcattaggttttcttgagatattaataatgtgtaaaggtatagatgctaccttcagacatttattcgaataaaattttcacttaactggatagtggctctgattgtcattaagtattttgacttttggcatgatcactgcactcttcagcactgtgtccttgcttggagccatcacctctctgtctccggtttccttggcatgatgactgttggtattgctgtaatcattgtctgcttgatcacccactcctttttagctctgttcgtatcattgtctgcttgatcaccaccctttttgctactgatttctttgaagtcaaggctgtgaaagaaattgagcctgcacttaagaagcagctcatcatctccaccaccctgatgactgttggtattgctgtaatcagctggttggcccttctagctaagttcaccatcttcaactttggtactcagaaggatgtctccaactggggcttgttcttctgtgttgcaattggtccatgggctggtctgattattggttttgtcacagaatactacactagcaatgcatacaagttcaaagcctacaagtctcttatgttttttcttctcatcgtttctttgtgatggtgttttaataatcctaacatgtttattctatggtagtcctgtgcaagacgttgcagattcctgcagaactggtgctgtcactaatgtcattttgggtcttgctcttggatacaagtcggttatcatcccgattttcgctatcgctgttatcatctatgttagtttctccattgctgcaatgtacgacatcgcagttgccgctcttggtatgctgagcacaatcgcaactggtcttgctattgatgcttatgctcccatcagtgacaatgctggtggtattgctgagaactgatgctgttgatgctgctggcaacaccactgccgctattggaaagggatttgccattggttcagctgctcttgtgtctctggcgctttttggtgcctttgtcagcagagctggagtcaaggttgtcgatgtcctctcccccaaggttttcattggtttgattgttggagccatgcttccctattggttctctgccatgaccgtgaagagtgttggaagtgctgccctaaagatggtggaggaggtccgcagacagttcaacaccattcctgggttgatggagggaactgccaagcctgactatgcaacctattggaagatctccactgatgcttccatcaaggagatgattcctcctggtgctctggtcatgctcactcccctcattgttggaaccctcttcggtgttgagactctctatggtgttcttgctggtgccctggtttctggagtgcaaccgtcgttttctcttaacagaaaagaactataaaaacgtcgccgctgtcaaaacccagaaattacgaggcgcgaaatggaaagcttccagcagattaacgatcggctagatttgattcattccgcccgcccactacctctcacggtcacggccaatccggccaacccagagatcacgtgtcagtgctattttgtgtacaagtactacttaatatatgtttgaaaacttttttaagtgatttccaaacttgaacgggaatcattcttattcttttaaatgtctgatagtagttattgtttgtgtgacattgtactgttttgtttcttaaacaaacaccattctac

SEQ ID NO: 175569 - DNA, 491 bp, Zea mays
  Clone ID: MRT4577_91708C.1
ccgccggatcaccttcctcatcggccccgacgtctcggcgcacttcttcatgagcaacgagtccgacatgagccagcaggaggtctaccgcttcaacgtccccaccttcggccccggggtcgtcttcgacgtcgactaccaggtcaggcaggagcagttcaggttcttcaccgaggcgctcagggccaacaagctccgcagctacgtcgaccagatggttgccgaggccgaggagtacttcccaaagtggggagaaagcggcactgtgatctgaagtatgaactggagcacctcatcatactgactgctagccgatgcttgttgggaagggaagtgcgagaaaaattgtttgatgatgtttctgctctcttccatgatcttgacaatgggatgcagccaatcagtgtcatctttccctacctcccaatccctgcacaccgtcgccgtgaccaggcacggacacgtttggcggagatctttgccacgatcat

SEQ ID NO: 175570 - DNA, 626 bp, Zea mays
  Clone ID: MRT4577_91709C.1
ctctcccacgcatcacgccaaggaacagagacagatcgccgctccccttctcggagtccgcggtgtgcgtgccctccctcctcgagcgagatcaggctggccacagatctatgtgacaaaatgctgaagatctgctgcatcggcgctggctatgacggtggcccaaccatgaccatgattgccctcaagagcccagacattgaggccggcaccattgacatctccaagtccccgtattgaggcctggaacagatgacaccctgacaatatacgaagctggactctattatttttttacacagcgcagagacaggaacctcttcttgaacactgatgttgatgaaaacgtcgctcaggctgacattatctttgtctcggtgaacacgcccaccaagacccgagaggattgaagatggcaaggctgccgacctcacctactgggagagcgctgcccgcatgattgcggatgtctccaagtatgactacattgatgttgagaagtacactggccctgacaagaccgctgaggctattgagaagatctcgacccacaacagctagggcatcaaccaccagatcttttccaacccagagtcccttgcggaggccactgccattgaggaccc

SEQ ID NO: 175571 - DNA, 518 bp, Zea mays
  Clone ID: MRT4577_9170C.1
gctcacataacaaaacctatcctttttaggggtatggttacggtacaaatttgaaaaagcaaattttaccctataactggctggtaagcctggattcaagtgcttcaagttaacagtttaggaatcatctgatcaactgccccataaacacacacaacatttactagggtcatataagggcactttcacttgaaaatacaaacttaaatgtgtcacaaaaaatttctaaatttaacgtgggaagggtttctttgctctaagagattcaagggccttcgcaccgggtgcaagttctaggttcttctgatcaaacatttctatttcaaagtttggaactttttttctaacattaccatctgaatcataaacccgatccttctcagagttttgaggcataagaaccgaatcggtgttctttaatattcccttgctggcatggacttctagccttttgcggagttattcttcacgtcttccaacggatatcctctttgattagcccgttctgtaggttccta

SEQ ID NO: 175572 - DNA, 147 bp, Zea mays
  Clone ID: MRT4577_91712C.1
cactggccagcgagctgtgctgaagtttgccgctgccacaggagccactccaattgctggccgcttcacacctgggaccttcactaaccagatccaagcagccttcagggagccccggcttctagtggtgactgatccccgggctga

SEQ ID NO: 175573 - DNA, 312 bp, Zea mays
  Clone ID: MRT4577_91713C.1
gtgcgcttggcttgaatctggatcaacttctaccatttctacagtatttttgtcttcatagattgcagttgtagcagtccaaacagtcagatttaatccgaagcgtttatcataaacactgcagaatctaatgaacgtgctctggctcaaaatatctgatactagattatatctcaaacccattttgatcgcagactatctacacagagacggatagcattagttacagcagcacatgtactgcaatatactgtctggagagaaggcggcatcagcgcgcggagtggcagcagataaacggcatccacgact

SEQ ID NO: 175574 - DNA, 309 bp, Zea mays
  Clone ID: MRT4577_91714C.1
gcaccgcacaaaaggtttaccccttcccggggaaattctggatttaaaattacacgaaacatcttttttttctattacaattcacgacacctaaaatggccgggcagtaaaactaccgtcgagtttttatgctacgggtgggatcgttcttacaacatgcacctcccagctgtgaaacacaattttaaaaagggtcaaccaaaatggccccgggagaaattgggctcttaagggtttcatagcctggggatagtggctttcttgtggcgagaccttttggatacagaggccagtttttgtcttttgggc

SEQ ID NO: 175575 - DNA, 681 bp, Zea mays
  Clone ID: MRT4577_91715C.1
cgggtctatccctatacatgccgccatgtttgtaaaaaaaaaaaaaaaatttagaaggtatgcacaccaatctggaacagatgcacccctctgtataagagagaaggattttgcatatgatcaagtaagggaactacaggatcagttgagaattaagaatgaggaatttgaagtgttagcaaagtcacatcaactgcaagcaaacagctatgagaaacaaatttattatctacaagagaaaaaccattatatggaggaggtgcttgaacatcgcagtggcatcacgaggaaccaagaaactcggaaacaaatgttctctctaatattccatgatccagtgctcatctgtagtctgcagtgtctgcaatgaacactaacgctgctgctgaagcgctactctgctggatgacattggcattgaccttcctaaagctccagcacaatagggtattggagcactttggaacctagaattcttttcaccctttaggtcaccaaattgttttcatgaaaaccttggaagcaaacccatcaggttaggttatcttaggctcgcctgctgctgctgctgtaatagacgcttgcaacagccttttgcaataatcttcctagcagctttggcctatcaacctttttagttttttgtatcttgcgaaagacgggctcgtgtattctctatag

SEQ ID NO: 175576 - DNA, 563 bp, Zea mays
  Clone ID: MRT4577_91716C.1
aattcggcacgaggggatcttcgagttccttttgaaaggtttggccctgttcgggatgtttacattccaaaggactattactctgggtaagttgtactaaatcaccatattctgtgagttatgtattaattcctcaaaaagatagctattgctgtttctataatgtttggagctgtaaatagttggagacctggctagtttttcttggtcataatcaacaacaagaagaacatcaaagctttttatcccaagcaagctgggtatgatagagttaaaaatccaatagaacccacaagtcaaggttcgggcacatggatgggtatatcctatcatctcaagtctcttttcattgcctctttccatgtcaactttggttttcctcttcctctcttctcgttgcttcgtgccttaggatcccactacgtaatggcgcttatagagggtctctgttggacatgaccaaaccatctcaaccatagttattaaggctgtaaggcgaccgaccccctttttacctttcatcgggtaaagtgtaaggtgaggcaacacctcatttatataga

SEQ ID NO: 175577 - DNA, 305 bp, Zea mays
  Clone ID: MRT4577_91717C.1
caaaaaaccaaaaggggtttttttaatcttattgggcggttccacatatgccatagttacctatggaacaaggatctacatctaacgggagcatgggacctatttatggctcatcaactacatatcgaatcacatggggccggccacacgagccttttatacaaactggttacatttaaaacaccattgcacagatggctatcagcgcgcacggacatattctacaattcattggggaggcctccactaatcaagcattcgtggattgaccttcctgactgaagcaacaccaaggacgggaacta

SEQ ID NO: 175578 - DNA, 372 bp, Zea mays
  Clone ID: MRT4577_91718C.1
atggggaagagcgcgtcggtgcagcgagggcacgtcccggtgctcgtcggcgaggcagggaaggaggaggaggagctgaggagggttctagttcacaggaaggttcttcagcacccctacttcgctgggctgctggagctcgcggcggcggagttcgggcatgaccagaagggcgtgctccggatcccctgcgacgtcagacgcttccatggagttgttcagctcatcagaagaagcagaacacggaggaggaagaaggtgacggttccatgcctcgttttccttaagctgttgtaataactgtcagagagagtgggagtgtgaggttagggttttcagaaattctgtgtatcatcctgatagtcaacatcg

SEQ ID NO: 175579 - DNA, 460 bp, Zea mays
  unsure (1)..(460): unsure at all n locations
  Clone ID: MRT4577_91719C.1
gagtgcacatctgatgaggggtggcaagcggctgttccaaaggggcgatccacagggagccgcagaactggtgcaggcacgaggaggccaaatctggcaaaaattaatactagttcactaaacagtgagaatggaagatacaaaggaagaggtatatctaacttctcttcccctcgagtttcacctagtgaggctgcagtttctattggttctagacctcttgcaaagaaattggctaagagttcaagcttcaattccaaagcagttagcactgccgtctcatcgaatactggtgagaattctttcaatctcaactccaagccagcaagccctgccattgccacagctgctgccaaggtgataccatccacaacaccaagtgctagccaaacagtaaggaagtcactttcatacaaggaggtagcaatagctgcaccagggactcttgccanagcatcga

SEQ ID NO: 175580 - DNA, 839 bp, Zea mays
  Clone ID: MRT4577_9171C.1
cccgtccgccgcagtgcaggttcgttccgttcgctctgtcgctcgcgtcatctcaccttccccgtccggtagaaatcatctcctgtatcccggtaagagggggtcgaaatggtgaagcacaacaatgttatccctaacggccacttcaagaagcattggcagaactatgtcaagacctggttcaaccagcctgcccgcaagcagaggcgccgcattgctcgtcaaaagaaggctgtgaagatcttccctcgccctacatctggtcctcttcgtcccattgtgcaatgccagactcggaagtacaacatgaaggcaagggctgggagaggctttacccttgaggagctgaagtcagcgggcatcccgaagaagctagctcctactattggcatttctgtggaccaccgacgtaaaaaccggtcacttgagggtatgcagtctaacattcagcgactcaagacttacaaggccaagctggttatcttcccaaggcgtgctcgcaaggttaaggctggtgattctacccctgaggaacttgccacagccacccaggtccagggtgactacatgcctattactcgtggtgagaagcgctcggttgagatcatgaaggtcaccgaggagatgaaggcgttcaaggcctacggcaagctccgtgtcgagaggatgaaccagcgccagctcggtgcccgcacgaagaaagctgccgaggcagagaaggaagaaaagaagtgataagatattttgtttcattctgcagctagtgaatgttatcatcgggaacttgttctaaattttgttttggggctggaaaagagaccagcggatggctttgatac

SEQ ID NO: 175581 - DNA, 143 bp, Zea mays
  unsure (1)..(143): unsure at all n locations
  Clone ID: MRT4577_91720C.1
cgacttctcaaagtggctctgcgtgactcagtgagcggcgagggtagttaagttgtgagtagctgagcttatngtcgtagagcaagcatgatccagcaaatctgtggtatcctgcatcatcataagaagttgctacaagtctt

SEQ ID NO: 175582 - DNA, 334 bp, Zea mays
  Clone ID: MRT4577_91721C.1
agggaataaaatccctcttaaatttcaggcttggaaagcgggatggatatcaacgtaaatacataatgggtttgggcggaagcgaatcgcactttttggcattagcaggcctctacggaacggaccttcctattcacatgaacccaaaaaggggcttcactggccaacaacctactagcataaccccaaacctgtgctcccacacccccgcttaaatcaagctcaagcttgctaacacctgactactaatgccaaccactaatcgcccatgtcgctagaattagggccaattgcataactctcagacagccataccacacccaaggagtgccct

SEQ ID NO: 175583 - DNA, 605 bp, Zea mays
  Clone ID: MRT4577_91722C.1
ccggccgacacaactactgcctacatctatcaaccatcgcacaacatggcgagcctgctcgctcgttgctactgatactgcgcgaacaaggcgtatcctaagttccacttccaccgagccgtccgcgaccccaagatccaaatcttccatcttgaccaagagtgcgccaacacccataacttcactctgctgcgtccacctcgtttacaacaaatatcaccaccttagctctgaggctcttgaggacgcccatatttgcgtgaatgagtacctcacgcagaacatagtgaaagaggctttccacctccgactgcctgctcaccttttccacgtccaccatgatcaagaacatggtgtgttcgggtccgcgccgatatacttcagatcgcgatgcctgccgcctggctgtatacgacatcgtcactgtggcccgcgtcaacattgagcacattctcatgagcgtgctcactcgtgatgctaaccgtgcattgctctcgagtgcctccgccgatcccattacaagttccctgagccgacaaaagatcattgtctcctagaactgaagtgttcactcactctccatcgcgaggaggtacctcgacaac

SEQ ID NO: 175584 - DNA, 368 bp, Zea mays
  Clone ID: MRT4577_91723C.1
ttttcagcgataacgtcatgattttatttttattgataaaagttgtaaaagtggaaacaattaatatattgtatagcaaccacaagagctgaagcttgttcctgcagtaattgtctaggggtccaccgtggagtcagccaaatagtgggactcggatcctgtgggtgttgacgaagctagcttgctctgcagttgtgggcggttaaccatctgcatgtgcactgggagattgtcgaagacgtagtatcttctttccctctttgatgagtcgtcgtcgacatgtttgcgatgagctttcaccagatctacctccacccggaaggcattggaggaaacacccaccccgtggggggacaaaaaaaaccaca

SEQ ID NO: 175585 - DNA, 796 bp, Zea mays
  unsure (1)..(796): unsure at all n locations
  Clone ID: MRT4577_91724C.1
cgggtattcagcttcagcactagaccttgaggctgtgggctgcttgcgattacactagaacaccacattcctaccaagatatacttcaaaacctcctgtagagcgtctatcatcaatatcaccgggccaatctacataagaaaaggcactcacaagcatagaaggatacttacaatttttacaccatcttcaagagtaaacttgatataccttagaatcctcttcacatcactccaatgatgagtggtgagtgcatgcaaaaatcgacacaccttattgactgaaaaacataagtcaggttgtgtcagagccaagtctgtaaggcacccacaatgctcctgtaccttgttacatcttctggatctagcaactcgccttcaccaatcctcaatttttctgaagtattaagcaaagttgtggtgagtaagtttgcaattcatcattccaactctattgagaaaatttaagcatgcttagtctgagacaaatgaataccatcagttgtttgaacctcgacgctaaaaaagagtgtagctaccctaggtctttcaacacacaatcaactctcaagcctataagcattgttatgtggggcacagtctacaagcgtcggccacaacagaaatagatagagttaatagattgatttagttgagatagatgagaaagtaggagaaaatagttgagaggaaatagggataagctgggcagattagccgncgttccctaggaggattatntaatgtaaacagatggaataaagaagggcacaaggaagtttaatctaatacctttc

SEQ ID NO: 175586 - DNA, 790 bp, Zea mays
  unsure (1)..(790): unsure at all n locations
  Clone ID: MRT4577_91725C.1
ccgccgcccagccgncgnnatctccagttganagctgccgagcccttcttccttgccgcgtgttccatcttcttccccagtcgtgcctcacctcctgcgctcgctcggctccctggcgtgcacgttcctacccagctcgaaggtcggagctccctcctccccaaagccttctccatggcgctcggctgcccggccgcctagccttgttcccagacgcgcgcagcttcttcccaatccgcgccccatctccctcgccgtgctccttctacgggttttccatggtcgccgcgcgcccagctctgccatggccgcgccctccctttctcttctagctcgctctccagcctccagctcgccgagctctgtccgctccccatggtcgagctccatccctgcctctctccccctcagctcgcctccttcagctcggatttggtcttgctgcgcccctacgcttgctctgctcggagtcactcccatggcgagctcgccggcgttcatcccctgcgtctcctcgccgtggaatttcccagcttcctgcgccgcgcccatgctcggcttcctgcgcgttgccgcgttccctaccgcgcgttgagcatcccgctagcgctcagctccgtcctttcttcctctattcgctcacgcgcaggcgcgcttcgccgagctcgcccctgcacgtcctgctcgcccctgcttttctctgttggccgctgcacagctcccgctcggatttccgctgtgcgctccttagttcgacacccggtgctgctccatggatggcccatgttgc

SEQ ID NO: 175587 - DNA, 394 bp, Zea mays
  unsure (1)..(394): unsure at all n locations
  Clone ID: MRT4577_91726C.1
tttacgttgttggttttatccggtngaaaaaaaaaaaaaaaaaaaaaaaaaaaaaaaaaaaaaaaaaaaaaaaaaaaaaaaaaaaaaaaaaaaaaaaaaaaaaaaaaaaaaaaaaaaaaaaaaaaaaaaaaaaaaaggggcgggcctttttaaaagaacccaattttacgtcggggggcttgcaactttttagtttttttttggggccccctaaattaaattaattggccgcgttttaacaacgtcggaattggaaaaaccctgggtttccccaattaaatccctttgaaaaaaatccccttttccccagttgggtaaatagcaaaaaggccccccccgatcccctttccaaacatttgcccaccctaaatggcaaagggaaccccccttttac

SEQ ID NO: 175588 - DNA, 198 bp, Zea mays
  Clone ID: MRT4577_91727C.1
attcggctcgagccgggccgcaatttttattttacacacatggcccaattttaatggatggttttcaacaaaacaagcttgtaaccagaatgccttgaacaagcggtggcgggtctcaacacgaccaatcgcctgatctttactgagttactcaagaaatactgggggaggaatcagaattcttaaaaaacacccaca

SEQ ID NO: 175589 - DNA, 654 bp, Zea mays
  Clone ID: MRT4577_91729C.1
atcgcaatattattgagaccaactagcaacatacaaagcacaatatgcgtaccaacaatggcagacaaaagattacgcctacttatgctccttggtctctctgcaggcgctgttacagcgaccattatgccgcaatgctcgcacgctgctatagctttcctacttcccccgtacctcataccagcggagcagttactatgagaaaacccaatcatttaaccgtacaggatccaacaggcaatcacaggtgggatgttacctgttatcaaccttgcaactacaacaatgatcaaccctatcacatcacatacctccgtagcatccattggcacacaacatcagcggcacaacacctccaacaccgtgcgctagcaaaccttgctgcctactctcataaacagcagagtattccattcaaccaactacctgcattgaactctgcttattatttgccacaccaccacctaccatgcagccagctacgtgatggctacccccagtagtcatttccattcaacgcaactgacactatagaactctactggttattaacaggaccaacaactactaccattgaaccagcttgctggtgtgagccctgctaccttcttgagcaaccacagttgctgacgttgcaccagcacgctgtgccta

SEQ ID NO: 175590 - DNA, 455 bp, Zea mays
  unsure (1)..(455): unsure at all n locations
  Clone ID: MRT4577_9172C.1
ggccgccggcgcgtacagtacgcccaccancagcttccctcttgctgtttccgcccctccgcgcgaccgggctaccgtgtccgcctccatggggctgatcgcccacnacgacttccaacatattctgcgtctgctgaacaccaacgtggatgggaagcagaagatcatgttcgccatgacctccataaagggtgttgggcgccgcttctccaacatcatctgcaagaaggccgacatcgacatgaacaagatggccggtgagctgactcctgaagagctggaacgcctgatgacggtcgtggcgaaccctatgcatttcaaggtgccagactggttccttaacatgaataaggattacaaggaccgaaggttctcacatgtcgtctccaacgccctccacatgaagctcatagacgaccttttgaggctcaagaagatcaggaaccaccgtggtc

SEQ ID NO: 175591 - DNA, 2871 bp, Zea mays
  Clone ID: MRT4577_91730C.1
atgaagataccttcggaccaagggctcattgctattcatggaagccaggaagctgccagaagggccggaggaaactggacagactcaaaagcaatccataacatagatggagctgaagcttgtgagcaatacaagtacagaagggagaaagctgcttcggccgatcaaccgaagcccatgctcatatgtgatgacatagcagagcagaaggtgctattgggatctcagctgtccgaggaacaggagaaaaccttgataaggtttctgttcaacaacaaagttgtttttgcatggtcagctaatgatctttgcggagtcaacagggatgttattgaacactcgctcaatgttgatccatccttcagacccagaaagcagaggcttcggaagatgtctaatgacaaggccgaaggtgctcggaatgaagtaaaaagactccttagcgccggggtcatcagagaagtgaagtacccagaatggctagccaacactgttatggttaaaaaggtcaatgacaaatggaggatgtgtattgattttaccgatctcaacaaggcttgtctgaaagatgagtttccattaccaaggatagattccctagttgatgcagcagctgcatcagagcttatgagtctgctggattgttattcaggctatcatcaaatttggatgaaggaggatgagccaaaaaccagcttcataacccatagtggaacatattgttatcttcggatgcctgaggggctcaagaatgctggaggaagcttcagcagaatgacagcgaaggttcttcattctcagataggcagaaatgtgctaacttatgttgatgatatcattgtaaaaagcacaaaacaagaaaattacattgctgatatgcaggagaccttcgctaattttagacaggtcggtctaaagctgaatccagaaaagtgtgttttcggagtaaagaaggggaaattccttggttgcctagtttcaacaaaagggattgaggctaatccaaataaaatcgaagctattcttcgaatggaaccaccaagcacaaagaaaggggctcagcgactgacgggaagacttgcatctctgaaccgattcatatctagatcagcagagagaaatctaccattttttgaagtgctgaagtcagtcaaagtttttcaatggggaccagttcagcagaaagccttcgacgagctaaagcagtatttgatagacctaacgacattaactccaccaatgccaggggctccacttttgttatatgtggcagcttcgcactcagcggtaagtgtggcacttgtccaagagaagcttgaagggcaagtcaaaaagcaagccccaatatacttcgtctctgaagttcttagtttatcaaagaaaaattatacagaattggagaaggtgttgtatgctgttttgatggcttccaggaagcttcggcattattttcaagcatacaatataattgtcccttcctcacaaccattgaaggatattatgagaaatagagaagctactggaagggttggaaaatgggctgcggaactcaatgagttttgcattgattatgtgcatagatcttcaattcagtcccaggcgttagcagacttcattgctgactggacgccaggggctcaggaagaagaagcgagtaaagatgccgaagcttggacagtattatgcgatggttcttggggaaccttcggggcaggtgcaacttccgttttaattgcaccttcaaaagctagaacatgctacgcagtgaaacttgattttagttgtacaaataatatcgctgaatatgaggctttgcttttgggtcttcagaagttgaaagcaatggggataagaagggcggtcctcaaaaccgattcccaagttatttctggccatgttgacaaaagttgcaaagcaagagatctgaagcttgaaaaattcctggatacagttcgaagacttgaagcctccttcgaagggttctctgttaagaatatcccacgaggaaaaaatgaacatgttgatctactagccaaatggggccttgatttgctaggcccactcccaccagcacaagggaatttgaaatatgttgtagtggcagtggaatatttttctaaatggattgaggcaaatcctttagccacaataacttcggttactgttcaaaagtttttctggcaaaatattatttgtcgcttcggagtgccgaaggccattaccgtggacaacagaacgcagtttgatgccgaagctttcagagaattttatgaacaaattggcacgaagatccattttgcatcagttcggcatccggagtcaaatggacttgttgaaagggctaatggcatcataatgacaggaataatgaagtttatcttcaaccagcccagggggaagtggccggacgaattaattaaagtggtgtggagccaccacacaacaaaatcaaggtcaacaggttttacaccattcaaattgttgtttggtgacgaagcaataaccacagaagaagctaaagcgggatcaataagaacaatagcttcgacagaagacgaagctgattattctgtggcaaaagatgctatagaagggatcatgcttcaagatgtagagaatatcaacaaatatcaagtcgaaacaataaaatggcgtgacagaaaggttcggctaaaaaatattaagccaggacacttggtacttcggagagtcgccaacccagacacagtaggcaagctacagctgaaatgggaaggaccttttctggtagtatcttcgtcaagacctagttcctacagattgaaggatatggatggcaacgacattcctagatcatggaatgcggatgagtttcggcgatattatgtctag

SEQ ID NO: 175592 - DNA, 1440 bp, Zea mays
  Clone ID: MRT4577_91731C.1
atggggataagaagggcggttctcaaaacagattccaaagtcatttctggtcatattgacaaaagttgcaaagcaagagatccaaagcttgagaaatatttggatacagttcgaaggcttgaagcttcctttgaagggttttctgtcaaaaatattccacgaggagaaaatgagcacgctgatctactagccaagtcagcggcacaggggctgcctttaccttcggaagtattctttgaaacaataaaagcaccttcgattgaccttcttgaaagagcagtgctcaatatatcccctgtttgtagcgaagattggagaactgagatcatgtcttttctccagggcaatttcctttcagatgacgaagcttatcaaaagagaatagcggcaagagcccgtccatatgtaataatagaaggggagttatacaagcatggagtctgttctccattactcaaatgtttatccagagctgaggatcagagacaaccttcgtctctaactcaattaatacagcccacttggccattgcaaaggtggggccttgatttgctaggcccacttccaccagcacaagggaatttaagatatgttgtggtggcagtagaatattttcctaagtggattgaggcgaagcccttagccataataacttcggtcactgttcaaaagtttttctggcaaaatattgtgtgtcgcttcggagtgccgaaggctatcacagtggacaacggaacacagtttgatgctaaagctttcaaagagttttgtgaacaaattggcacaaagatccattttgcatcggttcggcatccggagtcaaatggacttgtcgaaagagctaatggcattataatgacaggaataatgaagttaatcttcaaccagcccagggggaagtggccagatgaattaatcaaagtggtatggagccacaacacaacaatgtcaaggtcaacagcaataaccccagaagaagctaaagcaggatcaataagaacagtggcttcaacagaggacgaagctgatttttctgtggcaaaggatgctatagaagggatcaggcttcaggctgtggagaatatcaataaatatcaagccgaaacaataaaatggcgggacagaaaagttcggttaaaaaatattaagccaggacacttggtacttcggagagttgccaacccagataccgtaggcaagctacagttgaagtgggaagggccctttctagtagtatcttcgtcaagacccggttcctacaggttgaaggatatggacggcaatgacattcctagatcttggaatgaggatgagcttcggcgctctacaagagcaatatcccccgaagatgtaaatgtaaaaactgagcatgcaccatcgagtgcaaagagaaaaggaaaaacagggagaagctcgacagacgtccctaaggggatgtag

SEQ ID NO: 175593 - DNA, 2094 bp, Zea mays
  Clone ID: MRT4577_91732C.1
atggtttcgttcaacaaccacactggagttgcttcggctccgaagctggtactcccgataacaggcggttcatgctcaaagccagccaataagaagcaaaagaaggaggcacagagaagggtacaacatgtcggggtgcaaggacccttcatcaagtcaagatggtcccacatcccaattactttctcccaagaggaccttcagctcaaggattaccctcacaacgatgttatggttatttcttgtgttatcaaaggatttctggtacacaatattttggttgacacaggcagtgtagcggatattatatttgctaaggccttcagacagatgcaagagcctgaagatgagatccatgatgctacacatcccctttgtggcttcggagaaagactagcatctttgaatcgatttatatccagatcagcagagagaaatttaccattctttgaagtgttgaagtcaaccgaagtttttcaatggggatcagctcagcaaaaagcctttgaagagctgaagcagtatttgatagatttaacaactctaactccaccagcgccaggggctcctctactgctgtatgtggcagcttcgcactctgcagtaagtgcggcgcttgttcaggagaagtctgaaggacaattgaaaaagcaagctccagtatacttcgtcttcgaagttcttagtttatcaaagaaaaactatacaaaattggagaaggtgttgtatgctgttttaatggcctccaggaagcttcgacattattttcaagcataccatataattgttccttcatcacagcctttgaaggatatcaacgagttcagcattgattatgtacatagatctttgattcagtcccaggcactagcagacttcatcgccgactggacgccaggggctcaggaggaagaagcaagtaaagatgccgaagcttggacagtattctgcgatggttcttggggaaccttcggggcagctttgcttttggggcttcggaagttgaaggcaatggggataagaagggcggttctcaaaactgattcccatgtcatttctggccatgttgacaaaagttgcaaagcaagagattcgaagcttgagaaatatttggatacagttcgaaggcttgaagcttccttcgaagggttttctgtcaagaatattccacgaggagaaaatgagcacgctgatctactagccaagtcaacggcacagaggctgcccttaccttcggaagtattctttgaaacaataaaagcaccttcggttgaccttcttgaaagagcagtgctcaatatatctcctgtttatagcgaagattggagaactgagatcatgtcttttcttcagggcaatttcctttcagatgacgaagcttatcataagagaatagcggcaagagcctgtccatatgtaataatagaaggggagttatacaaacatggagtctattctccattacttaaatgtttatccacagatgaaggaataatgaagttaatcttcaaccagcccagggggaagtggccagatgaattaatcaaagtggtgtggagtcacaacacaacaatgtcaaggtcaacagattttacaccattcaaattgctgtttggtgacaaagcaataaccccagaagaagctaaagcaggatcaataagaactgtggctacggtagaggacgaagctgattattctgtggcaaaagatgctatagaagagatcaggcttcaggctatggagaatatcaataaatatcaagccgaaacaataaaatggcgtgacagaaaggataggttaaaaaatattaagccaggacatttggtacttcggagagttgccaacccagatacagtaggcaagctacagttgaagtgggaaggaccttttctggtagtgtcttcgtcaagacccggttcctacaggttgaaggatatggacggcagcgacattcctagatcttggaatgcaaatgagcttcaacgctctataagagcagtatcccccgaagatgtaaatgtaaaaactgagcatgcaccatcgggtgcaaagagaaaaaggaaaaacagggagaagctcgaaagacgtccctaa

SEQ ID NO: 175594 - DNA, 1239 bp, Zea mays
  Clone ID: MRT4577_91733C.1
atgggaataagaagggccatcctaaagactgattctcaagttattgctggccatgtggataagagcagcaaggcacgagatccgaagcttgaaaaatatctggatgcagtccgaaggttggaggcttccttcgaaggtttgtccgtcaaaaatattctaagaggtgaaaatgagcatgcagatttgctagccaaatcaacggctcaggggctccccctaccctcggaagtattttttgaagcaataaaagcaccttcggttgagctcatggagagagcagtgcttactatttctccagtacacagtgaagactggagaactgaaataatatctttccttcaaggcaattgtctttcaagtgacgaagcttataacaaaagaatggaggcaagaacaagaccatatgtgataatagaaggggaattgtataaacatggagtttgttcaccactcctcaaatgtttatcaagaatcgaaggtatggaattaatgaaagagatacatgcaggcccacttccaccagcacaaggaaatctaaaatatgttgtggtggcggtagagtatttttccaagtggattgaggcgaagcctttagccacaataacttcagtcactatccagaaatttttctggcaaaatattgtttgtcgcttcagagtgccgaaggctattactgtggacaatgggacacaattcgatgctgaagctttcaaagaattctgtgaacaaattggcacgaagattcattttgcatcgcctagaggaaagtggatagatgaattgatcaaagtggtgtggagccacaatacaacaatatcaaggtcaacatgttttacaccgttcgaactattgtttggtgacgaagcaataaccccagaagaagctaaggcaggatcaataagaacagtggctgcgacagaggatgaagctgattattctgtggcaaaagatgctatagaagggatcaggcttcaggccgtcgagaacatcaataaatatcaagccaaaacaataaagtggcgtgacagaaaagttcggctaaaaaacattaagccaggacatttagtgcttcagagagtttccaacctagatacagtagacaagctacagttgaagtgggaaggaccttttctggtagtatcttcgtcaagacccggcttttatagactaaaggatatggacggcaacgacattcctagatcttggaatgcggatgagcttcggcgatattatgtttag

SEQ ID NO: 175595 - DNA, 516 bp, Zea mays
  Clone ID: MRT4577_91734C.1
gcttgtgtggggtgtttttttttttttttttttttttttttttttttttttttttttttttttttttttttttggccaaaaaaggtataggaggtggcggaattggtttacaggaatctatttcattagtcagaagcgaaatgaaaaaatgggggggggggcgacaagggtaaccctttggatcacgcaaaaaccctgccttttcgaaatactcaaggggggccaacaaaggtttctccattggccttggggtccagcctaaactcttaagtttctccgatggaactgggggagattcaaaatcatagtccttgggggggcagttcacaaaattgggggtaggggaggactttttaaacaagttcaccatgttggttgggctgatccgattaggcgcacaaatggatctcccgggagaatccactttttcgggtactaggggcaaaggattagttacgtgacgggcgtggactatgttccagggggagggtttttagaaccctaagaccccctttt

SEQ ID NO: 175596 - DNA, 333 bp, Zea mays
  Clone ID: MRT4577_91735C.1
tctttatatctctgattatccactgccaaaccgagtgcaacttggcttatctagaggtgtctttttcactgcagaccattcgtagctggaagatctcgattgtgtgaaccaattattacaccaattagaatctgttgttcagtccctgggctacactgagcaatgagccatatccactatcaaatcaatccacactgctagtattcctcggacgaacactcaattcacctgtacaacattgcattcactgctcacagtccacattgatctgctgcaactttcgggaggctgttttttatcatgacctccactgtacagactattacccttgat

SEQ ID NO: 175597 - DNA, 1990 bp, Zea mays
  Clone ID: MRT4577_91736C.1
ggatgttattgaacactcgctcaatgttgatccatccttcagacctagaaggcagaggcttcggaagatgtctgatgacaaagccgaaggtgctcggaatgaagtgaaaagactcctcaacgttggagtcattagagaagtaaaatacccagaatggctagccaacactgttatggtgaacaaggccactggtaaatggagaatgtgcattgattttactgatctcaacaaggcttgtccgaaggatgaatttccattaccaaggatagattctctggtagatgcagcagcttcgtcagagctcatgagtctactagattgttattcaggctatcataaaatctggatgaagaaggaagatgagccaaaaaccagctttatcacccccagtggtacatatcgttaccttcggatgcctgaggggctcaagaatgctggaggaagcttcagcagaatgacagcaaaggagaagcttgaagggcaattgaaaaagcaggctccagtatacttcatctccgaagtcctcagtttatcaaagaaaaactatacagaattggagaaggtgctgtatgctgttttaatggcctccaggaagcttcgacattattttcaagcataccatataattgttccttcatcacagcctttgaaggatattatgagaaacagagaagctactggaaggattagaaagtgggccgcggaactcaacgagttcagcattgattatgtgcatagatcttcgattcagtcccaggcgctagtagacttcatcgccgagtggacgccaggggctcagaaggaagaagcaagtaaagatgtcgaagcttggacagtgttctgcgatggttcctggggaaccttcggggcaggtgcagctgccgttttaattgcaccttccaaagtcagaacatgctacgcagtgaaacttgatttcagttgcacaaataatattgttgaatacgaagctttgcttttggggcttcggaagttgaaggcaatggggataagaagggcggttctcaaaactgattcccaagttatttctagccatgttgacaaaagttgcaaagcaagagatccgaagcttgagaaatatttggatacagttcgaaggcttgaagcttccttcgaagggttttatgtcaagaatattccacgaggagaaaatgagcacgctgatctactagccaagtcagcggcacaggggctgcccttaccttcggaagtattctttgaaacaataaaagcaccttcggttgaccttcttgaaagagcagtgctcaatatatctcatgtttatagtgaagattggagaactgagatcatgtcttttcttcagggcaatttcctttcagatgacgaagcttaccataagagcatagcagcaagagcccgtccatatgtaataatagaaggggagttatacaagcatggagtctgttctccattactcaaatgtttatccagagctgaagcaataaccccagaagaagctaaagcgggatcaataagaacagtggcttcgggagaggacgaagctgattattctgttgcaaaagatgctatagaagggatcatgcttcaggctgtggagaatatcaataaatatcaagctgaaacaacaaaatggcgtgacagaaaggttcggttaaaaaatattaagccaggacacttggtacttcggagagttgccaacccagatacagtaggcaagctacagttgaaatgggaaggaccttttctggtagtatcttcgtcaagacccggttcctacaggttgaaggatatggacggcaacgacattcctagatcttggaatgcggatgagcttcggcgctctacaagagcaatatcccccgaagatgtaaatgtaaaaactgagcatgcaccatcgagtgcaaagagaaaaaggaaaaacagggagaagctcgaaagatgtcccaaaggggatgcagagcacgacgaagctacaaaaagccattcctaa

SEQ ID NO: 175598 - DNA, 3021 bp, Zea mays
  Clone ID: MRT4577_91737C.1
atgccagtgaccttcggatttgtcaacaatacaaggactgagcaagttgtgtttgatattgtcgacatggagtacccctacaatgcaatcattggtcgtgggacactcaatgcttttgaagcaattcttcatcaagcatatctatgcatgaagataccttcggatcaagggcctattgctattcatggaaatggagccaaagcttgtgagcagtataagtacagaagggagaaggctgcttcggccgatcagtcgaagcccatgtttctatgtgaagatatagcagagcagaaggtattgctgggatctcaattatctaaggagcaggagaaaactctaataaggtttttgttcaacaataaagatgtcttcgcatggtcagccaacgatctctgtggtgtcaacagggacgtcattgaacattcgctcaatgtcgatccatccttgagacccagaaagcagaggcttcggaaaatgtctgatgacaaagccaaaggtgcttggaatgaagtgaaaagacttcttagtgctggagtcatcagagaagtaaaatacccagaatggctagccaacactgttatggtgaagaaggccaatggtaaatggagaatgtgcattgattttactgatctcaataaggcttgtccaaaggatgagttcccattaccaagaatagattctctagtagatgcagcagcttcgtcagagctcatgagtctactagattgttattcaggctaccatcaaatctggatgaagaaggaagatgagccaaaaactagcttcataacccctagtggtacatattgttatcttcggatgcctgaggggctcaagaatgctggaggaagcttcagtagaatgacaaccaaagtccttcactctcagataggcagaaatgtgctaacatatgttgatgatatcatagtaaagagcacgaagcaggaaaatcacattgctgatctgcaggaaacatttgctaattttaggcaagctggccttaaattaaatctagaaaaatgtgtcttcggagtaaagaaaggaaaattccttggttgtctagtttcaatgaaagggatcgaagctaatctgaacaaaatcgaagctattcttcggatggagccgccaagcacaaagaaaggggctcaacggctgacaggaagactggcatctttgaatcgattcatatctagattagcagagagaaatttaccattctttgaagtgctgaagtcggtcgaagtctttcaatggggatcagctcagcacaaagccttcgaagagctgaagcaatacctgatagatctaacaacactaactccacccacgccaggggctcctctgctattgtatgtggcagcttcgcactctgcagtaagtgcggcgcttgtacaggagaagcttgaaggacaaactaaaaagcaagtcctagtatattttgtctccgaagtattaagcttatcaaagaaaaattacacaaaattggagaaagtgttgtatgctgtattaatggcctccaggcagcttcggcattattttcaagcttaccatataattgttccctcgtcacagcctctgaaggatattatgaggaacagagaagctactggaagggttggaaagtgggccgtggagctcaatgaattcaccattgactacgtgcacagatcttcaattcaatctcaggcgctagcagacttcatcgctgactggacgccaggggctcacgaagaagggacaagcaaggataccgaagcttggacggtgttctgcgatggttcttggggaaccttcggtgcaggagcagctgcggtcctagtggcaccttcaaaagtcaaaacatgttttgcagtcaaactggatttcagttgcacaaataatattgctgagtacgaagcacttctattagggcttcgaaaactaagggcaatgggaataagaagggccatcctaaagactgattctcaagttattgctggccatgtggataagagcagcaaggcacgagatccgaagcttgaaaaatatctagatgcagttcgaaggttggaaacttccttcgaaggtttttctgacaagaatattccaagaggtgaaaatgagcatgcagatttgctagccaaatcagcggctcaggggctccccctaccctccgaattaatacaacccacttggccgttgcaaaggtggggcctcgatttgctaggcccagttccaccagcacaaggaaatctaaaatatgttgtggtggcggtagaatatttttccaagtggattgaggcgaagcatttagccacaataacttcggtcactgtccagaaatttttcttgcaaaatattgtttgtcgcttcggagtgccgaaagctattactgtggacaacgggacacaattcgatgctgaagctttcaaagaattctgtgaacaaattggcacgaagattcattttgcatcggtcagacatccagagtcaaatggacttgttgaaagagctaatggcattataatgacgggaataatgaagttaatcttcaatcagcccagaggaaagtggccagatgaattgatcaaagtggtgtggagccacaatacaacaatatcaaggtcaacaggttttacacagttcaaactattgtttggtgacgaagcaataaccctaaaagaagctaaggcaggatcaataagaacagtggcttcggcagaagacgaagctgattattctgtggcaaaagatgctatagaagggatcaggcttcaggccgtggagaatatcaataaataccaagccgaaacaataaaatggcgtgacagaaaagttcggctaaagaacattaagccagggcacttggtacttcggagagtggccaaccctgatacagtaggcaagctacaactgaagtgggaaggaccttttttggtagtatcttcatcaagacatggctcttacagactaaaggatatggacggcaacgacattcctagatattggaatgcggatgagcttcggcgatattatgtttag

SEQ ID NO: 175599 - DNA, 1731 bp, Zea mays
  Clone ID: MRT4577_91738C.1
atggagccgccaagcacaaagaaaggggctgaacggctaacaggaagactggcatctttgaatcgatttatatccagatcagcagagagaaatttaccattctttgaagtgctgaagtcgaccgaagtcttccaatggggatcagctcagcagaaagccttcgaagagctgaagcagtatctgatagatttaacaacccttactccaccagcgccaggggctcctctgctgttgtatgtggtagcttcgcactctgcagtaagtgcagcgcttgtcctggagaagattgaaggacaattgaaaaatcaagctccagtgtacttcgtctccaaagttctcagtttatcaaagaaaaactatacaaaattggaaaaggtgttgtatgctgtcttaatggcctccaggaagctccaacattattttcaagcataccatataattgttccttcatcacagcctttgaaggatattatgagaaacagagaagctactggaagaattggaaactgcacaaataatattgctgaatacgaagctttacttttggggcttcggaagttgaaggcaatgaggataagaagggctgttctcaaaactgattcccaagttatttctagtcatgttgacaagagttgcaaagcaagagatccgaagcttgagaaatatttggatacagttcgaaggcttgaagcttccttcgaagggttttctgtcaagaatattccacgaggagaaaatgagcacgctgatctgctagccaagtcagcggcacatgggctgcctttaccttcggaagtattctttgaaacaataaaagcaccttcggtcgaccttcttgaaagagcagtgctcaatatatctcctgtttatagcgaagattggagaactgagatcatgtcttttctccagggcaatttcctttcagatgacgaagcttataataagagaatagcggtaagagcccatccatatgtaataatagaaggggagttatacaagcatggagtctgttctccattactcaaatgtttatctagagctgaagaatattgtctgtcgcttcggagtgccgaaggctattactgtggacacagaacacagtttgatgccgaagctttcaaagagttttgtgaacaaattgacacgaagattcattttacatcggttaggcatccggagtcaaatggacttgtcgaaagagctaatggcatcataatgacaggaataatgaagttaatcttcaatcagcccaggggaaagtggctagatgaattaatcaaagtggtgtggagccacaacataacaatgtcaaggtcaataggctttacaccattcaaattgctgtttggtgacgaagcaataaccccagaagaagctaaagcgggatcaataagaacagtggcttcgccggaggacgaagctgattattttgtggcaaaagatgctatagaagggatcaggcttcaggctgtggagaatatcaataaatatcaagccgaaacaataaaatggcgtgacagaaaagttcggttaaaaaatatcaagccagggcacttagtacttcggagagtggccaacccagatacagtaggcaagctacagttgaagtgggaaggaccttttctggtagtatcttcgtcaagacccggttcctacaggttgaaggatatggacggcaatgacattcctagatcttggaatgcggatgagcttcggcggtattatgtgtag

SEQ ID NO: 175600 - DNA, 3990 bp, Zea mays
  Clone ID: MRT4577_91739C.1
atggcttcgatcaacaaccaaccagaaggagcatcggctacaaagctgctgctacggatgacaggcttttcatgcccaaagccgaccaaaaaaaactagaaaaacgagcctcagagaaagggatatctagtccacattgttgtgtttgctacaggctgtgcagaggaaacaataagtgctaaggccttcaaccagatgcaaaagctggagaataagaaccaagatgctacatagcgtctctgcggtttaggatgaaggcatatcgtcataattggcataatcacgatgtcagtgaccttcggatttgtccacaacacaagaactaaagaggttgtatttaaaattgttgacacagaatatcactacaatgcaatcattggtcgtagaacactcatttcattcgaaacaattcttcatccaacatatttatgcatgaagataccttcggaccaagggcctattgctaaaaaactcggccggggggggggggggggaaagaccgccctcccggaagctgccagaaaggctgaaggaaattggatagactcaaaggcaatccgcaatatagatggagtcgaagcttgtgaacagtataagtacacaagagagaaggctgcttcggctgatcagccgaagcccatgcttctatgtgaagacatagcagagcagaaggtattgctgggatcccaattatctgaagagcaggagaaaaccttgataaggtttttattcaacaacaaagatgtttttgcatggtcagccaacgatctctgtggtgttaacagggacgtcattgaacattcactaaatgtcgatccatccttccgacccaggaaacaaaagcttcggaaaatgtctgacgataaagccgaaggtgctcgaaacgaagtaaaaagacttctcagtgttggtgtcatcagagaagtgaaatacccagaatggttagccaacactgttatggtgaagaaggccaatggctaccaccaaatctggatgaagaaggaagatgagccaaagaccagcttcataacccccagtggtacatattgttatcttcggatgcctgaggggctcaagaatgctggaggaagcttcatcaggatgacaaccaaggttcttcattctcagataggcaaaaatgtgctaacatatgttgatgacatcatagtgaaaagcacgaagcaagaaaaccacattattgatttgcaggaaacatttgctaattttaggcaagctggcctgaaattaaatccagaaaaatgtgtcttcggagtgaagaatggcaagttccttggttgtctagtttcaacgaaggggatcgaagccaactcaagcaagatcgaagctatccttcgaatggagccgccaagcacaaagaagggggctcaacggctgacaggaagactggcatctttgaatcgatttatatctagatcagcagaaagaaatttaccattctttgaagtgctaaagtcagctgaagtttttcaatggggcccaactcaacagaaagcttttgaagagctgaagcaatatctgatcgatttaacaacattaacttcactcgtgctacgggctctattgctattatatgtggcagcttcgcactctgcagtgagtgtggcgcttgtacaagagaagcttgaaggacaagttaaaaagcaagtctcagtatactttgtctccgaagttttgagtttatcaaagaaaaattatacagaaatggagaagatgttatcttcaattcaatctcaagcgctagcagatttcatcgctgattggacgccaggggctcatgaagaggggacaagcaaagatgccgaagcttggacagtattttgcgatggttcttggggaaccttcggtgcaggggcagctgcggtcctagtggcaccttcaaaagtcaaaacatgttatgcagtcaaactggatttcagttgcacaaataatattgctgagtacgaagcacttctattggagcttcggaaactaagggcaatgggaataagaagggtcatcctaaagactgattctcaagttattgctgaccacgtggacaaaagtagcaaggcatgggatccgaagtttgaaaaatatctggatgcagttcgaaggttggaagcttccttcgaaggtttttctgtcaagagtattccgagaggtgaaaatgagcatgcagatttgctagccaaatcagcggctcagtggctccccttaccctctgaagtattttttgaaacaataaaagcaccttcggttgagctcatggagagagcagtgcttaccatttctccagtacacagtgaagactggagaactgaaataatatctttcctccaatgcaattgtctttcaagtgacgaagcttataacaaaagaatggaggcaagatcaagaccatatgtgataatagaaggggaattgtataaacatggagtttgttcaccactcctcaaatgtttatcaataaccgaaggtatggaattaatgaaagagatacatgcaggtctgtgtggatctcaaattggatgtagacccttgttgggaaaagtttttcgacaaggattttactggccaaaggcagcttcggacgcagcagaattagttcaaaaatgtgaaggctgtcaaaaatgtgcaaaagatcagaagcaaccttcatctctcactcagttaatacagcccacttggccgatgcaaaggtggggcctcgatttgctaggcccacttccaccagcacaaggaaatctaaaatatgttgtggtggcggtagagtatttttccaagtggattgaggcgaagcatttagccacaataacttcggtcactgtccagaaatttttctggcaaaatattgtttgtcgcttcggagtgccgaaggctattactgtggacaacggaacacaattcgatgctgaagctttcaaagaattctgtgaacaaattggcacgaagattcattttgcatcggtcagacatccggagtcaaatggacttgttgaaagagctaatagcattataatgacgggaataatgaagttaatcttcaatcagcccagagaaaagtggccagatgaattgatcaaagtggtgaggagccacaacacaacaatattaaggtcaacaggctttacaccatttaaattactttttggtgacgaagcaataaccccagaagaagctaaggcaggatcaataaaaacagtggcttcggcagaggacgaagctgattattctgtggcaaaaaatgttatagaagggatcaggcttcaggccgtggaggacatcaataaatatcaaaccgaaacaataaaatggcgttacagaaaagttcggctaaaaaacattaagccagggcatttggtacttcggagagttgccaacccagatacagtaggcaagctacagttgaactctacaagagcaaaatcctccaaatatgtaaatgtaaaaactgagcatgcaccatcgagtgcaaggaaaaaggaaaaaacagggagaagctcgaaagtcgtccctaaggggatgcagagcacgacgaagctaaaaaagtcgttcctaagggagcgcagcgcggatgcttcggctctaaagataaggcttcggcaaaaagaaaaagaagcagtagtttcatgcttcgttgtgtacgaaaagaagagaagcttcgtcatcttgctcctcagcttcgtcatcttgtacatattaaagtattgtaaggaaaattcaagtttaaaggaaaaggtaagcacaagatttcaggaaggcgacagctgtgccccgagaagctaccagggcacagaaatcaccatgtccggctataatttcatcaagggcatcaacttcaccctcgatatgttcgaaggcccctggcaggtcttcagtcgaagaactaaatttttcacaactggctccaaccgaattgaaaatctgcttcagccgttgtacacatcggctactgaactccagacatttgttttgaagctctgtcaatga

SEQ ID NO: 175601 - DNA, 365 bp, Zea mays
  Clone ID: MRT4577_9173C.1
cggacgcgtgggcttgcatcctattttgttagtctaatggaccgacaatggcgggcaagaatattttgcttccttatgctccttaggctccctgcaagctgggctaccgcacccattgtcccacattgctcacaagcttctacattctcatttcgttgcgcatacttatactcagcggtgtacttaatgcactatagcccaagctcataactttacaagtttcatcaagccctaaggtcgtgcagcttacctttggtaatgctgtttctccaatcacgtttgatacaaccaaagtacttgacagttattgcagcagcaatgatgtcatgttcttaggcaaattgagccacaatacattcaccaaa

SEQ ID NO: 175602 - DNA, 250 bp, Zea mays
  Clone ID: MRT4577_91740C.1
cactcgacccactcatcctcgcacgcatccacccactccttctcattttcctccaatactaaaaaaaaacagtaccgatcctcttccaatttaatataataaccatacacactaaaactacatctcacacaacaaatacacaacataaccaaactacaaacaacccgctactactaaaaaacccactaccatcatccaatcacccataactccaaaacattacctcatccccactattacataattacaa

SEQ ID NO: 175603 - DNA, 1107 bp, Zea mays
  Clone ID: MRT4577_91741C.1
atggatgctcaatatgatgtgactcaagaatggcttgatagagtgaagataacaaggaaagggcttcgaggaactaagcgaagacctagaaagcagaggcttcggaaaatgtctgatgacaaagccgaaggtgctcagaatgaagtgaagagacttcttagtgctggagtcatcagagaagtaaaatacccggaatggctagccaacacagctatggtgaagaaggccaatggtaaatggagaatgtgcattgattttactgatctcaataaggcttgtccaaaggatgagttcccattaccaagaatagattctctagtagatgcagcagcttcgcaagctgaccttaaattaaatccagagaaatgtgtcttcagagtaaagaagggaagattccttggttgtctagtttcaacgaaagggatcgaagctaatccgaacgaaatcgaagctattcttcggatggagccgccaagcacaaagaagggggctcaacggctgacaggaagattggtatctttgaatcgattcatatctagattagcagagagaaatttaccattctttgaagtgctgaagtcggccgaagtctttcaatggggatcagctcagcagaaagccttcgaagagctgaagcaatacctgatagatctaacaacgctaactccacccacgctaggggctcctctgctattgtatgtggcagcttcgcactcggcagtaagtgtggcgcttgtacaggagaagcttgaaggacaaactaaaaagcaagtcccagtatattttgtctccgaagtattaagcttatcaaagaaaaattacacagaattggagaaagtgttgtatgttgtattaatggcctccaggaagcttcgacattattttcaagcttaccatataattgttccctcgtcacagcctctgaaggatattatgaggaacagagaagctactagaagggttggaaagtgggccgcggagctcaatgaattcaccactgactacgtgcacagatcttcaattcaatcccaggcgctagcagacttcatcactgactggacgccaggggctcacgaagaagggacaagcaaggataccgaagcttag

SEQ ID NO: 175604 - DNA, 170 bp, Zea mays
  unsure (1)..(170): unsure at all n locations
  Clone ID: MRT4577_91742C.1
gntatttcttnccttgaccnccggtanttatctcccacggnagctgagcacgtacgagctgcctcgttgtttctanccgccatggtaccgcccagccgaggtcttgcccngctcgcctagccgctgcgcacagcactacagntaccatctcccaattganaaaanaanaa

SEQ ID NO: 175605 - DNA, 358 bp, Zea mays
  Clone ID: MRT4577_91743C.1
tttttgggggttttgggggagatttttttaaacccattaccaatttataggcaaggggaagagttgcaacaaatttccaaagacaggggccattgttccctaatttaatcgattttacaatttaagccttttttaaaggaggcctcctattagaatcacgggcctaaactgggaatttgccatcttttttgaggggggatcgaccctggctcatcaaatttgaagttttgccgccttcggttaatccggggcctttctttgcctggtcttcctttttggactttggggccatggccgccgccattacctttttttttgcctttggttccaccttcgcctgggcctcctcctcctgggc

SEQ ID NO: 175606 - DNA, 162 bp, Zea mays
  Clone ID: MRT4577_91744C.1
agaacactccatgccttatttctttctttcgccataaactcccggtgctcttccgactgcttggggtccgagagctacattacttttgatgatcccctatgatcgtatcttatttcttgatataattcatcgtcgattcctttattttatactttaactact

SEQ ID NO: 175607 - DNA, 284 bp, Zea mays
  Clone ID: MRT4577_91745C.1
cccacgcgtccgcccacgcgtccgctcacatgtcgggagcgataccactaccaataagcagcctatcgtttaatgttgcgatggcaccagtcgatataagctctaagtataccatgaaggcctaccgaggcgacagccgctcctactacgagtggagacccgtcgagatgtccatgcatgggcgctgcctaatcggagaagccgagctctctgtcgaccgcggaagcctcgcgcttggaaactactgctactcagccaaggtcgcctacgtagtctaaggcacg

SEQ ID NO: 175608 - DNA, 640 bp, Zea mays
  unsure (1)..(640): unsure at all n locations
  Clone ID: MRT4577_91746C.1
acgcctgcaggttccggtccggaattcccgggtcgacccacgcgtccgaaagaagttctgctttcctactttctactgtctttaagattttgtctttcaagcaggtaaatcaacattcccgaggcggaccagcggatgtgcatccccgcccccctagagcacacaggcggcagctgttacccccagtctcaggacatttccagcatgtggctttcagtctgagttaaaaatttaggtttacctagagggctagaagagtagatttttctatatcaataaagattggtttttattttggtagacaggcttagccccttagctgacctctggcttttcacccttgctgttaccgcaaggtgtccttagctcagtaggctgtggaaaaaacagggatgaggaggatcgacttccagctcctattttacccacaaatcgtggtgttattaacgacataattcttgcttaggctttgctaattctgaggttgataattctcctttaggagctgcacagcactcagaactgtgcatactgggtttgtgattgtacaaattcagtatgggcaccgcttggtgcagagatacttactgcaggngaaggtccagcttgaccatttctgagtttcctgtgagaaaacccg

SEQ ID NO: 175609 - DNA, 321 bp, Zea mays
  Clone ID: MRT4577_91747C.1
aaaaataagaaaggttaattataaaccaaggggcatcatatatattcatacatacgtacatgatcactgcatgtgacacatctaagcacataaagttagctatttactcatagacactcacgaaggctctgtctgcacccaaagcacagaattttaacaactaaagccttacgagacgaccaacatcattaaggacttcaacgagcctccgtttctggacccgatcagtctcttacttggccccaccaagttcatggtcatacaaggcgagcccggcgctgtcatccatgggaagaagggatctggaggcataactgtgaa

SEQ ID NO: 175610 - DNA, 1989 bp, Zea mays
  Clone ID: MRT4577_91748C.1
attaatattagggattgtgaaaaacggggcttctttacgatagacccctctcttaaaatttttttacctctcttctctcttttgcaagagagagacacgggattaatctaaaagccaaccatgtagccaactttaataattctcatataagtaaaattatttttttttcttttttttttttttgaaagagagagacaagggattaatctaaaagccaaccctatagccaactttatcatatctcatataagtgtgtttattgttggctctagatgacgtgacaaggagttagagccagcaatgggctctattattaaacttgctcataggataaggacgagacaactaagaaactgcatgaaacaacctcgagactctacatcataaatacagtcaagacacaataaatatagggaatcgtaaaaacgggctctttacgaatagcccatctcttaaatttttttcatctaccccctagaaactcctcggcaatagcaccatactttaatataataacgaattgcataaatataaataattcgtcatcaccataaagtattactgttgtgcccaatgtccactgatcacaattactcttcggtagcgtagtactgcggggcgagctcagccagccacaaggggtcaatacgggtcaggttcttgatatagttctgtgtcgtccgaactagctcgttgaagatgacacagtcgaccttggtcctgaaaagcacagatgaagggtggatctgcacgctctggccagttgcaagggccctgtatgaaccatctggctgtcgcatcgctgcattcaagaagaaggcagacgtaaggcatctccgaaacagaaccatgtcatctccacatgacgacatgctcagccccatttgttggacatggccctgaatttgtctgtgaacatcgcgagcatgtcttagagagcggtagttgatgaagttttctctgcaccacctgttcagagccttttccattgttttttctttggcatttgcatttctgctcttctccaagcattctgcagctcctcgatagacattcaccaatgtgatatggtctccttcggagctttcgaatctcttcctggcagctcttgcctcttctaacttctcacgcacggagaagaaaattgattccaccgaaagcatagatacaacaatgagcatttcttccaagcacttgaatttgcttgatactattaatgacttagagtacattggatccaaaggtagcctagccatctgatggccaactggatctgagagcttataatcatcagtcagagcccctagtaagattaactgctccagtgatttcaaaatagcagtccttgatggtttctccataaaatcaaaacctatgatgtcatcaattccaagagccttgagttgcagaacaacatttgagaggttacaccgcttaatctcaggcacagtagaatccaccagcttatcaaactcactttcttggaacaatcggaagcacttccctggtccctcacgtccagcacgaccactcctttgaagagcctgcgctttagagactggaataatgattagtgattccattccagtcacaggattgtaagcacgagcttttaccatcccaggatctataacatatttgatgccaggtattgttactgaagtctcagcaatatttgtagctagaactaccttgcgagttccagctggtgcaggcttaaaagcattcatttgctgttctgacgggagagatgaatagataggtgtaacacatatcttactacttcccggccgaaatagacgagcacactgatgaaacagtgattcttgtgcctattctaacttctcacgcacggggaggaaaattgtgatcagtggacattgggcacaacagtaatactttatggtgatgacgaattatttatatttatgcaattcgttattatattaaaaaaaaaaacccacgtgtcctcggacgcgtgcgtcgacc

SEQ ID NO: 175611 - DNA, 256 bp, Zea mays
  Clone ID: MRT4577_91749C.1
gcgcccaaaggcaacacccatggaggctaatacccaacctcgagacctacaatccaccgtatgcgacttgtgattcactccgggcggccatggcctgctcctatgccgtcgcgaccgtcgaagattgcggccggagcccggtcgccaagaccatcgccgttgcgccgcaccccggatctgagtcccggtccgccgacggcgccggcgccaggccgatccgtctagtcgcctgcagatccgcgcgtgccaccagact

SEQ ID NO: 175612 - DNA, 731 bp, Zea mays
  unsure (1)..(731): unsure at all n locations
  Clone ID: MRT4577_9174C.1
accgatgtatcccccgcccaggtcgtctccattcggggagctccacggctgcgaaggtgacggctgcgcttccgaccaggatacctggcctctacaccatgtgctacggagtggagtgcactgccgcctctgttgctcctgtatcctcctctcccaccgctcgttgtactgctgtcgctgcttcctcctcgtcacctcaccgtcgtgcaactacgacaatggcgacacgctcatggcccctccagcaccaaccgtcacctgtcaggtttgccacgacgccgtcgcacacctcccatgcctctaccccccacccaccgatggtgtcttcgtctgccctccctgcaccgcggcccagaacggaaggcccttcacctacgcgccgccctgcaggcagccactcgacgagcgcaacgccagggttctcgtcctaggggcgcggatagcgctagcgctgctgcagcgacacgcgacagcggcgcgcgaagccgcggaacggctggccatggaggcgcgggacgctcgggcgagggcgcatgacgctcttatcgcggccttcgacctcgatgcggaggaagatctttcgtgtgtcgtgccacaacccaccgagaatgacctagcagcttctgaagaagaagaagaagaagaagatagtgaggcagagacggatgagngggaggtgatgctggtgccgcgcaacgtgatgcccgcgttagtcacgccaaccatcgaca

SEQ ID NO: 175613 - DNA, 251 bp, Zea mays
  Clone ID: MRT4577_91750C.1
gcaacacgagaacggtcgtttatatagtgatcaaggggggatttgtccccctgaagccagcttttacaattatgcaacggataccccggtgttagcctaacataacctccgacgaatccctatataatatatttgcgtgtgcatcacgcgagatataccgacgctctacgctctttactccatacgagtaaacccaatatatgcgtactcccgcacgttgctctaaaatgcgacatcctacaaagaggggc

SEQ ID NO: 175614 - DNA, 380 bp, Zea mays
  Clone ID: MRT4577_91751C.1
ggaacccatgggccccaaaaacaataatgggaggagggggataatcaggacccattacaaaaatcacttgttctgcatacataagggctaaacccaaacaatcgggttttaaaaaaatacatatccctcacattgcactatccttttccttagcggggccaattaaaagcccccgggggtaaacaccctcaaaaaacttttccccgactcccggggaggggcatgacgggttacttttttttacatccaaaactttgcaacaggagggcgtaaaaccccgacttaggcgaaccctaaaacccgatacctaaaaatttttatggtttctgaactcgatctaggggcaaagcaaactccaggtcatggggggtgccgttgct

SEQ ID NO: 175615 - DNA, 268 bp, Zea mays
  Clone ID: MRT4577_91752C.1
cccgacccatccgtgcgtgtgttggtcgagatggctacaacagcttacgctcccatggcgagccaggtgatgaagagcagcccggtgcactcgaggccgaggcgcctgccacctcctccgctctcctagccgcgaccacctgacctcgacctagtgtgccgcggatgtccctcgcctacctcctcaagttcctcatcatgggcgaccgtggcgtgcgggaagccattgcctggtgctccagccccccgatcgagtgctgcccgccccg

SEQ ID NO: 175616 - DNA, 528 bp, Zea mays
  Clone ID: MRT4577_91753C.1
aaaaaaaaaaaaaaaaaaaaaaaaaaaaaaaaaaaactagaacaccaacctcactaaggagttaagtctgaaatatatcaatcataactggccggtcgctccaagcatccttgggggaggtttttagtcctatctatagccctttttgcttacatattgactcgtccttttacgtaccaaatttcccccttggaaaaatgcctttaccaacccaattcaccttgtttgaaatacatctttctttagaagccttgcgttttaaaaaataggtcccgttcgaccttctttccctttgcccagccttgcttgaatgataaatggcccctccctgtgccctttaattaaacttggtgggtgtggtggttacaggcagcccccttgtttcacttgataattccctaccgcccggtgctttcccttcctttcctttctttctctttccggcgcctttctccccccttctttatataaatggctgcctttttttaggctttcgagtgctttttttgccgtacctttaacccaaaa

SEQ ID NO: 175617 - DNA, 307 bp, Zea mays
  Clone ID: MRT4577_91754C.1
ccaaccattttatttattccaccccagccgacacgacacccagggggggatttattaaaaaataccaacgcacccccccccaaaggggggcggaaggcaaaggcaaacacgggaagaggcgaccaaaaaaaacgggggggatcccaaaaacaagagggtaatccaaaaaaaccctggcttgtcacaaacgacccgcaaagaaaaaaaggccaacccaaagctagccacccacaaaaacttcccgccgacacggaaaaaaagggcccccggaaacccggagaagaacacggcaaactggaccccccag

SEQ ID NO: 175618 - DNA, 489 bp, Zea mays
  Clone ID: MRT4577_91755C.1
gttaatgttacagagtttttacactgccaaaccatgcctgagaattcaaaaaaagaaatggtacaatggacagcctcacccacccatcatacagtatattaaaacttgattcatgggcatttttataatttcacaatcttttaaaaagttgtaacaagagttggaatttcaaatctcctgcaggtcttcaggtttctagtatagtatgccattaaataaatgttccacatactcatctaagttcattcctcagtaacacaacccccaacaaaattttgctggaaaaaaaaaaaggtatacttttcaggggaaatatgtggctcaaggtccaagaaataaaatttttggttcccaaatgaagtcttcagtttaaccaaaaatcccttgtttcttgcttaatcatccaacctttttttggctggctcagctactcaccccagtacaccagaaggcagacaccctgcccgccacctaaaacaccatcacggc

SEQ ID NO: 175619 - DNA, 2364 bp, Zea mays
  Clone ID: MRT4577_91756C.1
attcagcggaatgtttacccttgcagttaagatgggtttgcagtttcctgttggacaaactaatattgatgggatacttcaccttcgggagaacgaattgaaacgacatgctggggagaaatctacggcaatagaagcatattgtgcctatgttgctgaagggttcgaaaacctgctggactggaatgatgttatgaagttccaagcgaagaatggatccttgtttaactctccttctgcaactgctgccgctttggtcgccaactatgacgacaaagcgctacagtatctaaatttgcttgtcacacaatttggcagtgcagtaccaacagtgttcccacaaaatattcactatcagctttcaatggtggacacgctcgaaagtgttggaatatcacggcatttttctgtggagaaaaaggctgtcctggacatgatatacagtttgtggttacagaaagaggaggaaataatgttggatgcagaaacatgtgcgatggcatttcgaattttacaaatgaatggctttgatgtttccacagattggttgtctcatattgctgaagcctccaatttccataactcactacaaggatatttatgtgatacaaagactctattggaaatgtacaaagcctctaaagtcatattatcagaaagagacttgaccttagagaacataggatgttggacaggtagcttattgagggaaaagctatgctctgatggagcgcaaagagtaccgatacttgaagaggtagagtatgcccttaagtttccccattatgccgtagtagatcctctcaacaacagaagaagtatggagcatttggatgctaggggttctcagacgctaaagacaaaatatctgccatgtcatgtaagtcaagacatccttgcgttggctgttgaagatttctgtttttctcaatctatttaccaggacgaactacagaacatcattagttgggagaaagagaataggatggaccagctacaatttgtgcggcaaaggctggcatattgctatctcgctgctgctaccaccatatcccctcatgaattgtctgatgctcgcgttgcatgtgccaaaagcatcatgctcacggttgtagttgatgacttcttcgatgttggtggatcaaaagaagaacaagaaaatctcatcgaattagttgagaactgggatgagcaccacaaagttgagttctgttcggagaaagtagaaatagttttctatgctgtctataatacagtgaaccagcttggatctatggcttctgcagtacagaagcgcgatgtgacaaaacacctcgctgaatcatggctaaaagtattgctgtgcatgctgacggaggcagactggcaaaggaggcaatttgtaccaacagttgaggaatacatggcaaatgcagtttcctccttggcactggcggtcattatacttccagcgcagtattttcttggcgaaacgctctcagattacatggtcaaagatcatgaatacagcaatttgtctgagctcatgttcacttgcagtcgtctcttaaatgacattcgaagcgttgagagggagttcgaagctggtaaactgaacagcgtttcactgcttgctctacacagtggtggttccatgtccatagaagcggctaagaaggaaacacatggatctttagagtcgtataggagaggtttagtagcgttggttcgtagacaggacagtgttgttcctaggtcatgcaaggagctgttctggaagctttgcaagacaattcacctgttctacttccagattgatggatttacgtcgccgaaggagatggttggggcagtcaatcaagtaatcaacgagccactcgaactccaatcaagcaacacacatgtttagtttagctgttcgatctatttgaagattaaggactctggaaggacaggtacttccccggagacgatgcaaacaatcattggtgggtcaccatacaaacagtgaccttagttgtttgggcctcgcattgaccttgttaaaggcattatctaaaataccgagtgtctttttctctttaatgaaaacctttgatttggccttttgttggttggtcatagcaacgacgttgcttttggagagcctcagtctcggctctagctttgcctggttagtggttgacttgaaaattatgttgtggtgatagctcgctcaaagtgatgagtttgttttttctgtcttttttcttctttttttgcctgtgtgtgtacatcttagtgtgtagagtccaggataaatcttagtccacttgtatcatcttgatgtaattgtctaagattaataaagcttcctaatacaaacaaaaaaaaaaaaaaaaactc

SEQ ID NO: 175620 - DNA, 282 bp, Zea mays
  Clone ID: MRT4577_91757C.1
acggccaagatcattaagatcttcttggacctagaggagaggaacaacaccgtatactggttggacacctacactacggtctaccgcaggctgtgtgggaaagatgtggtctttgagtaccctatggtcgaaagatgcgtaaatattgcgcccggatatcgcgattttatttcggtgaatctggatgtttctttggtgtctcaactagactgctacgtatgtacttaaaaaaccatagtgttgatgccaaagtcgtggcctaggaaatgggtactaggtaat

SEQ ID NO: 175621 - DNA, 340 bp, Zea mays
  Clone ID: MRT4577_91758C.1
gccgaaagatgtaccaacggcagcacatcagccgccgtcgccatcccaataccctactcagccgggcccgcctcagcctcaggctgagtgcaaccacgccagtgccaacaaacgcatcacaagcccgtactagctgcacggaacctgcagacctggcagcaatcatagcctgagccagtgcaaacagatcctgacgcatcaatgcactccgacagggacgccctacaagcaacataactttatcacccttggttcaacaatcgccaggcctatctttggtgcagacattggtgcaaaccatcagggcacagcagctgcagcaactcgtgctatctgtgat

SEQ ID NO: 175622 - DNA, 294 bp, Zea mays
  Clone ID: MRT4577_91759C.1
aattcggcacgagggcagaaccccaagcaagcgactcgcaaagcttgcctgacgcgagctagctgagctacagccaacagcatctgatctgactgacatggagaaggacatcgaggcattcttgcccgagagcgcgctagttctcggccaaggactacaccgaccctacgccggcgccgcttggtcgatacgcatgagctcacccagtgggccctgtaccacgcgcgcatcgccaagttcatcaccacgctccgctaggtctacatcagccggccatcgtgatcgcgtacaagc

SEQ ID NO: 175623 - DNA, 308 bp, Zea mays
  Clone ID: MRT4577_9175C.1
tttattttttttttttttttttatttattattgggggtatatttaataattttgcttttttcagggccacaaattaaccatggaaaaacgggggcccggaccccacaaatccagaaacttgcctagtgggctggtggccctcaaaaaaatgaactgacccccccaggcaagaaaatgccacccactggaaccaggatgataaaccccttgaaaaaatgaggcccccattaaaatgggggcaaaattgggggaaagcggacttgaatccactgtttttaatgggatgagacatgtttcaatccaaattc

SEQ ID NO: 175624 - DNA, 262 bp, Zea mays
  Clone ID: MRT4577_91760C.1
aaaaaaaaggattcccacgttttaatcaaactgggaacccaatttttcaggggggggtcgggactcaagggccggggcccctagctctatactcaggtgctcaccactagcctggtcctgccaaaattttttttaaaattaaagaaaggccttgtaactaatagggtgtttgggttaagaaataagcttgtttatttttttaaaacacaaggtataagagccacccctcaaatttaagaaatagatttccgatccccccctt

SEQ ID NO: 175625 - DNA, 887 bp, Zea mays
  Clone ID: MRT4577_91761C.1
actcacccgcccgccgccccagccgcgccgcttttcccgtctaagctcgccatccgcctcggcgccgcaatacatatggcctgcgccgccggctccgcgcggaaggcatcggccgtgctgtaccactacccgtgcccggacggcgcattcgccgcgctcgccgcccacctctacttctccgccgccgccctccccgtccgcttcttccccaacaccgtctatgaccccatcaggagcgatggtcttccgtttgacgaaattgaagatgtttaccttcttgacttcgtagggcctcctggttttgttgctgatatagccccgaaagttcagagtgtaacaatcttagaccatcataagactgccatggaaagtctgtgtgggagtgccacacttggagaaaacgtgaataaggtgattgacatgcaacgcagtggagcaacaattgcattcgactactttaggaacaagttattaacagaagctagtacttcacggaatcatggaagtggtaattctgtaactgaaatgaaatatctacctgaaaacaagcttgaaatggtgcacaagcttttcaagtttattgaggatggagatctatggagatggactattccaaatagcaaggccttcagcagtggcctcaaagatctgaacattgaatttaatgtcaattcaaatgggaagttatttgatcagttgctggagttggatccggagcaagtaatttctcggggacaagtaacattatcgcagaagcaaacattaattgatgattgtttggagaagtcctttgaaattgctctaggatgtggccagtttgggaaattgtctggctgtcaatgctgatgctatttcaatgctgagaagcgaaactcgaaatcagctcg

SEQ ID NO: 175626 - DNA, 1296 bp, Zea mays
  Clone ID: MRT4577_91762C.1
tacggtctagaattcccgggccgacccacgcgtccacccacgcgtccgcccacgcgtccgcccacgcgtccgcccacgcgtccgcaggtaccctacggacgcgggccggcccggggaaaaacaaaaaagagcggcaagcaaccagcggagcggaggaggagagactgatccagacgcaaagggcatcgacagagaccgagcccaataataaatcttgctggatacatacaggaaacagcgcgagggaacgagaagttagtttccatggagaagaagcagaagaagcacgcacacgcgaggtcaaggagcttcaccggcggcgggctggcctccttcctcaggtccaccgtctcctccttctcctccgccttcccgcccagcggcaggaggtcctccttcaaccaccgcaacgccttctcgggccccatcgtcgtctccatcgtcccgccggaggctcgcggcggcggcggcaggaggaagcgcccggggtacgtgacgcccgagccgtcgtcgcccaaggtgtcctgcatcggccagatcaagcgcagcaactccaggcgccagaagaaggtcaacccgtcgtgcggcaagggcggcggcgcctgcccgctcccgccgaggccgccagcggaggacaagaagccctgcagcaggaccagcagcagcaggggctccctcgtgaagcggatgcccttcttccgccgcagcaggtcgcgtcctcgctcaagggcggcgtcgtccaaagatgggctcatcgtcgtcggtgacgggaaagagagcgacggcgacagcgcggtggcggatccagcgccgccgccgccgccgatgggcctcggccagatgaagcggttcaccagcgggcgcgccgcgtttcaggacttcgactggcgggaggaggagaggacgacgggccgtgacagcgatgaggacgacgacgggttcgtagcgcattcggcgccgctggtgctcgggggcggggtggtagcctcggagccgaggaaggaggtgaacctgtggaggcgtcgccccatagttcctcccactcagctacagcttccctaggatagcgagctgcatctgcatgcgcgcgcgttcgttcgtctctgtgtgcctgccgatgcctggtgttttctttagtttgtatatacaactcacgcgtgtataatgtgatgatcatacgggtttagttgtttttgtaagtgtgtggtgctcatctttggaaatgaagaccattctgcctagctagagcttggcgttttacacataaaaaaaaaaaaaaaaaaaaaaaaaaaaaaa

SEQ ID NO: 175627 - DNA, 439 bp, Zea mays
  Clone ID: MRT4577_91763C.1
caccgggaccttaaaaaggatggccaaaccaggccaagggagacaaaaccaccaaataagatggacagctcatagggtggatggacaaaccggccgacgaaacaaaaagcccctcttgggcgccaaattccaacgggacccttaataccacggacttcgaaatcaaaacacaaatagggggcctttttttcaacatacccaaatcccccgaaagttaggagccgtgcctcaaaaattgaaaaactgtagggggtgcgtgttatgtaagggcagcaaccaaaccttatggtgggtactacaaagagaagaccggtccggggatgattctaccaagctcacgtgggatactgcacacggccagaagacaatcggtttgcttctaagcgaacaccttatctaccccttaaggggcaccccaggactttaaacgattgttttc

SEQ ID NO: 175628 - DNA, 290 bp, Zea mays
  Clone ID: MRT4577_91764C.1
caggtacacagagatcagcgcccaccgcccgtcttcccacgctagcgggcacaaactcagagtagtgtcgctcaatgaatgtcctcgcccggacgacgcagccagcagcgactgagcacccaagaatttcagagcaagatcacaagaataacttacaaaagacgacatcgacacacgagggcctcattgcggacgattcacaccaccagcacaactctgcccacagcgcagatggagcagctaataatgggtccatggatatcagtggggattcctcatctgttgatttg

SEQ ID NO: 175629 - DNA, 244 bp, Zea mays
  Clone ID: MRT4577_91765C.1
gggggcgtccggccaacaaccggcgcaaccggcccccgcgaccaaggccggaaaaacaccggcccgggaaaacccccgggggcgtcccaaaccaaaccagcctgttgttccatgaccccgaccagggcgaacacagacaacattttttttaacggggggggggggaggctcctccgggcttgtggcgggaaacaaccaaccctaccccggccgggggaggactccaacaccatgattcccgcac

SEQ ID NO: 175630 - DNA, 447 bp, Zea mays
  Clone ID: MRT4577_91766C.1
gggagggggaaattagcttcaaaaagaagccagccagcagcactaaaaactgaattggaaaaatgaaaaaggggcgaaacaaccaacctgttcctccagacaacgcatttttatacaggttcatttcccgacaaaaaattccaataatgcctggggccttaagcaaaatttatttttcctggctttcataccatggaaggggggctgccttattatgctgccaacctacggaagagaagctttcaactccttcctggctggcccaaatgactccacgctgaagccctttttataaacatttgggaagaggtcaaaagtttcaggcatagaactttcctttgctttaccaatagcggcatttacttgtttcccgatttctttctccatatttttgagctcaacaacatttgcccggtcatgagtcaaaaacaactttttaaccctttt

SEQ ID NO: 175631 - DNA, 234 bp, Zea mays
  Clone ID: MRT4577_91767C.1
atttgtaggacgaggacgctttctttgctgactacgccgaggcccacctgaagctttcagaattggggtaagcggtgctgatagatctatcatctatttctatgtattatgactgaatgattgtatctcttgcactatgcagatttgctgaggcgtaacgaaccagaagagtgtggtggctgtcgtcggccggccggccttgtgtttttgttgtctgcttttctcttgaatgaa

SEQ ID NO: 175632 - DNA, 416 bp, Zea mays
  Clone ID: MRT4577_91768C.1
aattcgggagtcgacccactcgtgcggttggcttctcctacccctccggttcagattcaagttcatgaggctctcctacgagctcaggtcttcttgaacgcatcgagatggcctcctcagatgctcagtacccttgcttcgtcacccaactctactgttccacgaaccaccacatctatccacaactacttcatcacctactccgacgtcctcgagtgcaaaatcatccttaatcgtgagactcacaagtcctcacgcttcagactttttacctactccaaaccggagaccattctaaacgccattcattgcatgaaccacaatgatcaacacagacgcatcatcatcgtccacaaagcccaacacaccgtcagacgccataactacctccctggctagtactgcgcccttcgtaa

SEQ ID NO: 175633 - DNA, 533 bp, Zea mays
  Clone ID: MRT4577_91769C.1
ggcgaattgaggatcctacaagccggccgggaccggtcattcctggatgcagccgagggccgaggggcagagtgggccgaggggcgtggcaggcggtgagcacgccggtggtcgggacggtacggatctcgtgatccatggccttcgcgggatggcgctgctccctgcttatgacacctcccgttcaccggcagcgaatcggggcttggcatttcccatcaagcattaagcagtgaagcaccccccctcgtttccaccggcagtccggcagcgagcagacaggtaagctatggcatgcgctgctgcaccagtaatctcgagattcgtttgcttttcgaagctattggcgatttggcattggggaaatcgagagacgttgagatattccaagttgttttccactgtcactctcagtatctagtttgggcgaacttcgccgagcaaacctgtgtgctgcagtttttatttaggtcttttatagtcaggagaaggataaccctgcttaaagaaatcccatgaattggttatgtcac

SEQ ID NO: 175634 - DNA, 116 bp, Zea mays
  Clone ID: MRT4577_9176C.1
cgtctctacaaccacgtttcgaaccatacggcagattgattactagctgcgccgaattgactagcgtgttctcgagaactgcgccagggatgctgcttccatgatcaggcggtccc

SEQ ID NO: 175635 - DNA, 777 bp, Zea mays
  Clone ID: MRT4577_91770C.1
tcactcctcatgctcctcctcagccgaggcagggtcccactcgacagtccaacccggtggcaaggtggacggccaagttatgccagcaaccatttcctccagagaaccttccaaagcagtggcaggcaggtcctctggtgcaggctcgggtgctggatcgggggctacctcctgagcagctccttgctccggcacgaggatgtactctccgtcagcaagattacagtccggcggcgagggaggtccggcgaagggtggggttggctcggggagactctggcggtcacgtcgaggtacggcttgacgtcggagatggccggaatcgcccggtccacgcgtgcaggcgggtgtcctcgtcggcggcgagtataccggccaaaccacggcgaactggttcaatccgagggcatggtgagcttcacggggtaacatagcgaccatgtgcacaaggaatcgaaggatggttgagtggtttacccggtccacgtactccggcggggttgagagctccggcgagcgtggactggcctctccggcgaagcaaactccgattccttgctcggggagcttcacggaggtgtgcactgtcttctccaggggctggacggagttgggaatggctccactggccggtctacggtggcagagggattgggcggccgcggactcgctgcgcacggacaaccggcgacgagctagactccggtgaggtttgagggtgcgcggaagggtacaatctaagtctgggagggttttataagcgcgggcgcgggccat

SEQ ID NO: 175636 - DNA, 558 bp, Zea mays
  Clone ID: MRT4577_91771C.1
atggcccgcgcccgcgcctataaagccctcccaggcttcgactgcactcttccgcgcaccctcaaacctcaccggagtttagctcgccgccgtttgcccgtgcgcagcgtgtccgcggccgcccaatccctctgccaccgtagaccggccaatagagccattcccaaccccgtccagccctcggagaaggctgtgcacacctccgtgaagctccccgagcgaggaatcggcgtttgcttcgccggagaggccagtccacgctcgccggagctctcaaccccgccggagtacgtggaccgggtaatccactcaaccatccttcgattccttgtgcacacggtcactacgttaccccgtgaagctcaccgtgcccttggattgaaccagttcgctgtggtttggccggtacactcgccgccgacgagaacacccgcctgcgcgcgtggaccgagcgattccggccatccccgacgtcaagccgtacctcgacgtgatcgccagagtctctccgagccgaccccacccttcgccggacctccctcgccgccgaaactttaa

SEQ ID NO: 175637 - DNA, 1528 bp, Zea mays
  Clone ID: MRT4577_91772C.1
tatcttttgctacgtgataatcagcttcgtcttctgccaaagatgttgttcttattgatcctgctttagcttcttctagggttatagcttcatcaccaaataataatttgaacggtgtaaaacctgttcatcttgatatagttgtattgtggctccacaccactttaatcaactcatctggccattttcctctgggctgattaaagattagcttcattattcccgtcattataatgccatttgtgtggcggaactgcccgaatttttccaacttaagtgcctaagtcccgccttagaggctagaccacacttaaatgggaataactcgtcaatccctcggatctagtccgacacggccactgataggatcaagtaccacaatctcactcgatggtgagtcacagagcaaatacaataaagcataaaaccatgcattaaagagtattaaattattacatcatcatcagagttttgcaaaagtagtcatcattgttcgaagtgcagcggaataaaactaacggtaaataaacagggagatggggaagcctttcccatcactcctcatgctcctcctcagccgaggcagggtcccactcgacagtccaacccggtggcaagatggacggccaagtcactccagcaaccatttcctccagagaaccgccttggcgtacaatgccccactgaccccgactgccgtcgtgcagtgaccgcacttgtacccaccataaccggaatgggagaccacgtctcaggtcgcgtgaggggatatgtcggggcttgccttccaaagcagtggcaggcaggtcctctggtgcagactctggtgttggatccgggactacctcctgagcaactccttgctccggcacgaggacgtactctccgtcagcaaggttacagtctatcgaatgcaatgaacattccttcccccaatgtaaacagtaaccacgggaaagaaaagggtggcgcggcttaccggcggcgagggaggtccggcgaagggtggggttggctcggggagactctggcggtcacgtcgaggtacggcttgatgtcggggatggccggaatcgcctggtccacgagcgcaggcgggtgttctcgtcggcggcgagtgtaccggccaaaccacggcgaactggttcaatccaagggcacggtgagcttcacggggtaacgtagtgaccgtgtgcacaaggaatcgaaggatggttgagtggattacccggtccacgtactccggcggggttgagagctccagcgagcgtggactggcctctccggcgaagcaaactccgattcctcgctcggggagcttcacggaggtgtgcacagtcttctccgagggctggacggggttgggaatggctctattggccggtctacagtggcagagggattgggcggccgcggacacgctgcgcacgggcaaacggcggcgagctaaactccggtgaggtttgagggtgcgcggaagagtgcagtcgaagcctgggagggctttataggcgcgggcgtgggccat

SEQ ID NO: 175638 - DNA, 698 bp, Zea mays
  unsure (1)..(698): unsure at all n locations
  Clone ID: MRT4577_91773C.1
acaaatagaatatcaccatggatatatatatccctctaatacatctatcaaattaattggctagaatagcgaatcagagtatgattaacatattcaccataacttcgcgcagacgacaatgattcttgctcagaccttttaccgagcacccggcaagcaccacatcagatttgttgctttatccaaactctcgggatttttcgacgacgcaagggatgtcgacgagttggaggcctccggggtcgagcacgatagggggcttcagagctcaacgcaagtggcgcgcaactggaagatagatcgtcggaatcgacgggcacgtcggggaagcggcttggatcgacgacgaagaataagggggctgctggcttcgactttagcaccaaatctccctccaaaactatatattcggcttgaacttcacaagaacaatgatngagaccgtggttcagggctttacgtcgagttcttggctagcatcgcatggagctttcacttcccttcacatccatatgcactactgcgattccacacaagtacaaatcgatggtgctgcagcagagagaacatgacgacgaggggcaaggtttgacgatgccgcgacggggctgcccaaacacaaagacaatggcgtggggcgagtggcggaccacgcgtcgcagtacacgacggctgttcaggcttggcatttcctcagc

SEQ ID NO: 175639 - DNA, 533 bp, Zea mays
  unsure (1)..(533): unsure at all n locations
  Clone ID: MRT4577_91774C.1
ggaagcaanggaggcaacaggccaaccggcagagaggnaggacaaaagcgncaaacaccgccaacacacgggaagggggggccgagggngagagagaaancnnannagaaggaaggaggaaaangacgaaannaagaaanaaggggacactggggggggggcactcancanananccaacgacgcgcgccggccgggcggnnaacncgcngcccggaccggaggnagcnnncgngacaccggngaagangacgcnggagccgagcagcnccnggccgaccccggcggngaaggggncgnagcggaggaagagcncgacgaggaggagccngccgacgagcaccacgaagnacnncccggggcacggcnnggnngncgacgcnggggnncncggncncgcggccgggggaccagnacacgnacggcagcagcnggcggcccnccncgccgaggaagcggncgggcacgaagnccccggcgggggcgccgaacacgcgggggnccngggnggcgcacggcnggnagccgaacagc

SEQ ID NO: 175640 - DNA, 375 bp, Zea mays
  Clone ID: MRT4577_91775C.1
gggggggaagcggcccattttattccggggggggtcctcaaaacataccatttttaccttccaggggtttataaagttaaaaaaaaaaatcccaagggctttttttttttttttttttgggggaaaaccgggggggggggaagctaaattattacccgctggtaaggtaaggggttattttggggtaacacctatcccaaataataaggcccccggaatggggccccttttgggcaaactgaacccctttaaaaaaaaggcccttctggaacaagtaggggaccttttcccctttgggggaatccccaaagcctacaaaaaccggggtggcggggaaccccggggcccaattttcccaaccctccgggggggacc

SEQ ID NO: 175641 - DNA, 293 bp, Zea mays
  Clone ID: MRT4577_91776C.1
gtgtcgatctctctgcctgctaatggccattctgtgaattggtgatttatgggggtacttgctcagcctcgatataatggtatttctatctttctttctttctttcaagtcttcaggttcagtgagtcgagttggcgatgatttctcagttacaaatgtagccactcttgcttccacgatgctgagtgcatgcatgctgccctttgaaatcaccattcgacgtttctgtcgctggagaaccgatacagtgacgatgcatgcactagtgcctgctgtattattctagcttcgct

SEQ ID NO: 175642 - DNA, 443 bp, Zea mays
  Clone ID: MRT4577_91777C.1
gcgtcttcgtactcgcctatctccgcgacccaaaggggtcccccttctcccattcttctctcatttctcaccaccggcgccgataccccctttcgacaacaccatgagggagtgcatctcgatccacatcgggcaggccgggatgcaggagggaaacccctgctgcgagccgtactgacggaagcatgggagggcgggcgatgcaagaataccggcaggaagagcgaggggacgtacaagatctacattttcaaggtgctgaagcaggtgcacccggacatcggcatctcctccaaggccatgtgcatgatgaactacttcatcaacgacatcttcaagaagctggccggcgagggcgacaagcttgagcgctacaacaagaagccgaccatcacgtaccgggagatccagacctacgagcgtctcgtgctccccgctgagct

SEQ ID NO: 175643 - DNA, 295 bp, Zea mays
  Clone ID: MRT4577_91778C.1
tttttttttttttttttttttttcggcgttttttttttttttttttttcccaaaaaattttttcccccctccaaaaaaaaacctttttttttcaaacaaaactgaaaagaaaaaacccaactgactgcctgacccccatccaaccaaaaagttcaaaaccacttttttcacctaaaataccttcaaacacaaaaacaattttaaccccccccgccttactaaaacccattcgttatcctttaacgaaggataaaacaaaccttggcccttccattccgaacaaacaatagccccc

SEQ ID NO: 175644 - DNA, 372 bp, Zea mays
  Clone ID: MRT4577_91779C.1
gttgtgtggtttttttttttttttttttttttttttttttttttttttttttttttttttttttttttaaaacctaataatacaattcactttctttcctccaccaagcattttcttttttcaatcccaccaaaaaaataaaaacaggggggcgtggggatcacccttccaagctattttataaaaaaaaacaacaataggcaggtcaatttttcccttcacaaggcaccctacagggtacatcaaaactacaaactcaagttatttgaactatttcctcaacaacaacaaacttttccattcggattgtgcccaagtaacaaactagttaggtcttactaccaaccaaatattttttttacccggctggca

SEQ ID NO: 175645 - DNA, 384 bp, Zea mays
  Clone ID: MRT4577_9177C.1
gggtcaaaacaaacaaacattactacatggatggagcataaggactgaaacacccacatcatttcatgcccatgcactctgctagtggaaccatgcattctgatgcaccggagcaggatcgacataggcctttcctaaaaaccataatcacagactggcggcccaaccacccgtgcgggggtggaataaggaaagacttatttttattcctccccaacaaaaggctgcttgcatccccaggacggtgaccggtacaaacgccttaataatctacggatggtgagggtgaggactttccgtctgcaaaattacggtgggactaattcctttttggcttgcaaggctggggggctgtttgtttagaaacacttaattctttttggg

SEQ ID NO: 175646 - DNA, 234 bp, Zea mays
  Clone ID: MRT4577_91780C.1
gggatacttacgaaaaggggggagcccggaaggaaagggcccaccacttcggcggaagtcccaacccaacccaccctattcagaattcaaggacttgacttggaaccccagggttttgggaaggcttatgtaggctttgccgtcttggtgccttatccgggagctgttacttctcccctggtcgttggtatattggacccgttagcgcgggggatatatacacggaattttggg

SEQ ID NO: 175647 - DNA, 409 bp, Zea mays
  Clone ID: MRT4577_91781C.1
ccttaaccgtacgattcgtgaggcatataccgatcatacagttttggattagccaggatagcgcgctgataagatgaggaggtaaaaggataggttgtgtcattgctgagcgcccgcgcctttttggctgaagcgtgttcgaccttttggactcaaatgagaaacaatgactactcccaccaggctagtgaacacaccccttacttcacttatgacacaccctagataatttgtttcaaataccggggtacaagctcgtgagagccaaatacagagcgtataaggaaaaatacactatcccaagcaacaggcagaactgggtgctgacacatccctcttaatcgagcatagcagaaaagaagtcctccgctgctgcaaaacataatagatggtgggtgaatacactaag

SEQ ID NO: 175648 - DNA, 422 bp, Zea mays
  Clone ID: MRT4577_91782C.1
cacccgaacgtaagctcggaattcggctcgagccaccgcgtgcatgcgtggcgctgccccagcctgctagctagcctgcaacggaagggcccggataagatggcagatggtggggcggtgtcgcgcggccctcccgacggctcgccgccggccgcgctgctgctgcagcagcccctcctccacgcctacgaggcccgcaaggacccagcggtgtgcggccgggaggcgcacgggcacggcttcggcctagaccccgacggcggcggcggcggcggcgcgagcttcgtgcggacctgcttcaatggcctcaacggcctctccggcgtcgggctgctgtccatcccgtacgcgctgtcggagggcgggtggctgagcctggcgctgctgctcctcgtcgcggccgtctgctgctacacgggcct

SEQ ID NO: 175649 - DNA, 477 bp, Zea mays
  Clone ID: MRT4577_91783C.1
ggaaaaaaacggcaccctcaccacaaggagaaaaaggctaatttagggccccatattaacggggggatctggcacagatggaagcaggaggggaaacaaaagggcaaaacatgcccaaactcaaaagaaacctgggaacccaaaggcccccgcggggcggattaatttttggtttacccaaggagcaaccatccatgaaaagcgggggggaaaaacccctactggttcttgaacatgggggggataaggccgacaacgcggttgctgtacccccactcgtgtgagaaccaagaaacgaccttaacaaaggggtcgttaaaagcaatcccggccttggggtcaaaaatgcccgacctggtgcccccaaggaagtcgtgaaaaaccaaatcctcttccccataacccatgaaacccttgaggggaccctcggaagcagccttaaaagctttcttgaaatcctcataggaggcccccttc

SEQ ID NO: 175650 - DNA, 927 bp, Zea mays
  Clone ID: MRT4577_91784C.1
gttgatctgcgctcccagactcgtgatggacaaggatcgccagggagctgcacaaaagcgccaggcggttgtcaggcttcatgaagccaggccgaagaggcagcggggggctgcgaaggctgtggcccccggcggaggcaagccgccgctggcggcgaagtcgggcgtccctgcatctagcaaggcgccggaggcagcggcaggcgccggaggctccaaatcgacgaaggctgtgccgccgtccagcatatcgccctaggtttcttcctcccctcgtcgtttcctattattcttgcggcgctcgccggagtccgtcttcgttcgtcagtgacgtgatgctgctctgctgtcgacatcccctgccctatgacggattcctggtgcccgtcgccaaggcctcaccgtcgctgctgcttgccggagacctatccctcgacgccaacaaccgcgttcgactcctcaccgaccgtcgagtccctgttgtgccctcgtggagacattgcacgtgctcgttcagctcagccgtcgttcgtcgctcactcgccgtcatcgagatctcgtcggtgtcttgctaccccgcgtccccatcggtcctgtgctccgatctcctcgtgtaccatccgaagtggttgatctagtagttaagaatcaagatctattccgatccgtggaagaaccccaagttttcaataagcaaggtgaggaagcagcaattttttgttgcttttgttccaaggtggtgcctaaggaagaaaatcaagactgaagcctcgaaaggaagtgtcctcccttaaaaactttttactgtttatcgggaggggtttttgcctcccaggttatgtaataatattactccagcactcttatatttctctggtctgtaataatactactctttctatactttaaaataaagtaagttattgg

SEQ ID NO: 175651 - DNA, 463 bp, Zea mays
  Clone ID: MRT4577_91785C.1
attcggctcgagctccggcatccgtttcgagttccttgaggccatcacgaaactgctaacgaccggtgtgagcccctgtctgccgctacggtgcaccatcaccgggtggggcgagctgatcccgctctcctacatagccgggcttattacgggccgccccaccgcgcactgatgaaccgtgaactgaaggaaggtggacgctcccgaggcgtacaagatcgccggcttcgagggcgggtcttgaagctcaaccccacggagggcctggccatcgtcaacggcacgtccgtgggctccgcgctcgtggtgcaccgagatgtacgacgcctacttactggccgtgctgtcggaggccctgtgcgccgtcttctgagagggcatgaacggaaagcccgagtaccttgaccacctgacccacaagctgaagacccaccccggggtccatcgaggccgctgtcatcat

SEQ ID NO: 175652 - DNA, 413 bp, Zea mays
  Clone ID: MRT4577_91786C.1
ggcacccctacgcagtccataaaccaccgtgggacaggagaaacgatcgagaggccaccgcaaatcccaatccgaccgggggaacccacacatactagtcctacattgtcccggcaattcgatctccacctggtgagcgattcacttgttaccgccgtttcatatccatcgctccgcataacacattttcgtcccgtaagctctagctctatatcatagtcactgagagaatgaatataaatgtaagtatgattattatgaatgaactcgtaatcaggattgtgttaattaagattgttatacataaagtccacgttattgttgtggtgtataacgcactcaagaaaaagttatatcacattaacaactaaaacattataatatttaataaaaataacatcatatataatttt

SEQ ID NO: 175653 - DNA, 683 bp, Zea mays
  Clone ID: MRT4577_91787C.1
cgcgccgcaaccgcaggcgcgcccaacgcaccgcgccgcatgcaagcagcgaggggcacggcgcgcaccccgcgcaggcggaaagaaggcgcaccacgacacgcccagagcagaaccgcaaaagccagcgcccaacgaccccaggacgaggaccaacggcacaagcccaaccacaagcggagcaagggagacaacgagcagcaccggagagcacgaacaggagaagggcacccccacccgcagactgcagcggaagacaagggccacccaagggcgaggcacaccaccgacaaccacacggcgaacggcaaacgggcggggcgccgcacagcaaaccaacccggcaagaccagcgaggcggagccccacaccggaccgggacgacaccggaagacaccagcaccaccaacaccgacaccccgaccagacgccaaccagaccgcaccaggacgcacgcgcacccgcaccggaaccccggaaacaaccacggcagccacaggcggaacccacgaccgcaggaagagccggcccgaacgaccacaagccccaaccaacccggaaggcagcggccccaccacgaaccgaacaagcccccccccaccccgaaaccacccccccaccccccgaacaccccccaccaagggggccccaagcccacccacccgacaaaggccaaagaaccc

SEQ ID NO: 175654 - DNA, 389 bp, Zea mays
  unsure (1)..(389): unsure at all n locations
  Clone ID: MRT4577_91788C.1
agcagtggtaacaacgcagagtacttttttttttttttttttttttttttttttggcatgaaatggtcagattctttttatcaccatgtaccaagctgacataataacatggttaagttttaggcgttctttttacgcatacacaatcccaggttaatttagatgccactacatgggataggttactaggtcgtttagtctgcagnatttccgttcataacaccattcaccaaaattatgcagacctatttacacttaatactagttggggtgatggtactggattattttacattaaanaggaaaccagaccttgnttaggaaaggttggtgtggttaatttnaacgaggtgtgggtttgttggntatttttggttagggggttgttt

SEQ ID NO: 175655 - DNA, 156 bp, Zea mays
  Clone ID: MRT4577_91789C.1
caacgaagccccacacacacaaaagcaaaaagcatcatcacaataatggcccgcgcgtgtgtgttcctcgtggtgctcctactggccgtcgttgcggtggcgccgattgcgggggctgcgcgtgtggatgtcgtggagggcatgttcatggcgttc

SEQ ID NO: 175656 - DNA, 304 bp, Zea mays
  Clone ID: MRT4577_9178C.1
cttattttttttcatacacaattccagcacactggatgtgccacaacagaggttgaaacatacaaaggtcccaccacaaaggtttgaagcattcaaacagattgctacgtctgcctgacgaagttctagccgacgctatagtctaccaaggttgcatgagcctgggccagggtgtaaccgcgcgtctggagatgcgcgcctaggtgaatcttttgcatgatccagacgagctccaggcgccgcatgcggcctcttcatactttgtttttgcatccgcggaaactaacgtattgggccctggtgc

SEQ ID NO: 175657 - DNA, 282 bp, Zea mays
  unsure (1)..(282): unsure at all n locations
  Clone ID: MRT4577_91790C.1
caaccaccgcgcnccggctctccccaanncnaagcgagacggggcacaggaagaggggagccgaaaacccgaacccccagaancgganccggccgccggagcgcggaaccccaccccggccgccanggagangggagggangagcgacgcngagcggcngnncnncnnncgagaggcccgcaagaaccccgaggncgcgnacgagcanaaccccggggggggcgacaaccngacgcggnggggcggcgcgccgcnggagccggcgcagggcccaaccggccc

SEQ ID NO: 175658 - DNA, 454 bp, Zea mays
  Clone ID: MRT4577_91791C.1
ggggttgtgggggttttttttttttttttttttttttttttttttttttttttttttttttttttttttttttaacacaaaaaagctttgagggtttcattcttggtaccccggctgggaggaggatcgggccatggatcaggcccccaaaagggggggggggccactgccaaagctcgctccagtccccgcgttacagccaaggagggggaactctttccttcccctaaaaacctttttttaaaccacgggtagggctaaactggcaccggggctagttttattgccgggggcgggcgttgtccccggggcggcccccggcaaaggaaacgggggaaaggcggttggggcggggccccccggggccggcgcggggggggggcttcccggggggggaggggcgggcggtggacgaaagggcgcggggggcgaaaaggggggccttcagggggcc

SEQ ID NO: 175659 - DNA, 312 bp, Zea mays
  Clone ID: MRT4577_91792C.1
ggctggggtgtttctgtgctggtgggtgttcctcgtggggcgctctgttctcggcccgcccggcggtcttgctgtccttttgggcggtgtcggggtccttctttggcggcttctggcgccgctctggtctgccgtttgtggtggtgctgttcctgctgtgggtgctggttgtggtgtcgttcctctcgctctgcgtcccgttcggcgtgctctcccttgctttcttcctgttggttctggggtgtgggcttccgctgcctctttccgctttggtttgcgttctttgtctttgttctttttttgttgttcctt

SEQ ID NO: 175660 - DNA, 420 bp, Zea mays
  Clone ID: MRT4577_91793C.1
ggacccccccaaaccggggggggggggttaaaaaaaaattttaactttcctttccaaaaaaaaaaggccctccagggccaaaggggggttcaaattacagggaaacaaacaaaaaacaggggctcattttttaaaacaaaacaataaaataaaaaaacaaataaataaatggtttcaaaaacgggagctacgtttatggggggggccccctttggacaaaactgacccgggaaaaaacgcccgccccccctttgggggcgctttggggggggggggggccctgcccacaaaaaatggggcggttatatggggggaagggctacccgacgttcgccaaaaaggggaccagccggtggggaacccttttgggcccaagggcgcaggtataaaaaactcccccaagcaaaaaccgggggtttt

SEQ ID NO: 175661 - DNA, 375 bp, Zea mays
  Clone ID: MRT4577_91794C.1
aattcccgggtcgacccactcgtccgtgtgcatctttatgaatagagtattctgctcagcataattttttaacccgctcgatacgatccattgaagaggtgacttttccaggattcatctactgcttctacataggtgcaccaagtgaactcatactggacattggaataggtgacataaaagccaattcatacttaaagtatatggagatctggaacaaattatgactccgaccgacatagacgatccaagattacttacgcgtgcattctacgttatatttattctataatgccacctaaattaaattcactgtccgttggtcgacaacgttctcactgttaaaacccttgcgtaccttacttaatcgccttt

SEQ ID NO: 175662 - DNA, 703 bp, Zea mays
  Clone ID: MRT4577_91795C.1
ccggccgggaaacttttctctttccggccgggaaccttcattcgccttcacatccggcacgcaaaccacgagcctctgccgacttcaacgaccaatacagacaagatgcctcccaagttcgaccccaatgaggttaaggtgatccacctccgcgccactggtggtgaggtcggtgcctcctctgctcttgctcccaagattggtcctctgggtctctctcccaagaaggtcggagaagacattgccaaggctactggcgactggaaaggcctgcgcgtaactgtcaagcttaccatccagaaccgtcaggctgccgtctctgttgttcccactgcttcttctctcatcatcaaggccctcaaggagcccccacgcgaccgcaagaaggagaagaacatcaagcacaacaagtctgtcgccctcgacgagatcattgagatcgcccgcaccatgcgatacaagtctttcgccaaggacctctctggtaccgtcaaggagattctcggaaccgcctacagtgttggctgccaggttgatggcaagcctccccagtctgtcattgaggccattgacagcggcgacatcgacatccccgaggagtaaatttgatctcacgaattcaaataccacaaaacaacaacaatagatccattgtctgatggtctcctcatcaaacaaaaaaaaaaaaaaaaaacccgcggcc

SEQ ID NO: 175663 - DNA, 758 bp, Zea mays
  Clone ID: MRT4577_91796C.1
accctcgcggcctgccgggaaggtcgagtccacgtcaccatcttttgcccaggacgaggagctccgtcgccaccactcgagctccgcctcctcccggacctccgccagcaccatcgatccgccgccgccgcacaggctggccgcgccgtccccgctcccgctttgctccgacgcccctgctcctccacgctgctcaatccgccggatccagcgcaggccaaaaaaaatgcattggagtaaggcgtaatcttcagactactagattcctctggagcgtggtggagcacgcccgcggggctcgtcgtccgcggaacgcggggacatcgtcgtccttcgaggtgccagcgtgccgccgactcgtacctcctcgccgccgcttccttcgaggatcgaggtgcaggtgcggcgtgccgccgactcgacggactcgtacctccccgtcgcgggcttcctttactgctccgagctccatcacgacgcatggtcgaagtggacgtgaatccatgagctgactgctggggtcaagcacatgagcgtggagcactggttcagcttctgaataaatcttcttgagattaattattcggagtgtgtttggggtttggtcagggaaaatgcaacacacacacacactagtgcttattggacgattcagttgttgaagtttactcgtagttctgtcagatagacaacatgaatgagagctcgatcgggcctgtggggtcgtcaggtcattcattacgacttatgctccattg

SEQ ID NO: 175664 - DNA, 369 bp, Zea mays
  Clone ID: MRT4577_91797C.1
cacttaaaacgtacccatataatgagaatccgtcttgcatcccacttaatggtaggaataaattacccatttcacaccacacgtttgccaagatgtgcacacaaaagaaagcccgggggcgccccgagactcatgcggaccgcatagcaggacccatgctactggacccaataccagcccaccgtgagcggaacccccaccagacggaccggggaccgcctactccaagaacagtccttctacagacgctagggccctaatcttctttgttcctgcttttcatgcgcacaaactgggccgcgctgacccccgtgtggcattgacccctcacgagcaaaaaagaggccccctctgaccttggcccacgcg

SEQ ID NO: 175665 - DNA, 442 bp, Zea mays
  Clone ID: MRT4577_91798C.1
cgcggaggccgccggcgccgccgtcgacctccaggacgtgctcctccgcctcaccttcgacaacgtgtgcatgatcgcgttcggcgtggacccgggctgcctccgcccgggcctccccgagatcccgttcgcccgcgcgttcgaggacgccaccgaggccaccaccctccgcttcgtcacgcccaccgcggcgtggcgcgccatgcgcgcgctcggcgtcgggcacgagcgcgtgctccggcgctccctggccgccgtcgacgagttcgcgtacgacgtgatccgcaggcgcagggaggagctcggcggcgacgacgccggggccgggcgcaggtcgtcggacctgctgaccgtgttcaccaggatgcgcgacgaggacgggcggccgtacacggacaaggttcttcccgacatctgcgtcaacttattctggccgggcgcg

SEQ ID NO: 175666 - DNA, 456 bp, Zea mays
  Clone ID: MRT4577_91799C.1
tttgggctgatttatgtgcttgacatatttgggcaggtttatgtgcttgacggtcctcgaggccgcttgtttcagtgatgttgagtcatcaaaggtataagttgatacacggtggtctagttctcttcattctatgttttcgctatcgaggcgtgttgcggagtccggtacttttatggtgactcattgttacggtggggtcgttctagttgtcgagtcggctatggtgtcgctctcttttcttatcaagtcgttgccttcttgttgttcgtcgtggtcttctgttgtgctgggtgcgcctattgctgataagtagagtatggaggaggagtggcattgtactagttttgcgcttcattcttcggcggatggtactttctatgaggattatacgaattatattgtctcggcgtctattcgtattctgatgtgtcatactgaggtggggacagggtc

SEQ ID NO: 175667 - DNA, 308 bp, Zea mays
  Clone ID: MRT4577_9179C.1
acaagaataagagatgcagacctatttttcttgatgaggatgatggtcatgagcagcaggagcagcaggatactacttatgtacatcaacctagcttggggacagccgctaaaaggaagagagctgcatttcaatttagaacagcagctccacaaccatccaacatggaaaaagaaaaaagaaaggttgcaaccatgcttcggagaactcccaaacaagttgtggatgacaggcgttcctcagggtcacaccaaaccaccatagaggctgcactgaagccaaaggctgacagggaatatgtgaatgag

SEQ ID NO: 175668 - DNA, 234 bp, Zea mays
  Clone ID: MRT4577_917C.1
aggaattcgggacgagggtcaacgcccccctagttcccatgggcactgttggagcatgccctagccaagcacctgactatagcagctagactccgtccttggaccgacaacagtagaaggggaaggaggcatggctgcacgctaattcgccggcctgacatgacagaaccaagaacgagagcctgagcacgccttatagcgcgccagaagtagctcagacgcacaggtacccga

SEQ ID NO: 175669 - DNA, 189 bp, Zea mays
  Clone ID: MRT4577_91800C.1
cttatgctaaccctgaggaaccaagtaccactgagagaccttcgtcattgctctcagcagctgcagtcgccatactcaaactacgtttatagactgacccctggttgatgcttgcagcagctacgacaacctgttcgcgagcactctagtgcttaatccaaataacaacagcggctgctattgaagctg

SEQ ID NO: 175670 - DNA, 148 bp, Zea mays
  Clone ID: MRT4577_91801C.1
accactaggccgagagaaaacattcctggccggcgcctcatcgtgagctcctcgcagcatcggtaccgcgccctagcgttagctatgactaactgtggcgcgtacgcttggaagacaagcgaaaaggcacgtacggaaagtaaataaa

SEQ ID NO: 175671 - DNA, 203 bp, Zea mays
  Clone ID: MRT4577_91802C.1
aagtcgtaccccttgttgcctgtagtgttcttccacgttctgtgccaaattccggataccatcaccaagctcaagcagctcgttatccaagaccgagacaagcaccaatttatcaggccgcgataagtcaaccatacgaatcaaaggcacagctgaacgcgcaacggaggaacctcggaacagaagcagcggctcgcggaggt

SEQ ID NO: 175672 - DNA, 408 bp, Zea mays
  Clone ID: MRT4577_91803C.1
tttttttttttttttttttaggatcgaatgtacatctttactaataacaggagttctatacaaataagtaaataattacattataaggagacaacggtccagcaacccaaagttgactgggagacgacggcctagacctctcacgaactcatcacagcatcctccatgcacctcatcctgcggtacctgttcttgaccttcaccaaacagatgctcagggtattcgatctcgtagaacttgaagaattggatcatttggtcgccgaagcttgaccgtcgattccttgaagctcggaaacagatcacgatcaaggtgaagttcgccgaagatggagcaggctacgacggttctgctgcttgtgcgcagggacaccacgacgcatgagtctttcaaggcgctgggtacta

SEQ ID NO: 175673 - DNA, 766 bp, Zea mays
  unsure (1)..(766): unsure at all n locations
  Clone ID: MRT4577_91804C.1
ggccgcttttttttttttttttttgcatttcttgaaccaaacagcaccttacatgaacaatcattaatataccatgttcgcaatcacgtcccaaacctcacaactcctcgaggaggttacgttacgtacagtacaggctctaccgctattgttttacgggtgcgtcatagcttcaagtgcagtaagcctctcctgatgatcataacgcaaaagcttgtcaaggaaatctatggcctcaggagacactaggtgctggttatctgcgttcataaactttaaccagggtttcctgctatgccttccaacgagggcttcaagctgagggtcaagctcaattctgtacttgttcaaataaacattcagcccatctgtcccaagtaccttggctatcttaacaagttgatcatggttgtcatgcccgtagaaaaatggttccttacgaaaaatcatcccagcaaacatgcagcccagactccacatgtccaaagagtaatcataatcttgcaagtcaacaagaagctcaggccccttgaagtacctggatgcaacacggacattatattccttgccaggatgatagaattcagcaagaccccagtctatcagcncggagtttccgaagctcatgatctatcataacattgtggggcttcaatnctcggtgcataataccttgtgaatggcagtaatctaatgccttgagtaactcgnnagatgtaatacccgaatgtcataatctgggtaatggtgggtacagcactttgaa

SEQ ID NO: 175674 - DNA, 191 bp, Zea mays
  Clone ID: MRT4577_91805C.1
ttgggttgatttagtgcttgttttgtgcttgtcttgttagttcccagtccctcgcgaaaacatttgagactggtgacagggatgttccggcgattgattaagtattataattgacatttgctgaagtttaattaccggttagaaaactaatagaaatttactttaaatctaaagattattttacgcttcaa

SEQ ID NO: 175675 - DNA, 1611 bp, Zea mays
  Clone ID: MRT4577_91806C.1
accttttactcaactcggagtcggagattcccctccccagccgtcgaaagtcgaaaccctagccccgcctcaccgccggcggtggtggcagcctcagcagtcagcaccggcacacagcccgccgtacctctcctcgtacgctccctcccggtgtgccgtcgccccctcgatcggtccatcgttcgtcggctcggtagccgccggatcgggatcggccggcgccatgtccaaggccagggtctacaccgacgtcaacgtgctgcgccccaaggagtactgggactacgaggcgctcaccgttcaatggggtgagcaggataactatgaagttgttaggaaagttgggagagggaaatacagtgaagtctttgagggtattaatgttaacaataatgagaaatgcatcattaagatcctcaagcctgtgaagaaaaagaagatcaaaagagaaattaaaattcttcagaatctttatggaggccctaacattgtgaagctgcttgatattgttagagatcagcattcaaaaacaccaagcttgatctttgagtatgtcaacaacacagatttcaaagtgttgtacccgacactaacagattatgacattcgatattacatctatgagttactcaaggcattagattactgccattcacaaggtattatgcaccgagatgtgaagccccacaatgttatgatagatcatgagcttcggaaactccggctgatagactggggccttgctgaattctatcatcctggcaaggaatataatgtccgtgttgccgggtacctcgaggccggccgggagtgttatgatagatcatgagcttcggaaactccggctgatagactggggtcttgctgaattctatcatcctggcaaggaatataatgtccgtgttgcatccaggtacttcaaggggcctgagcttcttgttgacttgcaagattatgattactctttggacatgtggagtctgggctgcatgtttgctgggatgatttttcgtaaggaaccatttttctacgggcatgacaaccatgatcaacttgttaagatagccaaggtacttgggacagatgggctgaatgcttatttgaacaagtacagaattgagcttgaccctcagcttgaagccctcgttggaaggcatagcaggaaaccctggttaaagtttatgaacgcagataaccagcacctagtgtctcctgaggccatagatttccttgacaagcttttgcgttatgatcatcaggagaggcttactgcgcttgaagctatgacgcacccgtacttccaacaagtgagagccgctgagaacagcaggacgcgagcctgacaggcaaagagcgaagaccatctgctcttttatcagtcagtcaggttgtatgagatgagtagccgttgggtcacttggcagaaaataaacaacagcggtagagcctgtactgtactgtacgtaacgtaacctcctctcctcgagaaggggttgtgaggtttgggacgtgattgcgaacatggtatattaatgatgattgttcatgtaagatgtttgtcataaaatgtttgtccgtttgctgttgaaaaaaaaaaaaaaaaaagcggcc

SEQ ID NO: 175676 - DNA, 380 bp, Zea mays
  Clone ID: MRT4577_9180C.1
aacagcaaagagactaattaacatacaaatataaagatgaccatcatcccacataggaagcatgttttttggaagtccgaaaataatctctagggagcaaacaacactccggaacctatctcgtacgcaagagttccaaatcgggcacgcaaagagaagcaactcactacttgtaatccttgacgtgcaagctctcggagtaagcggcctcatcacccttgtgggttcccacggtagcctaagagttggtcttgcacctgtcgaggaaggaaaatataaccttctccagataccccaccttggcagtccatgccttgagggtgctcacccggagggcacggccgatcgtgaaagacagggaccacgggtccttggtgctg

SEQ ID NO: 175677 - DNA, 653 bp, Zea mays
  Clone ID: MRT4577_91810C.1
gcgtcgacgcagccaccacctactacgtcggggacagcaacggctggtccttcagcagccccagctggcccaacggcaagcacttccgcgccggagacactctcggtacgtacgtctcagcattactcagcatgctggccgtctgctggtcactgaagatggccatgctctttctgtcatgcgtggtgtggctgcagtgttcaggtacatcccctggatccacaacgtggtggccgtggacgaggacgggtacaacggctgcacgacgccgccggggtcgcggacctacacgtccggcgccgacagcgtgacgctcgccaggggggacaacttcttcatctgcacccggttcggccactgcaacctcggcatgaagctcgtcgtctatgccgcgtgatctgtcagagctagcgactggtggtggtattgttgactgggtgcgctcaatgatcggctgtgcttgctctcgagcgaactggtctgtttgatttgtgctatttcgtgtaggctcagtcagtcgcttggttctaatccgtaacgacttctactacttttacaatgttgttgtaacaatacaaacatccagctttaattgaagctaacggatatcgcatgtttgaataaaaaaaaaaaaaaaaaaggcccctagggcc

SEQ ID NO: 175678 - DNA, 170 bp, Zea mays
  Clone ID: MRT4577_91811C.1
gaagctcggaattcggctcggacagtctgacacgctaataaaccccctcggccttctccgcgtgttaccgtcttttttttaggccgacctctacacttctagacataaccatcgagagggcggtcgagggaaacgagagcgcgagacaccatggggagcgcgaggaccaa

SEQ ID NO: 175679 - DNA, 132 bp, Zea mays
  Clone ID: MRT4577_91812C.1
gcttaattcaggagcaggtagctggaggcggaccagcttgcgctatagtgactcgtattagaccttggtgaaatcattgtcatagatggttcctgtgtgagattgatatccgctcaccattccacacagcat

SEQ ID NO: 175680 - DNA, 350 bp, Zea mays
  Clone ID: MRT4577_91813C.1
gcgtccgacgcggggcattctgctgtcaaagaggaaccccttgatgagcatgaacctgcagaggaatggcatgaacacctgcatgacgtccccccgggactggctgcggagggacctgagcgtcatctgcttagggctgatccgctggatggggccgtccagcattccggtcatcaacggcaacagactcacggcgctcttcttctacaacatcgtccaggagctggcccacttacccacgcacgcgcccgtaacctgacacatatggctgtggctagtgacgtggcacctgtgcctgctcatcgtgctcaccttgggccagatcggattcaagggcaagaccgaggact

SEQ ID NO: 175681 - DNA, 357 bp, Zea mays
  unsure (1)..(357): unsure at all n locations
  Clone ID: MRT4577_91814C.1
cagatattgggagccctcactcagagcatacctaggaggactgtgtctgaactccatgaagagaaagacttagcaacctgtatgcacaaaacaggaacgctcaagtctaaaaaggtgctcacatacgggctagctattgctaggggcatgacctagcttcaccagtgcaagcgggaccccatcatgcactgcgacctaaaggcaaagtgccagacatatgttcctgcatagctggaggctcacctgaagatcgctgggttaccagagacaaggatgtccaaagtcgggaccgactaaggcgaggaggatctactcatggcgctctcgcacacagcttgagntaccacagccggcctg

SEQ ID NO: 175682 - DNA, 496 bp, Zea mays
  Clone ID: MRT4577_91815C.1
gcgctaactcgagaaggatgaccaggcccaggcacgctcagtgagggtaagaatacgacccactagatctagccgcaaagcgatatgtcaagtactacgactccccgcttgcgccactgcctgttggctgccgctgatactctgcccccgttagctgctcgctatataacgtcctaacgctccactctgccgtggcacgcactgccagaggacgcgccggtggcaccggtgtcggtggcattggccccacgtatgcagcgtgcaggcgccggcgaccacaccgaccagctggagcagcaccaccatcaagagtgcgccaaggtgccgtcgtccgtcgcacaggcgctggtccactacgcgacgtccaacgagacgccgcaccagacggtggcggaggccggggccgccgcgcgcgtgctggcgcggcgtgcgccgtgtagcctcctggtgctggggctgggacccgacagcgcgctctgagcggcactcaaccacg

SEQ ID NO: 175683 - DNA, 499 bp, Zea mays
  Clone ID: MRT4577_91816C.1
gaaggggacagcgaaccttatccaatgtccaaccgagaacgggctttcactgcaccactcaggggtttctgaacatatcaatcaaaacctaggaaacggtatgtattcccctcatcccaccagtacacaatttaaccttcaacagcttaccaggcttggggaaaacgtacggggagaacttatgcgccaggcggatgtcccccttgatgataagggcccctccgatgaacgcctaatggggcttcgccattgccgggggcgattccaaagaaatggcagtccgccaaggataaaggggcctgcggcattttcctggaccgggcctttggagacctcggcctttttgaggttgaacaccaatatcctctaataaacgccgatcttattgggggccatgtgcaccttgtacactatgcccaccttgttgacaaacttctagaccgtgttgatggccaggagctggtccttcaggtaccgaatccgggggaagaccgggaaa

SEQ ID NO: 175684 - DNA, 471 bp, Zea mays
  Clone ID: MRT4577_91817C.1
atgtggatgtatgagagtttcatgtcaatactaaatggctatgtatcaacccatgctcgtcacgaggcatccatgatagaggggtactataccaaagaggtcattgagtccggaggtccattctgcaaaagtattctaaaagaccaggttgcaataggtttgcctccatcactacacaaggttagactatatggaagcaggagaatgggacggaaatatttcatcccatcggattacaatatagtacttgaggcacatcacaacatcctacatcatctagagataatggagccatttatccaacaacacatcaatgagcttcgcgagcaaaatcctaggcatacgaatgattgggtaatgaagcaacacaaacagcggttcaacacatggctaatggtgaaggacattccacatggagaaacaatagaagaacaaacaatcaaggggttggcatctgaacagccacgctag

SEQ ID NO: 175685 - DNA, 426 bp, Zea mays
  Clone ID: MRT4577_91818C.1
accctggcgtgcgttgttctgcactccccttttcttcttcgtagttcctccccctaccccccccccacaaagcgagagcccaccttgctaaacatgattctaacacggtcttttttagacaaccataggggtcgctctaaggggaagttgctggggcgcgcgcccagaccctcggaacaaggttatacctacgcccacaaccacgctggaggctgctggggataacacgccaagcgccggcgcccggtgccagcgctgttatcctctcatggcggactactaaaggtggctttgactatggagactggacaggggcaggcgctggccatggaagcttgttgcggcttgggctcttggcatcagacttacttggcaccttccggagccttgccaggagccgaggattttgaccccgaagcagaatcg

SEQ ID NO: 175686 - DNA, 356 bp, Zea mays
  unsure (1)..(356): unsure at all n locations
  Clone ID: MRT4577_91819C.1
attgcgaatgaacggggggattaatataatacaggagggggacgagatttcccataccggccgagttttttaaacacatgatagagtacatatgatgcagatcaacgccttctagcaaaaaacggtccacagacgtgagccttgacactatcattgttcaactccattctaagtgacatgtccaccatgaaaccatgttagacaaggaatgagcatcctgcccctagttttgaagttcttcttgcttgcaaccgcncttccttacatactaatctgggcccacttgagagatccgaaaaacaggctggccatccacattttctgcaccatgatgtttaccttctgggacgccataa

SEQ ID NO: 175687 - DNA, 109 bp, Zea mays
  unsure (1)..(109): unsure at all n locations
  Clone ID: MRT4577_9181C.1
cagtcaaggttggtggacctctcaatcatgttggcaccttcaaaaccagagattgnaacgaagtagatcttatcagggttntatccatccttnttagntnngaagagac

SEQ ID NO: 175688 - DNA, 260 bp, Zea mays
  Clone ID: MRT4577_91820C.1
ctcacgcgtaggacaacacataggagtacagggaaatatatttacaaggctcatgcccgcggaaaagatatgactaacactggctcggcggccaaaaactctcttatcttcccatccattgtggtcttcgctaatgttcaagtcaaggcctatctaaagacgctgtaagtcacgcagtgctttgagaatgttcaacatagacccttctacccgtgcagccagtgatctatacaatttactaaactggtctgccttgggtg

SEQ ID NO: 175689 - DNA, 483 bp, Zea mays
  Clone ID: MRT4577_91821C.1
acagcatatttcattggtcagctccactccacagggggcatacaaaaatacactagcgggacaatctttttggggggccacaggtcccttaaaaaaaactggggcaacctggagggtttacgggacacccatgcaagcattatgcccttgctcacttgccggggacaaaattgggggcgtaagcccaagcgttgttgttgacggggtcggcaatgtggtcggcgaggttttcgagggggcccttgccggggaccatagcctgcacaaaaaaacccaacatggggaacatagcgggggggccgtttttaaattccttcaccttgagctcgggaaacccctccgggtcgtcggggagccccagcgggtcaaaactgcccccagggtacaaggggttgaccaccttttcgagggggccgccgggaacccgggtccccttgacggggcccatgagcaccacctggcacccccaaatggccaggatgc

SEQ ID NO: 175690 - DNA, 471 bp, Zea mays
  Clone ID: MRT4577_91822C.1
acagcatatttcattggtcagctccaccccacagggggcatacaaaaatacactagggggacaatctttttggggtcccaaaggtcccttaaaaaaaacgggggcaacctggaggggttacgggccacccatgcaagcataatgccctcgctcacttgccggggacaaaattgggggcgtaagcccaggcgttgttgttgacggggtcggcaaagtggtcggcgaggttctcgagggggcccttgccggggacaaaagcccgcccaaaaaaacccaacatggaaaacatagggggggggccggtcttaaactccttcaccttgagctcgggaaacccccccgggtcgtcggggaaccccaacgggtcaaaactgcccccagggtacaaggggtcgaccacctttccaagggggcccccggaaacccggtaccccttgacggggcccaagaacaccacctggcacccccaaa

SEQ ID NO: 175691 - DNA, 325 bp, Zea mays
  Clone ID: MRT4577_91823C.1
tgggtacctcgaggcggccgggacagctttttcccaacccagctcgctcgtcccagctgatcaggtcgagcacctagtagcgacctgctcgatcatcagtgcatagtgtcggcaggtgtctgtctctcttggtggttggttgcaacggtcatggcgacgccgtctcgtcgggtgcccttgctgctgctgtgcctgggcgtgatggtgtcctgctccttcacgtaggtcatcttggaccatgagctgtacatcacgtgtgtagaccggcgggacaaggtccttgaccacggacgtctgttgacgctgtcgcatgaaccgcacgtcc

SEQ ID NO: 175692 - DNA, 231 bp, Zea mays
  Clone ID: MRT4577_91824C.1
gcaccgcacgcaacaagtacgcattcagcgcagcctcgagccggggccatggcgagcaagcacctcgtcctcgccggatgcctcctcctcctcctgcccaccgcctcggtggacaccgacgtcgactactggagtaagaaggactacccggggaaggtgatcggggtgcagatcctgtccgatccggtcgaacccgggggagggcgggcctttcaagattttcggtcctac

SEQ ID NO: 175693 - DNA, 152 bp, Zea mays
  unsure (1)..(152): unsure at all n locations
  Clone ID: MRT4577_91825C.1
ggaaaacangganccagagacggagcgagnagacgaggangggcnnggagnaagggagagcagggctgaggcngnaagagcagagagaagcaaccnnggcangcagccnngggagggaaccgacgaggacccaagcaaggcaagggcgcaca

SEQ ID NO: 175694 - DNA, 113 bp, Zea mays
  Clone ID: MRT4577_91826C.1
gtggtcattgtgctgactggatggcgccctggctctggcttcaccaagaccatgcgtgtagtgcctggaccatgatgatcctctggagcttctcttctagcccctgtcccttc

SEQ ID NO: 175695 - DNA, 194 bp, Zea mays
  Clone ID: MRT4577_91827C.1
cggccctggagagctcgggggtcatctgatgagttgggattggagcttctgtccgaatgtatactagcaagaagtattaggctgctgcctgcttttagttgagtgcatctcttctccatgaggatgacatgcatggttccttctattctagtcagttaaggaggtgacagtgttaattacttattccgtaatga

SEQ ID NO: 175696 - DNA, 387 bp, Zea mays
  Clone ID: MRT4577_91828C.1
atggccaactccattgcagcggcgctgtcaagaatgagaaggcaatcacgtcttcacctgactatccctctctgttcctggcgtgtaaagccgaaagctgattgggaaacggaacaggacaggagccgcgcgtgccagccaccagttcgaagtctacggaggatagccggagacaaacgctctaccggcctagccgcggacgtcgtccatgcgaaggcccaagcgccctcttcgcttcgacaagccgaggcgaaaaccatcaaagacttcaacgaccgaatgactgaggccacgaagaccacaaggctttgtctcactcaatgcaagaaggggcccgtgtgtaatccggcccatgttgtagagccccgtccgcaggttgccatgtga

SEQ ID NO: 175697 - DNA, 161 bp, Zea mays
  Clone ID: MRT4577_91829C.1
tcgaagcttacttacgcttgcgtgccacctcatgcctccgatatgcagatgcagaggtaggatatattgcgcctcgccagacaactcctagactgggaaatccttgtacgcatcgatatccatgacgtggcaccaaatagcgatctcatcaaatgccttac

SEQ ID NO: 175698 - DNA, 346 bp, Zea mays
  unsure (1)..(346): unsure at all n locations
  Clone ID: MRT4577_9182C.1
gcgggaaactttccctatagcttctcngttgngntgttcccggtttcctcgcgcagtgtggtatttaacatggnncgtgccggaggtggtggtngacggcgccgtcttcccgcccggcggcccgcccgccgggctccgccgcctcgcccttccttgccgcagcccgcgtgcgaggcctccagatnggacctacctctctcacgctcccgcccatcggcctgtccctgcaggacctgtccgtgcccgcgtctggccagcaagtggggcggtaagacggtcgtagagatcgcctctgacgtccttctttcttcagcgatctccttacgctccatttcaataatttttt

SEQ ID NO: 175699 - DNA, 338 bp, Zea mays
  Clone ID: MRT4577_91830C.1
gcggcgtcggatgttgagtaccgttgcttcctaaccggcccaaaatcagacacgggggaccactccctacacagggccttaaccacataccgagatggcccctagtccaagatcatactctatcggggaaccagatcccaaacctgttccaaaaccaaaacctaatccagcctgtcgactgtcaaggtctgaaaatggtcttatcaagcagccgagctggacagacgtaacatcaccgtcaacgaggaccagtcccccatctatctatcaagagccccagccaggagctttatctacagggtaatgagagaagctacttttcaagatagcaatgggag

SEQ ID NO: 175700 - DNA, 599 bp, Zea mays
  Clone ID: MRT4577_91831C.1
gtaactcaggaacgggagcctgcaggagagggctgttaaagaagaagaggtgccaccctggatcttccttctgtaaaaggaaaagtccttaacccctcctgtcttctcccctgcctgctgcgtgtgcctgccctttctaagcagactcatcctacctttgggcagtaagctgtctgatccctgtctcctcgcctgcccggtatccctgcagcctgctccctctcccaccgcttggtccaagtccagccacctcctctctttgttctgccctctgggtgcttccttacctgctccccagggtctttccctggcagttcactcagttgcctgggctctagaaaccagcctctaggggcagagggcagcgcgaggaagccctgagaaaaagaggccgtgccaggttagagaatgagagcgagaattctcctgggaccgtggcctttctgtgcgtgttgaccaggccctttccctccctgacttcctaccactcctggggctctgtcccaccaaaaagggaaagagacagctgagagccgactgtggggtttggggaaaggctatgtcatcagctggcccagtgcctatgatccatccggctg

SEQ ID NO: 175701 - DNA, 551 bp, Zea mays
  Clone ID: MRT4577_91832C.1
tacggattttttttttttttttttatcaaccatgttttcgcagagaaaaatatacattgtagttaaatatctataaacgattacatccaaattacgtttatacaccgaatgtaaaaaataataattaaaaagtgttctaataatagtctcctctgatatacttcttgagctgttttacttcttggtgctgctggtccacgattgttctaacaacatcaccgatggatatcattccaactaccttgtcgtcgaaaacaggaacatgcctgatacgcttgtctgtcataacctccattgcacgcagaatattggtacgaccggacaccgtgatcaccttgtcctcttctgtcatgatatcctctacccttgtttgctgtgaaggtcgccctggcaagaggatctttctggcaaaatctctctcggtcacaattcctgcgagctggttcatgtcccccgacttgagaaccacgagagctccaacgttgtgtgccgccatgtgctgcaccgcttcgtgcaccagatgggcggtgctgcaccagtagaccgctccg

SEQ ID NO: 175702 - DNA, 854 bp, Zea mays
  Clone ID: MRT4577_91833C.1
caagtgtcttttttccgttgatcaatgtcatgttcaaatacacagctgatcacgtggcgggactgaccagatggagaagctatcacacaacgtaccaggtcaggacaagcataatttgcagatggggcaactacatttcgatttaagaacctgtagaccacattttgccataaaaaagttctcaggcactacaatgttcttacagttttctcatctcatgtattaaccgtacagaatcacccacaaatgtcagaagggggtgctcgagacatgcatctctgctaccatcaccttgacgtcgatgagcgagcggtgatggaaatgtgatacgttgagctcctttgcttacgataagaagaatacacatcgtcatactggctcacctcgttcggatcggcggaagctccgagacccaaccggccgctggaccctggcttactgtcgacgctgccatcggcgtgcatccctgtctcagggttcagaagcagattcggcgggggagggatgcaggcgcctcccttccgcgcaggaagctccctctcgtagtcgtcgtagtcatcgggctcgccttgcctcatcggaccttctgacgggttcacctccccaatgtcgctgaagaacttggacacgcgctcgaggatctcggactccgggactgtcgatggcgggatggtcgtggggatgtcgagcgggctcagggaagagtacggtaccccgctgcctatttgcatcttccgaaccattccagggatgaggccaggcgggaagagcggataaggaggtggagttgaatcgtttgcggcggcagtgctttgaggagccacagcgggaactgttgacgacggttgcacctc

SEQ ID NO: 175703 - DNA, 645 bp, Zea mays
  unsure (1)..(645): unsure at all n locations
  Clone ID: MRT4577_91834C.1
aggaattccaaaatttggngaaagttcactgaatctttggactacagatgcattagaactatcaactgaagggatgactccaaagattggagctgacagtactgacaggagattacgaagtggcaaaattcttggaatgccaagtggtggactaatganatagaggccacaagctgaaaaagatcaagcaggaagcatccagtaaacagatggttaatcaaggggctacatgcactgtggatctgacttctcatgaaaatgtaggtttaattttacaccttgaataaatcagttaacaacagttattctgatttaattaatattcttttgataccctgatactctttttggcctgtggttcacccttcactctgatcacactactttttattatctattattatgtgcatattgccaattgccattcattgttgtgggtttacacaatgcataatatcctgtttctacacctttagttccctgaatggtaatctgtaaagatgagttgggtggttaactgatgtctaagggtaatgtattattcctacaagtattaactnttggtaagcctttgaagaagataatggtgaatgaaccataattcttcatgttaataaatcattgaagaattattntttcatgtgg

SEQ ID NO: 175704 - DNA, 336 bp, Zea mays
  Clone ID: MRT4577_91835C.1
ccccccaataggacccctcggggcggccggcccgcgctttttctctctcatccgaattcccacggaggcaggtcggagaggaggacaggaagaccgaagaccgagccgtgcgggggctcgagacgggaacggcacaggaccccaaaatctcagatccttcctgaccgcacgaacgtgaccgtccacgaatcgttcttggcggacgcaccccacctccgaactctcctcctccaggggaatcggatatgtcacacggtgtgaccatgcagctgcggctcttccgagacggctccctcatctgaaaccccggtttcaacttcgacgaccccatcctcg

SEQ ID NO: 175705 - DNA, 626 bp, Zea mays
  Clone ID: MRT4577_91836C.1
ctgtggggcgtcgcctccctcacctgcctatacggccgatatggcggcgccggcgccggctgctgcgacatggtcggtaacagacttgcacgctttattagtctgcccacaacacgatccaagttgggtcgagtcctcctctatttgggggaacgcgtacacggccggtatccgcagcaccggcacggtgcaccgcctctcggagaatcgaagccgaactggacggcgggcgtaatggatctgctgaagcgggaactggagaagaagcggaaggcggcgacggccgacttcgggggcaagagcttcgtgcggcggtcggagctggagcagaagcagctccagaagcgccgcgaagagcaccgccaggtcctcgccaaggccggcacgtcggcggtctccgcgaattccgccgcagctgctaccggttccgaccccagcaacctcgacgccgcagctcagacggcgccctccgtcccgcccgccctcgcgccaaagaagaccgcgcaggaggaggcgctgctctccgaggagcgtcgcatcgatgagctcgacctcccacggcacgaggtggtgcggcgctgttaacactactcccaggataggccggatgggtagagcgaatcgag

SEQ ID NO: 175706 - DNA, 1974 bp, Zea mays
  unsure (1)..(1974): unsure at all n locations
  Clone ID: MRT4577_91837C.1
aggggaagaaccgcaagcaggagaccgcccggtgtggggcgtcgcctccctcacctgcttatacggccgatatggcggccccggcgccggctgctgcgacatggtcggtaccagacttgtatatcagcaccggccggattaggatcagctaaacgacgctttattagtctgcccacgacgcgagccaaggagtcgagtcctcttctatttaggggaacggtcaaatacgcgtacacggccggtatccgcagcgccggcacggcgcaccgcctctcggagaatcgaagccgaactgggcggcgggcgtaatggatctgctgaagcgggaactggagaagaagcggaaggcggcgacggccgacttcgggggcaagagcttcgtgcggcgctcggagctggagcagaagcagctccagaagcgccgcgacgagcaccgccagctcctcgccaaggccggcacgtcggcgccctccgcgaattccgccgcagctgctaccggttccgaccccagcaacctcgacgccgcagctcagacggcggcggcgaaccctaaccctagctcctccgccgccgcctcctcctcggcgccctccgtcccgcccgccctcgcgccgaagaagaccgcgcaggaggaggcgctgctctccgaggagcgtcgcatcgacgagctcgacctcccacggcacgaggtggtgcggcgcctccgcgtgctgcgcgagcccgtcacgctgttcggggaggacgacgacgcccgcctcgcgcgcttcaagctcgtgctcaagtccggcgtcatcgacgacattgacgacatcgacatgaccgagggacagaccaacgacttcctccgcgacatgatcgagatgcgcaagcggcagaagtccgggagggacacctacgccaagggcaagagcaagcgtgtaggtgggggtgatggtggcgacgggggtgctgctggagacagtgcagatgatggggatgccaaggggagcggcgatgatgctgacgcagacaaggactccaagaggatgaggaccaagtttgaggagctttgcaatgaagacaagattttggtgttctttaagaagctgcttaatgagtggaaccaggaattggatgagatgactgagctagagaagcggacagcaaaggggaagtccatggttgcaacattcaagcagtgtgcacggtatctcagtccgctgtttgagttctgcagaaagaaggttcttcctgatgatatccgtcgagcgttgcttgttattgtcgagtgttgcatgaagcgagattatttagcagcaatggaccaatatatcaagttggcaatcgggaatgcaccatggcccattggagtgactatggttggcatccacgagcgttctgcccgagaaaagatctacacaaacagcgtcgcccacatcatgaatgacgagaccactcgcaagtaccttcagtcaatcaagaggctcatgacgctttgccagcggcgttaccctgcactgccctcaaaatcagtggagttcaacagcctggcaaatgggagtgacctgcaggcgcttctatcggaagagaatggttcgggtaaagcttccgaggaaaggctccggttgatgccagcatcgaaagagtgatgccttcgcagactagattggattacaagtagagcttgagatgcttgtgtaatatatacaatcaattctgcctgtttttttttcttttctgtttgtgctgaagagaaaagcaacagaattgtgtatgctaattaaatcgctttaccgctacatgtggtcgggcaaagtttttattaatatatcagtcaattccggagaactttaaaaaaaaaaaaaaaaaaaaaaaggaaaaaaaaaaaaaaaaaaaaaaaaaaaaaaaaaaaaaaaaaaatttnaaaaaaaaaaaaaaaaggggccccccaacccccatttttttcccctttaaggagggtaaaatgcccccttg

SEQ ID NO: 175707 - DNA, 1452 bp, Zea mays
  Clone ID: MRT4577_91838C.1
tctcgtcgatgcggttctgggggagagagaaggcgtcggcgcccaacggtggggagcggcagaggaagacgtctggctcgttggtgtacatgcggaagcggtagggcgagttctcgatgcggtcgcccatgaggagctcgccgaggttctcggcgctgtccttgacatcgtcttgtggctcgcaaaaggggaggctgtagtatctgaaggccatctcgggtggaggggggtgagagaagacaccttcgcgcccacgcgtgcgtccacgcgtgcgcccacgcgtacgcggccgcttttttttttttttttttcatcgaagccgcattcgccgtgctccgtactaccaactgtcctatcctgggagtagtgttaacagcgccgcaccacctcgtgccgtgggaggtcgagctcgtcgatgcgacgctcctcggagagcagcgcctcctcctgcgcggtcttctttggcgcgagggcgggcgggacggagggcgccgaggaggaggcggcggcggaggagctagggttagggttcgccgccgccgtctgagctgcggcgtcgaggttgctggggtcggaaccggtagcagctgcggcggaattcgcggagggcgccgacgtgccggccttggcgaggacctggcggtgctcttcgcggcgcttctggagctgcttctgctccagctccgaccgccgcacgaagctcttgcccccgaagtcggccgtcgccgccttccgcttcttctccagttcccgcttcagcagatccattacgcccgccgtccagttcggcttcgattctccgagaggcggtgcaccgtgccggtgctgcggataccggccgtgtacgcgttcccccaaatagaggaggactcgacccaacttggatcgtgttgtgggcagactaataaagcgtgcaagtctgttaccgaccatgtcgcagcagccggcgccggcgccgccatatcggccgtataggcaggtgagggaggcgacgccccacagacgcgcggtctcctgcttgcggtactccccctgtgggcgcctcctcgcgacagactccctctcgacggaaacgtagcgctgctctcccccgtctcactgaccgtaatcgccgtcctgcgcggtcactctgacggcgtttccgacctgtcctggtccacggagtcgttctacctctgctccgcctccgacgaccgcaccatccgcatctgggacatccggcccgtcctcgccggtggcgcccaggcagccgccgattccagcgcagaccgctgcgtccgcgtgctcaaggggcacaccaacttcgtcttcagcgctaacttcaacccgcagaccagctcgcagatcgcttccggaggatttgattgtaccgtgcgcatatgggacgccacgagtggccggtgcacccgcgccatcgaagcgcactctgagcccgtcacctcgtgcatttca

SEQ ID NO: 175708 - DNA, 204 bp, Zea mays
  Clone ID: MRT4577_91839C.1
tagacttggtgatgagcactatcaacagctctgactacgactatgaatgttttatgcctgcggaggctgcagcgaatagatgccgttctatggttttctacaccttacatgggctagactctgactagctatagaaaggaaaacaccgactgactcagcaccggcctaggagagacgaactaggtgaatcctctcaatatgcct

SEQ ID NO: 175709 - DNA, 419 bp, Zea mays
  unsure (1)..(419): unsure at all n locations
  Clone ID: MRT4577_9183C.1
cggggggggggcgcgggagncgaccgccgcagaccggggggggncgacncgccgncaccgaanccacagancanggcgagcccgggncacgccacacngcngacngccggcgagcagaggaacaaaaacccgcagccaagcgcaaggacaacacncggggaagagggnggncanggnacancncaacncngcccagnccaccaccacngaccaccncaaccacaagcccggcgggagcgaccagaccacgaccgagagggcccagaaagaggccgccgngaggaacaggcggccaggcaagcaccccagagngcccgacccgcacagggccgagcgngaaagaagcagcaccacagagaacacncagnggaagagcgggaccaccaaacacccgcccgggcggccccccgaaaaggcga

SEQ ID NO: 175710 - DNA, 405 bp, Zea mays
  Clone ID: MRT4577_91840C.1
ccaccacaagggagcatataagcgagtcccctcgcaggccagggcaagtccacaattttgggttacaaccatacaataagggtgtttgcaaaatcgcttacctttttttataacaataccaaaccaaaacaaaggacagccgattgattttttggagccaaaccccaaaaacatagggattttaaatatgctgcaggcaggatcaaaattccgatcctttaaactttctactggggggtagcaaaattaataatgatttttacccggtgagtttgcgcggggtcgggggcaactccaaatgctggaggtgcaggggggttacaagcccctgccatgtttccacagggcgagcaaatgttttaagttccacaattttcctttgcttctggaagaaatcttccagct

SEQ ID NO: 175711 - DNA, 327 bp, Zea mays
  Clone ID: MRT4577_91842C.1
ctgaagaacaaggagcggaggatggcttatttgcctcagtggaatatgttgagcaaacacatcccaattttactgaggagaaagtagatggttctattcctacaccagcaagttcggagcaacctgatcagttggaggtggttagaccatgggatgatgcgccgaatagtaccctaaggtcaaagcctccatcaaactactcacagccaatgcaaggatcagatctagatgttaggaatatggatgccttgggatccatctaaagagtggttggactcaaagttattgtcaaatacggtagagccatcaaagttcctcaactgggag

SEQ ID NO: 175712 - DNA, 447 bp, Zea mays
  Clone ID: MRT4577_91843C.1
acccactcgtacgcccactcgtcctccctatttccccttttttctctctctctccatcttctacaaaccgttggcttttataaaaacctcccctatcccaatactccatcatactcttctccaaatcttctttacacccacctcctacaactatcaactcttattatccaatccctcatcttataatactttccaaaattactatattatctataatactttaataaatgtcttcaaattattcctttttaccacattattatcattctattattaaacacatacttttcactattacaactaccaccatttttaaaccatcactaattaaacttcataataattttatctacttatcaacttatatctataaatatatcatataacataatttactttaaaacaacttacaattcctttcttcatttaaatttatcaccttttaac

SEQ ID NO: 175713 - DNA, 379 bp, Zea mays
  Clone ID: MRT4577_91844C.1
aacactcgtccgcccactcgtccgtcgttccgaaccctgacctgtacacggtcgccagggggctcgcaagacctagatcactagtagacaaggatagcagcatccacaaacacaatccatatcagtgaaggccaacatatacaataacaactgcagactgatcataatgatattcgaccagatctccgtgactgacatcttgaaggacgacgatggctacgttgatctgagcaagaaaaccaactacatccacttcgacaaaaatacgacagtttaacaaatacaggatgcgttcaaagaatatactacgatggatgatattgctattgtgctcatgaacaagtataatgtcaacatcataaggtgtctggtggatagc

SEQ ID NO: 175714 - DNA, 579 bp, Zea mays
  Clone ID: MRT4577_91845C.1
gggcatgtggctgccgctccgaatattgccgccgcgtcaaggcgatccaccgatcctgaccgaccgacgcgcgagggatctatgcaaatctcaatgatatgcgcccacccagccttttgacaaaacggagggcaggaataattgcgcgtaggatgcgttcatgcatgcatgcaatccgcgaatacaaattagcacccgctaatcattgtacttgtgcccgtccaacgcagcgcctgtatgtatagtatagttgtcacttaagcgtacagtgacctgcacctgctgccctaatccttgtatagagacttgcagtgcaagttcagcaaccgtcctgctccaaaagcagcgacgaagcatatcaagattgttcattggagtgcttatcagagaaagaatgccaggaaccaaactttctgtgtactattcactggagagaaagaaaaaacaagacagaggattcatttacttatcttccgaacgaagatgcaaaatctattccaccaggaacaagaattgcctcagggagggagttaaataacaaacgaacaaaaaaaaaaaaaaaaggggccccttggagct

SEQ ID NO: 175715 - DNA, 336 bp, Zea mays
  Clone ID: MRT4577_91846C.1
cttatccatttatcattatgcgtggagacagtacatacatctgtaaccacagtgtggcatactggcattatgcccaggatcgatctggtagctagtatcatatccatggcatgtgttgttaattcgaaactccaactagtatggagagtatctataataagctgcattcgtatgcatgcatccttcgtcgacttggaagagggtctgccatctttaatttactcacgcatcttctcctggataggcagagatcaggccgagggcgccgggcacacgtacagcggcggcacggcgccggcgttggcgcaactggccatgaggttcctgggcggcgtg

SEQ ID NO: 175716 - DNA, 595 bp, Zea mays
  Clone ID: MRT4577_91847C.1
ttatattcaacagtaaaagcataacatcatgcaagtatacccaaaaaaaaaaaaaaaaaaaaaaaaaaaaaaaaaaaaaaaaaaaaaaaaaaaaaaaaaaaaaaaaaaaaaaaaaaaaaaaaaaaaaaaaaaaaaaaaaaaaaaaaaaaaaaaaaaaaaaaaaaaaaaaaaaaaaaaaaaagggggggcccgtttttagaggatccaatttttcctcccccggcctggcaaggaaaaactttttttttggggcccctaaattaaaaacacgggcccgtttttttaaaccggggggtggggaaaaccctggggttccccaaatttaatcccttggaaaaaatcccctttttccccgggggggttaaaaaaaaaaggcccccccccttccccttttccaaaaattgcccccccttaatgggaaatgggacccccccttttgggggccttttaaccggggggggggggggggaccccccaaggggaccctttttttttgcaaggcccttagcccccgtttttttgttttttttcctttttttttcgcccatttggcgggtttttccccgaaaacttttaaagggggggttccttttgg

SEQ ID NO: 175717 - DNA, 310 bp, Zea mays
  Clone ID: MRT4577_91848C.1
cagaccatcagctctatctactccagagcggagaagaacccgatcgacaccatgagggagattgctcgataccctagctctcctggctctcagtgcgagcgcgacctgcacgcatacaagcggggggtgaaggtgccagccaccgccccagggttatctaccggcggctgtgcatgtggcacctggaggtcacctgccacctcccgggcatgtgccaccgccaggacacctgccggcggatgtacacctggcaccaccaggacatgttgcgacgccagtttatctgccggcggcaccatgtcaataccct

SEQ ID NO: 175718 - DNA, 678 bp, Zea mays
  unsure (1)..(678): unsure at all n locations
  Clone ID: MRT4577_91849C.1
ccggccgggaccggagcctcttgccgcatttttcagactgtcctgtttcgtgacgtcccaggattctaggagaagagaacaccctcgcccccctggggcatagtcgctgccgagccagtggtactggccgcgacggagcggtcagaagctgcggcggccggcgcggtttcggtttcggtttcctggctggcccgaggagtttgactcctctcctgatttgtgaaagtggagaaataagatacacagtggaagatgagatcagttgttcggtcacttcgccagcttcgccgtttcactcagcaccatgcagaggggcactcacaagcaaccagattgttcgggcagcagaacgctttaatcatgtgcggttcgacatctggttcactgagcacgttacgttgtaatggtgaaattagcagatttgcaagccctggcgtcgagttgatgaggtccatgttctctactgtagtgactgatccgatcaaagatattggaagaggtggtccaatggtggaatatgagaggagaatagcatcaggagagctagtagacggtgatagctntcaggttgatacaattcaacaattacaaaggctctatgaggagttgattgagaatgaagaagactgtcagctggatagatataaatcatctgagaaatcaggcccggagtcgatg

SEQ ID NO: 175719 - DNA, 397 bp, Zea mays
  Clone ID: MRT4577_9184C.1
aataaattttcacaaaacttttgctagctcattcgacaggttcgactggggcaatcacgaggggggcaagggcaagtggcccacacaactgagcagactccgactcggcgtacatgctaacggcagcgcacacaagactcaaaaatcagatcaacagctcgcacacatgtcgcaacaagagctcgcaacaccactcaatgagttcacaactcaacaagagctctagatgctatcacaatgaaccacatgcgcggaatccatgtctcggcgcttaggaatgtcgtaggaatgcttggtgtcctcctacatgcgcctaggggtcccttttatagccccgctgagaacaaatctggaaggccattcttgccttctgtcgtctggcgcaccggacaacact

SEQ ID NO: 175720 - DNA, 678 bp, Zea mays
  Clone ID: MRT4577_91850C.1
ttccatcccagtcgacctgttcccaacttcccatcccctcggcaccggcccgactaccggagcctcttgccgcatttttcagactgtcctgtttcgtgacgtcccaggattctaggagaagagaacaccctcgcccccctggggcatagtcgctgccgagccagtggtactggccgcgacggagcggtcagaagctgcggcggccggcgcggtttcggtttcggtttcctggctggcccgaggagtttgactcctctcctgatttgtgcgccggggcgtctcttgttctgctgcagcggattgtcgcggactggacgcggtgaggcggacatccctgtgcggaaggcgtgctcgggcagggccagcccaaccgccgttcgtgcgctagagttcctcgctcagaaagtggagaaataagatacacagtggaagatgagatcagttgttcggtcacttcgccagcttcgccgtttcactcagcaccatgcagaggggcactcacaagcaaccagattgttcgggcagcagaacgctttaatcatgtgcggttcgacatctggttcactgagcacgttacgttgtaatggtgaaattagcagatttgcaagcccctggcgcgagttgatgaggtccatgttctctactgtagtgactggaccgatcaaagatatggaagag

SEQ ID NO: 175721 - DNA, 859 bp, Zea mays
  Clone ID: MRT4577_91851C.1
ggttgcacccccacaattccagctcacgctgcactcctccatcccagtcgacctgttcccaacttcccatcccctcggcaccggcccgactaccggagcctcttgcgtcgcatttttcagactgtcctgtttcgtgacgtcccaggattctaggagaagagaacaccctcgcccccctggggcatagtcgctgccgagccagtggtactggccgcgacggagcggtcagaagctgcggcggccggcgcggtttcggtttcggtttcctggctggcccgaggagtttgactcctctcctgatttgtggctcataacttctttatggtgtttggtgtgcctagaaagtggagaaataagatacacagtggaagatgagatcggttgttcggtcacttcgccagcttcgccgtttcactcagcaccatgcagaggggcactcacaagcaaccagattgttcgggcagcagaacgctttaatcatgtgcggttcgacatctggttcactgagcacgttacgttgtaatggtgaaattagcagatttgcaagccctggcgtcgagttgatgaggtccatgttctctactgtagtgactgatccgatcaaagatattggaagaggtggtccaatggtggaatatgagaggagaatagcatcaggagagctagtagacggtgatagctttcaggttgatacaattcaacaattacaaaggctctatgaggagttgattgagaatgaagaagactgtcagctggatagatataaatcatctgagaaatcaggcccggagtcgatggctatggtcccgcctcattactcagccttctacgtatgctcctattaagggctttacctcta

SEQ ID NO: 175722 - DNA, 361 bp, Zea mays
  Clone ID: MRT4577_91852C.1
aggaaagatgcaagaggtggacattgtcatgtggcctgggggactgtctgcaggcctattgagctgggtggccttggtatttcgagcttaaaagagcttgcttggtcacttagaatgcgttggttatggttggcaaaaactgacccaactcgcccttggacttctattcccatccaagttcctaagaaagtaaaagatttcttctcaatggctatgcaaactgatattggtaatggtgcttctacgtttttctggacagataggtggctgtcgggacatagaattgcagatttggctccacggttatttagaactatttctaagcaaagggctaatcggagaacagtattggacgctcttt

SEQ ID NO: 175723 - DNA, 2122 bp, Zea mays
  Clone ID: MRT4577_91853C.1
actcgagcaagtggacggaattcttccctgccatgttgtgcaaatctcgcacggccaacaacctcgtgaacggcatgggcgggcggagcgagtctttgcttctgatgtatgaggagctgcacgtgatgtcgccggtcgtcccgacgcgcgagttctgcttcctgcgctactgccggcagatcgagcgcgggctgtgggcgatcgcggacatctcggtggacctgcagcagcgcgacgcgaggttcggcgcgccgccgtcgcgctcatgccgcctcccgtcgggatgcctcatcgccgacatggccgacggctcctccaaggtgacatgggtggagcacatggagatcgaggacagggttcccatccacctgctctaccgcgacctcatcctcagcggcgccgcgctcggggcgcaccggtggctcgccgccctgcagagggcgtgcgagcggtgcgcgtgcctcgtcccggccggtatgccgcaccgggacattgcagttgcaggagtgacgccggaagggaaacggagcatgatgaagctgtcgcagcggatggtgagcagcttctgcgcgagcctgagcgcgtcgcagctccaccggtggacgacgctgtcggggcccagcgacgtgggcgtccgcgtcacggtgcaccgcagcacggacccggggcagcccagcggcgtggtgctcagcgcggccacgtccatctggctgccggtcccgtgcgaccgggtgttcgccttcgtccgcgacgagcacacgcgctcccagtgggacgtgctgtcgcacgggaacccggtgcaggaggtgtcgcgcatccccaacggctcccacccagggaactgcatctccttgctcagaggcctgaacgcgagccagaacagcatgctgatcctgcaggagagctgcaccgacgggacggggtcgctggtggtgtacgcgccgatcgacatcccggcggccaacgtggtgatgagcggcgaggacccgtccgcgatcccgctcctgccgtcgggcttcaccatcctgccggacgggcggcccggcgcgccgtcgtcctcgagcgccggcggcccgctggtgggctcccccgcggcggcggggtcgctggtgacggtggcgttccagatcctggtgagcagcctgccgtcgtcgaggctgaacgccgagtcggtggccacggtcaacagcctcatcagcaccactgtggagcaaatcaaggcggccttgaattgtgccagccattgatggagccccggctgatggatccatggaatttggtgcgggcgtgcgtgcgtgcatgcatgcgcgcgcgttggtctcggtctcctctcctctcgtcccccagccggccgcctgccgcctgcctggtggctgctgcgaggagtgaattcccttcaaggcgttggttcgcgacggagctcttggttggtcgggggggcttcaatgctggctggccattcaaggaggcgggggctgctgccatggtgtcgcccgcttggggttcacctgccgctgttactgcgccgtccgatcaccggcccatgatcattcagctctgtctctctctctctacctctacccctttctctgcatgcatgataacttttcctgttacaggatttgaagcttgcttgccggcgaggctttgcacgaaacgggggagtcaagaacgcaccatgctcgtctcattcctcttgctgccgtcacgctcatcagttgttaattccattcctctttgtgtctcccctcccctagtttctgccgccgatttgcagtctcgctcccattctgtagtttgcagcagaggatgatgcatggttcgggtattgacttctatctaatggtgtgaagccttcaatgatcattaattctctccttctttttagtaagggaaatgtcactgtcaaaaaaaaaaaaaaataccatattaaaaaaaaaaaaaaaaaaaaaataaaaaaagaataaataaaattaaaattaaatttaaaaataaaaattttattatagataattatatatttatatttattggggggccccccgctttgggggttctcctccccggaatttatttccgtaccggtcctgtgtgggtgaccaattttccctatatggggggg

SEQ ID NO: 175724 - DNA, 265 bp, Zea mays
  Clone ID: MRT4577_91854C.1
tttttgggggggggttttttaaaatttgtgggtggtaaacccaccccaaaatatggggcttcaaggatctggctagataacaaaatggggccgggcaagtagtgaacgacccgggaggggggccccgggggggctactcttacgttcaaggaaaaacgtccattcaaggacgtcctttttggtggtgggcaggaacaccaggcccgggcagatgtgcctataaacaagagggtttggtttcccaagacggggaaattgggctctt

SEQ ID NO: 175725 - DNA, 964 bp, Zea mays
  Clone ID: MRT4577_91855C.1
tttttttttttttttttttttttttggagggagagctggagagcagccattcttgacaattgacatcaacgaacaatggacgcgacgcccttgagcgacgagcgccactggagactagagcgtaggcggtagtcctggcatcgagcaagtttcccacgcgaagcttgcttctgtccacaccacacctagctgctgaaagaacgagagattgcttctcctaaatcaccgaacgggtcacagccaccagctgtgcacacgagagaacgatcatgaggtgagaagctaagagcaaatgcctagctcacactttattcagctcttcaagacttcttcagttcagaaagatttctttactggctagctagtaaacctgacgaggtaggaaaccatctccgagttcaccctctcggcctgctcctgctggagaaaatggtggccttcgatgacggtgacttcaagatctggaacggtggacttgaactccgcgctcttgatgtactccccagttccaaaggactgggcaccgatgtccttatcgccagctatgaacttcacaggcactgtaatcttcgctccgttccagggtgcaaggagtctcgagttcgcctcgacagcggtagtagttgagggctccaatgaacccggacttgtgaaacttctcagcatactggcccagttcttcctcgctgatccaaggaagtggcgagggagacgcctccaggaagtctatgatctccaccccaggaggagcggtgacatcatctatttcgatggagtagaacttttttaggacagttgcgacatcgtaacgggcgaatgcgctctcagctcttccagcctcctggaactgatttatgtaaaagccctcgccaaacgccgcgaaggcctccgtgatggggcgagcgtgtgcgtgtcgagcggagtacggtacccccagaacgacggcggcgcgcacccgggtcga

SEQ ID NO: 175726 - DNA, 518 bp, Zea mays
  Clone ID: MRT4577_91856C.1
tcgagcggccgcccgggcaggttaaaaaaaaaaaaaaaaaaaaaaaaaaaaaaggaaaataaaaaaaaagaaaaaaaaaaaaaaaaatttatacctaaataccttacccctcttgggggaacttccttaggtctacttctccctgtttgcctttccttgatgccttttcagggccccttttcccctttccttttcccctttacatttcactccctcgcctttcccaacccaattatttggaaaaccttaccgtttcccccctctggtgacccaccttaaatgcccttttcgatttccctttttaacaagatggggccctaaccgaaaggccttccccccctgtcctttcccattatttccaattgacaatgcctgttggggcccctttatagccgcgccttttaggggttcgctcaccgggacccttccatttttaacttcccttttgcccgcgcccttaggtttgttcctttactttttttccctggttttcttctttacttttccagtttttactt

SEQ ID NO: 175727 - DNA, 337 bp, Zea mays
  Clone ID: MRT4577_91857C.1
aagcaataacactttattaacaatggtgcagctttaacaagcaacccagtcttgggagaattttctgtcaaacaaacccttttgagttaaacagaggcaggacacccatactgaaggatataatactggtgcatccttcgttccgaacatgggtaactaggttgggcgaacgcctagcacttgagggtgttaagcaccataaccataaatactaggaatgttctggattcactggcggcctatccttgattataggcgcattaccacgagacgctatcatacctgttatggtcctacaccaactaaataattgtgaggcttcttacagccttagaat

SEQ ID NO: 175728 - DNA, 421 bp, Zea mays
  Clone ID: MRT4577_91858C.1
cagaaataataaagcacatatatgggattccactccacatcaattctcaacaactacagcggcttgtgctatcagacctgtgctgactactctcagcaacagcaccatacttcacattcaaccaactagctgcatcaaactctgcttcttatttacaacatcaacatctaccattcagacatctacctgctgcctacccacagcaacttcttacattcaaccaactgacacatttgaactatgatctttatttacagcaagcaccacttactacaattcaccaagctacttgttgtaagccttgcaacctttttgatccacccacatttgttgccatcctacaataacactaagcctaacgctgccccccttttacaattcaaccaattgttgccatttacccaacttccttttacaaacc

SEQ ID NO: 175729 - DNA, 701 bp, Zea mays
  Clone ID: MRT4577_91859C.1
catgaagagagcatcgccggagtcggggacggtgcgccgagaaggaacaaaagaagacggcggcggggcggagatggggagccccctgggcgggtggccgtcgtacaacccgcacaacttcagccagctcgtccctgccgacccctccgcgcagccctcgaatgtcacaccagccacttatgttgcgacccacaggacagacccgccacccaatcaagtgataacaacggaggccaggaacatcctgctgaggcacttctaccagaaatctgaggagaagctgaggccaaagagagctgctccggacaacctcgctccggagaacaacaacaagcagcccaggggacctgtgggcgacgtcgggggccagtcaagcgcaagaggctgaagccacacagctggtgctggtgcccgtcctcccctgcctctcatctctcggtgtcatgcagatgcagcctgcatctctcgctcacatgtcacagctggtggttgtttctcccctgtgcgtcctcttcgcctctcacgtatgtacgtatgacccaaagagctgaggtatacatacctggatggttggatggatgtacataaccacctgagacgagacaaagctcggtgcgtgccatttcacatggcactaggtgtgctgcagcctctccttttcatcctctacaatgcaaaaatatggatgtgcccatgctgct

SEQ ID NO: 175730 - DNA, 247 bp, Zea mays
  Clone ID: MRT4577_9185C.1
atactttatacccaatagctctcaaacacttattcttgacattcttaaacctcatactaagatctcttttaatcaacattatgactatcatcaacctcatcacaaacacgcttccataaaccatattaaccaattcgaaaccctagtcggcatcataaatcacaacaccaaaatcatgacccacagaactaaaacacccagcattcgccatatgtacattcacctatcatccaccatcattacatat

SEQ ID NO: 175731 - DNA, 226 bp, Zea mays
  Clone ID: MRT4577_91860C.1
aaaaaaaaaaaagaaaatttaaataatcaattttctatacaaaaacataaatcaagatccaacgcgggcattttcaaaaaactaggcagtacacattacgctaggtggcttcagattattcaacttgctacacggttccaattcaattgattaccatacactcattcatcgtggcgcacgccactcaccatacgcagtggacaaacccccacaacttattaccaat

SEQ ID NO: 175732 - DNA, 383 bp, Zea mays
  Clone ID: MRT4577_91861C.1
gggggggcccgaaaacctattactttttaaagttttttaacccttttgtacaaggcccccatttggttttcaccgtgggccgaaagaataacagggttttttttaaaaaaccccccccaaaagggggaagggcccctctttcttttggtgctttttttataaaatttccccccagcctttttttccaaaccggggattttattttccccaatctgcaagctcccctgtttataaaaattaagggggaaaacccttgtgggcccttagataaaaaaactcttttatccaaatcccaaaaaccgggcccgggggttccccccggaattttccccccgggcccttgaggggatcacctttttttttttggaggccttttaaacttg

SEQ ID NO: 175733 - DNA, 619 bp, Zea mays
  Clone ID: MRT4577_91862C.1
gggtacctcgaggccggccgggattgcgtaatcttcatgctacgtcgatgatcgaggaacaaacaatactaccttgtcgggaagcttaatgttcccgtcggcctctctcgcaataagtaggcacatcgcatggcgcgtctctcatgggctgttgcttcgttgaccctccttcgctcatgtttgctggcccgctgcatgctgagcgcgtgacagtctaccatgtacttcttgcatgaccacctcgtctccgtggcctgatgatggactggcaggtttgggtctactcagagagcctcatcatacagaggcgaacatctactctgtatatagaagctctggactacatcgaggagaacgtggcttcgccgaaggccaataactgcccctgatcggcagagacatgccctctcacgcagactcactcgcacggaaacaaactcgagatagagataccctcttatcaagtgctgtggcgtcttgctcgccgataaggacgcgcgactacgcctacgacatgatcgatgcacgcgccgccatcgtccacctagaactccgcaacattgaccatatcgacaaggacgtgcgcaacggtctagaccttgacattctctaggacgag

SEQ ID NO: 175734 - DNA, 795 bp, Zea mays
  Clone ID: MRT4577_91863C.1
tgggtacctcgaggccggccgggcctggagaaaaagaaaagtcctgctggcagctgtcaaccacccgtggtcccgtggaagagaagagagcatcgccggacccggggacggcgcgccgagaaggaacaaaagaagacggcggcggggcggagatggggagccctctgggcgggtggccgtcatacaacccgcacaacttcagccagttggtccctgccgacccctccgcgcagccctcgaatgtcacaccagccacttatgttgcgacccacaggacagatccgccacccaatcaagtgataaccacggaggccaggaacatcctgctgaggcacttgtaccagaaatccgaggagaagctgaggccaaagagagctgcgccggacaacctcgctccggagaacaacaacaagaagaagcagcccaggggacctgtgggcgacgtcgggggccagtcgagcgcaagaagctgaagacgcacagccggtggcctggtgggtggtggccgtcctcccctgcttctcatctatcggtgtcatgcagcctgcatctctcactcacagctgagctggtagctggtggtggttgccctcccctcccctgtgcgtcctcttcgcctctcacgtctcgtatgtacgtatggtatgaccaggagagctagtttgcatacaatggatatactggatgtgcatagccacctgagacgagacgagacgggactggacgaggtcggtgcgtgccatttcacacggcactaccgcactagtctgtgcggcagcctctctctctctctct

SEQ ID NO: 175735 - DNA, 1137 bp, Zea mays
  Clone ID: MRT4577_91864C.1
catatccatggtttgcaggcaagtaaacttattacatataatccattgaacttcatgtcttggtttgtccaattcgacatcgaagggctcgccatgtggggtgacgtcgacggggcttcacctgtcctattctatcattattgtgattactgactatgccattgtttgtgctactgctgcttatgcttgcagtgccacaaaggcaagcgaacctttgatttggtccatgttctggtctaaccttgttgggtccacactccatgggtcactttcacattactactaccatatctgtgagacagtgcattcaagtaacggtacaatacaaagggtggcaaatgataatagcctgaagaatgatggcacaaaatgatctaagcaatggtaacaacgcagagtacgcgggcaacattccatcatcatataatctcgaatattttcataaactggttgtgtaaaatggggggatctttctccatgaatctcaatggatctgttgtgcactgcatagctgcggagaagaaaaaggtatcaaatatcaagcagctttacggcagcgaaggatcattcactatgagtggatattaaactgttgcaaggaaaacatcttcattttcatcctaggaagttgaacgatcattctctttttgggcactgctgaaggtgatgttgttcacccaactgagtgtatgccccagctgcttgagcaagttcggcatcacaaagcgaatatcgattgcaatgattatattgtcatggtgactacattggttcttgaggttgaggatttgtctacacaacaagtgaatgataagctcctagaagctgtacaaccttaagcactcgagcaatggagcaatgtggtatgatgagagcataggaggtttgtcgagatgaggtcgaaacatggccccaatgtaactagaccagagcaattgacaatctaggcaatatccgctatctggtccattgtttctctcgtgggtccattgtttctgtcgtgggtcagacgtcttcgacgtgaagagaggttgttttgtcatttccacattctgaagcgtaatgtagtgcagtggacgcaaaaaaaaaaaaaaaaaaaaaaaaaaaaaaaaagtactcttcgttgttaccactgct

SEQ ID NO: 175736 - DNA, 324 bp, Zea mays
  Clone ID: MRT4577_91865C.1
caaactaccctagttgcagccacgagcaacaagccctaaagggatgaagtccaagggaaacacacaagggagcatggcgaccgatagagcaactaagatttgaggttcaggcgcgtacatggagaaggagacgtaactaaggagctagcaccctgggcaacaggcccgagttacagcagccccatgaggacctcccaagggtagacccagaccgtaggtaggtagagctttttgactttgcggtccataactttaagagcgagagagtacatcgggccagcaaccacttgggcagagggcttgcacaagctaatagaaccccag

SEQ ID NO: 175737 - DNA, 3383 bp, Zea mays
  unsure (1)..(3383): unsure at all n locations
  Clone ID: MRT4577_91866C.1
gcgattgggttcctcgcggccggcccgcgcgtcgcgcgtccccaccgtgcccgccgcacacgccgcgatgagatcctggatccccctgcgacatcctcctccaccgcgccatggccgcccccgacgtcctcgcgtgccgctccccgaggtggcgggcatggtgcgcgcagctatcgcgggggtcacgacggcgacgcgattccaggagctggtagactggatggaggagcggaaggcggcattcagggacgacggcaagtggacagagacggtgaatctggggctcaggagccccgcgctcatcatgttcgggctgcttcagttcgccatcgacagggacctcgggttcgggaagaccagcctcgtgctgccctgggtgcgccatggccggctggggtccgcgtccgtgacggtggtgccctgccccaacggcgacgggtcgtggttcttcggcggcactaggatgtggtcgcggctcatggaggtggtcgaatccgatcctttgatgaagccgacagcgaacccgagaatggtgacaccggcgggatcccgtctgtgaccctaaaccgacgggaactgtgaactcgcgctggcggtacctgccattacggtgtacgggtatcgtcaccatcatcatccagatccaggttttggccccagttcattgatttgcttgttggtaccgctattgaccatccaatgcagtgttctcaaggtccaaagtacgtggaccttcagttggtgtaatcagaagcaatatccaagatattcattatgcacttctataaaaggatgaacacttaggataaggtcgaaacatgnccccaatgtaactagaccagagcaattgacaatctagggcgagcctaccaaagacgacatcgtcccagccgttacttgcgcaattcccttccatggtcctggcaatgatggcatccccccagccttttccatctggcatgtacacgccgcgatgagatccttgactccgcgtgactttttcctactccgtcccatagcggcccgctacgcactcgcgcggatctccccgaggttggaagtgtgcgcatgaccgtcgcgggtgtcacctccgcggctcacttccaggacctccttgactggatggtgaagtggaaggcggcgttctgagactacagctagtggacggtgatggtcaacctggggcccgggcgcctcgcgctcatcatctccgcgctgcttccgttcgccatcgacggggacctcgggttcgggaagcccagtctagtgctaccctgggggcgacatggccggctgggatccgcctccgtgatgtaggtgccctgccatatcggctacatgtcgtcgtcattcgggggcaccaggatgtggcagcgtctcatgaagtggttcgcatccgacgccttggtgaactagacaacgatccagggatcggcggcgcactgcatagctgcggagaagaaaaaggtatcaaatatcaagcagctttacggcagcgaaggatcattcactatgagtggatattaaactgttgcaaggaaaacatcttcattttcatcctaggaagttgaacgatcattctctttttgggcactgctgaaggtgatgttgttcacccaactgagtgtatgccccagctgcttgagcaagttcggcatcacaaagcgaatatcgattgcaatgattatattgtcatggtgactacattggttcttgaggttgagaatttgtctacccaacaagtgaatgataagctcctagaagctgtacaaccttaagcactcgagcaatggagcaatgtggtatgatgagagcataggaggtttgtcgagatgaggtcgaaacatggccccaatgtaactagaccagagcaattgacaatctaggcaatatccgctatctggtccattgtttctctcgtgggtccattgtttctgtcgtgggtcagacgtcttcgacgtgaagagaggttgttttgtcatttccacattctgaagcgtaatgtagtgcagtggacgcatatagctactacgtatgttaaagttgtattttttattgatctatatatatatctttttgattttcgcattagtcattacttgctcgtgcaccaaatctaaaaattgcggtggcttggcaagcgtagtggttgtctgtgtctgcctggcgacgacatttgctgcacgcgatctcttgcagtcgctactcgctacaacaaggcttctggggatgccattgttagctgattcttttcctcactggtgaagggcagctggttgcttcagctaaaagagtcgagcagaccaacaatgcaatttagctggagcatgatcagaattcttgtctgtactgcagacactgctctggggtctgtttatgcgcaacaacggtttatgagaggagaggtggcccccatctgtggccgcaaaggagcttggccaactgcgacaacgacatcctggctctgatgatggcacaaaatgatctagagtattctttatcttacttagattttgtcaacattccatcatcatataatctcgaatattttcataaactggttgtgtaaaatggggggatctttctccatgaatctcaatggatctgttgtgcactgcatagctgcggagaagaaaaaggtatcaaatatcaagcagctttacggcagcgaaggatcattcactatgagtggatattaaactgttgcaaggaaaacatcttcattttcatcctagtctcatcagtgacatgtatcgcttgtcatttgatgaaaatggaagttgaacgatcattctctttttgggcactgctgaaggtgatgttgttcacccaactgagtgtatgccccagctgcttgagcaagttcggcatcacaaagcgaatatcgattgcaatgattatattgtcatggtgactacattggttcttgaggttgaggatttgtctacacaacaagtgaatgataagctcctagaagctgtacaaccttaagcactcgagcaatggagcaatgtggtatgatgagagcataggaggtttgtcgagatgaggtcgaaacatggccccaatgtaactagaccagagcaattgacaatctaggcaatatccgctatctggtccattgtttctctcgtgggtccattgtttctgtcgtgggtcagacgtcttcgacgtgaagagaggttgttttgtcatttccacattctgaagcgtaatgtagtgcagtggacgcatatagctactacgtatgttaaagttgtattttttatatctcatattagatgtatttactattttacaagccttatgaaaatagcaatatgagtggtactaaattattgatatgtattaaagcaccctcttaaaaaaactacatatccatc

SEQ ID NO: 175738 - DNA, 524 bp, Zea mays
  Clone ID: MRT4577_91867C.1
cccacgcgtccgcccacgcgtgcgcggacgcgtgggcgacaagatggcgtgcacaaacaatgcgatgagagccctgatactcctgatactcttctagcatagtgcatggtgagaaggaagaggcatagggcatcgctacgaaagcattccctcctggagagaccttcaacatcaccaagctgggcgcctccggcagaggctagacagacagcacgaacgctgtgcaggacgcatgggcatctggcgtagtcggagggactagggaagcagacaatcctcatacccaaggatgacttgacttgctaagacaactgaacttgacaggcccttgcatagggcgacgtgaccatgcaggagtgtggcaatgctgctggcgaccacggacctaatccagtacaaggaccatggtaattggatcgagattgtacgtgtggataacctggtcatgaccgggaagggaaaccttgacgagcagggccctatcgagaggagcaagaactgccgcaccaagatacacgactgca

SEQ ID NO: 175739 - DNA, 151 bp, Zea mays
  Clone ID: MRT4577_91868C.1
tcggttggattaagggggtaccttaaaaattccgcaaaagccttgggcttctggtttgtaaaagcccaaagggccggaaaggtttggcccgcacccgccaaaaagggggggctcccagcgaaacgcctattttaaaaagaagtgaagcggg

SEQ ID NO: 175740 - DNA, 237 bp, Zea mays
  Clone ID: MRT4577_91869C.1
cacatgggtacgagccgggggtttattacatgatggctcttattccatacgggccagacgcagcgcggggttccatggtgggggggctcagtcgactcacagaggccctgtgtccagacagagaggagcatacgtgcggaggccggactcgcaggtcttatcgttcacctgttcgccatgcttacgggcaatgacctatgaggcactgaggttgagggccgcggctagacgcatacc

SEQ ID NO: 175741 - DNA, 379 bp, Zea mays
  Clone ID: MRT4577_9186C.1
cccatttctatctccacccacatacactgccggccctacgcgacacaggcccggaccggaacccattcccactcctacgacggacaccccgaccgcgaggcgctccgacacctaagcctgcgcccgcctacgtacaacatcaggccgccaaaccgtgcgctgcttgacgcctgttcctaacgcccgtggacaacttccctcaagcctccgacacctatgccgaccccgcctacgtacactctaagccctaagccaccgcctaccaaggctaccacgcccaaggcgtgtccgtccacgtacactccttagacaaagcctgcggcgacccaaggcgaccccgccgactggcaccccctctccgaagtcttccacgcccaag

SEQ ID NO: 175742 - DNA, 594 bp, Zea mays
  unsure (1)..(594): unsure at all n locations
  Clone ID: MRT4577_91870C.1
tctgtcccaaacctcgccatgttttgtggcaatttcttcgtttgcgagagggatgtacccagagatttcgtccgcgagggaggcttgctctctgatctcgtggaggattttttggaaacatttggttagatgcgacgggttaaaatttagctctccccatccaaacacctgttctgaggttctgttcccgccgcggcgtccatcaccgccaggcgccagcagctccgactgctaacggccgccggccgccggccgccgcagatgcagaatccaagcggcaccatccttcagttctaccactcgggacggctttccgccgcgctctgggcctttgagtcgctccccttctcccccgcatccgcccccgaccctctctccgccgctgcctatgccgcgctcgtcgcggnctgctcccacctccgctccctcccngaggggngcctcgtccatcgtcacctccttgcctcctctgntggagccgcatacctcgatcgaaacaccattctcaagaaccacctcaataccatgtaacggacgatgtgacgacccagaattccgaacgcatggtgatccgacggaatggctcgaaaggaa

SEQ ID NO: 175743 - DNA, 473 bp, Zea mays
  Clone ID: MRT4577_91871C.1
ttttaccgtgacgttggatcaaaagaaccggagagagttaaacaaataatggccgacgctgcaaatgacttggcagggaggaccaaattacttcgaggaacacagaaacgagcaggacctgatggctttgaaggtctattacaggttatccatgggtgatattaaaccgagaatatatggagtactgcattcgtgcttgggagaatatgcctaggattatgctcatggacttcaacaatgaaagacaacctgatgaagggtatgttccagacagtcatttgcaactcactggacttccgtaattcgactgtgaacaatgacttgaggctcacggggcaagaggactctcgtgagaaaaagggccttctcacgagcagggaacattatgagcacatggtggatagtggtgcaccctgacgaaggccggtcgaggagaatgagcctctgcggtccagatcgacggcaatctactc

SEQ ID NO: 175744 - DNA, 239 bp, Zea mays
  Clone ID: MRT4577_91872C.1
cctccgctcctctctccttctcctcgtcttctcctgtacaggtaccccttttcccttttgctgtccttcttactaccttctggggtccccgttccgttcttgcctcccgtggaatggtttgctcgtatgatcctggttctcgatcgactgcttatccgttggctgcgatgctcccgcggatcttgcttctctactgctctggattcctgatcggttgcttatcactgatcgtagtctgt

SEQ ID NO: 175745 - DNA, 163 bp, Zea mays
  Clone ID: MRT4577_91873C.1
acccttcgacccccaaccagtgcaagaacaagatcgagtccatgaagaagcggtaccgggcggaggccgcagcggctgtgctcgctggtcccgccgctgcaggctcgatctgcaggttctttgcccacattgacgggctgctcaaatggcctcacgtctgctc

SEQ ID NO: 175746 - DNA, 2299 bp, Zea mays
  Clone ID: MRT4577_91874C.1
aaaagctggaggataggcccttgtcaaaaggcaacaaatctctcgggcccgaggccccccgaaacggaagggcgaccctcaagggcaagccggccgcccagctttccctctgggccgggacctcacctcacctcacctccgcacccgctgtttcgtgcaccgcacttcacaccccaccaaccttctcccccactgaaaaactatctaccccaccccaaaccacccctacccgccgacgagcgcgatcgattgattcgtttcgcgccgggcggcggcggagggagcccaccagatccggctaccgccgcggctacgatgaagtcgctgctgccgcggagcgagctgcggcgctcgtcggcggcggccgtgcggtcgtcggccggcggcgccgcggggggagacggtgctgtggccgacggcggcggggctgggccgcgagcgcccgcctcctccaccttctggttcctgctgcacgcgctctgctgcctcatctcgctcttcctcggcttccgcttctcgcgtctcctcttcttcctgctcttctccaccaccgcgctctaccgctccagcacctcctcctcctcggccgcggtccttcgcgccaccaccacgacaaccaccaccacgaccaccaccacgacgacgaccaacaccttcacgctctccttcgccgccgccaacactcccccttccacccccgctaaccgcaccgcgctggatgcggccgacaagggggcggcgtccgggaacccacagagtcacgtcgtggtggggaggcacgggattcggatccggccgtggccgcacccggaccccgtcgaggtgatgcgggcgcaccggatcatggagcgcgtgcaggaggaacagcgccgctggtacggcgtcaaggagccgaggcaggtgctcgccgtcaccccgacctactcacgcgcgttccaggcgctccacctcaccggcctcctccactcactccgcaacgtgccgtacccgctcacctggatcgtcgtcgaggcaggcggcaccaccaacgccacggcgtcaatgcttgcgcgctctggcctcactttcgttcacatccccttccctgaccgcatgccccacgactgggccgaccgccacgccactgagaaccggatgcgcctccacgccctacgcgtgatccgcgagaggaagatggatggcgtagttgttttcaccgacgacagcaatgttcatagcatggagctgttcgatgaggtgcagaaggtccagtggatgggtgctgtatccgtcggaatccttgcgcatactggcacggcagaccaactacggctcagcgaggaggacaagcagaatatgcctctcccagtccagggccctgcttgcaactcctcagggcatctggttggatggcacacgttcaactcattgcccttctctgggaagacggccacagtggttggtgaggcggcccctgttctgcccaggggtttggagtgggctggctttgtgttgaactcgaggatgctgtggaaggaggctgaaggcaagcccgactgggtgaaggatcttgatgctgttggcgagaatggagaggagattgagaacccacttactctgttgaatgatccatcctctgttgagccactggggaactgtgggaagaaggtcctactgtggtggcttcgtgttgaagcacgggcggatagcaagtttcctcaagggtgggtaattgagccacctttggaagtcgtcgtccccgcaaagcgcactccatggcctgaaacaaccaccgagctgccagccgagttattggatgacaagcaaaagcaggaggataggcgcttgtcaagagccaacaaatcatctcggccccgaggcaccacgaagcggaagggcgaccctcaaggacaagataactgatgcagaacgtactggcattgtgatgtatatcttgcaccctgcaaaaacacagtagcaagcatatcctgttaatctggcggtgtctgtttaatttttcttttcttttctgatgtttttgctcctgtggcgatggtccacgcttgggtgtgttatctgtagagggcacatttttaaagtagcttgtacctgttgtgttgtaatgtaactgcattgggaactaaaaaaatgggggctggattctggaagcctatctatgcttgtgaaggaggactgaactcttgggtgctgcagcatgggctgatggctggttgagcatatgcttctctcaggaagatattccttcagaaaaaaaaaaaaaaaaaacgctaaaaaaaaaaaaaatttacctttgcgtccg

SEQ ID NO: 175747 - DNA, 256 bp, Zea mays
  Clone ID: MRT4577_91875C.1
acaagggaatattgggccgggccccgcgggggtaccacccccccctaccgggggggccacaaaacttggcaaaaagagggcaaaaaaaagctccggggaaaaaaggtaaacccttcacaatggcaaaaaacatacggccccaaagcctaaaaagaaaaacccggggggcctaaaaagggggcaaacccagattaaatgcggggggcccactccccgatttacaggcgggaaacctgggtgccaacaaaaataagaa

SEQ ID NO: 175748 - DNA, 236 bp, Zea mays
  Clone ID: MRT4577_91876C.1
aaaggggtgaattgaactgccaagaaataaattggcgaacattttgtccaggcccgccaaaaagcagcaggtttaagtaaacctgggggggtcgtttttaaacaggtaacagggcaaagtaaccaatcaggccgcccaacgatggcaaaatttttaacattggcaacaaataagttccattagcattgcctttgttaaagccaatttaaccaatggggtccacatttccaggcccg

SEQ ID NO: 175749 - DNA, 259 bp, Zea mays
  unsure (1)..(259): unsure at all n locations
  Clone ID: MRT4577_91877C.1
cactccattgaatattagagggtcaatgataaatcttgtgcttggaaatccacnnnngagnaactccactatacatgcccttatgcttaaatgttgaactatttagctctctaaaatctttgagaaggagtcgctcccttgcatagagtcgttttattccaattaactcaggaaccatacactacctataatatgcttaagaacgcgagtcgtaagatatgtcacatcagatttatatacatacttagcaggtatctct

SEQ ID NO: 175750 - DNA, 533 bp, Zea mays
  Clone ID: MRT4577_91878C.1
acgtcgaggcggcggacgagatgctgtacggggcgatgttcttcggcgacccgcccgcgcccctccccgacgagttcggcgacgtcggcgggctgttcgacggagaagggggcgaggaggacgccatgttcgcgggtctcggcgagctgcccgagtgcgccatggtgttccggcggcacgccggcgacgggatttcggtggcaggccgggtgaagtgaagtgaatcctgaattgaaggtcctgacatgtgggccggggcaggccggactccaataaaaaccagataaactcatgtagagctccttgatctatctacttttggcttttcttccgttcctcttgtcatcacctagcttttcttctttcatccttctctgattggttgtttatacacaaacacagacacgttagcagatctagttctagatcgcgattgcgtttgcacagagttgattcggtggacatcaggggtgggtttgagaaggacacgcggattttttttttctctcaaaaaaaaaaaaaaaaaagcgtat

SEQ ID NO: 175751 - DNA, 672 bp, Zea mays
  Clone ID: MRT4577_91879C.1
gccctctctcgagtttttttttttttttttttttttttttttttttttttttttgttttttttttttttttcaacaggccgggataaacgaaggggggttgtgatacctgcgtttcgctttttaaacccatagaaaaacgctgaaccggtattcaaaaccttcccaggggggcctgggggaatgcaacagcctaactcaggcggagctgttggcttgcttattcagcacgacaggctccaaatgtggggggggaaccgggggatttgctttggcaaaaacatggagggccctgaccccaataaccactttcccctacggggcccaattttgttcgttctttggcgaggtatggtccctgcggaggctaccctaacaaaactgtctcctttcttaaaacgccaactcctttttttatttagctgcaaccggccaatgatccctgcgaggctgagaacagtatgttaaaacccttattggccctaaagacgaccgggatctggctccttggtcgtttatcacgcttgggattgccctctccgttgttggcaaaagccatgatcgcctttcatgtggcgtgccatccttagggatgtagacgctactgccttgtcccgcgtgcaaacttgtaattcaaggccgaaggcacgtggtgtttcttgttccttcgaagc

SEQ ID NO: 175752 - DNA, 882 bp, Zea mays
  Clone ID: MRT4577_9187C.1
tttcccacgcgtccgcacacaccattcctgggcctgggcgacaaggccacacacgatcgccggcagtttccgaaacgagaaaaggaagaaacaggaggcgagagatcgagatcgatgagcagcggtcagtcgtcgccatgcccacatggcggcgcccggccgggagcgagcccctccaagaagctgtggcgcggggtgcaagccgtctacctcgtcctcgtcaagaagcaccagccgaagctcgccgcgttcggcgtccacatgcaccgcctcctctccagcagcaagcgccgccgccgccgccacctcgccgcgcgggggcgggagcagaacccggcgctgacgtacatgtcgtgccggtccatggaccccgctgccgcggtggtgcacccgtacccgcacagccacggccacggccgccggcgcgcgccgtcgaggtcgaggtcgaggtcgaggctcgcggccccgtcgtccctgtcgtgccggtccttggaccccgccgccgccgtgcgcagcaagtaccagtaccgtccccgcgaggtggagttcagctgcaagagcacgcctatgcacacacgccggcgccgcctgcgcctgcatcagggccgcggccacccgtcggagccggagccggagccggagcggcacgtctcgggcgcggcggtgacgatgctgttcgcgctcaaggacgacgtccaggtccaggaggcggcggacggcgatctggggctgggccttggcctggacgccccggcgccgcctcaagtgcggatcacgggctcgcccttcctggcgaaggaagaggacaataaccaggaattgaggagcgcggtgggagaggggcgcccgcgagttcaacaagtggttccacgagcagctgcg

SEQ ID NO: 175753 - DNA, 611 bp, Zea mays
  Clone ID: MRT4577_91880C.1
gggtacctcgaggccggccgagcatactcccatacctgattcacgaacagtcgacacacctgcctcctggtgggtgacaacgctcacaactcccccttcctcggtcgaggaggtatagatcgctgcctactaaatgctgatgcctatgaggatgcatgaagagattgaaataagatttgtggtacttgcaacactggtctactaacgaagtagcctacaacttcatgctcccgtaggggagacagtagaatgtgcattcccactacaagctcttgcaaatgatctaaataacgaagaatatgcttgactattagatatgaatgaagtcaactcctacactaagacataaaatggatatgcattactctcaccttctaacattcgagctctacagatatgatactaagctgactgtgcacaagtactgctcatcctcagtgccatgatgctgtaaatttatccttcccctaccataccttagggatcgagaacttgcatgctatctcatatgatctcgactcagtacacattgtatcagatctaccactctccacatatgacagtatccgacaacctatcaccttgcgacacagaggatgtaggcttacgca

SEQ ID NO: 175754 - DNA, 349 bp, Zea mays
  Clone ID: MRT4577_91881C.1
gcggccgggccggacgggccccaccgtacctgtttgcttgaagcccgaactccgatgtttagcggcacttgcctgcgggctccagccagagctagagggcgccctcccattgctgggcccggatgtggagggtgtgtgctctgcagctccccatctgggggcgggtgggcctctttttttttctctctctttactttcgggccctggcttgggatgtggccctctagccctggctggagctcccttgcgcgcgcggctcttcttccgcgcttccgccctgctgcctgccctggcgcttgggtctctccgcctgggcggccttttgggcggccccccctcctttctttgc

SEQ ID NO: 175755 - DNA, 543 bp, Zea mays
  Clone ID: MRT4577_91882C.1
acgccgcgcctcccggccgggttcctccccgtggtcccgccgcgcgtccctcctcctccacctcgcggtcgcgatcgcggggccggttatttcccgccctctgcgaccactcctcgccggctgcggtcgacgcgcttgcgctcctcgcctcgctcgcggcacttgcgttcctcgcagcgtcctgcgcgactgttggctgtgagaaatttggaatattggcacacccaacaacgctctttggtattgcagcatctcgaacgctgaacacgacagcatggcacctgtgacaactgacaatgccctgtcgtcgccgtcgagacccatggtgggtgccgttcttggagacccacctccattaccagctgtcgacgactctggagaagcggacgttactctccccatcgacgttgtgtatccctgcgagatgtcaagcaaatgaagttggtgatagtttgaatggtgtttgagaaatggagtcagctcccattggttaatgtcagacccgagaactagagtctattaaaatgtggttgaatgatgtct

SEQ ID NO: 175756 - DNA, 438 bp, Zea mays
  Clone ID: MRT4577_91883C.1
gcgggccggagcccccgggttgcttaaaaaaatcgtgcggggaaaaagcagggccggaaaggggtaaatggaagctggcgcaaatgtacatgaaaaaaaggggacgggtttgtgtcagcagcataaacctaccagccttgaaaacacggggccggaacccaccaaacagttggaggggagtaaaaacccatcttcttctccgctggaacgcccaccgccagaaggggtttggggaatctaatgaagaccccggccttggaattgggaaccaaccactgtgatgaaatcttttccagatccttcgagaggggctctggatgaaccccacccttaggtggggatacccgatttggcccacaacaccttgttgagccccgaaaagacggtgacgggccccattaagctggaatgccgcagtttttggaggaggacgggggg

SEQ ID NO: 175757 - DNA, 320 bp, Zea mays
  Clone ID: MRT4577_91884C.1
tgtttcagagcccagaggagggaggaggaggaagaagaaggacggaggaaggattgcatggattgctgtatttctctacttcatgttatctcagtacatgctgtcaagtaacgctatttgttcttcctgcctccaacgccccaaggtcttcatcgtctttctctacaggtatggtgagcacgatcaggactacttgtttggccgctctgtccagcctactctaggttcgcacaattggctgagaagacgcctgtgcgcaacttactgctatgttagcccggttgcaggttacctctttacaattctttcctttctccatc

SEQ ID NO: 175758 - DNA, 534 bp, Zea mays
  Clone ID: MRT4577_91885C.1
cagggaccgaaccggaatggccggatcgacccacacgaacaaacctccaaacaggaaaagaagaggaggagggaaggaggtctgaggggaagaacgcgcaccccccccacagagggaaaggaaaacaaaccaggaagcgcgccaaccgcaaccgaggcaaggagaagccagaccccagggaagaccccaaaaagcaagagaaacacaaccgacacacacaggcaacaaggcagacaagacagaacaaagcccgaaaggaagagaaaccaggaaccaaaccacaaaaaaaggaaacccgagaggcagcgaccaaaaaaagaaacccacacgaagaaaaaagaagccacgaggcacaagagaagaaaacaagagaacaacgcacacacaacaaaggaggggcccaacagccaaacgaaaaagcgagggagaaagccacacaagcaccggggccagaacaagaaaaagggcaacaaaaaagaagcaacaaaaaaaaaaaaaaaaagccagcaaaaaaagaaaaacaacagcagaacg

SEQ ID NO: 175759 - DNA, 217 bp, Zea mays
  unsure (1)..(217): unsure at all n locations
  Clone ID: MRT4577_91886C.1
accttggcttccgctcttttcccccctttccacaccgncctccgaacctggatgccattatgtatttacatacgcgcactttagcagagacttgaagatgtcaaaaaaactacatattccacagaaaacatgcagaactctgcccgcctctttacaaatccccctaagaaccctactatattacccacccctaccaatggctgggaacaaaacagag

SEQ ID NO: 175760 - DNA, 549 bp, Zea mays
  Clone ID: MRT4577_91887C.1
cgcatagctagcaccacaacctatcgtccttgtatatatagtactactaggctgtggtcaatgatggcgtgtccgagccaaggaagaagacagcagaagctagcaaacaacatgagtggtgccatggacatggtgcgagccgcgtgacccaaacaaactacatacgcctgcctagctaggagagagcagacattgagagctcagaagcgtgcgtgcacacgtaaggatcgatgtgctgaggaggaaaagagaaggagatcgaagggattattaaagttctgtcacgtctttttgctgccggctatcgatcatgtggagcctggtgcggcgatgactatgggggcggcggagccgtacggcacggttggtgaacgagagcgcgctcggcgcacacggcgatactgacggtggctccaccgctccggccgcggacggcatcggtggtggcacgacactgggtggccatctatctagtttgcttgttgtgatggttgtgccattttctttagtggcacgttcgttagctgttcgcagcaggcgtggaccgtc

SEQ ID NO: 175761 - DNA, 309 bp, Zea mays
  unsure (1)..(309): unsure at all n locations
  Clone ID: MRT4577_91888C.1
ccccttcacccctccaaaactcaaattgaccnancgagnaagcagaagaggcgaagagcganaacgaaccccncccacatcggaggccccaaancgccnggcgccgagaccacggcaggagaggngganacggcagcaggaggggaggaccnggagccgcgcngcgaccacaagcgagcgcagcccaggangacgnncagcgggggggggggcgacncgnggnggccgacancnccaaacaccgcaacaagcgaccaaaggcccacacccccacggaggaggaggggaagccggacgaggaggacgccg

SEQ ID NO: 175762 - DNA, 628 bp, Zea mays
  Clone ID: MRT4577_91889C.1
gccggccgggccggagctcttcactagtcgcgctgtcacggtgccgaacagcgtgtcatcgccttcccctccctacaagccaaacgcgaataccacccccgtgacttcccgatctccggcgatggccgcgcggcgcctcggatcccccgcatctaggtggctgcgcccgtctccgccaaggactatcccagcgtcgccaagaagggcaaggtcgatatgatggaattggagctgaagaagctagaggaaactataaaaaatatacatgaagagatgctttatctgcgtgaaagggaagaggaaatgcaggacgtgaacaggcgaacgaactcaaggatggcttggctagggttcctctcccttggcgtctgcttatcagtggcaggtttgcagctgtggcacctgaagaccttctttgaaaggaagaagttgttgtagactgtagttggcccatggttcacggtagacctcagcgcaggtgtaacctatttttgggtgaactgccgatctgttacggagcttgaaatcccatgtaacaaacggtatgtcgtacttgagaaaatatgctttagcctgtcccagttgaattctaagaaacttgaaaaaaaaaaaaaaaaaaggcccccta

SEQ ID NO: 175763 - DNA, 177 bp, Zea mays
  Clone ID: MRT4577_9188C.1
taccgtccgattcccgtcgcccacgcgtcgcccaccgtcgcccaccgtcgcggaccgtggggtctaggttaggctagggtgcgaccagctagcggaaatgggccttcagtccatcagtaccaggtgggggcgcgcgctgcaccccgcatacaccagactaccgatgaagcttgccac

SEQ ID NO: 175764 - DNA, 471 bp, Zea mays
  Clone ID: MRT4577_91893C.1
aacagggggaaaaacaggggtattcgagggggttaaaaacgaactttaacattttttgggttttttaaacaaacaggccaaacaacaccccttaataggaaaccacccgggcctcaaacagaaacagccctagttgggggggggcccaaaacaggggcatcccttttttaaaaatcaggggccccccccccccgggggatttacgggaagaagacgtttttccctcccccggtaacggggagtaaaaaaaaaccgggaccaaaacctttgtaaaacagggccaatggccgggggggcctttttggtccaaccccccttaaaccccttaactggtggtgaagggggcgggctccccccatcctggggggggggccccggttgggcccggccgggtgttttagggggccaacgaactgatcaccccccaggcgaacacaggggggcccctcgggggcccgggggggtgggccc

SEQ ID NO: 175765 - DNA, 970 bp, Zea mays
  Clone ID: MRT4577_91894C.1
ctcagcagctaaatatagaagcctgcgaagcttcaccagacaattctagcactttggctaggatggacacgtttttcagaaatgcatgccagtcttcttgtgagggtataatgttaaagactttggatgtcgatgctggatactctgcttccaaacgctgtgattcatggttaaaggtcaagcgtgactatgtgcaaggcttaggtgatagccttgacttggttccaattggtgcatggtatggaaacggacgtaaagctgggtggtacagcccttttctcatggcatgctacaaccctgaaactgaagagttccaaagtgtatgtcgtgttatgtctggtttctcggatgagttctataaagagatgaaggagttctattcgggggaaaggatactgcccaagaagcctgtttactacaaaacagacgagcaaccagagctgtggttcaccgcagaacaaatctgggagatccgaggtgcagacctgacgttgtcccctgtccaccatgcggccattgggcttgtccatccatcgcgcggcatctcggtgaggatgccccggtacatccgttcagttccagaccggagcccagaggactgcggcacggccgccgatattgctagcatgttcaaagcccagacccggaagatggatgtcagcagcgagggccaggagtagtagggatgcaaagctcggcccatttcctcgtcctagctttgcttatgttcaccagttctgtatatacacagaacgaaccagggtgaagtgaaccaccctactggtcaaatggtgaaaactgaagcgtaggacaggcagcactgatcccactggctttcagtttttctttgtacagaaactgaatgcagttggaacacggaaggaagcccacgagttgcacgttcgggggggaaaaacaatgcataagtacatcaggtatcagcttgctttgtaaaaaaaaaaaaacacaa

SEQ ID NO: 175766 - DNA, 383 bp, Zea mays
  Clone ID: MRT4577_91895C.1
aaaaccaaaactttattatgaggcatatattatggggcataccacacatgataagggggggggtcttactgcattattacatatatagatagagggggggggatagaggagatttcccaaatatcatgaatcagtagtaggggggaagggcagcggaaaccccacaggggtgggggcggaagctgggcagctggtactggtactggaagagtccacccatggccgggatgttctgcgccatcatcatggccatgggggggagaccctgggctgccagcagctgctgttgctgctgaataagagctggctcgtacaggttggtgttggggggagcggcacgctaaagctgaataaacatctgaagctgatgcgcgacggactgc

SEQ ID NO: 175767 - DNA, 476 bp, Zea mays
  Clone ID: MRT4577_91896C.1
gagcccttaaaaaaaaaaaagagggcccaaaccacccggggggcacccaagccccaaaacaaccaggacgggaaccagaaagggttggacaaaggaaagcaaaaaggaaagggggaaaaaaattttcacccgaaggccccccccccaaaaaaaaaaaaaacggggggccctaaaaaaacaacaacccaggtggggggattgggcaaaaaaaaccccaaaggggggaaaagaggggggaccccaaagccggttaaactaaaaatgaaaaacaacagggcctggcaccccctttggcccccaggaattaacaacctgggaaagcccaacaaagggggaaaactttccaggggagctattctttgacaaaaggccccaaacaaccgggacaggaaaaccaatcccccgggtatttttaaacgcaaaaaccccacgtttaaacgggggaaagccaaatgggggaggggtaccaaacaaaa

SEQ ID NO: 175768 - DNA, 490 bp, Zea mays
  Clone ID: MRT4577_91897C.1
gttgattcctttgtttttttttttttttttgcatgttatatttacttttttttttatttacgctagtagaacgctttgttctataacagtagatcggaaacggcacggcgcccccgcccctgctctgaaccaggtccacggactgggacacgacacgcgtcttttgcccggatgcaccttcgacccatagaaagaaagggagagctgctccttctcggcgagcatggtgcgcagcacgaggcccgggtcgtcagagagcttggctaggaacgcgatgatctgggccgcccggttatgggcggggcgcatgctgttttttatgagaaggagctcgtcctacacgccgcgctgttgctcccgcaggcgctgcaaggcccggatggtcccgcgcacctcctccccgggctggcacagctgcgggcccccggcggcggaggtgccccccttcctcctcttgcgcaccaccaggggtttcaggcgcgcgtgggcc

SEQ ID NO: 175769 - DNA, 329 bp, Zea mays
  Clone ID: MRT4577_91898C.1
cccacgcgtccgctctcgcggcgggttacacattgctctcaggcgcacaggagactactaggctagttagctaccggcagcgcctcctaggtgaatactgagatgtaagcaatgcacatgtgcttctacaagcacgcaagaaagagcgggagcctctacaaaaatgagggagggaggcatttataacccttgaaaccgacacaagtagcgtgcggctggctgggggcctgcaggccttacagctgggggaatactactacacgacgacagtggggtgaagcacggaccagctataggtgaccatggacaacatggaggatactaaaaac

SEQ ID NO: 175770 - DNA, 492 bp, Zea mays
  Clone ID: MRT4577_91899C.1
gaatatatatgtgtataagtaacaggacaatacaaacacgaaaggtagaatattggatcaaagcaaaaatcaccttgatccagggaaggtttgtcagggccgagggtggactgagttccgccgacaggacttcttggttgatggtaactgaacgtgagtaacggactcttagttttaagccctcacctccacttccttacatatcggggagttggaataaagaaattgtgtccacgctaaaaaaaagaagaagaagaaaagaaagaaaaaatatgtaaaatgttatacccttcaagaacctcatgaaacctgcatagcctccgtataagccgagactatgtgccaaggctggataaaaaaaatcatttatatatgcgaatttccatacgaatcaagtgccccaatatgtgtcctaaaaaatggagagatcgtaaaaaaaaagatcttaagttttgagatccgggatcccgccaaaaaaaaaaaatttaaaaa

SEQ ID NO: 175771 - DNA, 366 bp, Zea mays
  Clone ID: MRT4577_9189C.1
gtaccgcgcctaattcccgaatatgacagctctttttcttttcggaacgttggcttacacaccggctggagtgaacaactattagggaccctacttaaaccacttgacagaaaaggcattgtaattatgtgagctgataaaaacacaccctaaccaaaaccaaccaacacacacttgtgtgaaaggtgctatataattgtcacgcattaaacatactatatattacgccatgataagaacagtttccctgcattgccaccaaaatgataaaatctcatgaaataaataaaaatttaggtgatgggcagatccttttctttaaaatagaaaaagttaaaactcttagtagtacataaatcagatctt

SEQ ID NO: 175772 - DNA, 448 bp, Zea mays
  unsure (1)..(448): unsure at all n locations
  Clone ID: MRT4577_918C.1
acttctacaccccgggtgcgtgcctaaaaaccatcaaggcgtacccaggcttggcccatggcgggtcncangtgcagggcaagcgcgagatctcctccttcttcgcgcacgccacgcacgagaccgggcatttctgctacatcagcgagatcaacaagagcaacggggtggtgcnacccnaccaanangcagtggccttacaccccggggcanaagtactacgggcgctgccctctgcagatctcgtggaactacaactactggcccgcggggagggccatcngcttcgacgggctcngggaccccngcagggtggcccgggactccttggtggcgttcaaggcggcgctcttgttctttatgaacagcgtgcacggggtggggccccaagggttcggcgccaccaccagggccatcaacggcgccctcgagtgcggcgggaacaacc

SEQ ID NO: 175773 - DNA, 216 bp, Zea mays
  Clone ID: MRT4577_91900C.1
tacgcgacgattgcctggacagtgcctgcgattttttccgcgatactcctgactctcatgtgggggctgaccgttaagcaggaagagccaaaggccatggattcgaaagcttctactcctggagctttattctacatgatctcgataacatcatcggccaatagctagacagacagcacgtaagctgtgcaccgaggcacgtccatcggcgttcga

SEQ ID NO: 175774 - DNA, 2352 bp, Zea mays
  Clone ID: MRT4577_91901C.1
cattggcgacctcgaggccggccgggactctcgctttcttctgtctcgcctcgccctcgcctttgttgatcttttcctctctcgcgttcccctcgccttcctcttcctcccccacacccaccggtcgccgcccccgtcgccccgtcctcctcggtccagagacgagggggtccgcgccgttccgacgccacaccgcaaccgcatcacatcacacaccgcctgctcccaccgtccgtccgccctccctcgatcgcgccccccggatcgctggtacctccgcgcgcggctccgacctcatcttcctccatcgactggcatcggcagcggcggcgtgttcccggccagccttcgaaagggtaatcaatcgccagacttttgggagctctgttgggggggaccggggggaagagccaagttactgcagaggctaacatttcggttgtcgagtgatggcgcaaggcatcaacttccctgacttcatcggcgccgtgggtggccatgatggtggtgtggactttggtgggaacttctgtgacatggccttctaccagaagctaggggagggcaccaacatgtcggtcgacagcctcaacagcatgcagaccagcatgcatggggggtccatcgccatgtctgtggacaacaacagcagcgttggctctaacagtgactcccgcactggcatgcttggtcatcctggtctcaaggggcctgccattgtgggaagctactcggttgggcacagcatcttccgccctggccgggtgtcccacgccttgagtgaggatgcgctggcacatgctctgatggacaataagttcccaactgagacactcaaggattatgaggagtggactattgatctggggaagctgcacttgggaatgccctttgcacaaggtgcctttgggaagctctacaggggaacatacaatgggatggatgttgctattaagcttttggagcgacctgaggctgaccctgagaaagctcaactgttagagcagcagtttgtccaagaagttatgatgcttgcaacactgaggcacccgaatattgtcaagttcattggtgcgtgcaggaagccattggtttggtgtattgtgacggagtatgcaaagggtggatctctcaagaatttcttgagcaagaggcagaacaggtctgtcccgctgaagttggcagtcaagcaggcattggatgttgcacgtggcatggcctatgtccatggccttgggttcattcatagagatcttaagtcggacaacctcctgatttctggtgataagtccattaagattgctgactttggagtggctaggattgaagtcaagactgaggggatgacacctgaaactggaacataccgctggatggctcctgaaatgatccagcataggccatacaaccagaaagttgatgtctacagttttgccattgtcctgtgggagttagtgactgggaatgtcccctttgcaaacatgagcgcagtgcaagctgcatttgctgtggttaacaagggcgtgcgaccagccataccccacgactgcctccctgcccttgcggagatcatgaccatgtgctgggacacaaaccctgaagtccgtcccccattcgctgagattgtgaggatgctggagcaggtggaggtggaggttctgaccactgtccgtaaggctcgcttccgctgttgcatcgcccaaccgatgacgctggactgacggactgagtcgtccgcaatccaggaaaagaacctggagaggggtttaatcctatgtgtttataatcccaatagacttgtgcttcagaaacagaaggctgactcctcagtctgcccttctgtctttgacatgttatcgtagagtacacctagctgtcgtcaccagtggttgtaatagaggtagctttatgcttgactaaatacccttccgttataacaagtgcatgctcttgctgctcgctgttatgcgtgtttatcatcatgcggcaacatgtgggagctttgcttcatggtatatataatatgttttattagtaactagcatggatttgctgcaaaaaaaaaaaaaaaaaagcggcccatgcgctcgcgacagatgacttatcatcccaacaacctcactcatgcgcatgtattcaaattaatactatattaccatgtgctagtgcttgttgtccgtcgacaagcaaatcttcttttgagctagaacttgcagaaacaaatgctgatacctatcaagagctcaaggaagaaaatgaaaggcctacaatgagcttgacacaactaaaagggaagtgcattgctcaaccttctccagataaccatgatcacatgccgaaaagcttgaaacg

SEQ ID NO: 175775 - DNA, 270 bp, Zea mays
  Clone ID: MRT4577_91902C.1
ttaaaaatgtaaaatgcgggaaatttttgattgttacagcgtgccctaaaagatttcaggacataacctcagtagggcttgttcatatgtagaacgtgcctgacatgtcataaggctcatgaaacatgggaaatttaagaccaaaaatatttcataggcttattggaagttgttcgaaacctggactgtagcaccagttaaaatgtaacattttcttataaaaataataatttgtcatcagcaatattggacggtagtaccccttttaag

SEQ ID NO: 175776 - DNA, 667 bp, Zea mays
  unsure (1)..(667): unsure at all n locations
  Clone ID: MRT4577_91903C.1
cctgtccgggaaaaaaaaaaaaaaaaaaagttgatcttttcctctctcgcgttcccctcgccttcctcttcctcccccacacccaccggtcgccgcccccgtcgccccgtcctcctcggtccagagacgagggggtccgcgccgttccgacgccacaccgcaaccgcatcacatcacacaccgcctgctcccaccgtccgtccgccctccctcgatcgcgccccccggatcgctggtacctccgcgcgcggctccgacctcatcttcctccatcgactggcatcggcagcggcggcgtgttcccggccagccttcgaaaggatggcaccaattcaccccaaatcaccagtcactgaccagtgggaccaggtaatcaatcgccagacttttgggagctctgttgggggggaccggngggaagagccaagttactgcagaggctaacatttcggttgtcgagtgatggcgcaaggcatcaacttccctgacttcatcggcgccgtgggtggccatgatggtggtgtggactttggtgggaacttctgtgacatggccttctaccagaagctaggggagggcaccaacatggtcggtcgacagccttaacagcatgcagaccagcatgcatggggggtccatcgccatgtctgtggacaaaacagcagcg

SEQ ID NO: 175777 - DNA, 500 bp, Zea mays
  Clone ID: MRT4577_91904C.1
cccacgcgtccgccgaatattgtcaagttcattggtgcgtgcaggaagccattggtttggtgtattgtgacggagtatgcgaagggtggatctctcaagaatttcttgagcaagaggcagaacaggtctgtcccgctgaagttggcagtcaagcaggcattggatgttgcacgtggcatggcctatgtccatggccttgggttcattcatagagatcttaagtcggacaacctcctgatttctggtgataagtccattaagattgctgactttggagtggctaggattgaagtcaagactgaggggatgacacctgaaactggaacataccgctggatggctccttgagaagtggcagttaagaagaggtggagcaatatgggacgaaggaagctttggtctcatttggttccatgaactagacccaacaatgatcgtggtcccaaccacgatggcaacgacgatgaccagagaggagccgacgaatggaagatggacat

SEQ ID NO: 175778 - DNA, 352 bp, Zea mays
  Clone ID: MRT4577_91905C.1
gggcccctacaaaaaacatgcattattaaagggaccgccaccccacgggggttttttaaacaacacatcgaaggccaaatttttgggggggggctaacaacaaatttgaactacggggaaacaaaccccccaaggggtctgaaaagacccaaagtaaaattgccaaaaaaatcagttaaaacgggccccaaggttttttttttttaacacctttccaagagctaaaattttggaaggaaactcgaccccctcctgtttaaacccctggaccttggcccccgggggttgccccctggcaaccctggcaatggcctggttcttctgggccgacccccccttgaaaaacaccccg

SEQ ID NO: 175779 - DNA, 495 bp, Zea mays
  Clone ID: MRT4577_91906C.1
aaaacaacaagggcggggtttcccaaattcccgggacccacccccgggctttttcccccgaaattccccttttcaaaaaagccccccggaaacccccaaaaaaaaaaaaaaaaaacctttaaaaacccccccccaaaaataaaaccccccttccccggcccccaaaggggggcccggaatgacctaaaatccgggcggaaaaacccccgccccaaggggcggggttgggaaaacgggtacccaagggccttggccttggggttccccccctgggccgaggacccccccccccccttgtcccaaagggccccgtcctggaaaaccaaccccctgggggggacccccccccggaaaacccccccccccggggttttccccccccccttgatgtttttgaagggaaggtctttggaagcccccccggcccccttcttgtgcccccaatttaaaaagggcccccccctccaacccaaaaaaagggggttcccccccccc

SEQ ID NO: 175780 - DNA, 1537 bp, Zea mays
  Clone ID: MRT4577_91907C.1
gggtacctcgaggccggccaggccgggaagtgaccaatccaactccaactccaagtctccacgagacgtacacaggaacagggcaggcggcaggaggctagggctaggcttcgacttggagccttcgacgctggacggtggcacggcgccgaggccgaccgcgagcgacgagtccgccaccgccgaccggtctctctccgccacgcggccctctgcctcagtcccttcgacagcgccaccgcgccgtcctggatctggaagcgggtgtgatgactgacgagcaccgacggccagcgcggcttctcctccaatctctgggctccggcgacaagcacaccaggttagattgctaagtgatggaacctttatcggttcattcagttgcgtcagcaaaacggaggagcgaaagagacgatactgattcagagagcaactcattcgacaagaatgatgacatgtctgaggatgagatgacagtgctaggtgggagaaatgagatgatgtaggaacaagatgaagaggatgatgttgaaaacatttcatttctacgctacagccagctgtggggtattttctccaggtcgctttccttcacacttcgctctttccttccaagagcaataccaaatttaccaatctactaccaagtagttccgtttcagttttgacttttgacagtgcctaggctatactgaatactggttggttccataacgcatgtcagattcttcagcccagtggggatgactccagtggtcgcgctgctcggatttggcctcttcgaaagaagtttccctgtggtaccactcgctttgtcccgatccccatttcgtgttcccaacgtgggtatgctgacggggaatggcttgctcatccgattgatgtctgataattgcatcaggttgggagatgcgttgagattggcctgccaatgctgatcctctttgtcgtgctgtctcaggtccgactggcaaaaaaaaaaaaactctagattattcagttctctctacgcaccaaattcatgatcttggcgagtttaagcgtacctgatctctgcatttcggttgtttcgcagtatctgaagaacatacagataaaagaaatccccatactgggaaaggttctcccttttcatctgtgtcgcgttggtatggggcgtacgctcagatcctcacttcaggtggagcctataagaacagcgccgaggtcacccagaacaactgccgcaccgacagagccaatctcatctcttctgccccatggtcagtacccttgccaacatcatgttaagtgtacggtggaatttatttatattggattgtcatttggtataattgatccattgacttcgcacaggattaagatcccctacccactgcaatggggtgcgccgaccttcaacgccggccagtcatttgggattgtgtctgctgttttggtctcgctggtagaggtgatgatcagcagcctcggatccttattttgctttggaatcccattcgggagcgggaccaaactgaccttaacgcaatgtgcc

SEQ ID NO: 175781 - DNA, 553 bp, Zea mays
  unsure (1)..(553): unsure at all n locations
  Clone ID: MRT4577_91908C.1
gggttgtgaagatgctggagcaggtggaggtggaggttctgaccactgtccgtaagggtcgcttccgctgttgcatcgcccaaccgatgacgctggactgacggactgagtcgtccgcaatccaggaaaagaacctggagaggggtttaatcctatgtgtttataatcccaatagacttgtgcttcagaaacagaaggctgactcctcagtctgctcctcagtctgccttctgtctttgacatgttatcgtagagtacacctagctgtcgtcaccagtggttgtaatagaggtagctttatgcttgactaaatacccttccgttataacaagtgcatgctcttgctgctcgctgttatgtgtaaaaaaaaaaaaaacttcaaaaaaaaaaaaaaaaaaaaaaaaaaaaaaaaaaaaaaaaaaaaaaaaaaaaaaaaaaaaaaaaaaaaagaaaaacataaaaaaaaaccaaannnnacaaacagggggatccaacttcnnnacccccctttagggacacctaaaattaaattatagggtcggtgaatttcaac

SEQ ID NO: 175782 - DNA, 157 bp, Zea mays
  Clone ID: MRT4577_91909C.1
tcgaaaacagatcaattctaacagtttgcctgtgtagccagcccacccaatcgaagaggaggatagtgtgcgtgaggactcagatgtggaccttgcgtacctgtgtgggtactgtggggaaagctatgctaatggagagttgtggatctggtgcgat

SEQ ID NO: 175783 - DNA, 1326 bp, Zea mays
  Clone ID: MRT4577_9190C.1
ccgggggaacgaccacgcaggggaaaaaactcgcctttttctctctgctggttcaagaacgccatggaaaatctcgagcgctcgctgtgattcctgcgaatacccaagcccaaccaaaccctagcccggcagccattctcttcgttccctctttgctctgcgcgccacaccgcacgacctccccgaagcagacgtgcccgctgcccgtccgtcccccgtggccatggccgcgacgtggtcttcgtcttgctgcgccgcgaccgcgtcgagcagcgctctgcttcgtcatgcccgcgtcaagagcgcgccttgggtagccggtgccagccggagtagctacaggcagcggcggcggcggcgggagctgtccatccgcgccacggccgcggcgccgccgcccgtggtctacgcggacgccggcgccggcgccggcgccgacaacgtggcctcgctgaagatcaagctcctgagcgcggtgtccgggctgaaccgtggcctggcagcgagccaggaggacctggaccgcgcggacgcggcggcgcgggagctggaggcggcggcggggtgccccgtcgacctcagcagggacctcgataagctgcagggcccggtggcggctgctgtacagcagcgcgttctcttcgcggacgctcggcggcagccgccctggcccgcccaccggccgcctcctccccatcacgcttcggccaggtgttccagcggatcgacgtggtgagccgcgacttcgacaacatcgtggagctggagctcggcgcgccgtggcctctgccgccgctcgaggccacggcgacgctggcgcacaagttcgagatcatcgggacctcgggcatcaagatcacgttcgagaagacgacggtgaagaccaagggcaacctgtcgcagcttcctccgctggaggtgccccgcatcccggacaacctccggccgccgtccaacaccgggagcggcgagttcgaggtgacctacctcgacgacgacacgcgcgtcacccgcggggacaggggggagctcagggtgtttgtcatcgcgtgacctgatcgcgcttgcggcgccgttctgctggtccgtgagattgccatccttcttcctccctgttgctccagtagatttgttggtttcttcgtctgaccaatgtataccgttctgttcttccgtgaactgaatctgcgattaacttagtaactatcttgtgtggtttacatgcttgctccgtccttatttactttgttaatttataatttgaactgattgccttgcaaattgcccctctaagaaacagggaaggtagcggagctgattggtatt

SEQ ID NO: 175784 - DNA, 334 bp, Zea mays
  Clone ID: MRT4577_91910C.1
actcctatgggcaattgggatcctcgaggccggccggggtctcattcgtcctgccacactgagatatgcaccttccgcagaatctaactaacatggaagcatgaaccgctaaccttatatactactgaaacttccaaattctagtatatgtattccttttgaacggcctcatgatcgaattccaaagagcgtaaaacaagcaacaggtgatatatgacatgccatgtttagcaaggatattcttttcactgaaggactgtgtccatatatgcaccactaaatatacatatcatttactttcctagaggaaaaactacaaaaaacatgtggggac

SEQ ID NO: 175785 - DNA, 640 bp, Zea mays
  Clone ID: MRT4577_91911C.1
agctgggctacagacctgctcactacctacacggaccctgttcactgacgtgaggcgagtatttcgtcatccctaactctatctaccgccatggcgatatctgactcaacagctgatttggccctgtctctggctctcccctgcgcttggctttttctccgctctattctggtgcctttactcaccatcactggcggggtctataccaacattcagagctcgcaggatatgcgagacatgatcagaatcatatcccacctacgggagtacgagttccgcatcgaccatgtacacgcattgtactcgcacgctcctctgcatgctactacacgtaccgctgacaggtattataggatggatactgatctaaagtcgtgctcttcttacgctgcgaagcatctgacgttaatgatgtgtggatcatcaactcttccttccccacttatgaagagccgcgacgaagagacacgccatctgcttttggaacgctatgacatgactgagtttgtcatgatactgattaatacattgcatggcatccgaatagaaggtacagttgataaacctcttccactgcttgaggactacatcattatgcaggacgccgctgacactacaactggagttgcacagctctgca

SEQ ID NO: 175786 - DNA, 196 bp, Zea mays
  Clone ID: MRT4577_91912C.1
attaatccttgtatagaacaatcttatttattaccaaaaggtctctgataacctggggcggggcttcaagctccttgtcttcctcaacctacaagtgctcaacgaaatacacatcccttcagtaaactacaacttccgtcacacctaactatatgattctgatgtattcggagaacaatgcctggcacgaattcat

SEQ ID NO: 175787 - DNA, 260 bp, Zea mays
  Clone ID: MRT4577_91913C.1
acgttcccttccttttttttctttcctttatctatatttttttgggtggttaatttatccaagggggcatgccaacacaaagagtcgctgggaataaacccggaaatccgaactgaaacactgcggctgaccagatatcaaaataccgggtaagaccaaagctcggcgtcaccgtgcccatagaggtttaaaaagggcaaccgcaaggccaggaccgaattatagaaaaccacaccaatttacaaatagttgccggataa

SEQ ID NO: 175788 - DNA, 288 bp, Zea mays
  Clone ID: MRT4577_91914C.1
acatgacggcagccagaccctcgttcaccgggacatcactgtccaacagcatacctgctacgagtccggaattacgagccccggctctctgatttcggcaccgccaagctgctcggctctgcttctaccaactggacttctgtagcaggcatcatatggctacatggctccagaactggcatacacaatgaacagtcacagagacatgcgacgtgtacagcttcggggtggtcgctctggaggtgatgatggggaagcatctggcgatctcttgtcctcgctgccggc

SEQ ID NO: 175789 - DNA, 1035 bp, Zea mays
  Clone ID: MRT4577_91915C.1
ccggccgggccgggaggtggtcccggcccgtcatcagctccggcagaagggtgggagtacggcaaaaggcctgcctctctgcgactgatctccggcggcgaggcgccgcaccggggtatgggccaggatgtggtcgcgcacgtctacgacgtcgccaccgccggctccgacaccaccgtgctccacatcaaccgcttctttaaggacgccatcggcctcggcggcatcttccacaccgccatccaggtcatccgtttctccaaatcccaccaccattttttgaatgcctgcaacgcccgcaaagattggatctcgacgccagcggtttagtgttcgagagaatcgtttcttttatatatagtggcgttggttaatgcgtccaatcagtttttaacccccaaatcttaattcaatgctgttgctactgaatgaatgggggcgattatctttttattgctcctgtgaataatctaacttgatctttccttgggattgacaaactgtgcttctgatacgtgtatgtaactgctagccatagttaccatttagcctgataccgtgcccctggaagagggtgtgacttcaaagttcaaactgtaattctcaatgggagcttggagatttcctatgaggccactagggttgaatgcagccttgtggtaaaagagatccctgtatcgtcctaaggatgatgccacggattgtgaaagaaaaaaactctttattctttatagccattctgctccttgttctgcgaactgcttgttaggctgctttactgctctagaatgggcactgattattaggctcgtttactgctctctttaacgaaaaatgtgtagattcatcccacaaaactagtcctttatggtatcaatgagcttatttgtgattggattcctagcaactggctaatcattagtaggtgcttatagttgaggctctgttgtgatcaactcctgagcatctcggctaacaggtctacggtgatgaagaatggtcctttggctactgtgaacgtggcacttggggttt

SEQ ID NO: 175790 - DNA, 478 bp, Zea mays
  Clone ID: MRT4577_91916C.1
agcagtggtaacaacgcagagtactttttttttttttttttttttttttttaagtaaaagacgcatcatgttttactgctactagagaggagcacaaactgagtattgctgttaattagggcaacatatttaaaatccctttggataaagaagtttgaggaacgtcggctagacttaataatagaataataggcaatagttctagaattcggtgtcagagccggtcctgaaccgctcaggtcttgtttgtaaagattatgtccaaatacatatatgttgcatatacatatctatttttgttcttttgttgtgtctctgattttttagcaatcatctcttcgagcgcaacagtctgtttatgacgaatactaactattgattgtcatggaaaggacgaaagatattgcccccccactttaggatgcaaccacctgaataaggaaaaatttaataaactttagtgaaaaatatgttaaaa

SEQ ID NO: 175791 - DNA, 231 bp, Zea mays
  Clone ID: MRT4577_91917C.1
gtgtcacagcgctgcttgcttgcttgcgatcgggcttggatttggggagcatcatggaagcctaggtcttgttccacagctggagggcgcacagagttcgcgtacgcggagctatgaggaggacatcggctcggccgacgggttccgaacccccgtccacgtcgacgtcgagggagtctgctggctcgtaggcggactcgacgacgacgctagctcctctggttctggctc

SEQ ID NO: 175792 - DNA, 561 bp, Zea mays
  unsure (1)..(561): unsure at all n locations
  Clone ID: MRT4577_91918C.1
gcgtccggcgaananaagagagagccaaaacagtcctcttccaacaaccgaacccctccgagccatgaccatgacgatatcagcatacagagcaccgagtcggagactcttgagggcctcgataaccacaataccgagaaattggcagagcgccacatgatgtatcagcaactcaagctgacgagacgataatgggtgaccccgagagcatgaccagagtgccaagcggtccagcatacagcgttttctcaaagaacacaaaaagatggattctagctttggtcactgcagccagcttcgtctcacctatgacggccaacatatatttccccgctattccccctatagcccaagatttgaacatatctgtgtcacttgtcaacctcaccttgacgtcgtatatgatttttcagggactttcaccaacgatatttggcgacttcggtgacatggccgggcgtcgacccgcctatatactggccttcttgatttatatatgtgcaaacattggtttggccctgcaacgtaactttgttgcgctactgatccttcgttgtgttc

SEQ ID NO: 175793 - DNA, 404 bp, Zea mays
  Clone ID: MRT4577_91919C.1
ctcgagccgcgcatgtgtggcagatcagcctcgtcaccctggccatcggtccggggatcggcatcgccggcggcacctacgcctacgtcaccatcggcctcatggcccgcgtgcgcaagtcctacgtcaaggctggcgagatcgccgaggaggtgatcggcaacgtgcggacggtgcatgcgttcgtcggcgatgagaaggccgtgaggtcgtaccgggaggcgcttctgaggacgtacaagtacggcaagaggggcgggctcgccaagggcctcggcctcggctccatgcactctgtgcttttcctctcgtgggcgctgctcatctggttcaccagcgtcgtcgtccacaagcggatatccaatggcggcgagtgcttcaccaccatgctcaacgtcgtcatc

SEQ ID NO: 175794 - DNA, 215 bp, Zea mays
  Clone ID: MRT4577_9191C.1
ggcggggcccaaaaggaaaaaaattggtagaattttgaaaagtttcaaatgggaccggtacaattgttgataaacaagcccgtatagtgcaaatttattggggaaaaaaaaccaggctagtgttccttttttttttattttcaaaggaaaaaagaaacgggtcaggaagaacctttctaaataaggtaacttaggaacaaatcagggaaccttaa

SEQ ID NO: 175795 - DNA, 430 bp, Zea mays
  Clone ID: MRT4577_91920C.1
attttcccgtagacaacagtatggcatgcgagatcttcgagagctctcttacctttcactcgggggcagagattgcaactcttctcgaattcctgtccgatggattaaacgatgctaccgatggtataggcttacattcaactgtcaaggtagcaaactggagaggcatgccctttgccattggcatttatggattttgctactctgggcatcccttatttccaaatatctaccaacaaaagtccgatcgctctaagttcactaaggcactgctcatatgttttgcaatatgcacagctatgcatgcatcttatgctgacataagcctttctcctgtctggagagaacatattatccccacacactttaacaattcaaaagcatccgattgactcaacagctgcactatggaccacgacgaacctccctt

SEQ ID NO: 175796 - DNA, 368 bp, Zea mays
  Clone ID: MRT4577_91921C.1
caagaacgtgaccgagaaaaactgtacatactgggataaggctgatgggaaacattacagacaatcattggttcgcttctaatgttgatggaatttctaaaccagatgtactgtgacaaaaatatgagtcggtctcaaaccgcgttaaacaccccagaccagttccgggggctgtcagttaacctctgaacgctaaagttgctgtcatatggcacaaaataggattagcatgaacaaaccaatgacaaggaagacccacatcgcggtctcagatgagatcacagactgtgtttgtcagctctaatgtctatagctttccaccgagaccagcagtcctgagcttcacgtcaacatggtctggaggatgg

SEQ ID NO: 175797 - DNA, 2213 bp, Zea mays
  Clone ID: MRT4577_91922C.1
ggatggctttcatttcaaatcccctttctctctctactcccgtctctcgtaattgcgtccggggcgactgttgttgaaagagcaaatcaaaccaacccatcgaaaaccaaaatccccgcacgagctccggtttcaaattccctcggcagagctcgccgccgggcatggatgcggcgcgggagtccatggcggcgctcctcgacgccggcctcttcggccccgcccaaacgctggggtgtttccttgtgtcgtcagctggtgcgggcaacgatgctggtatgtccatgaaggtggaaagcctggtccagcatggggatgctttgtatggagagaaagaattccgcagggcactgaatgcgtacaagcaagctatgcaatatagtagaagtatccctaggcaagcaacaagtaacaccagaagttcagtatccgtcacaggccggtcaccttctccaaactcttcaaatctcttatcattcaatgaaaatgaggtgaagttcaagattgctctttgccattctgctctatgtgagcaccgtgaagcacttcatgagatggaaggtattccttcaaaagtgagaacactgaaaatgaatatgatgttagggaagctttatcgaatatcaagaaatagccgtacagctgtagtctgttataaggagtgcttgaggcaatgcccttatgttttcgaagctatcacagctttggcggaaatggggctttcagcaaaggaattttctttattattttcacaagcaccaaatagaggaggcaagctatcgggtgacttcgtagacacacaacgttggtggagtcggtatgttgaggcgcagtgttgcattgcttcacatgattataaaggtggccttgacatatatctagaactaatgcaacgattccccaataatgtgcatatcttgttggaaattgctaaggttgaagccatcataggcaggaatgatgaagcgataatgaactttgagaaggtccggctgattgatccaaacattatgacatatatggatgaatatgcaattcttctaaagtcaaaatctgactacatcagactgaataagttggtacatgatatgctacatattgaccctgcaagaccagagacatgtgttgctcttgcagcaatgtgggaaagaaaggatgaaagaaaagctttgacatatgcagaaaagagccttcgagttgatgacagacatataactggctatataatgaagggcaatctgcatctttcattgaatcgaccagatttggcagtgacagacttcaggggggctcaagaattgagggctgatcttcgttcttatcaaggattggtgcgtgcttatctagcactttctaaatgcaaagatgcattattcactgcacgcgaggcgatgaaggttatgcatcagtctgcaaaagctcttaagctagttggtgatgttcatgcaattagttccagtgggagggagaaggcaagaaagttctatgaatcagccattcgtcttgaacctggatttcttggagctgcactggctctggctgatctgcatgttgcggaaggacggaataaggaggctgttatgctactggaaagatatatacaacaatggtcagatgattctctacacataaaggtggctcaagtacatgcggcaacaaatatgctttcggatgcactttcccattatcaatctgcactaagaataaacccacaaaatgaagctgcaaagaatggattggagcgcttggagaaacaaatgaagggagtggacccagatgctccagaagacgatgaagagaacgaggaggaggacgtcgatgttgatcgagatgactttatttgaagctggctcattacaggtctcttatacctgtggaagctggcgctgattgatcacgaccatctttgtatagcggtggtagcagtggttttgtgctatttgtgactgaatagcaggtgttctagcagaaccccagttgttttagcttgtaaaaatgccgcccgaaacgaattttgcacgtgttgtatgccatttcctttcagttcttctttgtgtattcttttgcaccaaatatggttgacccaactcttctctccactcagatcacagtatttcccttaccgcctgttcaaagtcagctgacatgcccgcccataatacctctctgtcatcatctgctttatcagctgagttgcatgtctttgaagagct

SEQ ID NO: 175798 - DNA, 453 bp, Zea mays
  Clone ID: MRT4577_91923C.1
gcagccacgcctgcaggagccgggccggaagttatattgctgggtcgaccagttttttagtcggcggccgcccgagtggatccggtacagctcgaaggccgagcggaagtcaacgctgtatggcttgatctactgctcgaggaccaccttggccttcactgagcccatgctgagattccactgtaagaatctgagcccctacggcctcagcgaggacacgtaccttttaagcgcctagctccgcacggccattaagccgttgatcaacgacacacctatggaggcacgcacatccatcttctgtgccatgcacccaatgctctagaagaccgttcccttgtccaaggacaccgtcttcaccacgttcaactgggacctgcgcaagccataacctctgctggagagcatggtggtcagccatcacatgctgaacaggaatttcgacacatacat

SEQ ID NO: 175799 - DNA, 457 bp, Zea mays
  Clone ID: MRT4577_91924C.1
tacgacggccggccgggcaggtacaagctttttttttttttttttttttttttttgattttttttttttttttttttttttttttttttttttttgtgggctttttttttttttttttgtgttgtttttttatttttttttttttttttttaaattttttcttttgtggggactttgttttttttacctttatttgttttgccatggtcacatttttttcctttttgttttttttttcgggtgtcagttctattcccctttccaaccgtatccgtaaatgtttggggcttgggtccctcatttttgcgcccccttaattggttgctcttcggtctttgcccgctttgcagcggttcaattttttgtgcccttttgctcggtccttcgctttttttcctttctttgcggcttgggttgtgggttctcttccgcttccttcattcctgagtttttttta

SEQ ID NO: 175800 - DNA, 344 bp, Zea mays
  unsure (1)..(344): unsure at all n locations
  Clone ID: MRT4577_91925C.1
gttgttggacatatgagagaacacccactgatatttatggagattattgattaaaactcgcacggtttgtccttaaatacatgatgagcgcccctattatgccatggtaccagaatgacatgcggagaaaacctttcctgcatggaaggaaagggagnctggaagcccttgtcttgtggacggaagttttcctcatgcagcacgacgtggactatacgggcctccgctgatgatcttaaaaaagaccgcgctggcttctcttaactaaactctataaagccagtggggttaacaaaaaagaaaaaaaagggcgggcggactgtatttttgtggagaaccccgga

SEQ ID NO: 175801 - DNA, 549 bp, Zea mays
  Clone ID: MRT4577_91926C.1
gcctagtcgaaatatattatttatggtgtaacactgtctctagcagctatcatatctcatctcatgtcttatcttctttttcaaacttaactctgcaaataatgtaatctacagcgtgaatttcctattttacacgatcttctgcggacagcctaagaaggctaacatagttccaactgcaaatggctaagctactccttatctcttgttttgtggcttctcttgtttcttcaaaagcatgaagattgttgtaaattcttgagccatgcaccacaacattctatctggattccttttttctgatagcattgccaacttgtgaatcaaaacaggcagctggagctaccttccatcgtattgagcaagtagagttttgtggacatccagttttcttcatcgcccctagcccctaagggctatgagtctccagaagtaagttctcaagaatcatgtgtgatgggacagaatagcaaaatgtccagagtattactccgtttcctcaaagtccataagaaaatcagttaggttctcagaatcgtcaatagcttc

SEQ ID NO: 175802 - DNA, 314 bp, Zea mays
  Clone ID: MRT4577_91927C.1
gtgggtggttttttttttttttttcttcccaccaagaacacaagttttctgtttttttttaaaccctggcccagatcatgggcctgttcccgccctggttccctataccacaccccccgtaggaacgcgaatgttgtccccaacaggggctcagggtttggaagacaagcccgcccctatgggcttatgtggcttcccccaacagttctcatcgcttacgctccgagggactttttgggatcaaccacttgggtcaaattcatgcggggggacgcattttttccaccgttacctccgttgcccatgcctttggc

SEQ ID NO: 175803 - DNA, 289 bp, Zea mays
  Clone ID: MRT4577_91928C.1
aaccggggttgagcgtctagcccatctctgcgtgacttccgccagcgtttagagcgttttcggggtccgagttgaagagcaaaaccaagtgaaggaaacttcactaagttcagggtgacaagggaggaagtagagagactgcactttaaattctggatgacagacctatcaggactgagtggacctttgagtgacaagatgggggtgttccaaagagaccatggcagcctgcagctaggactttaatgcaagtggtgatgctgtgatatctagtgctttaaacaaatct

SEQ ID NO: 175804 - DNA, 383 bp, Zea mays
  Clone ID: MRT4577_91929C.1
cggacgcgtgggcggacgcgtggggcatgggcagcaatggccttggcttcaggcagggtgtgtggtcaccgcaggcccagggtcgaggcttgtcagggcttgaatggatgatccctgtgaggggtcaatattaaagcaaaggtcaggttcggcttggagggcttggtggaacacctcaggtcactctagaagcttttaagtggtcagtgcattgtttgtaggccggaaggacagctgatatgctccttggtgatgtcctcggtgggcaccagccagtgaggagctctgtggtggggactgagggagttgtttagaggcgtttggaccagtgcggcagtcaagctgtctttctgcagtgaggaggactcaccaaacaacaaaga

SEQ ID NO: 175805 - DNA, 267 bp, Zea mays
  Clone ID: MRT4577_9192C.1
ggtcgagtgtcttcacctccatcatcagacaaccactcgacctccttactctacctagaggtcgagtatctcgatcagaccactcgactgcatactcgatgacaagcttcagagccttcttcattctgcactcaaccagacactcgagcacaaggaagaaaagaagactccagctattcactcgacctctcactcgaccacatgggtcgagtacagttcttaatccgttccaatacttcgtcgctttgagtattagggcctcttcta

SEQ ID NO: 175806 - DNA, 556 bp, Zea mays
  Clone ID: MRT4577_91930C.1
aaaaaaaaaaaaaaaaaaaaaaaaaaaaaaaaaaaaaaaaaaaaaaaaaaaaaaaaaaaaaaaaaaaaaaaaaaaaaaaaattttttttttggggaacgtagcgcgcgcggccccgcctttgttcttctcctcttcccgccccacccgagggaaggggctgatcccatcgcctcaggacagtcggtaccaaaacctcccgcgttgaagtgggttggggttggtttctttgctattcaaaaacacagaaaagaaaactattcggcggaacaaaaaatggtgtaattgaaggagccaaatcgcctcaccggaagtgttctcaggggaagggaaagggaaggtggggctcgaccccaatgaaggaaatgaaattgccataggtcaactcccgccataacatccggaatttgggaagggatggttttatcataaagaagcctaaaaaaatccactttaaatctcataaaaaaaggccgcactaggctaaacaaaagggacgtcactaatgatatgggaagagtaaaggtaccaggtaggctcccctccccaccaaggtac

SEQ ID NO: 175807 - DNA, 287 bp, Zea mays
  Clone ID: MRT4577_91931C.1
tgctgttcgcggttacagtctttttcttcggcatctgctggtatcagcggtgggggaacatcactggcaaccctgaagtcagggtaaacatggcagggagggctgctggtgtgcttgagaaccatgaggaggggagacgttacgccatgcatggcctaagaagctttttgcactacaagacttctgagattatgcctgcaattaacaagttcttgactgaccctaagcgaagcatgttgatagtcatactactactactacttgctactggggtatttacactttgt

SEQ ID NO: 175808 - DNA, 321 bp, Zea mays
  Clone ID: MRT4577_91932C.1
ttggccgaccgcggttgcctcgacctatggccgatcctcggaacctgaagaacccagatatttcctgagagtgagtgggcagtgcaagcctgccgcggatcaatctactcgacctgccacatggccatgagaacggaaaaacgcagcctcgctcccgatttttatctaggagtggcgcgcagattctggcttttgcttacctttacctcacaagggaggcctcttttattaccttcagactcacggaatgggcgcccctagtgcatacactagcggcgagagatgcaatgaggatgcaccttgatgtctgttgcacccagc

SEQ ID NO: 175809 - DNA, 443 bp, Zea mays
  Clone ID: MRT4577_91933C.1
aaaaaaaacttgccccggttttaatcgataattgggggggttttgaaaaacagagttttgacccctggggccgtttggaagttttccctggcgggggaaaaaagggcctgggattggggcttttatgagccctgctcctaggaagggtcacatagcaggggtttggaaaaaaactggggatccccccatcccccagcagcgggcaatccgggtgccaatggggggggggccttaaacaagcccctgggctggagttagcctaacaatcggaaccctgaagggggggcaagaaacgtaatcccccccccccttcccaaaaaaggccacaaaggaagggtttccaccgggttttccacaaaggcccccctttaagttaggcctagctttgcggcccctttttgtgggaaggttaaccaggtggccccctcccctttgggccagga

SEQ ID NO: 175810 - DNA, 498 bp, Zea mays
  Clone ID: MRT4577_91934C.1
caagcttaagcttacaatcaacctctcaatcacagtcacaaaacagccattatgtctatcaaggtcggaatcaacggcttcggccgcattggtcgtatcctgctccgcaacgctctcgagaagcccgagctctccgtcgttgccgtcaacgatcctttcattgagcccacctacgctgcctacatgctcaagtatgattcttcccacggtctcttcaagggcgaggtcgaggttgatggccagaacctcgttgtcaacggcaagcccatccgcttctactctgagcgcgaccccgccaacatcaagtggagcgagactggcgccgagtacattgtcgagtctaccggtgtcttcaccaccgttgacaaggccaaggctcatcttaacggcggtgccaagaaggtcatcatctctgctccctccgccgatgcccccatgttcgtgatgggtgtcaaccacaaggagtacgatggtacccccagcgttctgtccaacgcc

SEQ ID NO: 175811 - DNA, 182 bp, Zea mays
  unsure (1)..(182): unsure at all n locations
  Clone ID: MRT4577_91935C.1
tcgagccggccnggggttgcgcacaacgcttctggttctcaccaccaatgacgggacgtgcttggtcaaacgtccatcccctgacgtggtgtcatagcatcatgcaagcctcatccatcctgtttgcccaccccctccctctctatatctagcttcctcccccctcccccacccccctcttt

SEQ ID NO: 175812 - DNA, 115 bp, Zea mays
  unsure (1)..(115): unsure at all n locations
  Clone ID: MRT4577_91936C.1
gccttccgatcggctcctctccgaagcgntagtggcacctgctatgtcctgtgttctccacagcaccctcggggcgtccggtgtgtgactgngngcttacatccaccatgccttc

SEQ ID NO: 175813 - DNA, 331 bp, Zea mays
  Clone ID: MRT4577_91937C.1
attctgatccccgacccccccaccggaacgttaaccctagtacccggagactagggtgcgggctgcggtgggctctgaccggtgcgcgtttacacccagagctgcggccaccaaaacccagcggccgtggcttcccatctccagtgtgagaacagctacgaaactggtgcttgctccaagctggcaaatgcttactgtctgatagcaaccggagggtcctataactgccacagtgcctttgaaggtagactagcagataccatacctgtgggcaagacctctattggaagcactagaagattatgccgtctcagtgggggtaacaataatg

SEQ ID NO: 175814 - DNA, 253 bp, Zea mays
  Clone ID: MRT4577_91938C.1
aagtctttcgcctactgtagttcagtccaccaccatcgctctccgcgactgcaagttcgtccccttgtctgcacacgtctagaataaggatgcaggataacatgtggtctgtcgatgagaaaggtgagaatgccagggaacaggtcaagcgatcggctgagacgcccctgacaaagtcacaatgcatgagctaaagaggttggctatgataaagggagagaaagagccccgagaagctcacagacctacacta

SEQ ID NO: 175815 - DNA, 2690 bp, Zea mays
  Clone ID: MRT4577_91939C.1
ggccgcttttttttttttttttgtcctttttttttttttttttggttaagctttgctgcttttgttaacttacttagatgcaaattctatacattgtattgctgtacaatcttctatcaccattcatttgcgtgttgtttgggcagatattgctacttgtagttttcctgttagcaaggggcaaacaaaaagagaacactctacaaaaatgtctcccggattatccgtgcaaatacccgtgacgacaaccggctcaagacatcaggtaggatcttcgacgagatgcctggcaacacaggtagaagctcttgcaccacagacaccacgttcacgtccccgcccactgttggagttgcagtcccggatgtcaggaacttcacaaccttctcgacgttgttcaggatgaccctgtcttcctctgtgatcgtcggaagcaatgccctggccctgacaggaaccatgctaaaaactggggccgcgtttcctatcccaaaagacgcggcgatctggatcaactgctcccttgaaatcgcatcgatggctttcacaatctcgtcaagaataaactcccgaaagaagttccccctctcagagagtagaaaagcaagagccgcacgggctttaactggctgctcaggctgcgctacggccattgcaaatacaggaaccagactggtgctaggttgacctcccaactcagccagctcagccatgtttcccttcaagttctccccaccaccgctcttcgctgcacggataaaattctcgaaagcttgcataacatcaatgaacctttccgcgtcgaaaacaccggttttgccatatatggtgtaacgcaaggcgctccttagccgaggcgattcgtccgttagtagcctctgtgcgatgtatgggtatgcttcatccacaatggcaaattcaggatctcccaccaaagctatgccttctaatactccgatggctctaataatcaaagcaaaatacggaggtatcctgaatggataatcaaaagttatctgtgctagatctgctgccaattcttggaagttaatattcttggcaccgcctccttctagtgcctgatcaaaaaccttggccagtacaggcaagataggatccaagttaaccccttcaggaataaaaccaagcttcacaaagtccttaacaattgcatcataatcacgatgaataaggtgagctattgcttcgatcattccatacttttgatcatctgtcagtttggttacacgcggaaattcaagaatagccagctttccatcaggtgttctaatcatattgccaggatgtggatcagcgtggaagaacccagtatcaagcaactgtttcagatagcaaatgactcctacactgaccaatgatccaacatcgtcctctgtgctctgtgacaacttctctccatctatccattgtgtggtaagaacttttctagacgtgtatttatggtaagtctttggtacaacaacctgtggaagatcttctttcatcacgtcagcaaagtaagtgccattttccccttcatttacataatcaagttcttcaaaaaatcgagcagcccactcatctaccaggccaacaacatcgatggacacctgtggaaatctcctgagtaccaaacccaagtttctaatgatgaataaatcgatggtaacagtctcaagtacaaatggcctctgaactttgacagctactagttctcccgtttctttcaagcggcccttataaacctgtcccagagatgctgcagcgattggggagggggataactctgagtagattgcttgccaaggctgaccaagctcttcttcaagaagagccattgctatatcatctgggaatgaaggaaccttatcacataatttctgcaactcggtcattgctgcaggggacagaatatctggacgtatacttagcgcctgcccaagcttgatgtaagcaggacccagagacgtcacgatttctctcagttcaattgcgcgagccacttcattctccttgagcttcttgttaataagatcggatacgagatgggagatgaaaccaccagcgacagacagcagctgcacaacccgggtggcgacagccctaggacgcttgccccagtaagctgatatgatttcagggctatacacaagaggcaggccctcattgttgtccgcggattctacctcgacgaggcggaggcggacgttgtcgtcggcgaactgctcgtcgcggaggttctggccgcggagaccgcgcatgagcgtggcaagctgctcgtcctgctccatctgcttacgcacgcgctggatctccttggacacctctccgaacctggtgtcagagaggtcattacggctcctggtcctgccgcgggaggaggaggaggtggaggtggacggcttgggctccgtggcgacggcgcggacgcgtgggaactgtcctcggcggtggagcgctgggaggtgcgctacgcggccgaagccgccgcagtgcagtagatgcggcgccgccgccgcagcctccatgccggctgtggtgtggactcggcccgcagcagcgtctctggtgggaggtgggaagcgaggccggcgtggcaagcgtggagcgggcgggcggcgggggttgcgatgtgagaaggcaactcactggccggctggacagacgtcccggccgtggtcgttgtaccc

SEQ ID NO: 175816 - DNA, 378 bp, Zea mays
  Clone ID: MRT4577_9193C.1
cgaagcgctgcgcaacgagttcataccacgcgtccgcgcactcgatacgtgcacgcgttcggccagacttccataaggagctactgaaaggaatcgagtactttgctaaagagaaattgagatgaaatactgctcgtgccctcagtgttcagatcgctggactctccagatggctggacatcttctattgaagtggaatgaacattgctcgtctacggtttcacgccgtttatgatcatgtgatagacagcttcacgcctaacattgcacaggatagataaagaacagtgctagctgatgctctggaatctacgcaaacaggatctcgaatgcctatttctgattcacaaaagttctctgctgcttttagctgcgcag

SEQ ID NO: 175817 - DNA, 647 bp, Zea mays
  unsure (1)..(647): unsure at all n locations
  Clone ID: MRT4577_91940C.1
gccggccagtcagttgccttctcacatcgcaacccccgccgcccgcccgctccacgcttgccacgccggcctcgcttcccacctcccaccagagacgctgctgcgggccgagtccacaccacagccggcatggaggctgcggcggcggcgccgcatctactgcactgcggcggcttcggccgcgtagcgcacctcccagcgctccaccgccgaggacagttcccacgcgtccgcgccgtcgccacggagcccaagccgtccacctccacctcctcctcctcccgcggcaggaccaggagccgtaatgacctctctgacaccaggttcggagaggtgtccaaggagatccagcgcgtgcgtaagcagatggagcaggacgagcagcttgccacgctcatgcgcggtctccgcggccagaacctccgcgacgagcagttcgccgacgacaacgtccgcctccgcctcgtggaggtgcgtccagactgcaaccctccttgatcccacttcacctaacctttcactcagcttgctctcttcttctataactaattaccatttacagaacgtcagaatcacttncagcacacaactccacaacatcaattaatctatgcacagctaggttgttactgaattccgttttcccc

SEQ ID NO: 175818 - DNA, 454 bp, Zea mays
  Clone ID: MRT4577_91941C.1
gtggattttcaaactactagttgacataccaaatcaagaatagccagctttccatcaggtgttctaatcatattgccaggatgtggatcagcgtgaaagaacccagtatcaagctcctgcaaataaaaataaatataacatgaagatacttcctctaaaaaaggtgacatgagtgcacacatatcttcaatcatgtaggacgggaatactatggataagatggtgaagaccgttattccttaccttcagcaagtgagtgcatgcatatgttcaatcatgtaagatgtggatagtatttataagatgtaaacaaatgcttttcaaactaacctgtttcagatagcaaatgactcctacactgaccaatgatccaacatcgtcctctgtgctctgtgacaacttctctccctctatccattgtgtggtaagaacttttctagagtcgagctgcagg

SEQ ID NO: 175819 - DNA, 195 bp, Zea mays
  Clone ID: MRT4577_91942C.1
cgagtctggccgcagctcttcctcttgcattgattccattctagagcacgactgctaccacccagccggttgctcattaacaacaaagcgagcgagtaagagcgagagagatgcacaaggggaaacatcctaacgaagacgaggagatgaggtggtgcaacgctctcctcttccaggcgcgagccgcgaggagta

SEQ ID NO: 175820 - DNA, 722 bp, Zea mays
  Clone ID: MRT4577_91943C.1
ggcaagccaacacaagattagacttaaaaactctccagttttatcgggttgagccctcgggtgctcactacagacaggccgggttggttaaactttgctgcttttggtaacttacttaaatgcaaattctatacattggattggtggacaatcttctatcaccattcatttgggtgttgtttgggcagatattgctactcgtagttttcctgttagcaaggggcaaacaaaaagagaacactctacaaaaatgtctcccggattatccgggcaaatacccgggacgacaaccggctcaagacatcaggtaggatcttcgacgagatgcctggcaacacaggtagaagcttttgcaccacaaacaccacgttcacgtccccgcccactgttggagttgcagtaccggatgtcaggaacttcacaaccttttcgacgttgttcaggatgaccctgtcttcctttgggatcgtcggaagcaatgccctggccctgacaggaaccatgctaaaaactggggccgcgtttcctatcccaaaagacgccgcgatctggatcaactgctcccttgaaatcgcatcgatggctttcacaatctgcgatgcaaaaaatgagagacctttagttttgaatgaacatctgactataacaaggaaaccttaatatgtcaggtacagcttctggtccatcaataaggataactatcggcagctgtaaaaagtata

SEQ ID NO: 175821 - DNA, 938 bp, Zea mays
  Clone ID: MRT4577_91944C.1
cctcaggcggcgggccgggttgaatacaagagcgcgttatcctctatggtggccgggccggggcaactcgaagaagccgcgtgcgttatcctttgagcagtttggggcgctgagcaagtccagtgagagagggagagcggcgagaggatggctgggatggcatcgctgcagggcgccatggcgtcgctctccatctccgcgctaggcgcggcgacggcgagcagcagcagcttctggggcaaccggctcgccacctactccgcgccgcagcctggggtaaggtttatggtcaagatatgcccaattgaaatgagacttaagagatgggagcgaaagaagtgtaaaccaaacagtcttcctgtgctgcacaagatgcatgttaggatcggggacacggtacaggttattgcaggccgtgagaaaggaaaggttggagaagtcacacgccttttcaagcacaacagcacggtgatcgtgaaggacctgaacttgaagtcgaagcacaagaaaggcacagacgatgaacccggtgaaatcgtcatgattgaaggccccattcatagctcaaatgtgatgctctactctaaggagaagagtgtggtaagcagggttggccacaaattcctggaggacgggaccaaggtccgatacctggtcaagaccggtgaagtaatcgacagtgttgagaagtgggtaaaggtttttaaggaaggaaattcggagtaacagttttagcatgaaaacctgcaaaatgctctgaacgctgactgcgtcttgcatgttgaattgagcctgtttatccctctatgttgttatttacgccagtttttccccctgtaaattatacagttgtcaccaaatcttgcaacgcaagtcaatgcgcatcagcatatgctgatcttgttccgcttcaaaaaaaaaaaaaaaaaagcggccta

SEQ ID NO: 175822 - DNA, 201 bp, Zea mays
  Clone ID: MRT4577_91945C.1
gtttaatcatgatgtgttttggcatggattcctttagatttatcccatttgaagtttcagcagttttctggatctgtatatttatgttttttactaaatttggggagttttcagtcatgacttgctagtaatgctttttcagcactctcttttctccttctggaactctgatgatataaacattattttgttattgttcca

SEQ ID NO: 175823 - DNA, 688 bp, Zea mays
  unsure (1)..(688): unsure at all n locations
  Clone ID: MRT4577_91946C.1
ttgggaccctcgaggccggccgggagatttgtggctattgacctcgacttgaggactgtctctatcggctcgcccttctcggatgactgtcgcataacgaaatgcacgagtcgctaatgaatggataccagtacgcttcacaaatgcgaacatctctcggtgcgagaactagcaatcatagacttgtcttcaaataattgagcatactcgactgcatctggaagcggaatcatgataatttgggcaagcctcgatcagacaaatataccaacggtggataccacaatcggagccccaaaaaacaaactttgacatggtataaagaaatgtagatggtccacaacgcgatcacccatgtgatatagacatgcaacctatgtggaaatgcttggattgatatgaacggaaaaggcatctgtgggccttgttccagcaccaggtctatcaatgataggtgctctcccacctgctactactagtcaacatttataccacacgagtgcaagagctgtccgtgcacagcccactcagagatgctaccatatcccacagtcatggctacatccctcatataacatcctctaggcctatgagcataatggtgatgatctcacccatatctcattctcaagaagagctgtgacgagcgcgtgctccttatgagtcagangacttcccttccctagac

SEQ ID NO: 175824 - DNA, 535 bp, Zea mays
  Clone ID: MRT4577_91947C.1
ccacaagggaatgcattggttcattactggttggatcatttattacaaaccaacaaaccccagcggttgcttttcttattaacgagatcttcattaacaaaggaacgaacttgtcattccttttctgcgggtcattacaaaacaaaaccacccacgaccgggtggtccctccccagccttataagggtcgttagtaattaaaccaaaaacaccctcccgccgatggacggggcggaacaatggccggcttaagaggaccctcccaacccgtcgaaaataggagggaggagcgggtcgctcaagtaggcggcccagttggtgagcggccccttgccggcggcggggggctggccggccaatcccaggaaagccaacatggggaggcacgcctgcttgatcttcctcagctacagccccttcttttttttatggtcggccggcccgccccgccggtccaagtaagaaccggcgggcgacaagctcttcttccggttcaacccggcgttgcgctggaacctgatgtaaccgatcacca

SEQ ID NO: 175825 - DNA, 194 bp, Zea mays
  Clone ID: MRT4577_91948C.1
ccaaacaacctttttccctatagattactcctttccattccaatggtaaattcaggtcatcgatcaccctgccacccatggtgaggggtgacccggaggaaccaatcgccggtaaacgagtaaactaactatagaaagctggtcggcggctccattacattattactacagaacctgcccgggcggccgctcta

SEQ ID NO: 175826 - DNA, 378 bp, Zea mays
  Clone ID: MRT4577_91949C.1
atggggaaagctggcgcgctccgcaggcaccgatcctgtatagctggcgcgactccacgcgtccggacctctatcacacagaaagccgatcttagtccagcaatgcccacccaacaatcatgactcgttatgctcgacgatctctctgaagagctcgatacgaggacccttcccctacagtgctcacaagctcatatatgttgccttcttccaacgtacgtcttaccagcggtgtcttctgtatatgaaaacccagttctccaaccctatgcgatccatcatgcaataacggctggcatcttacctttatcaccatgggtgcctgcaacaatcatcagtccctattacagcagttacctttggtgcatgtattggcac

SEQ ID NO: 175827 - DNA, 352 bp, Zea mays
  Clone ID: MRT4577_9194C.1
cacgggtttaaatttgaagtactcatcacgatgaactgcttgcatcgcatgtcttttaatcagctaggataagttctgtttccgtgttctaccattgactcatttttcgcaataatggtcttgtacctaaagctcaaggtggatattgttgctaatggtaaaagctattctgtccctgcaagtatgctttatcctgttgctcaacccaacattggtaacaactattgattggcaaatattatcttttgtatcatgtttagcaaatgtctcatattctccatatccacagttggtataactctgcatacgctcttcctttcttactatgtcttctgcactgaattgagctttc

SEQ ID NO: 175828 - DNA, 383 bp, Zea mays
  Clone ID: MRT4577_91950C.1
tccttaatttcctaggggggcaggcttccatttgtcttcactcccccctcccatgtgctgcccacttaacttggcggcggtctattacagggcggcgttcaagaagaaccgggtgaatctccgccacctttccgcccggcacgggcgcatcggcaagcacaggaagcaccctgggatgtctccggtaaccccctgttgcattcaccaccaccctattctcttctacaagtaccatccgggctacttctgcaagggtggcatgcgttacttccataagcttcgcaacaagttctactggcccgcggtcaacatccagcgcctctggtcgatggttccccccgacaatgctgcagagtgccgtccgctacaaagccccgcatatc

SEQ ID NO: 175829 - DNA, 351 bp, Zea mays
  Clone ID: MRT4577_91951C.1
gtagcactagcataccaacaacaggggggataataccataagtgggagggcccacaaaacatacccgatgttctgtatctccccgccataagaaaaaacctgatgtagtcatcctcctccatcttgctatcgccagcgtaatactacagagggggctatgttgtgtaagcctacgaagccttcggaccctaagcgatgctgaggcccatgttgaacatgcgggtgtatgctgggtgccaaaggtgttggaatcgcataggctgaagcctgaagggagcaatgccctttcgagcaggggcatgacaaggccctaaacggacttgtcggtttagttaatactagtcacgcttg

SEQ ID NO: 175830 - DNA, 378 bp, Zea mays
  Clone ID: MRT4577_91952C.1
gcaagaaagttggtgtcatttcattaaaacagagggattcaaagatgtgcaacattttcccgaccctaccaacacacgcacgcgcacacacataccagtgacacacaactaggtcatgagcatctcatgctccatgaaaagtgagagatacaaccaacgaagctggagtcgatcagtcactcatttagaagacaaaagtgaaatgtcagaatcagcgtgcaacttgctaatactcagcacgaacttgaactataactatgtcatcatggaaccattagatgaattttctgaatatggaatgcggcgaagacattgaatcctttcagtaatctcacaattacgatgctgatctatttcatcgtaaacattaacacataa

SEQ ID NO: 175831 - DNA, 1831 bp, Zea mays
  Clone ID: MRT4577_91953C.1
tatactcgaggccggccggggtctgcaaccttcactcccgactccacctctctccgatcgtctcatcttcttccttctcttccaccacatccttggcatctcatccggatcgaccagtacacgccccagtagtactaaagaaccagtttctgagtaaaacatggcggcgtcgccttccccgtccggcagcggcggcggcaaggccggcgtggaccggatcaagggcccctggagccccgaggaggacgaggccctgcagcgcctcgtgcgccgccacggcgcgcgcaactggtccctcatcagccgctccgtcccgggccggtccggcaagtcgtgccgcctccggtggtgcaaccagctgtcgccgcgggtggagcaccgccccttcacgcccgacgaggacgacgccatcctccgcgcgcacgccaggttcggcaacaagtgggccaccatcgcgcgcctcctctccggacgcacggacaacgccatcaagaaccactggaactccacgctcaagcgcgagcgcgagcgcgagcgcgagtactacgccgatgcgcgccccggccccggcgaccagcgctcgctcaagcgcaccagcagcgacgggccccccggaagcccgtccgggtccgacctcagcgactccagccaccagagccttcccaccgtgatgccgtcagccgcttctaccgccgtcacctcccagcagcagctacaacacgtgtactaccgccccgtgccgcgcgcgggcggcgtggtcctgctcccggtggcgccgccttctccgcaggctcctccagcaacctccttgtcgttgtccctctccctgccagggctggaccagcagcccgaaccatccccgccgccgccgccaacacctcaagcacaagcaagctcgccgttgagcgcggagttcctgttgatgatgcaggagatgatccggatcgaggtccggaattacatgtccgggtcgggcttcgacgcacgcgccgtgatgggcatggccgagatcgactagtttcagcggcaggggtcccaagacaacgaatcgccgatcgatcccagattcctttgttaatcagcagagcagaggccttcgttccatgctgctgctgtgctgcctgctggtggtactcagtataaccagtagagtttagagtacagtaccagagagacggacggacggacggcgagacctccgatatcgtcatgctgttcttgtacaggagacagcaaaaaagggatcgagaagatggatcagggagaagagagaggactcactcgtgtttcttggctcgtgcagatttgccttttggtttcgagtgcaaaattggaccactaagataaaaaggggtctcttcgattggcgggctcaaaaatttggtcgttcttagattattaggctagatgttgggattttatttcctaggtagtaagttttaaaaatatggattaaattttagtttagtgtgtcctaacacccactgaccaccgtgcacacacagaaccgtacggacaacactagaatggtctgcctgggagctgaggagctctttttttttgtagttgtggaccactgctgagctacttctagatggtatggtatggtatggatggatggaaggaaaggacgaagagaaaatatatggccatgatggctggcagacagggtagctagccggccgttggcagaagccgcggcagagttgagtgagtgacagctaactggctgcttgtcccagccgtcgatgacgatgaagtgtggtgtttttctttatgattcagcaaaaaaaaaaaaaaaaaaaaactcgagggagggccgcgtgtaccc

SEQ ID NO: 175832 - DNA, 769 bp, Zea mays
  Clone ID: MRT4577_91954C.1
cgggaacgcaatgcgctgacccgagctgacccgatccgatccgcaactgctccggtcagccatggctactaggcttttgctaaccgccctactcctcgacttcctcctcgatgcacccctttaacagcccgatttgcgtagaacttactctgaggaagatgctgctgcagctgatgctggaggacgggctgatctatgtattgtggcttatgatacacaggtttgcagtgatggacctttaacccctgctcctggcgtagagacagcaatggcattgcccacatatgctgggaaaataggactatcaggagaataaactgacttactaaggggactgcaaaaggaggttgaatgaagtttgaatgcctatagctgttcattcaactctgcatcttccttgggaccataatatgtatggacagaaccttactgtgcaaaattagttgaacgcatcaactcctgtttagtgtgcaagcgaccttaccttataaattccgttgagagcaagatcttgctgcctggagcttattatctgagcggtatcatagttgatgagagcgaccaaaaaccttaccagaatgtgatctacactggcactatcgtgggcatactggctgtgagctactgcacgttgagtatcgagttcctcatacacgctgggaatcgctctattgaactgtttgaacatgggcatatcgccagtgtcagcagctctcgaaaaaagcggacctggccctccaggtggagctcggtatctggacaactgatg

SEQ ID NO: 175833 - DNA, 249 bp, Zea mays
  Clone ID: MRT4577_91955C.1
cccacgcgtccgatcaagttgagagactgcagggaggacgctgtgtcaaacctcgctcctgctgaaagctatctcaaggctgagctcgctgacccattcgcttgaaagagagtggaatcgatgtctgtacattaacagcttcgatttagaggctgactacctaacaaccacctacaaaactcttgaggcagcatgcgacgagctacatggtagcaggctgttccacaatatactagacgcgtccctgaa

SEQ ID NO: 175834 - DNA, 216 bp, Zea mays
  Clone ID: MRT4577_91956C.1
ttatcttgccatgtcaaagttcaattaaaccctcaacgattttcatcataagaagattttctaaccaaatgatccacattctacaataaagttcaaagatttctaaaaatctatccaaaacatccttttttaataaacaatatcttctatatattattataatctctccctatcaaactctatacactaccatattattataaattatccacatta

SEQ ID NO: 175835 - DNA, 294 bp, Zea mays
  Clone ID: MRT4577_91957C.1
ttggttataagggtggtcgccgggaggaagcggttgtggccggacgaggcggtgatctccgggcaagactaggcaggggtagggaaagggaagaagacgtcgtacttcgcgtcgaggtggaggcccaggatgcagctgaacatctaggtcgctgcgtccagtctgcaccggctacccacgaactgacacaacccccctcattttctccccgggaccgatgcgcttctctagattctccctctccagcatagcccggctctgctgttcccttcctggcctttcctctcctggtgc

SEQ ID NO: 175836 - DNA, 223 bp, Zea mays
  Clone ID: MRT4577_91958C.1
ctcgtgcgtctacgactgagcggcacaccatcgctgccatccaacagtagtctgcaatctcgcgtgctcgtgtgaatcccaacggcgtcgcctccagaggaagagaagatgagcctcatcagcttgttgcgctacgacttcggagttagcccggacaggaactgctagtccgagggtacgaagaacacttcgatctaggtggtagcaggaggtcatcgcgctc

SEQ ID NO: 175837 - DNA, 215 bp, Zea mays
  Clone ID: MRT4577_91959C.1
ggcgggcccaaaaaacaccattttttccttaccacatttttaccattacaaaaaatagcggcaaactgttaaaaagggtaaacataacaggtaaaccagccttatagcctggccagcaggtcaaccgataacgggccaaaaaccttgaacaatagtgaaaattaacctaccacaggtggcttagtctgggataagataaacgggaagcttccttt

SEQ ID NO: 175838 - DNA, 318 bp, Zea mays
  unsure (1)..(318): unsure at all n locations
  Clone ID: MRT4577_9195C.1
cggnccggaatccagttcgagcccgcgtacgcctcttcccacaatgctcacaagctcccataggttgctttcttctcccatacctgtgaccagaggtgtcttgattgtgtgaaaacgcaattcttttaccctacagtatccaacatggtatgggagatggccttttatctttatcaccctggttagtacaacatccggttgccctattacagtagatacctttgttgcatttgttgggacaataacatgaagggtcaacatcttctacaacttgtgcttggaaaccttgctggcttctctcagaaatcatccattttt

SEQ ID NO: 175839 - DNA, 720 bp, Zea mays
  unsure (1)..(720): unsure at all n locations
  Clone ID: MRT4577_91960C.1
ttctctctccctggatattttctcgcggtgcttatctcctccctcgcgcgcagctttcccctgctcggatcctcggcaccgcgccccgggtcgcctgctccaccgcgccagttgcccctccctgctcggccgccctcctgctgctcgccatggccgccgcgccctggacctggctccagctcgccgtggtctgttgctccctcggccatggcgtggacaccagccgagctctccaccgccgtcctcagcgctcggcctcttctccatacccgggtcgagctcctcttccttcccgtctcccagctcggaccgcgcgtcctctccagcgccgcgccccttagctcgctccggccgtggggcgcctgaccaagcgaccaggtcctccagctcaccggcgacctgcgtctttcccagccgcgcccagccgaggcccccttccccgcgcgctcctcctcctctctcccaaccgcgcgttcttccatggccgcggtgctcctctgctgcccggcgtcctcctctgccgtggacggtggatctcccttgcatgccggacttccctccgctccttcccatggcgctcggctgcctctctctctggtctccagcagccgagcttctccctggtttcccatggcgctcgcccagtccagccgtcggtgacatgggcgctcgctgcatcttcctcatatccggnccctgctcgaccgcgcccctatgctc

SEQ ID NO: 175840 - DNA, 336 bp, Zea mays
  unsure (1)..(336): unsure at all n locations
  Clone ID: MRT4577_91961C.1
ttacaatacaacctaaattcaattcacacacctacattttacaacttctanactaaaaaaactattcntaacccaacttaaccacctcgcaaaacataactctttaaccagattgcttaataaccaaaaaaaaaacaccaatcacactatcccaacactttctcatcctcaaattccaatactactctccctgtaccatcacattaaacgctcattaaaatatcaatacacccaccttaacacctacactttccatctccctatcgcccaattattatcctttcttcccttactttcttcccacattcaccaactttacccatcaaactctaaatt

SEQ ID NO: 175841 - DNA, 380 bp, Zea mays
  Clone ID: MRT4577_91962C.1
ccggccgggataggcctcgccgtcgtgattgatgcgccaccgctgcaccggccccgccgccgtgattaccacgccacttatgccctcgccctcgctctgtctcgcgttcgcgtgcccccccgcagcgcaggtccgcgaccgcacccctccccccccccgccccacataggtccggtccccggcgccggcgccgcgatgcccaggatcaaaagcggcgacctcgctcttgccgctcaagcacgaaaaaagccccgccgagccggaggccgcgtgacatgttccggacctcgacgccgtgctcaaccgcaatacgaccctccctcttccttcgccgagtgcgatcgcacccgcattccctccagcatccgcatcggatcccc

SEQ ID NO: 175842 - DNA, 1084 bp, Zea mays
  Clone ID: MRT4577_91963C.1
cccacgcgtccgcccacgcgtccgggttgcgtcgactcgccgcctgcactgcgcagccaccacccatgactacaacgtgttcagcttccacccggacaactcgccgtgccacggcttcgaggaggtcctcgcctgctaccgcaagatcgtgccgcacctcaagctttccgggccgacgtcgttcgcgcccatcgtggaggcggccgtcgacatcgtggaccggagcggggggcagtaccacgtgctcgtcgtggtcgcggacgggcaggtgaccaggagcgtcgacaccggtgacggcgacctcagcccgcaggagaagagaacggtggactccattgtcatggcaagctcctacccgctgtccatcgttctggttggggtcggggacggcccctgggacgacatgcgcagattcgacgacaagctccccgcgcgcgacttcgacaacttccagttcgtcaacttcaccgccatcatggcccgcgccgcgacggcacagcagaaggagtcggcgttcgcgctcgccgcgctcatggaggtccccatccagtacaaggccaccatggagctcggcatcctgggacggtccacggggaacgccaagcgagtcgcccccgcgccgccgccactgccgcacgcgcagcggcaggcgtcgtcgctgaggaggggcgccagcaacgtcggcggcgccgccgcggcgccgagagatgaccaggtgtgcccgatctgcctgaccaatgccaaggatctggcgttcggctgtgggcatatgtgctgcagggagtgcggggaaagcctcaccagatgcccgatatgccggcagccgatacggtcgaagctgaggctatattcaggatgaagtggctatgctacaacagaggccacgaagaggaaaaaggatatatagcttactcgccgttaaaatgtacatgtgaatctgtcaaaacgtgtaagaaggaaccaccggtcgaggtcagtcctgttcgtctccaaatttggatgaaccgatgttccattttgtcacttctaaaggatgccaagctttacagtacgacggtgcgatgacgtacgtgcatcagctcct

SEQ ID NO: 175843 - DNA, 1323 bp, Zea mays
  Clone ID: MRT4577_91964C.1
ctggatttctcccccgaattcgcacctcccccctcacttcgctgtgtctcatcaacgccggcatcaccgcgaggactgggccagctctccctccctttctcctccctccgccttcattgctgacggcgacgactgggcgagctctaccgccgctctgcgctaggtgcccaggtcttcctcgggcacttcaccggcgacgagcacccatcagattgagaactacaatgaaccctatctcaatgccttgaatgaatatgacgatgggagagacttgacctcatatgattttgaggctgactgttttagttcaccatatgatgatgcgaacaaaaagaagcttgcttacaggcatcgtgctattggagagaaatatgcaaagggtttggaaaaggttctggacggacacatggtcaaagtctgcaatgatcagtacagtttgactgacaaatatactgatggctggctgtcttcagctcataagttactggaagaagcattgggcaaatcagcatcagcaccttcagccaactcttcaagcatcaactgcatagttacatcagggtcactgattccaagccttgccaaatgtttgctgtatcacctggatgatgtggtctcatctgagaacgtctacagctcatgggaagtgggtaagctgcagtgcttcaaatggatcaaggagcgcttcgacggtccaaacgtccgcttctgtgcaatcggtgatggccacgaggagtgcagtgctgcgcaggtcatgaaatggccattcatcaagatcgagttccgccctgaagcccatcacaggttccctggcctagacttgcccacagtgcagacctacatggatgtgatatacgagtcatcgagcaaagatggttgaccgacgattgatgtcgattctgttttctcctctgacctccaccacccatggagctattgtttgaggaaactgtaagcaaagagatgtcgtgggaaaggaacgtgtcgtcctccctagatctttcaccttggcgaattaggaggcaggtgtgataaataagagtcttgctagttcgtcgtcgtcgtccatgttgtcatagatcctgtcttgtgtgttcatgttactgtgatgcaggcaatggtgtgttgtgtccgggcgttatttcctgtgttgtgctttgccaatttgccagcttcagtttatgtgtatatgctttttaggctgtcttcggcagatcgtgtaaaataggggacgtgacagtgtagatgacaccgtttaacttgtttttaaaatgaagtttgaaatatacacacatcatagttcatcatcaggaggcaggcggc

SEQ ID NO: 175844 - DNA, 1584 bp, Zea mays
  Clone ID: MRT4577_91965C.1
ctcgatttctcgcccgggttttttccccaaaaccaaaaccaaaaagaaggccggcccgccgggcaacgaactgcctttcccgtcagcagcagcagcagctgctgcctgctgctgtccatcttcatcctccccatcgcccgactggatttctccctcgaattcgcacctccggcctcccccctcacttcgctgtgtctcatcaacgccggcatcaccgcgaggactgggccagcgctccctccctttctcctccctccgcctttattgctgacggcgacgactgggcgagctctgccgccgctctgcgctaggtgcccaggtcttcctcgggcacttcaccggcgacgagcacccatcaggagcgaaatggacgaggctgttcctgctttggctactggccaagcttcaaccgacggcgtgacagagcagcctgtgaatgtgtacatatgggacatggatgagacactcattttgctcaagtcacttctggatggctcatatgctggggcttttgatggcctcaaggatcatgagaaaagtactgaaataggaaagcgatgggagaacctcattcttgaactctgtgatgagcacttcttttatgaggagattgagaactacaatgaaccctatctcaatgccttgaatgaatatgacgatgggagagacttgacctcatatgattttgaggctgactgttttagttcaccctatgatgatgcgaacaaaaagaagcttgcttacaggcatcgtgctattggagagaaatatgcaaagggtttggaaaaggttctggacggacacatggtcaaagtctgcaatgatcagtacagtttgactgacaaatatactgatggctggctgtcttcagctcataagttactggaagaagcattgggcaaatcagcatcagcaccttcagccaactcttcaagcatcaactgcatagttacatcagggtcactgattccaagccttgccaaatgtttgctgtatcacctggatgatgtggtctcatctgagaacgtctacagctcatgggaagtgggtaagctgcagtgcttcaaatggatcaaggagcgcttcgacggtccaaacgtccgcttctgtgcaatcggtgatggccacgaggagtgcagtgctgcgcaggtcatgaaatggccattcatcaagatcgagttccgccctgaagcccatcacaggttccctggcctagacttgcccacagtgcagacctacatggatgtgatatacgagtcatccagcaaagatggttgaccgacgattgatgtcgattctgttttctcctctgacctccaccacccatggagctattgtttgaggaaactgtaagcaaagagatgtcgtgggaaaggaacgtgtcgtcctccctagatctttcactttggcgaattaggaggcaggtgtgataaataagagtcttgctagttcgtcgtcgtccatgttgtcatagatcctgtcttgtgtgttcatgttactgtgatgcaggcaattgtgtgttgtgtccgggcgttaaaaaaaaaaaaaaaaaaaaaaaaaaaaaaaaaaaaaaaaaaagcggcc

SEQ ID NO: 175845 - DNA, 706 bp, Zea mays
  Clone ID: MRT4577_91966C.1
cctgcgagacccacctcaccaaccatcactcaccctccataactcttctcctcctctctcccagtctcactcgcctcacttcgtgcatggtcttcagattagtagagagagcaggagcaggaggagcacgagagaggagcagcgaagaagaagaagagcagcagcaggcagcagcagcttccgatgtgctgctacgtgggcaaggccaccaagatcttcctgtgcctcgtggcggcgctcctggtcgcgggcctcgtcctcggcttcggcctggcccgccacacgtggggagccgaaaggacccggcagcaaccggactgccgctggcccgactgccagcagcaccagggcggcgaccccccgctcctcccggatgccgtcaccacgcagcccaacccgctcacgcagccggccgtcgccgcgttccccggtgccaccgccaccccgtcgccgtccgccggcggcgccgcgccgcccacgggcgggccgtactttggaccacctggcccgttcgtcgtgggcctcggcccagccgctcatgcgtgaggggagctgcctttttttttgacttttgctcctagtcttctcccttctggaatcagtgcttcagtattgtttattattactgtatcatttttttatatgtttccactagtttttgacccgtttcgctgtacagtttggtaaattactccggttctcccac

SEQ ID NO: 175846 - DNA, 394 bp, Zea mays
  unsure (1)..(394): unsure at all n locations
  Clone ID: MRT4577_91967C.1
ccggaannnacggggcgacccaacccacccgtgcgcccataacgtttcgaccgcattcctattgcttcttctctgaccctccgatggcgggcatagaccagtttgtgtgggtgctcacactactaccccctaattcacaccagccacctccttcagtcacaccaatgggcgctatgaaaactcagatcccagtcaaggacgataaccaagggcaacatattccactgcagctaatgcacacggacaacctgcgggaggcgcgagccgtctcactaccgacctgggcgcagcactccgggctcatctccccgatacgggaggaagtttgagggccaccttgttggtaggtcgaaccagataggcgacaacctaagagacgagggtgccagcgtta

SEQ ID NO: 175847 - DNA, 190 bp, Zea mays
  Clone ID: MRT4577_91968C.1
attacaaaccaataccatgcaccggctaaagctccatcgccctttgttcaatatctaaaacgttcccgccatttgctcttcttccttaatcaccactctttagcacataacggatttacaatacatataagggctcacatatttgtggactctaacatacaaatgtttgttgaagttgtaacctactacc

SEQ ID NO: 175848 - DNA, 745 bp, Zea mays
  unsure (1)..(745): unsure at all n locations
  Clone ID: MRT4577_91969C.1
aattcggcacgaggagagttagaataaaaatacttcgatgcagcatggaatatatcagcagatgaagcttagatatagttatgccatgttttgcactacttgcctgtacagactaacaagagttgctttcgtaaaacgcatggaatctacaaagcttttactctgtgctgtattgctgtggaatgctccacccctgtaacagtgtctaaggtaactgcttttgcccatgttttagggcttcaggagctaatggtaattccttgtctattgttgtgatgactcattgactctaattttattcttacggtgctcatctttgtcttgcagaaggaggagccctttgccttccccaagaaggcacaagagccgttctccttctcctaggaggcgcaagagtccgtctccatcacaaaagcgttacagaagaaagagaagtccgagtgtcactagctctccagtcatctcagagttcccaccttgggttggtagagaataagaatgttattgatacacaaaggctagaagaagaaaagaaaaggtgggaagtatctgcttttctatgcagtctacattatttattctacaaacccagctattcactgttgcaccctttctgtaactcttccgtgatgctaacaatgaaattctactaatctanttgctgtttgcaccgggatatatcacaaggtcagctctatttgataatctgttgaccatctgtttttctgagtacatacgtgcaata

SEQ ID NO: 175849 - DNA, 305 bp, Zea mays
  Clone ID: MRT4577_9196C.1
gtcttcaaaaattataccactgtaagtaatatacactttgttttctgaacctcaaacaaacaaacaaacaaacaaacaaacgtgcacagaacgctacacatgatgatgctaacactccttgattcctactaggcctaggtgttggggccccagacggagaggaacatgacggtgcgcagcgcctgctcggcgcgccgccgcttctcctcctccgccttcctcctggccgccgccgccgccgccacggcgcccccacgcgtccgcggacgcgtgggcgcggcggccgctcgcgatctagaactagt

SEQ ID NO: 175850 - DNA, 602 bp, Zea mays
  Clone ID: MRT4577_91970C.1
cttggtttagccacctgcaacctggttttttggagatgtgattctgacctctaaaagtcttcaagctactctttctctcacaaaatgaaaatcaatctcaacatgctttatacgactatgaaatattggatttgctgtaatataagttgctccaacattgtcacaccaaatccttgcagcaggaggacaagaaaccttcaccttttgtaaaagggacttcacccgcattaatattccagtggcgttggctatagttttatattctgcatcagtatttgaccttgaaactgggctgcttgcgagcacaccaagacaccaaattcttaccaagatatactgtaaaacctactgtagtgcgcctatcatcaatatcaccagctcaatttgcattagaaaaggcacttacaagcatagaaggagactataattttgaccatattcaagagtaaacttgacatatttgacaattttagaccatgcacatgagtaaacttgacatgcatagaaggagttattactaagcattctcaatgataggcttgttcgcatagctctcatccatgtggattgagcgagattgatgagtttgatcccaacaagtc

SEQ ID NO: 175851 - DNA, 291 bp, Zea mays
  Clone ID: MRT4577_91972C.1
aaaaaaagaggacccgtttgacaagaggggtcggtcgataatgacccctttctaactttactcagggatggcctccaaaatgggctatgcgggtttcaaaaaaaaacttttgttgaatacaaatatcagtcctatcacatgaccccaaaagaaaaacgtgtggaaaacgtggggaggctatgccgagctatactttggcgggtgtggctcatttgttaggagccgcattttgttatctaccatgacaaccggaatctgctctagcaccaatcgttttacacagcaaaaacc

SEQ ID NO: 175852 - DNA, 507 bp, Zea mays
  Clone ID: MRT4577_91973C.1
cgtcttttttttttggtgttcattacaacttgtatacaaataattatgcacgcagagcatgcaacccgcaccgccttatgcctgtccagtcaacaaaatgacttgagatcgaaaaagcggatgacacacatcattgcagactcccggatgcacgtcatactgaagctaacgcactagcctggaaccatatgtgcaaacatggcatgtgtaatagcacctttgggcagccaacctatactaaaaaagggagcgtagaacatggtcaagtatggtcaaatgtaaagaataacccatgggggaggagggtgccatggcccgtcaaagggcacggatgacgtacctttatcaggaatttgttgcgaagcttcaatgcgacaccacaagctaggtgggcatctaagggcccatttacatcgttcaataacatgaaggcaccggacagccctatagcctcttgcaacagcatagctctctttttcttaaggacacttcgcaccgtgaaaacag

SEQ ID NO: 175853 - DNA, 434 bp, Zea mays
  Clone ID: MRT4577_91974C.1
gtaagcccggatcctctagagtgggcgccctccgcgcgtccggtgatgcgactggtggcagtccgtgcttacctcatgcattagacgagaaacccatatactatcatggctgcccctaagagggccactgggggaacagcgtgttctggagatgcatttaataaaccagatgggcctgatcttgacaaccgcaacactgcaactgttggcggagcccgctgttcaacagggtgaaaccaaaaacgaagagtcccagctagtcgaaagtgaaccgatgggacacaacatccgtgcttgccctttcaagaaaatggattaggcggtttttgccaggccgagacaaagcgtaatttgtcaccatgtcctgccagaaaaacctgcggtatgaccaatgtgcgtccaaaaggaaacttgctgaggagcagtgcttacca

SEQ ID NO: 175854 - DNA, 423 bp, Zea mays
  Clone ID: MRT4577_91975C.1
cggacgcgtgggtcagcaacttctgctgttgccgaaacacctacttattgctctggatcttggccacagagcttgctgaatatgtggtacaccgggtacgccgtcttccagtgtctgaagaacgagcagttctccgtgtactgtggcataaacaatgcacctctttgtcgaattctatgacctactcaacgtgctggcctgtatacactccaacttaacccgttattaacaggccttggaccatgaccaacgacttgcaagagctttacatgtttaagtaaccaacgctgatgatcccgcctaccaccatcctgatcattaacctgtacgacaaagtgacctgcatttactaggtcatccacaccggatacaattgagggggcacgctcttccgaaagctgttcttctacttctggttcatcg

SEQ ID NO: 175855 - DNA, 272 bp, Zea mays
  Clone ID: MRT4577_91976C.1
cttcccctttttttctttttcttttgcgtgaggtggggtttttttcggtttttgggttatcggatctagatggcggcggcggatgttgagtaccgctggggcgaaacggaaaaaaaagggccacgggggaccactccctacacaactcccccaccacctacggggagggcctggagtccaatatcaccctggatcgaaagacgcaaaacaaccgatgcttaggctccgtcaacttaaaaaccgagggggcgacacggaacgccatccaaagc

SEQ ID NO: 175856 - DNA, 435 bp, Zea mays
  unsure (1)..(435): unsure at all n locations
  Clone ID: MRT4577_91977C.1
ctgtggagtcctctatgacgcggccgccctttccctttnnnntcctatttttcttttcccannnnntttnnnnntttgtttttgttaaaataaaaaaacaaaggcctcccaaccccgaaaaaaccgatttttcaaccttcaaaaaaaaaaacctatttcccaccaggtatgccttttccccaaaaaaaaatttttttttttaaaaaactctcccatgcccggggaacccttttaaaagcccaaaggtttgttaaaaaaaaggcccaaaaaggctgccttcccaagggggaaaatggtggattccaaaaaaccttccccaaatttgaaaaaaaaggttcccggcccaagattgggacccaaaagggcctttccccttaccaacccaaggttggcccccaccccctttgaaaacccctggccaaaccccccgaaaaa

SEQ ID NO: 175857 - DNA, 361 bp, Zea mays
  Clone ID: MRT4577_91978C.1
aatcaggcccaaaggatgccgcgggggttgtggctacttcagtctccacctacacacgccacaaataacagttgtatcatgcagatcttataaatgaactcagaacttctcatctctttcattctgaaaaataaatcgaccgacttcttaggtcgtgctgaacaaaacattcttatatccgtgtttgatgtaactgtgtatgcatttacattgaaaatgagagattgattgagttatgcttctatagatagctcaccaagttgtgcccgaacaagacttcaaaatttgcatgcgagtaaatccatacttgccaactttgcagcttaaacctacatgaaaagttggtaaaggtagtaacttt

SEQ ID NO: 175858 - DNA, 915 bp, Zea mays
  unsure (1)..(915): unsure at all n locations
  Clone ID: MRT4577_91979C.1
cccacgcgtccgctctgatgggcgttctgtaaaatcaattattgctcacgtggnnctccactgaaacttatcctggtgcatggatcagctgaagcaactgaacatttgaaaatgcactgcgcaaagaatttagatttgcatgtttatgctccacagattgaggaaactattgatgtaacatcagacttatgtgcttataaggtacaactttcggagaagttaatgagtaacatcatttctaagaagttgggtgagcatgaaattgcttgggtggatgcagaagttggaaaagaagatgagaagcttattttgcttcccccatcgtcaacaccaccaccccataagcctgttcttgtgggtgatctaaagttgtctgattttaaacaatttttggaaaacaaaggctggcaggttgaatttgccggaggtgctttacggtgtggcgaatacatcatggtgcgcaaagttggtgattctatcctaaagggcagcacagggtcccagcagatcgtcatcgagggccccctctgcgaggactattacaagatcagggagcttctgtactcgcagttctacttgctgtgaggcaacgcttgtgttgtccgaaatttggcgtgggatgaccgtgacaaagttttggcatcagtttccggatgaccgtgctgactaccaagtggtccaagaacgatgacaatgcatccatccaaagaagaacaaaaacaacgacgacaaagcgtccacctattttccacctaggggtgcaatcaatcagatcggagatgggtaatgcttgtatcatattttctctttagatttagattagataattttctttttagatttagatcagatacgaatattattggtctatgaccgtaagatttgaatggatatcaatatatcttaaatacctat

SEQ ID NO: 175859 - DNA, 335 bp, Zea mays
  unsure (1)..(335): unsure at all n locations
  Clone ID: MRT4577_9197C.1
cgaaatnccggggccgaccacacccttccgcccacccgtccgaaaaaaaaagcctgaaccttttgccgttgccgaaccggttccgcgcgggaaccctccggggccggggcggaagccnaaaaacttaaccaccccgaatggaaaggaaaaaaaggctttgttggcaaaaataatggccaaaatacccggttacaaaaaaagctaagttaaggaagcaaacaacaaggcggaccccgccggtaagaacagaaccagttcttaaggtcgcatcctaaactcgtttcttgcccttgcccggtccttggtcaacaaaaatttttttaggggggggtggg

SEQ ID NO: 175860 - DNA, 1889 bp, Zea mays
  Clone ID: MRT4577_91980C.1
gctgtctgcaccagtttatgcaacagaacccgtgtttaggcttggccttttgaccatgtatgaccatttcctgtctcgatggcaagtttcagactttgacttgtttactctagatgatgttgatgctgcattccaaaatgttgtgagactgaagtactcacaaaattaccttctgaatggtgaaggagttgttattgctccacatgtggctgggcatcttttgggggggacagtttggaagattacaaaagatggggaggatgttgtgtatgctgttgacttcaaccatcggaaagagaggcatttgaatggcaccgttcttggatctttcgtgcggccagctgttctgataactgatgcttacaatgctttgaacaaccaaggctatagaaaaaagcaggatcaagatttcattgaatcattaattaaagttctggcaactggtggaagtgtgctacttcctgttgacacggctggtagagtgttggaacttcttttgttattggatatgtactgggatgaaaggcgattgcagtaccctatctacttcctgacaaatgtgtcgacaagtaccgttgattatgtcaagagttttcttgaatggatgggtgatcaaattgcaaaatcttttgaaagcagtagagccaatgccttcttgttaaaaaaggtcacgctgataattaacaaagaagagcttgagaaattgggagatgctccaaaggtggttctggcatccatggcaagtttggaggttggcttttctcatgacatatttgtggagatggcaaatgaagcaagaaatctagtgctctttactgagaagggacagtttgggacactggctcgaatgctccaagtggacccaccccctaaagctttaaaggtcactatgagcaagaggattcctttggtgggtaatgaactaaaggcttatgaagaagagcaagaacggataaaaaaagagaaatcgctaaaggctagccttgtcaaagaagaggagctaaaggcttctcatggatcaaacacaaaggcttctgagccaatggtcattgatgcaagctcatctcgaaaatctgtgaatgcttcacattttggtgggaacaatgatattctcatagatggatttgtccctcctttaaccagtgttgctccaatgtttcccttctttgaaaacactgctgaatgggacgactttggtgaggtcatcaaccctgatgattatatgatgaaacaagaagaaatggataatactctgatgcttggccctggagatggattagatggtaggatcgatgatggctcagcacgcctgcttcttgattcaacgccctcaaaagaagatgagaagcttattttgcttcccccatcgtcaacaccaccaccccataagcctgttcttgtgggtgatctaaagttgtctgattttaaacaatttttggaaaacaaaggctggcaggttgaatttgccggaggtgctttacggtgtggcgaatacatcatggtgcgcaaagttggtgattctatcctaaagggcagcacagggtcccagcagatcgtcatcgagggccccctctgcgaggactattacaagatcagggagcttctgtactcgcagttctacttgctgtgaggcaacgtacggcaaagcttaggctttatttacattggttataaattattagattagatgttgactgtaagactatcctggtgttttctgtttttacattgtttgtttcccctttcacaagcttaggcttgtgttgtccgaaatttggcgtgggatgaccgtgacaaagttttggcatcagtttccggatgaccgtggttagtatgctgaagcttgtttcgtccttcatcattatgggcatgtgttctatattgatcgt

SEQ ID NO: 175861 - DNA, 323 bp, Zea mays
  Clone ID: MRT4577_91981C.1
cctcgaggccggccgggtttttccttcttctttttttcctttgccctttcgcatcttataaaactggtcaagacctggtcgccagttcttacttgcatctgacatgttggcttttgcccgcccccccctttgatctgcatattcgagccctctcttgtgcatttgcagtattataccctcgaccctcttctcatacctgtttgtctcggtttagccctgcatcctaatgccatttacgaatcatatgtagtctttgtaaaagatggttccttacttagtcaattgatttgtattcatacaaaaaaaaaaaaaaaaaagcggcc

SEQ ID NO: 175862 - DNA, 3184 bp, Zea mays
  unsure (1)..(3184): unsure at all n locations
  Clone ID: MRT4577_91982C.1
gggtacggcccaacggcgcgctttcggcccgcgattccttcctaacaacggagggagggagaagtgggaaaaatcgcctcgcttgttggcctccgtcagcccgcgcctccttcctccgtcctccggctcggcggtccgccgccctccttcatcctccggctggaggccctcctccacccccgcctcgcggccctacactctcgttgggtcggcacccgtgcctcccattctctcctcttctctcgctcgagcgccgcggcctctgctcgctcggtcgaggctgaaggacgggacaaagcgcagattgaccaccgggcgtcggaaccgccgccgctgccgccgaaggggttataagatcagatggggacttcggtgcaggtgacgcctctcagcggggcgtacggggagggccccctgtgctacctactcgccgtcgatggtttccgcttcctcctcgactgcggatggaccgacctctgcgatacctcgcaacttcaacccctcgcaaaggttgcaccaactgtagatgctgttcttttgtcacatcctgacatgatgcatctaggagctttgccttacgctatgaaacaccttgggctgtctgcaccagtttatgcaacagaacccgtgtttaggcttggccttttgaccatgtatgaccatttcctgtctcgatggcaagtttcagactttgacttgtttactctagatgatgttgatgctgcattccaaaatgttgtgagactgaagtactcacaaaattaccttctgaatgataaaggtgaaggagttgttattgctccacatgtggctgggcatcttttgggggggacagtgtggaagattacaaaagatggggaggatgttgtgtatgctgaggacttcaaccatcggaaagagaggcatttgaatggcaccgttcttggatctttcgtgcggccagctgttctgataactgatgcttacaatgctttgaacaaccaaggctatagaaaaaagcaggatcaagatttcattgaatcattaattaaagttctggcaactggtggaagtgtgctacttcctgttgacacggctggtagagtgttggaacttcttttgttattggatatgtactgggatgaaaggcgattgcagtaccctatctacttcctgacaaatgtgtcgacaagtaccgttgattatgtcaagagttttcttgaatggatgggtgatcaaattgcaaaatcttttgaaagcagtagagccaatgccttcttgttnnnnnnggtcacgctgataattaacaaagaagagcttgagaaattgggagatgctccaaaggtggttctggcatccatggcaagtttggaggttggcttttctcatgacatatttgtggagatggcaaatgaagcaagaaatctagtgctctttactgagaagggacagtttgggacactggctcgaatgctccaagtcgacccaccccctaaagctttaaaggtcactatgagcaagaggattcctttggtgggtaatgaactaaaggcttatgaagaagagcaagaacggataaaaaaagaaaaatcgctaaaggctagccttgtcaaagaagaggagctaaaggcttctcatggatcaaacacaaaggcttctgagccaatggtcattgatgcaagctcatctcgaaaatctgtgaatgcttcacattttggtgggaacaatgatattctcatagatggatttgtccctcctttaaccagtgttgctccaatgtttcccttctttgaaaacactgctgaatgggacgactttggtgaggtcatcaaccctgatgattatatgatgaaacaagaagaaatggataatactctgatgcttggccctggagatggattagatggtaggatcgatgatggctcagcacgcctgcttcttgattcaacgccctcaaaagtcatttccaacgagatgactgttcaagtgaaatgctcattggtttatatggactttgaaggtcgctctgatgggcgttctgtaaaatcaattattgctcacgtggctccactgaaacttatcctggtgcatggatcagctgaagcaactgaacatttgaaaatgcactgcgcaaagaatttagatttgcatgtttatgctccacagattgaggaaactattgatgtaacatcagacttatgtgcttataaggtacaactttcggagaagttaatgagtaacatcatttctaagaagttgggtgagcatgaaattgcttgggtggatgcagaagttggaaaagaagatgagaagcttattttgcttcccccatcgtcaacaccaccaccccataagcctgttcttgtgggtgatctaaagttgtctgattttaaacaatttttggaaaacaaaggctggcaggttgaatttgccggaggtgctttacggtgtggcgaatacatcatggtgcgcaaagttggtgattctatcctaaagggcagcacagggtcccagcagatcgtcatcgagggccccctctgcgaggactattacaagatcagggagcttctgtactcgcagttctacttgctgtgaggcaacgtacggcaaagcttaggctttatttacattggttataaattattagattagatgttgactgtaagactatcctggtgttttctgtttttacattgtttgtttcccctttcacaagcttaggcttgtgttgtccgaaatttggcgtgggatgaccgtgacaaagttttggcatcagtttccggatgaccgtggttagtatgctgaagcttgtttcgtccttcatcattatgggcatgtgttctatattgatcgtattgactctttttgaattggttgagcatattttaaatcttcttccccttgataccttctttcatcaacatcaaagctgactaccaagtggtccaagaacgatgacaatgcatccatccaaagaagancaaaaacaacgacgacaaagcgtccacctattttccacctaggggtgcaatcaatcagatcggagatgggtaatgcttgtatcatattttctctttagatttagattagatatattttctttttagatttagatcagatacgaatattattggtctatgaccgtaagatttgaatggaatcaatattcttaaatacctatctataaaaaaaaaaaaaaaaaaag

SEQ ID NO: 175863 - DNA, 1515 bp, Zea mays
  Clone ID: MRT4577_91983C.1
acccctgcacagtgcccttgagaggctagattaacagagctattgtcatctcgtgcaaaaaccctgtttacgttgctacactcccccgttggatcaacttgcaccggagagcaagttccaacaaaattgatactaaatttttctaaacagaaatacccataaacaaaatagggactaaacgtataagtcttcaatgaatatttctggtgggctatgtgctcccccatcgtagtatcaaaaacaataatctaacggccctgcaccatagtgagacttgtatcatttacggacaattccctgtggacaccttcgtttccaggattgtagtcccgaagtgcaaaatctttaggttgcttcggtgttggaagtggtgttgctttgttctccagcatggacacaattgttgacatgagtggcctgcaactcggatcgtcttgagtgcacaggagtcctatatggatgcatcctgaaacttcatcgagggagcaactctccgttacagatgagtcaagaaaatcttctggtttcccatctttccacatgttccatgcaaatgttataaggttagaaaaatccatgataagatatggtgagcttatctttaatccacttacaatctccaatataagaacaccaaagctgtaggtgtcagacttaactgaaaatgcacctttcattgcatattcaggagacatgtagccatatgtccctacaactcggttagtatttgcttggagctgatcaccagagaatatcctagccatgccgaaatctgatatctttgggttcatctccttatctagcaagatgttgcttgcttttagatctcgatgaattacagttaatcttgagtcatgatggagatacataattcctctagcaaccccctggattatcttgaaccttgttggccactgaagcgttgactttcttgaagagtcaaagaggaagtaatctaagcttttgttcggcaagtactcataaactaacatcttctcatcttcatgaacacagaaaccaagaagcttaactaggttcttgtgctgcaactttgcaatcaaaactacttcattcctgaactcttcggcaccttgcccagaattcttgctcagtctcttgatggctacttctttggttccttccaacattcccttgtatactttgccaaaaccccctttcccaagtatattgcagtcagagaaattgtctgttgctgtgacaatgttttcaaaggcgataaatgagaactctatattcttccccccagcttcatccgtagagctcaagtattctagcatccttctcgtctggattttcttcttgtgccatttgcctctgattttacatgcccaaccaagagcgccaattgtaagtagcagcagacatgctatagttgagagtaaaattttctgaaaattgctcttctgatccatcatttccaacaccagatgagataaatttcacaggtagtagtggatttgctgtagtcacccaaaaccggatctgcccggttca

SEQ ID NO: 175864 - DNA, 649 bp, Zea mays
  Clone ID: MRT4577_91984C.1
ttttttttttttttttttttttttttttttttttttttttttttttttttttttttttttttttttttttttttttttaacggggcccctggggggcatcactataaaaaaacggggcaaaacatgctttaaaagttaaaaaaacacacccaacccaaactatatggggcaccccaaaaacaacccccccaagcatccaaaaaaacaaacgggcccccatccattaaaaggggagggctcgatctgaaaccatggaccccccctcgagggggagctaaaaaaacctgggatcgggcttccacggggaaagccccaaaacaaggcgtcctttccacccttgaaaaaaccaccgggggtttttgaaaaaaagaaaacccttggggaaacacctgaccttttgggaaacccccttaaaaaagccctggttgaacgggagctgcctaaacccaattttttgaaaccccacccgccactggttgaatgtttggggcctttccattctttcaaggccctggaaggaaaaaacggggatggcccttcaaccaaacaggggtgactcaaaaaacaccctttggtcggggcccctggggaaggtcccccccaacatgtaaaaaaggggggggaaggggaaaaaggccccccggaagcg

SEQ ID NO: 175865 - DNA, 407 bp, Zea mays
  Clone ID: MRT4577_91985C.1
attcggctcgagattctgtcatttttttctgcacgacatctagatcatgaaagggaaacttgaggaccttgataagccaatgaacaggaggaatgataaactgttcaagatacgcgcatgaattctatcgagccaacacaatgccgaggcgactgcgagactaaactgtgacggtgctactgaaggatgtgactatgactcaaaggtaacacgtcgcacatggagagctggaatagaattcacgctactatatgatcgcaaaatatttgtattagatcacctagatgggtgattgacgcttgttattgacgaaaccggcaaaatctatattgagaactcctgcatacattgctaatgacgttcgtttgaagagcgcatacaatggaaaggttgcatgcgtagagtcg

SEQ ID NO: 175866 - DNA, 3589 bp, Zea mays
  Clone ID: MRT4577_91986C.1
tttctttctggacccatgaaataaactttccatgaccaagagattgttctagcataataaattttatagattaaattgatactaaatttgtctaaacagaaatacccataaacaaaatagggactaaacgtctgtcttcaatgaatatttctggtgggctatgtgctcccccatcgtagtatcaaaaacaataatctaacggccctccaccatagtgagacttgtatcatttacggacaattccctgtggacaccttcgtttccaggattgtagtcccgaagtgcaaaatctttaggttgcttcggtgttggcagtggtgttgctttgttctccagcatggacacaactgttgacatgagtggcctgcaactcggattgtcttgagcgcacaggagtcctatatggatgcatcgtgaaacttcatcgagggagcaactctccgttacagatgagtcaagaaaatcttctggtttcccatctttccacatgttccatgcaaatgttataaggttagaaaaatccatgataagatatggtgagcttatctttaatccacttacaatctccaatataagaacaccaaagctgtaggtgtcagacttaactgaaaatgcacctttcattgcatattcaggagacatgtagccatatgtccctacaactcggttagtatttgcttggagctgatcaccagagaatatcctagccatgccgaaatctgatatctttgggttcatctccttatctagcaagatgttgcttgcttttagatctcgatgaattacagttaatcttgagtcatgatggagatacataattcctctagcaaccccctggattatcttgaaccttgttggccactgaagcattgattttcttgcagaagctaataagaataatataaaacagggcatatcagcaggcacacaggacatttatttgttggacatcattaacagtatcaaaaactggaatttcaaaataccaaagaggaagtaatccaagcttttgttgggtaagtactcataaactaacagcttctcatcttcatgaatacaacaaccgagaagcttaactaggttcttgtgctgcaactttgcaattaggactacttcatttttgaactcctccttgccttggccggaacccgtgctaagtctcttgacagctacttcctttgtgccttccaacattcccttgtacactttgccaaaacctcctttcccaagcaaattagattcagagaaattatctgttgctgtgacaatgttttcaaagctaataaatgggaagtttatgttcttgtccccagcgtcatcagtagaactcaagtattctagcatccttctcttttgaactctcttcttttgccgtttgcctctgcttttacatgtccagacaagggctccaagcatgagtagcagcacacacagtataattgggagtaaaattttcagcaaactgctcttccttcgaacttttttatacatgcaccaggaggggaagcgcccctaccagaaaacgacatggtatccagagctaggttttggcgccgccgctgcccgtaggctctgtccgtcgcctgagccgcatcacgtggccggcagatccggcgttggcggacaagctcggaggtggcagatcggtggcggggaagggcagagcgcgtgtggtgatcgagggaggattcagccgctcgccttctcttcttcctttcgtcctcctcctgctgttttgctcctctgcagctagcttgcggcgctctctgcaggtgcagggaggggagaggccggagggtcgaggaggatcgtggcgcgtgctgctgccaccagtcttgtgcggcgcgggagaagagggacagcagcaggtcgacgtctcacaggaaggcttgctcccttgccctcttgagatccgccgtccaagatgtgttgccccaccgagcggcagtccagcagatgggtctgggggcggtgattacaaagagagcgggctgttgctacgactagtgaggttggaggtactgcagattaattgagagaggggaaggaagcctggttcgtcttagtgtttgcaggcagtgatgatgatgagttcagaggagactgaagcaaaaaggttagaggaagaggctgaaaaaaggacaatgattcatggtgacaagaaagaagaggatccactaatcacaaaaagtgagatgagaaatgagatgaggagtatggttcaggaactcatgggactaggtatgattggccccaaggctttgcctatctcatctgaattaaaattagaactcgttccaaatgatgtgaagctagaaggaagcaagaattatttgagttggtctaggagagtgcgagtgctcttagaaggtaaatgagtggagcactatttagaagagggctgtgttgaacctgttgataggctcagccctgaatagagggtttggtataccaccaactcagttattgtgacgtggttgttagcatccatgtcttcgtctgtaagtaagatggtcgaagccatgcgtgctgttgcacaaatttggaagaccttgaacaatatgtattcgagaaaggagaatgtgatgatgatgatggagatccgaagtaaggcagatgcagtgaaacatacagggagaccagtggaacaatatgctagtgaaattcagtacttgtggagagaactagatcactacgctcctctgcaaatggtttgccctcaggatgcacaggttgtccacaagtgggtagaggacaggagagtaactcactttctaaagaatttggacccggagtttgagagcaggagagatgccttttgtcaccaagaaagtcttcctaccatggatgaagctgtgtcagcaatgattaatgaggaaagcaggctccgggtaatgacatctaatgatcctgcgaaatcagcctacaccgcaaatgatgatagagactgctataattgtggtgagaagggacacttgagctacaattgtcctcatcctcgtggcagtggtgaacgaggtggtggaactcgtggagccacttgtagtacctatggaagaggtcgtggaggttatggaagggggcgtggtggccgtgccaggggcagaggtcgtggtggccctcatgtcaatgtagcggttactgaagacaccccctcaatcaccctgactagggaacaagctaaacggtgggaagaatggcataagggcaaagaatccgagtgtccaaccagcactcctcttggttctgtggcaactacatccacccagcacttcggagaagagaactgggaagaggattgggactgaagtcaagcgtaatgggctatggttcatcaatcaagaggagcaagctttgtcagcaacaacagaaggaaataaaagggaaatcatgctgctacatcatcgattaggacatgtatcttttgagagcttgagtaaattgtaccctgattcctttaagggaatggagaaaggaactcttgtgtgtgatgcatgtgagcttgccaagcataccagatctacttaccctagtgttggacttcgtagcagtgattcatttatgttaatacattctgatgtttggggtt

SEQ ID NO: 175867 - DNA, 390 bp, Zea mays
  Clone ID: MRT4577_91987C.1
gttgttttttttttttttttttttttttttttttttttttttttttttttttttttaggagaaacacttaaggggggggaaccatggggcttacaaagatcccaaaacacttttgccgtttctagaggtggaccttacaaagaccccaaaacggggggggggcgtaagcagagggggcaccaaaagccttggcggcgggggaaagcttggaccttctcttggccaagctgttgttccggcggtttgtgtgttccttaaacctttgggtgaagaagattctggggctcggcagcccgataatgcttcctagacatcctgttccttggggggggggttttagtcctctttctgggggggggaaagggtttggatgggcccgtgaacctaggg

SEQ ID NO: 175868 - DNA, 1721 bp, Zea mays
  Clone ID: MRT4577_91988C.1
gattgatctagactatgtgcctgcctgtgagggtgaggaggacatgaacaaattcgagctacaagacagcttcgagttcatcatctagagcatccaggacctcatggaggatccagggaacaacaacgccttcgggatgccaaccaaaatgagctatagccaacatcgttaactataccagtagaacatttgcccgacgcggatgttgctgcagggaaggacatgcaggggatcccgtcggagaagatgctcttcggtagagataaataccaggagatgagaatgaaggtcttagaaattaccagaatataagttacataaagaaagaccatcgtcaaaaaccatctccgcatcaccaaacggataaaccatcaaaaaagcattctagcttaatctcggacagattaattttcaaagcattatcataatcataatatctcagccatactctagaaagaggttttaccagatacgatatggatccatggcaaaagccaattccaaagtgcatttcaacaggggctgcaaatgacaggcaaacactttaaaaggatctatgggacatcagtggcaaacactttaaaaggatctatgggacatcagtgcatttcaagccatcatcctgcatggtgcagacctataaccaaagtatcagatttttatagcatttttaaggaaataaggagctggacagtatcctactggtaacatgacagttttaaaaacatattgacatttcatttcaataacctctttaatacatatatatgcagctcactcattgttgtttaacaattgtaggaaactcccaatgataaaggtaaagagatcgagcctcctcttcatcggttagaaaaacagaaaacgaaagcaactacgctcaattgcttttgttgtcttcagtataaacagaacattgtagttacttctctaaaattaataatgtctgataattaaacccaatattcattgaataaacaatagtaaaaacatatattcagatgcgatgaagccccaagcagttgggttgcaggtcctcaaaacgaaggtggatgtcttggctatcgtctcccttccatatcttactctgtagtactcgcttggtttgcccaatggatcaagttaaaatgttaaaaaataagtaaaagtagcagctctctgcctgtgaactccagtatcaactgtcatccaccttgcctgcagtctgcggctcggcgctgcactcaactaccaccttctcccaaattttcactatttatttttctaaatgttatttatctcttcttttttgttcttcagtttagttcatacaagacttctcggattactcttcttctttaattgatctaggctttaaataaatgttgtggttggcgaccttttattccttggacgacaatatgggtggtgatttttccaacgatgtctttcgcaggtatgatcgctttatcaatacagcagaggtccttcacatgtatgattgctttgtcaatacggcagaggttctggagcgggtcacaactatagtctcatatattgtttattgaggatgccatcgctttggtgtgagatctgtaagcagttcttttattcacaaacaagttggtactagatggcttaaagtatagtttgtaatttattaaaactattacatgaatattttggctctgcttctatgtaaaaaaaacccaagaacaaaaactaaaaaaaaaaaataattt

SEQ ID NO: 175869 - DNA, 350 bp, Zea mays
  unsure (1)..(350): unsure at all n locations
  Clone ID: MRT4577_91989C.1
cccttnngcttttttggacttttaaatgcccaaaagattagtccccctggatcacacatggggcttggggtacattatctggaccccacaagcaaaatcacagggacccttggccgacaagaagaagagttttccaaatttagttttttttcagggttttatttggcatattgctccaactaatttgatcagtacaggtttcctgagcggggtttgttcggatttggcctgatgggctcccctgggaagggatcaaacttgtaagggtcacctgggaatggaacaaaccttatttgttggccgttgggctaaaaattcggggggcgacctggagcggaaatccccccccc

SEQ ID NO: 175870 - DNA, 496 bp, Zea mays
  Clone ID: MRT4577_9198C.1
ctcgaggccggccgggacgtaatccatccaggacacaaagttgcggtgagcaattgcaaggcgatgagcttgaggtacatgagccgtgtgggagcgcgggtggtgcgggagagcacgggcaggtcggtcaaggcgcaggcgcaggcggcgtccatggcgaggagcggcggcagcagggcgccggccgccgggtcggtggagtcggggagagcgagcgccgtggcggcggcggcggcggccaggaggaaggcggaggaggagaagcggcggcgcgccgagcaggcgctgcgcaccgtcatgttcctctccgtctggggccccaacacctaggcctagtaggaatcaaggagtgttagcatcatcgtgtgtagcgttctgtgcacgtttgtttgtttgtttgtttgtttgtttgaggttcagaaaacaaagtgtaaattacttacagtggtataatctttgaagacatcacaaaaaaaaaaaaaaaaagcggccttta

SEQ ID NO: 175871 - DNA, 323 bp, Zea mays
  Clone ID: MRT4577_91990C.1
tatgggggtcgatacttgctgccccggaaaaaagaactcacacggcggcggaaccctgaagaactttatctgggaaaaaagataatggatagaagggttaaagtggttgccccgtctttatggggtccaattcctcctgtaaacactgagatgagatgtcccttttatatgcctgctaacgccaaacacagtgggtttctctgtgcagactctaaaattgaccatggattgctaaatatattggaagaaaatgctaacctcctcaatcaaatagaagtaatttttttaacatcacaggcccataacattattgaacttttcca

SEQ ID NO: 175872 - DNA, 342 bp, Zea mays
  Clone ID: MRT4577_91991C.1
gaacagtaaacaacatatgatgttcatggtgggaattgctctgagatgaaaaatgtttgctatggaacagagactattacaacaacaatttggagtcacaatactcgatagaattgatccaacaactccctatagtactgaatatatagactagatgataaaaaaaaaacttaactacttaagaggttcaaaatgaatcctttgacaataatgacaataaaaatattctgggatgaaaaaaaatcgagtccttggtcagattaactttaaaaattaaaacaggattttcacttaatcaattcttacttttttgaagttcaagtacttgaacttacatatatt

SEQ ID NO: 175873 - DNA, 196 bp, Zea mays
  Clone ID: MRT4577_91992C.1
atgctgctgctatgcacgggtcatacatttctgtatgacaggctcaattaattgttgagctgctacatacatgcatggttgcacattgggcagaagttagctaacaatcagactttgttggtcttcaataagcagagcctccttttaaactggcatgatttggtttgcatattatcagcatgcataaacaatttta

SEQ ID NO: 175874 - DNA, 279 bp, Zea mays
  Clone ID: MRT4577_91993C.1
tcgagcggccgcccgggcaggtacaagctttttttttttttttttttttttttgtgtctcaactattgcgctcttgcccacaaaatcattaaatcaatgagtggataaaggggataaaccttaatttcatttggtgaaaccatgcccataaaaattattaaaccataccataatattctaacaacctaatcaggacctacctcgctaccgccctaaggcccaattctgcaccactctatgggcctgtcgggcgttcttgcatacatctcaagggcccct

SEQ ID NO: 175875 - DNA, 738 bp, Zea mays
  Clone ID: MRT4577_91994C.1
cggacgcgtgggaagcaatcatgggagccacctcgctttcatccacaacggcagcagccatcctccacctcgccctcctccttgcagcagctcgacggcacggcgcgacggactacaccgtcggcgactccgccgggtgggccatcggccccaactacctcatctggtcgcagaaatacaacttcaccgccggcgacaccctcgtgttcaactacgtgaaggagcagcacaacgtgtaccaggtgacgcaggacgagttccggacgtgcgagccgccggcgaaccagtcgacgcgcgtgtgggcgacgggccacgacctcgtcaacctcaccgtgccgggggactactacttcctctgcaacgtcgccggccactgcctcgggggcatgaagttctctatcgccgtggccgcgccaccccctccgcccccgccgccgccgcccccgccggccctgacgcccccgccaccgccgccgccgagctcgggctgcgtgccgaggatttcacggcggcgcgcgtgggcggaggtggggcggattccattcctcgcggcgatcggcctgctcgttctcacttgattgtcgtcgtcgttggtaggtacggtggttaccaatacttttttttgtgatggttaggaggttgacctgcacgttttcttggaattgatggttgggatgaactattgctatgcaagtaatggcgtgcgcatgtatgtctaattgtctacatttgattgat

SEQ ID NO: 175876 - DNA, 701 bp, Zea mays
  Clone ID: MRT4577_91995C.1
ggccgcttttttttttttttttttcgtagtggaaaatcttattaccaaattttacaagttataacaagtttacattgtatttatcgaattgattacaaaagtggttcaaaggaataactttgagatgttataaattatttgtaagtttgaaatatatgctagctcaagtgaccatcctcaataagaagtatagaagaattacttagacttataagaaggccgagcccaccggcacttaacaccatcaacaacatcacaaaactataacctgggtaacactaagttagtgtttgttagacgatgtccacttgatgaccatcctttgtcttggcattcattagattatccatattcaggttcgtccgactgacgtcgtcgtcttgcggagtgtccaatctctgcattatcctgggtcgacttggggccgtcttccacattacgcgatcaacgatcgtaccacatcacaactcgatttggtagttgcctgacgacagccttcagctgaagtcctcgatcgcacatctgacgagcatgaccgacgagctaaggctaaggcgaagcttgacgacgagatcgaataggggatggtgagcaagaggcagcgaccaaagaccgaagcacatagcacgacagacatacttagccacggcgaggccgactgatgaggggagaacagaacacgacggtgagtcgatgagctg

SEQ ID NO: 175877 - DNA, 168 bp, Zea mays
  Clone ID: MRT4577_91996C.1
gctgatatcagatgctgcacactctgacttctctgacacgaacacctattacatgacggcgaacatcatccttggctgatgtcacgaattgatcataagacatttccaataactcggactccattacccaaagcacatcaccgtgatcgctgaatgcaccaagggaat

SEQ ID NO: 175878 - DNA, 657 bp, Zea mays
  Clone ID: MRT4577_91997C.1
gtcaattgtgtcatatatttgtaaacgaaggtattattatctatcttcatgaagtcaatagagaagttattcaactcctatatgattttggtgttccaactgcaacatgtcttctgctgttctgcaatcattcaaggatgaataatccatgctatttgaacctttatcttctcctaccaacttcagatctttgattaccaatcatcttaaatgacaccagaattcccgtggcaatgcaaggggaattcgtctaactatatataagcatgtgctccactttatttaaagcataatttacctttgatttcttatgtgcagtttttctgactctttctccttataaccctcctttttgaaggttataagattgtctgcagcaactcaggatgttccaaggtctgtgatttgtaatgttcatggagttaaccccaaatttattgagattggcaaattgaaacatcagcagctatgccaaagagagcaagcattcttcaagggtgcatattatatcggaaagatggtatggagtaaaggttacacagagcttcttcagcttcttcataagcaccaaatggaattgtctggccttaaaatggagttgtatggcagtggggaagatgctgatgaagtaaaagcatcagctgagcgactgagctt

SEQ ID NO: 175879 - DNA, 393 bp, Zea mays
  Clone ID: MRT4577_91998C.1
caccgaaaagaaaaattccgttttatttaaggtttgccaggagccgcgataactttgaacccgccggtttttacggggttcaaaaaaataaccaccacaaaaggaccaaccaaccacaagtaaagtttaagggggcacaccccaccaactggggataacttttggtaggaactgggccagccaggaactggtgtacacttaaaattgacaacaaaccgtttagtccaccttctcaatattggggccagggccccctttgccggaaggggcgtatttgttcatgccggcggggccgcccaagtttttacccctgccctggaacattttggagatgatggggtttcaaaggccctccaggttcttaattttgtgcaagaaatggtctcgccttgg

SEQ ID NO: 175880 - DNA, 225 bp, Zea mays
  Clone ID: MRT4577_91999C.1
aagccggcagaataaggtacttccctaccaaaagcagggttcctttccacaagaaaaatacattcctaaacaaaaaccgaatgggccacgagggtgggtacccttgccgaaacaagatggcaaccacaccaaagggaacccccaacttattgggggcccctttccctaggaccacaaggcttaaaacaataacagccctccccttacatgttaaggggctgcacc

SEQ ID NO: 175881 - DNA, 549 bp, Zea mays
  Clone ID: MRT4577_9199C.1
ctcactcgtctgaccctttagcgcatctgctctggctttacacatagcatgtacgcatacacctcatcatagtcacagagcgctacggaggagagagggagaagaaagagcgcttgggttccatgctcccttacgcgcggaatcccatccggaccggggggcgcgccgcctcacccgcggaccaccagctggacgtgctggagccacctgcagtgccatttgtaaatcgcgagacgctctaagactggggcttgacactctgctgcatcctttgtggagggtggcatcttacgactcatgtgaatatgcgtgctcaatgtgccttgcggcttcatgtgcaagtgaccctgctgcatcgactggatgcaaagattagtctgatccttaatgcgtattataatggcgctagagtactgcacagtgcccattgtgggaggacactattactatgatggaacctaccagctgtgatctgccagaaggatgtcactgactaaggactatttcatacttatcatgtcgtgccagagcgatatttgatcatcctga

SEQ ID NO: 175882 - DNA, 1557 bp, Zea mays
  Clone ID: MRT4577_919C.1
agcagtggtaacaacgcagagtactttttttttttttttttttttttttttttattttttttttttttttttttttttttttttttttttttttttttttttttttaaataaaacagataaaaaccccaaattctttgggttttataaaaattctaacaagggggttttgggcaaacatcccctaaaataagtaatacaaggcattaattttagcgcttcaagggtttttgccccccccagtggaacaacgcagagcgcggggggactcatcccctcgagaaaaaacattgccccatgcaatttttttgttggagctagatacttgatgttaaaaagtgtaagatttctgctacatacattgagacaacgcagtccaaggcaaacattccatgtaattaaacagatataaacaccaaattctttgggttttatcaagattctagcaaggttgttttgtgcaaacatactctaaaataagtaatacaagtcattaattttagcgcttcaaggttttttgcaactacgattgacaaggtaaagcatgggagcgctaaaaaaagattaacctacaaaagatagcggctctcaacctacaccttaaaattcatgtgcacatgccgcctactgaagtaaagagcacctacactcttatatgtccaaatcatcatctggatcttcatccgagtcaggttgctcgtcatctgaatcacggaagtaatgtatttcaccctttgcagttccagatttgggatttttttagttcatccacaagggccggtgcagttaaattggggtcacgttgagcctcaggtagggaccggcgaccatcatatatatgaattggttggccatttccttgatgttcgaaaggaagaacaacatttgccctgtcgctacgctccttctctgacagctcaagattgaactgaaccttaggcactagactttggttcacttctatacttacagaaggagccgaatcaaatttgatatcattcccctcaatatacaggttctcgtaaaggtgcttcacccgtccatttcgtcgtttaaggcgaacaataaattttgcttttgaataattttgctcaaggatagacatgtttcccggactctctccacaaacaggatccacaagtgctggctccacacaagcaaccatagtagaaagacattcaaatgctcggggtaccttgggctcatggaggtctgaatgtatcatccaaaagattgatgatacttgttcatggcttcgaaggttactaagaaggcctgaaattgatgacactgaagcatgccttaacatggagctaattgagtcaacagccacagaaaaatatgttttgccttctccttcaaaacctcctccaagttcagtagtggaggacatcaattttgtaacatccttcacacttctataaacagtaatattatctttatttgttgagaactgctttgcactgttcccttgatgatgctgattttgaatcttctgcttccatccaagtgggtcagagtagcaatccaatattataacacatcgacggacgagtggg

SEQ ID NO: 175883 - DNA, 289 bp, Zea mays
  Clone ID: MRT4577_91C.1
cttggtccaagggttttgtcgattcgaggtttagatttagtcaaatgctagcgcacttaggagtactgacctaaggtatgccatatctaacgtacttccaaaatcttcgggttgatccttaaccagctggtttagctctggacgatatgccatggcaaaccatttcataagaaactaattccaatttgactcttaaagatgaaactgaagaagtaaaatagggtcatggactccgagggatcaaagctatcattcgcttccttgcaaagttttatggatcttatagact

SEQ ID NO: 175884 - DNA, 401 bp, Zea mays
  Clone ID: MRT4577_92000C.1
tggaccgcacgcgttcgtacgaacttattttttttttctgcactgaacaatcaagattgagcttttataatgctcagttgctgccacttaaattggaaaagagcacacggggagaagggtacctgccatacaagaggtaggtgccactgaatttacagatcttcttttttgaggatcaaccatagtacacattgcccatccctgggaatatatggatgtatctggaaaggtgttaattatagaaaacttgcgcgactgtactttgctgcacactctctgatttcttgaataatctgaggggaaccagacaggtctccccctgcatttacctttggaccattcataggaccacaccttttggaccactatgtagacacaaactaaaaggttaagctcattga

SEQ ID NO: 175885 - DNA, 759 bp, Zea mays
  Clone ID: MRT4577_92001C.1
cctcgaggccggccgggtccgtcatcagagagcgggggtgcagagagatctagatccggaggccgcgagtgggagcgccaccaccagcgactgcggcaatggcgggcacggtgacggtcccggggtcgtcgaccccctccacgccgctgctcaaggacgagctcgacatcgtgatcccgacgatccgcaacctcgacttcctggagatgtggcggcccttcttccagccctaccacctcattcaaggactccgcctgccgctgcttcggctacatggtctccaagaagaagtacatctacaccatcgacgacgactgcttcgttgccaaggacccatctggcaaggatatcgatgctcttgagcagcacatcaagaacctcctcagcccatccaccccgttcttcttcaacaccctgtacgacccctaccgtgagggtgctgactttgtgcgtggataccccttcagcctcagggagggtgctcacaccgccgtctcccacggcctgtggctgaacatccctgactaagatgctcccacacagctggtcaagcccaaggagaggaatgagaggtatgttgatgctgtcatgacaatccccaagggaaccttgttccccatgtgtggcatgaaccttgccttcgacagggatctcattggccctgctatgtactttggtctcatgggggatggccagcccatcggtcgctacgacgacatgtgggcaggatggtgtgtgaaggtcatctgcgaccacctg

SEQ ID NO: 175886 - DNA, 638 bp, Zea mays
  unsure (1)..(638): unsure at all n locations
  Clone ID: MRT4577_92002C.1
ctcacaccgccgtctcccacggcctgtggctgaacatccctgactatgatgctcccacacagctggtcaagcccaaggagaggaatgagagggatctcattggccctgctatgtactttggtctcatgggtgatggccagcccatcggtcgctacgacgacatgtgggcaggatggtgtgtgaaggtcatctgcgaccacctgagcctgggagtcaagactggcctgccatacatctggcacagcaaggctagcaaccccttcgttaacttgaagaaggaatacaagggcatcttctggcaggaggacatcatccccttcttccagaacgtgaccatccccaaggactgcgacaccgtccaaaagtgctacatctacctctctggacaagtgaaggagaagctgggcacgattgacccctactttgtcaagctcggtgacgccatggtcacctggatcgaggcctgggatgagctgaacccgtcgacccctgccgccgcaaatggcaaggccaagtagatgtgccatcacttcggcactggagtgaaaaagaaagtatganttgggtcctgcctaggccccatagatatagctcttttttgagaaggaagagagattaattcagcagcagcttttata

SEQ ID NO: 175887 - DNA, 1627 bp, Zea mays
  Clone ID: MRT4577_92003C.1
gccggccgggtcgggacgcctcccacctcctctgctctcccccacctcccggtccggcagcagagagcgggggtgcagagagatcgagatccggaggccgtgagtgggagcgccaccaccagcgtctgcggcaatggcgggcacggtgacggtcccggggtcgtcgaccccctccacgccgctgctcaaggacgagctcgacatcgtgatcccgacgatccgcaacctcgacttcctggagatgtggcggcccttcttccagccctaccacctcatcatcgtgcaggacggcgacccgaccaagaccatcaaggtgcccgagggcttcgactacgagctctacaaccgcaacgacatcaaccgcatcctcgggcccaaggcctcctgcatctccttcaaggactccgcctgccgctgcttcggctacatggtctccaagaagaagtacatctacaccatcgacgacgactgcttcgttgccaagaacccatctggcaaggatatcaatgctcttgagcagcacattaagaacctcctcagcccatccaccccgttcttcttcaacaccctgtacgacccctaccgtgagggtgctgactttgtgcgtggataccccttcagcctcagggagggtgctcacaccgccgtctcccacggcctgtggctgaacatccctgactatgatgctcccacacagctggtcaagcccaaggagaggaatgagaggtatgttgatgctgtcatgacaatccccaagggaaccttgttccccatgtgtggcatgaaccttgccttcgacagggatctcattggccctgctatgtactttggtctcatgggtgatggccagcccatcggtcgctacgacgacatgtgggcaggatggtgtgtgaaggtcatctgcgaccacctgagcctgggagtcaagactggcctgccatacatctggcacagcaaggctagcaaccctttcgttaacttgaagaaggaatacaagggcatcttctggcaggaggacatcatccccttcttccagaatgtgaccatccccaaggactgcgacaccgtccagaagtgctacatctacctctctggacaagtgaaggagaagctgggcacgattgacccctactttgtcaagctcggtgacgccatggtcacctggatcgaggcctgggatgagctgaacccggtgacccctgccgccgcaaatggcaaggccaagtagatgtgccatcacttccgcactggagtgaaaaagaaagtatgattgggtcctgcctaggccccatagatatagctcttttttgagaaggaagagagattaattcagcagcagcttttataaattctttgttgtcatgaagcaggtggttcttttgtagttgatgaaagggatttgtcgtcgctatcgtttacataattcagacaataattttatattgtgtaattctgagaatcaaagcactgtttgtgttatagcatatctaagaatgagcattgctgttgtttttgtcaaaaaaaaaaaaaaaaaaataaaaataaaaaaaaaaaaaaagagtatgtaggtagtcaattaccaattacaaacagccatgagttcaatatcaaatgcaaagtgcttcct

SEQ ID NO: 175888 - DNA, 751 bp, Zea mays
  Clone ID: MRT4577_92004C.1
cccgggagaccaaagccgtcgtcgacacttttgaccacaaggctgtgaaaacgacgcccctgaccgtcgcagacattgagcagcaagacgactttgaaacccggcgcgcatggaaaaaagtcagcgacgcgattaacaagggtaatatggacttgacgtcgtcggaaaaaactatcattgagacgcgccagcgcgagatgcgtcagcaagaaaaggatgcaggcaaggagtgggagcgcaagttcttctcgcgcgcgccgcagtaccccttgtttgaacaactggccaagaagattggcgagggcatcaatgatggccagactaatggtgtttggagttttgataagcagaaggcggatgccgccaagtcgccattccacccggatgttgtgcccccgatttatgagagaaagtaaagagtataagctggccgtggaaagtcgttttacttggccgcaaatgagtagtgggagtgtgaacggggctgtgatgagactgggaaatgaaagctctagtgtaatggtactgatggaggaaaatggcgacttacaagaaacgaagttatgttggcttgacgactgaaaacgtggaatggcatggaaagcgggggctgcttatgccaaatgtatggactgtcggcattagggtgttttccatttggagtctaactatccctacgctcgtcttctggttctacaatagtcatacactccttttccatttttgctaataacatacaacttgatcttac

SEQ ID NO: 175889 - DNA, 423 bp, Zea mays
  Clone ID: MRT4577_92005C.1
cagaagtgctacatctacctctctggacaggtgaaggagaagctgggcacgattgacccctactttgtcaagctcgccgacgccatggtcacctggattgaggcctgggatgagctgaacccagctacccctgccaccgagaatggcaaggccaagtagatgggagttccaggggtgccttcactgcccactgaagtgaaaagaaagtatgattgggtcctgcctaggccccatagatatagctctttttgagagggaagagagattaattcagcagcagcttttataaattctttgttgttatgaagcaggtggttcttttgtagttgatgaaagggatttgtcgtcactatcatttacataattcagacaataatttatattgtgtaattttgagaatcaaagcactgtttgtgttatagc

SEQ ID NO: 175890 - DNA, 532 bp, Zea mays
  Clone ID: MRT4577_92006C.1
cctcgagcctgccgggttcgcaaattgaggcgccgcaggacaggccctggccatcctcgtctcgctctgcgccaagtccgtgtttgctccccacctcggctgctcgggcttccgcaccagaaacagccgccgacttctcctctccccactctctcaactacagaaactgacacccactctctccctcttacgtaacggccaccgcttccatcaatggagtttaaggctggccgtcgaccacgactatccctctcccagcgcccctctgccttcctctcctcactctataaaatctcgatcaagccggagcctcatcccctatcgagtagcccaagcctcttcccggaacgcttcaccgtcgaccgctcagctcgcccaagccgccggatgttcgttgtcgtaccgcgcttcgctggagctgcgtcccaaccgagctcccgtgccgcacctctgcccctttacagtcgtccactccctcgccaagctccctgcgcaccggatttggctagaggtagaagaggtacaaaatgac

SEQ ID NO: 175891 - DNA, 1920 bp, Zea mays
  unsure (1)..(1920): unsure at all n locations
  Clone ID: MRT4577_92007C.1
ccggccgggagcctgcagctctcccaccttctcgctgcgctgtactgtgctggcaggggaggggccatagacgaccccgtcgagcgcttgaaggacgggttccacaagttcaagaccgaggtctatgacaagaagccggagctgttcgagcctctcaaggccggccgggccacgcctcccaacctcctctgctctcccccacctcccggtccggcagcagagagcgggggtgcagagagatcgagatccggaggccgcgagtgagagcgccaccaccagcgtctgcggcaatggcgggcacggtgacggtcccggggtcgtcgaccccctccacgccgctgctcaaggacgagctcgacatcgtgatcccgacgatccgcaacctcgacttcctggagatgtggcggcccttcttccagccctaccacctcatcatcgtgcaggacggcgacccgaccaagaccatcaaggtgcccgagggcttcgactacgagctctacaaccgcagcgacatcaaccgcatcctcgggcccaaggcctcctgcatctccttcaaggactccgcctgccgctgcttcggctacatggtctccaagaagaagtacatctacaccatcgacgacgactgcttcgttgccaaggacccatctggcaaggatatcaatgctcttgagcagcacatcaagaacctcctcagcccatccaccccgttcttcttcaacaccctgtacgacccctaccgtgagggtgctgactttgtgcgtggataccccttcagcctcagggagggtgctcacaccgccgtctcccacggcctgtggctgaacatccctgactatgatgctcccacacagctggtcaagcccaaggagaggaatgagaggtattgcattttgctctcgtcttttatctgacattctagcaactgccctgctgctgcatgaagggttgggtctaactcccttttttttcaggtatgttgatgctgtcatgacaatccccaagggaaccttgttccccatgtgtggcatgaaccttgccttcgacagggatctcattggccctgccatgtacttcggtctcatgggtgatggccagcccattggtcgctacgacgacatgtgggcncggatggtgtgtgaaggtcatctgcgaccacttgagcctgggagtcaagactggcttgccatacatctggcacagcaaggctagcaaccccttcgttaacttgaagaaggaatacaagggcatcttctggcaggaggacatcatccccttcttccagaacgtgaccattcccaaggattgcgacaccgtccagaagtgctacatctacctctctggacaggtgaaggagaagcttggcaagatcgacccctactttgccaagctcggtgacgccatggtcacctggatcgaggcctgggatgagctgaacccggctggccccgcggctgggaaagacaaggccaagtagatgggagtccctgggggtgcattcacttccctgctgaagtgaaaagaaagtatgattgggtccagcctaggctcccccatagatatagctctttttgagagggaagagggattaattcagcagcaggttctttttataaattctttgttgttatgaagcaggcggtacttttgtagttgatgaaggggatttgtcgccactgtcatttacataattcggacaataatttatattgtgtaatcttgagaatcaaagcactgtttgtgttaaaaaaaaaaaaaaaaaaaaaaaaaaaaaaaaaaaaaaaaaaagaaaaaaaaaaaaaaaaaaaaaaaaaaaaaaaaaaaaaaaaaaaaaaaaaaaaaaaaaaaaaaaaaaaaaaaataataaattaaaaaataaaaaaaaaaaaaataaaaaaaaaggggggctttttttagaaa

SEQ ID NO: 175892 - DNA, 2170 bp, Zea mays
  Clone ID: MRT4577_92008C.1
cagatgtatggcaagccagtcttgacttccaggctcaagtggtcacagatgaccttcacacaccatgcgggcccacatgtcgtcgtagcgaccaatgggctggccatcacccatgagtccgaagtacatggcagggccaatgagatccctgtcgaaggcaaggttcatgccgcacatggggaacaaggttcccttggggattgtcatgacagcatcaacgtacctttcgttcctctccttaggcttgaccagctgggtgggcgcatcatagtcagggatgttcagccacagaccgtgggagacagcagtgtgggcaccctccctgaggctgaaggggtatccacgcacaaagtcagcaccctcacggtaggggtcgtacagggtgttgaagaagaacggtgtggacgggctgaggaggttcttgatgtgctgctcaagagcattgatatccttgcctgatgggtccttggcaacgaagcagtcgtcgtcgatggtgtagatgtacttcttcttggagaccatgtagccgaagcagcggcaggcggagtccttgaagggtatgcaggaggccttgggagcgaggatacgtttgatatgctctcgcttgctagacatcatagtcgacaggcaatggcgggcacggtgacggtcccggggtcgtcgaaaccctccacgccgctgctcaaggacgagctcgacatcgtgatcccgacgatccgcaacctcgacttcctcgagatgtggaggcccttcttccagccctaccacctcatcatcgtgcaggacggcgacccgaccaagaccatcaaggtgcccgagggcttcgactacgagctctacaaccgcaacgacatcaaccgcatcctcgggcccaaggcctcctgcatatccttcaaggactccgcctgccgctgcttcggctacatggtctccaagaagaagtacatctacaccatcgacgacgacaaaaaatgcttcgttgccaaggacccatcaggcaaggatatcaatgctcttgagcagcacatcaagaacctcctcagcccgtccacaccgttcttcttcaacaccctgtacgacccctaccgtgagggtgctgactttgtgcgtggataccccttcagcctcagggagggtgcccacactgctgtctcccacggcctgtggctgaacatccctgactatgatgcacccacccagctggtcaagcctaaggagaggaacgaaaggtacgttgatgctgtcatgacaatccccaagggaaccttgttccccatgtgcggcatgaaccttgccttcgacagggatctcattggccctgccatgtacttcggtctcatgggtgatggccagcccattggtcgctacgacgacatgtgggccggatggtgtgtgaaggtgtgtggtctcgctgttcttgcttccacagctagttacttcttacccaaaacataatgtccactggactgatgatgattttacaactgaaacaaaataacttaggtcatctgcgaccacttgagcctgggagtcaagactggcttgccatacatctggcacagcaaggctagcaaccccttcgttaacttgaagaaggaatacaagggcatcttctggcaggaggacatcatccccttcttccagaacgtgaccatccccaaggactgcgacaccgtccaaaagtgctacatctacctctctggacaagtgaaggagaagctgggcacgattgacccctactttgtcaagctcggtgacgccatggtcacctggatcgaggcctgggatgagctgaacccgtcgacccctgccgccgcaaatggcaaggccaagtagatgtgccatcacttcggcactggagtgaaaaagaaagtatgattgggtcctgcctaggccccatagatatagctcttttttgagaaggaagagagattaattcagcagcagcttttataaattctttgttgtcatgaagcaggtggttcttttgtagttgatgaaagggatttgtcgtcgctatcgtttacataattcagacaataattttatattgtgtaattctgagaatcaaagccctgtttgtgttatagccaaaaaaaaaaaaaaaaaaaaaaaaaaaaaaaaaaaaaaaaaaaaaaaaaaaaaaaaaaaaaaaaaaactcgaagaggg

SEQ ID NO: 175893 - DNA, 2315 bp, Zea mays
  Clone ID: MRT4577_92009C.1
agacgaaaactatcaatatgaaaaaacaaaggcaaagcgaagaccagagagtggaaaaaattagcagagggggaggatccatccgcggcctcctatataacgaccacctcctcccaccgcttcctcccacgcctcccaacctcctctgctctcccccacctcccggtccggcagcagagagcgggggtgcagagagatcgagatccggaggccgcgagtgggagcgccaccaccagcgtctgcggcaatggcgggcacggtgacggtcccggggtcgtcgaccccctccacgccgctgctcaaggacgagctcgacatcgtgatcccgacgatccgcaacctcgacttcctggagatgtggcggcccttcttccagccctaccacctcatcatcgtgcaggacggcgacccgaccaagaccatcaaggtgcccgagggcttcgactacgagctctacaaccgcaacgacatcaaccgcatcctcgggcccaaggcctcctgcatctcattcaaggactccgcctgccgctgcttcggctacatggtctccaagaagaagtacatctacaccatcgacgacgactgcttcgttgccaaggacccatctggcaaggatatcaatgctcttgagcagcacatcaagaacctcctcagcccatccaccccgttcttcttcaacaccctgtacgacccctaccgtgagggtgctgactttgtgcgtggataccccttcagcctcagggagggtgctcacaccgccgtctcccacggcctgtggctgaacatccctgactatgatgctcccacgccgctggtcaagcccaaggagaggaatgagaggtatgttgatgctgtcatgacaatccccaagggaaccttgttccccatgtgtggcatgaaccttgccttcgacagggatctcattggccctgctatgtactttggtctcatgggtgatggccagcccatcggtcgctacgacgacatgtgggcaggatggtgtgtgaaggtcatctgcgaccacctgagcctgggagtcaagactggcctgccatacatctacaccatcgacgacgactgcttcgttgccaaggacccatctggcaaggatatcaatgctcttgagcagcacatcaagaacctcctcagcccatccaccccgttcttcttcaacaccctgtacgacccctaccgtgagggtgctgactttgtgcgtggataccccttcagcctcagggagggtgctcacaccgccgtctcccacggcctgtggctgaacatccctgactatgatgctcccacacagctggtcaaggccaagtagaggaatgagaggtatgttgatgctgtcatgacaatccccaaggggaaccttgttccccatgtgtggcatgaaccttgccttcgacagggatctcattggccctgctatgtactttgttgtcatgggtgatggccagcccatcggtcgctacgacgacatgtgggcaggatggtgtgtgaaggtgtgtggtttctctgatcttgcttctacagctgtttactttgttcccgaaacataatgtacattggcctgatgatgatcttacgactgaaacaataacttaggtcatctgcgaccacctgagcctgggagtcaagactggcctgccatacatctggcacagcaaggctagcaaccccttcgttaacttgaagaaggaatacaagggcatcttctggcaggaggacatcatccccttcttccagaacgtgaccatccccaaggactgcgacaccgtccaaaagtgctacatctacctctctggacaagtgaaggagaagctgggcacgattgacccctactttgtcaagctcggtgacgccatggtcacctggatcgaggcctgggatgagctgaacccgtcgacccctgccgccgcaaatggcaaggccaagtagatgtgccatcacttcggcactggagtgaaaaagaaagtatgattgggtcctgcctaggccccatagatatagctcttttttgagaaggaagagagattaattcagcagcagcttttataaattctttgttgtcatgaagcaggtggttcttttgtagttgatgaaagggatttgtcgtcgctatcgtttacataattcagacaataattttatattgtgtaattctgagaatcaaagcactgtttgtgttatagcatatctaagaatgagcattgctgttgtttttgtctactgttgccaaggcgatagttgacatctaaaaaaaaaaaaaaaaaaaaaaaaaaaaaaaagtactctgcgttgttaccactgct

SEQ ID NO: 175894 - DNA, 327 bp, Zea mays
  unsure (1)..(327): unsure at all n locations
  Clone ID: MRT4577_9200C.1
cgctnngttngnnnacnccnacgacaggagccgcgcgccgccgcnggcncngcnacccgcgggcggcgcngcancnggnncnncncggaccccgccgcnccccccgcagacgcaagaaacngcnggccanggagcccccanccgcccaggcgangnccgcgaccgacgacccccaggggggggccgncgacgagggnngcncnngcngcnacgacggcngcnccagcanccnggacccccngngcngcncgnccngancgancgangccngccccnncgacggccccgnggaannncncagggaaccggaggcccnaccgnggccca

SEQ ID NO: 175895 - DNA, 1645 bp, Zea mays
  Clone ID: MRT4577_92010C.1
attgggacctcgagccggccgggaaaaaattaaaagagggaggggagggccattcgcctctcctatataacgaccacttcctcccaccgcttcttcccacgcctcccaacctcctctgcttccgagatctctccccacctcccggtccgctagcagatagcgggggccagagagatcgagatccggaggcgctagcgccacccatcagcgtctgcggcaatggcgggcacggtgacggtcccggggtcgtcgaaaccctccacgccgctgctcaaggacgagctcgacatcgtgatcccgacgatccgcaacctcgacttcctcgagatgtggaggcccttcttccagccctaccacctcatcatcgtgcaggacggcgacccgaccaagaccatcaaggtccccgagggcttcgactacgagctctacaaccgcaacgacatcaaccgcatcctcgggcccaaggcctcctgcatatccttcaaggactccgcctgccgctgcttcggctacatggtctccaagaagaagtacatctacaccatcgacgacgactgcttcgttgccaaggacccatcaggcaaggatatcaatgctcttgagcagcacatcaagaacctcctcagcccgtccacaccgttcttcttcaacaccctgtacgacccctaccgtgagggtgctgactttgtgcgtggataccccttcagcctcagggagggtgcccacactgctgtctcccacggcctgtggctgaacatccctgactatgatgcacccacccagctggtcaagcctaaggagaggaacgaaaggtacgttgatgctgtcatgacaatccccaagggaaccttgttccccatgtgcggcatgaaccttgccttcgacagggatctcattggccctgccatgtacttcggtctcatgggtgatggccagcccattggtcgctacgacgacatgtgggccggatggtgtgtgaaggtcatctgcgaccacttgagcctgggagtcaagactggcttgccatacatctggcacagcaaggctagcaaccccttcgttaacttgaagaaggaatacaagggcatcttctggcaggaggacatcatccccttcttccagaacgtgaccattcccaaggattgcgacaccgtccagaagtgctacatctacctctctggacaggtgaaggagaagcttggcaagatcgacccctactttgccaagctcggtgacgccatggtcacctggatcgaggcctgggatgagctgaacccggctggccccgcggctgggaaagacaaggccaagtagatgggagtccctgggggtgcattcacttccctgctgaagtgaaaagaaagtatgattgggtccagcctaggctcccccatagatatagctctttttgagagggaagagggattaattcagcagcaggttctttttataaattctttgttgttatgaagcaggcggtacttttgtagttgatgaaggggatttgtcgccactgtcatttacataattcggataataatttatattgtgtaatcttgagaatcaaagcactgtttgtgtttatagcatgtctatgaatgtgcactgttgctttttccaaaaaaaaaaaaaaaaaaggccccta

SEQ ID NO: 175896 - DNA, 1724 bp, Zea mays
  Clone ID: MRT4577_92011C.1
gaaaactccaatatgaaaaaacaaaggcaaagcgaagaccagagagtggaaaaaattagcagagggggaggatccatccgcggcctcctatataacgaccacctcctcccaccgcttcctcccacgcctcccaacctcctctgctctcccccacctcccggtccggcagcagagagcgggggtgcagagagatcgagatccggaggccgcgagtgggagcgccaccaccagcgactgcggcaatggcgggcacggtgacggtcccggggtcgtcgaccccctccacgccgctgctcaaggacgagctcgacatcgtgatcccgacgatccgcaacctcgacttcctggagatgtggcggcccttcttccagccctaccacctcatcatcgtgcaggacggcgacccgaccaagaccatcaaggtgcccgagggcttcgactacgagctctacaaccgcaacgacatcaaccgcatcctcgggcccaaggcctcctgcatctccttcaaggactccgcctgccgctgcttcggctacatggtctccaagaagaagtacatctacaccatcgacgacgactgcttcgttgccaaggacccatctggcaaggatatcaatgctcttgagcagcacatcaagaacctcctcagcccatccaccccgttcttcttcaacaccctgtacgacccctaccgtgagggtgctgactttgtgcgtggataccccttcagcctcagggagggtgctcacacccgccgtctcccacggcctgtggctgaacatccctgactatgatgctcccacacagctggtcaagcccaaggagaggaatgagaggtattgcattttgttctcgtcttttatctgacattctagcaactgccctgctgctgcatgaagggttgggtctaactcccttttttttcaggtatgttgatgctgtcatgacaatccccaagggaaccttgttccccatgtgtggcatgaaccttgccttcgacagggatctcattggccctgctatgtactttggtctcatgggtgatggccagcccatcggtcgctacgacgacatgtgggcaggatggtgtgtgaaggtcatctgcgaccacctgagcctgggagtcaagactggcctgccatacatctggcacagcaaggctagcaaccccttcgttaacttgaagaaggaatacaagggcatcttctggcaggaggacatcatccccttcttccagaacgtgaccatccccaaggactgcgacaccgtccaaaagtgctacatctacctctctggacaagtgaaggagaagctgggcacgattgacccctactttgtcaagctcggtgacgccatggtcacctggatcgaggcctgggatgagctgaacccgtcgacccctgccgccgcaaatggcagggccaagtagatgtgccatcacttcggcactggagtgaaaaagaaagtatgattgggtcctgcctaggccccatagatatagctcttttttgagaaggaagagagattaattcagcagcagcttttataaattctttgttgtcatgaagcaggtggttcttttgtagttgatgaaagggatttgtcgtcgctatcgtttacataattcagacaataattttatattgtgtaattctgagaatcaaagcactgtttgtgttatagcatatctaagaatgaggaaaaaaaaaaaaaaaaaagcggcc

SEQ ID NO: 175897 - DNA, 437 bp, Zea mays
  unsure (1)..(437): unsure at all n locations
  Clone ID: MRT4577_92012C.1
gcctgttgtctgggacaagggttcccccaacgttttttccaaaaaggacttaaaaacctctgggcccacccttaagggcccccggtgggggtttaaacttaaccttcatcccccctcccaaaaacccgacagatgaataaaaaaagtggcttcctaaaggggggggaaaaaatttcttttaacaactccttgggaaaatgctccactttaatggccccccccgggtatgattttttacaagacttttttcaaaagagggggggagcccattgggtcagccttgggggggggctcaaaacatggggtcccatttttagggcggttttccaaggggaggctntcctggggggggttgttacccggagtaagggtggtttttcgacataaacgacctttaaaaacgctattggggctttttctggggggtaatccttttg

SEQ ID NO: 175898 - DNA, 353 bp, Zea mays
  Clone ID: MRT4577_92013C.1
tacgtaagctcggaattcggctcgagggacgttcgcaggaactttttcgcgcacacggcgcgcggacagaccaagggggccatatggagtctcaaggggatggcaacccagccgcgcacgtgcaagacatgcaaggcgcgagaatcctggaactaaaacgactacaccactaggcacgcgtggaaagagaggaacaaatacaaagtgggggaggatcaaatccaacaaccggacacctgcagaaacagacaaatccacggactgtgaaagtgcgaaccctggagagcagatatacgagaaaacgataactggtatgcatctcggaaagatagccctaataacttcactgaagt

SEQ ID NO: 175899 - DNA, 145 bp, Zea mays
  Clone ID: MRT4577_92014C.1
gtccgtcgagtccttctacaaccccgggggcagaccccattatttttccgggccccctcgcttatcagcaccccccgagaagaaccgacccaagccccgttccccaacctcgtggtccaagactacatgaacctgtacctgcccc

SEQ ID NO: 175900 - DNA, 1124 bp, Zea mays
  Clone ID: MRT4577_92015C.1
gccggccgggccgggatcatcacacctaccacaactcttccacacctcaccaacaaccaatccaccacccacaccaaaactaccacccaacaaacaaccactacacaataatcaaaatggacaaggccaaggcagctatcaccgacttcatgggccgctccggtcaccacgacaccactgtccacgaggcagttgcccccgctgttcagcacgaggtcatcaagcctcacgtacacgaggagatcaacactgccattgacaaggaggttcaccaggaccactaccaccgcactgtccagcccgtccacgaccgtgaggtcttgccagagcaacacactgctaagctcggtgctgttcagcaccgcgagtttgaccaccgcgatgccgatgccactaagagggccttgatcgacgaccaggctcgctttgctgacgagcgccgcattgaggacaccacccacagccagagtgttgcccctactgttggcggagagcacgtccaccaccacatccacgagactatccagcccgttgttcagaaggagaccatccagcccaacgttgtccacaccaccgtccccatccatgagggcggccataacaaggctacccaccatgagactactgctctcccagccatgaccatggagcagttcaaggccaagggcggtgctctcaccggccgcgaggagcgctacgacgagtttgagggtgtcccgaagaacatccgtggcgctggtggcatcggcgctgctgcaggtctcgcccacaagaccacttcccacggccacgagcacgcccgtcacggagactatgacgctacccccaaccaccacagcgatgctggcctgagggagggaggtcttactcacaactttactactaccggtacacacaacccccttgaccgtaacaactacggcgagggcagcgccaaggacttgactggtagccacttcaacaccttccacactgaccgtggcgttgccggccaaggcaacctgaccggctcttccacccagggaggagttgttggcagctctgttggtgaccgcaatcacgacggcaacattgatagccaggaacttatggaccctgcacccagcggcaatcacggtgctaca

SEQ ID NO: 175901 - DNA, 390 bp, Zea mays
  Clone ID: MRT4577_92016C.1
aaaaccccccacctgttaaaagggggaaaattaacaaaaaaccccctttttttgcctggcccggggaaaaacctttaacggcccaaaaaccctaaacaaaggggaaaattaacctttcccgggggttttatttggggaaaaaaaaaacgggggggttggggggcccccttttggcccccccccccttttttttttaaccaggggttccctaaaagggggggatttaaacctttgccaaaaaaggttttccctttttgtttttaaaaccgattttgaccctgggggggaccccgttcccaaaggggtgggggactaccaacctaaacccgggggaaaagaaagattttttaaacagggattaacaggaacccttgagggggttgttttttt

SEQ ID NO: 175902 - DNA, 321 bp, Zea mays
  Clone ID: MRT4577_92017C.1
accgggaattggggggaaaaaaaatgacaaagggggcgggggtcaatagttgaggcgccacatggaacccccagcttttagatttgaaaagatttaaaaaagctacaggggtggggcacctgtacagggggggccacgagtccatactttcatagaccaattcttgcctgccatttaaagcttaggctttgggtacccgtagctccaacagttttcgggcaacatggccattaccaaggtgagccaagggggctagcttttttaacgaagagggtatttttgaccaacacaacttgaaaaaagaacccgggattcccggac

SEQ ID NO: 175903 - DNA, 281 bp, Zea mays
  unsure (1)..(281): unsure at all n locations
  Clone ID: MRT4577_92018C.1
gggggtgaaatanaagtctccgtgggggggcgtcaaggatccagcttccatatcgaagtggatcctaccgacaaggttgctcgacgttgaaaaaggttattagagagtatacaagtatttttgctttctctatcctgctttaccaactttgtggggggggcggggggggnnaanntnnctcaanngacnacactaacattgtgagggaaaaccaagttgttgtaaaataattttgtttgttataatgncttaggcagtaacaagggttttattaagtgctt

SEQ ID NO: 175904 - DNA, 371 bp, Zea mays
  Clone ID: MRT4577_92019C.1
aatggtcagccttgtctgaagttgagtgtaagatgggagaatccacctacggtgcttagtgccatccaaaaacaccgacttatcattgcttgctgatactaatataatgatattcatgtctttatcatctatgagtgaagtgaccatatcagttcctctaacttggaacccttagcttgcccttttttctagaaagtttttggacctttgtcgcttcacttttatgatcctattttgatttgtgttattacaagaaattggttctggactgtattctatactacatgtgtatgctttgttcattaactgtatcagccgtgtcttgcaaagaacctttgtttggagatatttgatttttatttgagatattt

SEQ ID NO: 175905 - DNA, 431 bp, Zea mays
  Clone ID: MRT4577_9201C.1
cgatagactatcctgctgggcacgcaggccatctatagaggggatttatcgcacattggtttccgtgacagaacatgcttaaggaaacaacagacactttgtacagtacagagatatacattctcattgagggaaatggcaactttaggcatggatagcctggaccactgacgctgtgcccagtgcatgtgctactgtcatggatgagaatcatatctgtcgctgctctcatgatcagctatatctgaattagcggcgatgtattaatccccaggctgcttttctgaacgagataatggatgcttgtaactatcaccatcttatgatgctacagacggactgtcgatgagcttgacagatacttcatgcgtgatactgataaaacgccctgcagctggggaaacctgctctgcgtataaggatggtgctct

SEQ ID NO: 175906 - DNA, 443 bp, Zea mays
  Clone ID: MRT4577_92020C.1
gcaagcaggagaattgtaaatgtaatcattgaaactatactataacagtcatatgagaatctgtcagtcattatccatatgtgttttaatgcatatatgtataagaatataactaagttcatgattacttgtggcatcggtctttccgccatttttcctttatgtagccatccattttgccttcttgctccttggtttttcttgttgcattctggtttgaatacgtttaatatttttgtccacttctataatatagctttcaaacagcgctgaaggtggttctctactcaaagatattcctgctaccaaggatggaagggttgattggtcacaggatttcttctgcaaaccagcatttctgacagtgtctggacagcttaatggtgaaacatatgcttcagctctatctgatatttacacatttggtccaacgtttagggctg

SEQ ID NO: 175907 - DNA, 314 bp, Zea mays
  Clone ID: MRT4577_92021C.1
aggtgcattttaagcacgcatttctatattaaagccaaaaaaaaacgaatgggggtgtggttttttttgcaacggcccagggcacccctgaacatgtgaaaattctgcttggaacgcgagttattactcagcattctggattttaaataccaatggatggggtactttttaatggcattggaaacacattacattatggcagggcaacgattcacaaattaatgaaacctccacttattaaatgggatggttaagagaccacccatagattaactcttcacaacttataaatgtatataagctttagggatgaa

SEQ ID NO: 175908 - DNA, 644 bp, Zea mays
  unsure (1)..(644): unsure at all n locations
  Clone ID: MRT4577_92022C.1
naaaaaataatgagaaataaaaactaactaaagccatcaaacatgacagggttaattgtttcaaactgaatgtggaaaaagaattacatcagatagagctgaagcatatgtttcaccattaagctgtccagacactgtcagaaatgctggtttgcagaagaaatcctagcataagtaacattaaaaatattcatattattcgtacagttttgagcaactaaataacattaaatatagggcattatatggtataactataaccaaattgactcaggtaacatgctaacaaaggcaaaggctacctgtgaccaatcaacccttccatccttagtagcaggaatatctttgagtagagaaccaccttcagcgctatttgaaagctatattatagaagtggacaaaaatattaaacgtattcaaaccagaatgcaacaagaaaaaccaaggagcaagaaggcaaaatggatggctacataaaggaaaagttgcggaaagaccgatgccacaagtaatcatgaacttagttatattcttatacatatatgcattaaaacacatatggataatgactgaaagatnctgatatgactgttatagtatagtttcaatgattacatttacaattctnctgcttgcaacctgat

SEQ ID NO: 175909 - DNA, 934 bp, Zea mays
  Clone ID: MRT4577_92023C.1
gggtacctcgaggccggccgggttgggattctgagtgatcttgttcaggctttaagcattgtttgcctacttggagatgatgagatcctgctggttacagaggtctataataactgcatcatccgatacttggaggagccttcagattcagtttcattgctgagggatggagataaactagcagcataccgtctacccaaaagacatgagaaatccccccttgtggtttttacacaccaacattttgtccagcattctagtgatggtaatttaactccacaaatgagggagtttgaggccccacttttggcagcacttccagaggaaattagtggattatctcttcaggatatctacctaaagttgttgagtccatttcaactttccaacggggctagttcgcttaatgattgtatggagtctaatagtgactccgtcgatacgccttctgattcaggcagtatcaattttcagaacagccaattggaagatggccctgaaagcaaccactgtagtgctagtgaatgtgaaataacaaaaggacctgatgatttatacgatgggggttctggttctaacaaggaagcacatatggtggacttcgaattttatttaaaaagtgaaaggggcgagggccagcaacagaagatagaaattaatgagctccatttattatttgagacagcaccaagccggttgcatgtgaatgtccactggctacagaatgcttcaagaaaatatgccacctcaatgctgaacaatctacctgagatccacaagctcgagcttatcccgaaaggaactgaagattctgttgcactacatggttgtctggaagcctttctaaaagaggagccgttggggccggaggacatgtggtattgcccgcgctgcaagaagcatcagcaagcgatgaagaaactggatctctgga

SEQ ID NO: 175910 - DNA, 321 bp, Zea mays
  Clone ID: MRT4577_92024C.1
cagcttgtcgccatcacacgcatggaccaatccggagaatttgctgtgaggcactgccatgatcccaaggaaaggcctgctcttcacaggttcaggtgattctgtcagatctgaccctatgcttgcaatgtgtacccaagcgtagagaccgaccacacctgcgaagaaaactacaacggtgccacacacccacaccactatggaccaggaaccatgatgtgagatcttcacattggtcgtggaagaaacatgattcaccggagagttcggcaacagacagcgatggttgtgatcgatctataacttaaacccaacgagccg

SEQ ID NO: 175911 - DNA, 341 bp, Zea mays
  Clone ID: MRT4577_92025C.1
ttggcaatggcaaagggttactctgatgtggatgctcctgaacaaaagacaacaaagagagtcaagtttggcagactgctaaaacaggctgctgggtgcatggttccggactggacccggttttgcccatttcttacccactgggcccaaaagagctttcactcaaaatgcccactgggtaacaaccaacatgacacggacgaagattggccctctggactaggggaaacaacacggcagcgaacaggataacttggccgggcggtccccaccgttcagttcctccagttcccatcggagttgccgtagccgtcgccacggttgccaccgtcgtaggcggc

SEQ ID NO: 175912 - DNA, 141 bp, Zea mays
  Clone ID: MRT4577_92026C.1
cctctctccctcggcctcgtcggcggcacagcgcagcgcttccactgttgggtgtggtggatttcctccgcccccgaacgaacaaacttttgcaatggaacagcggctaaccttcaaagggcgggcgaacggttggagctt

SEQ ID NO: 175913 - DNA, 323 bp, Zea mays
  Clone ID: MRT4577_92027C.1
aaatctgcatggaatacagccacacaccattgctccttaaaagaggccccacacaagttgcttggatacaggctaacgatacattaattgttccactacacctctcaacaatatggtgctttgtgcagaggtttgggacaattaactaaaaaggctccctcgtttggactagcattcttcactgtttcacagggataccacaaggatgcctcacgatattgaaatactgccacaggacccgttctcttatgggcttaccttaccgctctttcctagaaaaacctaaagccgctggattggttggcccctgggctccacatttt

SEQ ID NO: 175914 - DNA, 420 bp, Zea mays
  Clone ID: MRT4577_92028C.1
cccaacaaaggggacaaaatcccggcctcccaaattaatttgtaggctataaaactaaaaggcccagaggggcgggaacaaaacccctcttccattacatgaaaaacagtccaatcaattacaaagggttcaaaggaatgttgaacacccccccccaatcaaagggaacagggagtcattaaaaacccaagggatctaatcttaagttaattttaaacgggggggggaaaaaattgaaattacttcccccccgaaaaaaacacaaaaaaatggaacccaaaaatcaaatctcactgttctaaccaaaatttgggaggaaaggaacaccttatggctaaaagggggcaaaaactacaacaaatttggaacctccaaacccaaaggaatttgagataccaacattcacttcaggcggctttt

SEQ ID NO: 175915 - DNA, 628 bp, Zea mays
  Clone ID: MRT4577_92029C.1
ccggccgggatgcggttcgctttgcttcggccaactccgtcgtcaccagattgacaagtcttgactgcacgccaggtcactccacaatattagttcaggccgcgaacactatatacaagctgctcctttgctccccctccccttctcagcacccctgaacaaacacgtagcataaccgtcacctgcagagcagagacagcccacagacatgaccaaggatatcaaagagttggcgagcgagtggctagagctggacgaggacaagacaacgactgacgagatctacaaacttttggtcaacggcgaccacgatgagctcgaaaggagactgcgacaccgcattgcctttggtactgccggactcagaggaccaatgcagggcggctttgcttgcatgaactccctgacagttatccaagcttcgcaaggactggctgcatacctcttgaagaccgaggaaaatgtaaagaagaggggtgtggtcattggccgggatgcgcgacacaactctgagaaattcgccaagctcacggccgccgcattcgtggcaaagggtatcaaggtgtggtgggacgaggagcctagtcatacgcccatggtcccttttggggtgcgcgagcttgaagct

SEQ ID NO: 175916 - DNA, 367 bp, Zea mays
  unsure (1)..(367): unsure at all n locations
  Clone ID: MRT4577_9202C.1
ggaagacccacgcgnccggccaagagcaagagaccctctcccgatccttcccgatcctccttcctcctcctcgccgtcgacgttgcttcgcgaagagccgaagatgctgctcctgcgggcatcgacggcgccgttcgcgtacgccaaggtggacaaggtggacgcggaggaggcgcggcacctcagggcgcagtacctcatccacaaggtgctggaggagaagagcccaaggccgccggcggcgctggcgcggaccagcaggcccagggtcggcgtccggctgaagaagctcaggctcgccgtccggggcctcagggcgcgcgcgtgcccggccctgctgaggcacctcaggaacctcaggcggctc

SEQ ID NO: 175917 - DNA, 385 bp, Zea mays
  Clone ID: MRT4577_92030C.1
gagataaatctcattcaatatattgatattttctaggaaacccgggcgggaaagagggccccaaaaggggattacttcccagaaaacccccgcggggggggggcccccacggggggggccccccaagaaggaaccaaaaaaaacgcccccccaacaaggggtaagctgcaagggcgggttaaagggaaaaaggggggcaaaaggaaaaaattgggtccgcggaaaaaagagaaaaagggttccccaaacccctgggctggccaagggggaaaccaagggccccggggcccctggccgggacccccctaggggggaactccccggcccggggggggggcccaagggggccccggccgggaaccaaaccgggggaaaatccggcaaa

SEQ ID NO: 175918 - DNA, 1949 bp, Zea mays
  Clone ID: MRT4577_92031C.1
aattcggcacgagggccgcggccgcggccctagtttttaatacaaagccgacctcgaggccggccgggacggcctagtttcacctcccccattcccttggaattggatttgctcccgaatccggcgaggaagcgaccggcactccacgccacgccgcggcgcccaaggaagggaagcttggggccctaggcctcgtctccatccccgccgcagccggcgcgaggcggcgcggcacgagcacgacggtcaccatcagccaccgcgcgatcccgggggacggccaggccagattccacaacgttttactcttattaaactccccaacttcgtctaaggaagcaagtgatttcattatgaaagactggtctattttctccaaacttgatcacaatggaggttaccttcccaggttcccaatggactctccaatatctcatgatattgggttacgattggtatcgcaagtcggaaacttagttgagtgttcatttcaacatccaaggcatatatgtgctacggggagtggagctgttcaggaagcattcagctgtttcaacaagtttgctggagctttctatttctggttttctagagcatcgaatcctaagttattccaaaggctatcagctgctgcaggctcaagttcaagagcttgtcggtcacacataaagcaagtgacctcttgcttgcagcatttacctggactggagtttggttcacaattaagagaagatcatgctgtacaagtgcttttagcaaggcttgcaagcgcaacttttggacgcctgtggacagaggtggaggagcggcatgcctgcaacatccttatgctggctgctgctactgtaattccaccatttgaaaacatatcaccaaagatgctggctgcgtcaatggcactaagaaaagatcgtggaaacatagagcctactgaacagtcttattcagaggaaaaccgtccaggttgtgcgtgtgttgctgtgccaagagtactcttaccagaagatgcaacggaaccaacaactggcatcaagttccccactgtactcgaagacaattccaatctgactacagaggtccttgttggaatgggttttagaagcatgcgaataatgagggtcaaaaatctgaatctttatgcctttggattatatatacaacctgattctgtctgcaagaagctgggtccaaagtacgcttatattccagatgctgagttaaaggatcacccagatttctatgaagatcttctgagggaaaatattgatatgactgttaggctagtagtaagctacaatggtctcagcattggcacagttcgagatgcatttgagaagtctcttggcttccggttgcaaaagatgaatcctaatactgattatggttgcttgaagacttttggttcttgttttagtgaagacattcgtatacctgctggtacaaagattgacttccggcaaacatctgatggccagctaataactgaaattgatggcaaacaaattggcactgtccagagcaaagatctttgcagagccttcttcgatatgtatattggtgaccccccagtttcagtggagactaaacaagacattgcgcaaaatgtggctggactcataagaagatgctagggaaacgggaaaactaaatcgaagaacctggaattatttcattcatctatacaaggagaggacatataaacagaaaggaagccaggagaggatcgattgtatttatagtggtagactgtctttgtaagctataaacataaagcatatgcttggcaaaggcctccatgcctttcatatggtttggcatctttgccatttcctggctggctggcgtgctgtatcatgtcgacaaatatatgatacagtaaaaagttgtacaacaagagcatgtttctgtgccccaagtgaaaaatgacggggttcagctttgttcatccc

SEQ ID NO: 175919 - DNA, 407 bp, Zea mays
  unsure (1)..(407): unsure at all n locations
  Clone ID: MRT4577_92032C.1
cccacgcgtccgctagcatgtgatcagacggataggtaatatcgccacataggctggctgaggaggaggagactgcagccgagccacctcagtcgtgacacagaggcgtcaccagagctggcgtaagcggaatcggcggccaggatcccgctcctgatggagccgacgnggcacccatgaatctgatggcattcagcacctctgtagcctgaccaaactgaccgcgtgtacagattctcatgtgcggcaacgctcggtgagactagaaaactcggcgcgttatgcagataaagccagtgcgccaacaagagatcgatgagggaatggagcagagtagcttggtaattaacgagacactgcatcctgtgtggngcaaaattctgaataaaacctgaataaaaccgggc

SEQ ID NO: 175920 - DNA, 505 bp, Zea mays
  Clone ID: MRT4577_92033C.1
aaaaaaaactgacaaaaaaaaggaaaaaaaaaaaaaaaaaaaaaaaaaaaaaaaaaaaaaccccaaccatatgcccgcccgacacaacccacaagtcaaggagctcgaagagggccccaataaggcgccggggtggaactccagcgtcgtcggggttcaagcccgccgcggaagggccgaaggccgccgccgcctcatcgccggcaaagcgggggcagttggccgcgcccgagggccgccgcgccgttctgctcggcctgggggccgtctccgccgtcacggcccccaccgggtcggccaaggccacaacctggattttttttttccaccacaccccgggcaagaaggtcttgaaggccaaaaacaggttggccaccgggggagaaaattttgggggcgcctaccccggggagttcggcggtggccagttcccctacgattttcctgggtgccaggacctccccaaccaaaagaagggccccttcttcggggacgacctccaaaa

SEQ ID NO: 175921 - DNA, 271 bp, Zea mays
  Clone ID: MRT4577_92034C.1
gcagaatgttgtatgtcacaaatagtcggttgacatcgctctatacacttttcatcttctcaaaagccaaaataaattcgcctgggcacgaggacggcgggtgccgctccggccatggagttgatgtgcttgagcaggcaaccatcgggttggacgaaaggaagggtagggtcttgtgctaaattggagtatttgactgcgctgtggttgacattggagaattgcgatggcggcgatgggaagtggagcctggctgcctgtgtgtatggag

SEQ ID NO: 175922 - DNA, 589 bp, Zea mays
  Clone ID: MRT4577_92035C.1
ccacgcgaagcaactcgagctacctgtgatcaactaacaaacctctggcaaacctttctccctactctcagcaacaacagatttcttccattcaaccaactgtctacactgaaccctgctgcttattcgcagcaacaactattaccattcagccaggtagacactgtctactctcagcaacaacaactttcttcattctaaccaattggccgcactgaaccccgctgcttattcgcagcggcaaatactactaccatctagccagctagctgcagcaaaccgcgcttgcttcttgacacagacacagctgctgactttctaccatccgaacgcggctaaccccgcaaccctattacaactacacacaactgagccacttagccaacttgatccgagagacctacttgcctcataccaagaacgcatccaagccagtggctctggttaacgtggctatttaccagcatccacaactaaagctactgtggatgccagcgctcagtcaactagccatggtgaaccctgccgtctacctacaactgctttcatctagcccgcccgctgtgggcaatgcacctacgtacctgcc

SEQ ID NO: 175923 - DNA, 335 bp, Zea mays
  Clone ID: MRT4577_92036C.1
aaccgccaacaaaactgggacagaaacggggggggcattaaaaaaaaaacatttacgggccccaaagggggttggagaacacgaacgacgggccagatggaccaaacaaaaaaaaacccccataaactccaaaaaggggcggaaaaaaataaaaaagccttgacctttttctaaaaaaaaagggggaaaaaacaaaagaaacaggcagggggccccgcgagggttaaaccaaaaaaaaattttccgggccccaaagggccagttattcccagggggaaattttttgaactttaaacaggggccatttaaaacaccaaaacatcggggggacaaaa

SEQ ID NO: 175924 - DNA, 189 bp, Zea mays
  Clone ID: MRT4577_92037C.1
gtgaaaggcataagcagctctgtgtccagcacgcacggtaatgccttcttgctcatgtgcttgcgacaccggacgggtggccatccaggtctggtttccagtgagcacaatacaggtaggtactataattggaacccgtgttctgtagataatcgaactctgcagacatgcccctgcatactcctagta

SEQ ID NO: 175925 - DNA, 325 bp, Zea mays
  unsure (1)..(325): unsure at all n locations
  Clone ID: MRT4577_92038C.1
cccaggcagtccggttctagatcgcgagcggccgccctttttttttttttttaaaaaaaaaatcccatatacatatagcacatttgtttcggttttttgatgcgcgcatgcatgctagcagacatctttcctaaaaaaaatttaaaaaaagctaacanngangttttgagnagnnacaaaaaatgttttntgagtagatcccccaaggctaggaggggggggaacccttctttttttggaacaaacgaaaaacacactatctatgctgcgttgggaatgcaagtcttgaccatcttctctaaaaaaaaaaaaaaagggcggccgg

SEQ ID NO: 175926 - DNA, 431 bp, Zea mays
  Clone ID: MRT4577_92039C.1
ctccctgtgggcatgccaaacaaatccatgtcatttaggccaatggagttcataggtgataaaggctcccaagatgctcctatgtattgccaagaaaaggatagagccaagataagaagccccagctattatattcttcgttcttgcagcactgaaattcttatgcgcccccactccagctatatatacacatccttagtggcttgttcggttagaagtgaattgaatgggattaaatgtcttgttagtcaaaattgaattatgaaagagatttaatctctctcgatccccatgcaactggattctaattctagctctctgtttggttttgagcagtagttggtacctctccccatgggtttgtgtatggagccatgtcaggtttaaatgttattgctggatcagcacaaaaaaggagcactgtacagaca

SEQ ID NO: 175927 - DNA, 772 bp, Zea mays
  Clone ID: MRT4577_9203C.1
cgaaaacagctgccaaatgtacatgttctgaaccaagtcacgaacaaagcgaattctgaagcccacttcagattgaccgggcctgagatctggaaggacacggcaggcaaggtggatgtattcgtagccggttcaggcacaggaggcactgtttctggcgtcgggaagtatctgaagatgcaaaagccaggcgtcaagatcatctgcgttgagcctgcagaaagcccagtgatttcaggtggcgcgcctggcaagcataaaatccagggagtaggcccagggtttctacctgaagttctggacacctcggtcatcgacgagaccgtcaccgtgagcaccgaggaggccatggcgaatgcgaggaggctggccagggaagagggcctgctcgtgggcatttcttccggagcaaacctggcagcttgtttgaaggtcgcttcgagacaggagaacaagggcaagatgatcgtcactgtgttcccaagtggcggcgagagatacatcaactccgacctctttgcagatgtgcgagaggagtgcattgccatgacattttgatcttccttttttcttttggacactttggtctgaatggtgtcagcattctccacaccacacagacatatttccaggacatggtcgtatcttggaatgaatgactgtggaggcaaacaagtccgcagcttatatcaaaaaaaaaaaaatttttttcaagactagtctctctctcgtgcgatcccaagattaatcaaaattttaataaacaggttcc

SEQ ID NO: 175928 - DNA, 324 bp, Zea mays
  unsure (1)..(324): unsure at all n locations
  Clone ID: MRT4577_92040C.1
gatccgcatcggccagactggtatccaggtcggaaacgcatgcttttatctgtactgcctcaagcattggagggggggtgatgttcatattccttttaacaagaccattgcctgaggtgatgatgctttcaacaccttcttcagtgagactggcgctgggaagcacgtnccccgtgctgattttgttgaccttgagcccactgatatcgatgaggagaggactgggagctaccgacagctcttgcatcctgagcagatcattagggacaaggaggatgcaaacaacaacttcgctcgtagtaactacaccattggcaaatagat

SEQ ID NO: 175929 - DNA, 351 bp, Zea mays
  Clone ID: MRT4577_92041C.1
gtaaaaatattatccctggtgttaattgcaagagaaaagtgaaaccgcacaaagaagaaaaacctggttatgtaccaatgagggaagaatactctggggaggacaagtggataaaggggaggagccgcctatataaaatgtgactcattcttttgtgcatatggttacactgcacacttagttaagtgtgcaaaatcatccacaatatgcgcaccacctgactggaagagaagttctgaccctaatcaagcttcaaagacacacctctcatgtgatcttcatagggatcaaggaccttggcctttatgagcaccagctgaccctatattgattcttaacaaagcttaaacc

SEQ ID NO: 175930 - DNA, 740 bp, Zea mays
  Clone ID: MRT4577_92042C.1
ctgagaagacccctgtgctgtccagccaacttttccacctcagtcctggatgccccccctccgccgtctagatctccccaactcctccgtcctcttgcttcctgtcgtcgacctcggtggccgccgcgagctgcgggtggttcatcgccgtcgacctcgcctctccgctccttctgcactacctgttaccggcttcctggtgctcgaccggtgcggcgcgggtcgtcagtgaagctccgactatccggattgactcggatcgacctctcctctcgtggatacatcatggcaccacgcagtaggccttcgtctaaaaggcctctctggttcatcgtgttggttgcatttgtctgtgcagtagccattggagcctacctttatactccacggcattacacagcatgttatctggtaccatcagaagcctgcaattctcggcctcctccagaacctgctagggtatacactgatgatgagatcgctgctcgtgctatcatgagagacatcatccgggcacggccagtgcagtcaaagaatccaaaaattgctttcatgttcttgacgcccagttcattgccatttgagaaactgtgggaaaaattcttcatgggacatgaagaccgatacaccatatatgtgcatgcatcaagagatagaccaattcatgcaagttcagtattctctggcagggatattcgaagtgaaaaggtgatctggggcacaatttctatggttgatgc

SEQ ID NO: 175931 - DNA, 1771 bp, Zea mays
  Clone ID: MRT4577_92043C.1
gtcgagcagaagcagagtttgcagtctgagaagaccacgtgtcctgtccggcccctgtgtggacctccgtccctttgctgttcagtcttggatgctccccctccgccgtctagatctccccaactcctccgtcctcttgcttcctgtcgtcgacctcggtggccgccgcgagctgcgggtggttcatcgccgtcgacctcgcctctccgctccttctgcactgcctgttaccggcttcctggtggtcgaccggtgcggcgcgggtcgtcagtgaagctccgactatccggattgactcggatcgacctctcctctcgtgggtttttggattttgatcagttatatcagaggagtgcttatggatgatttcatggctgtagcttgctaggccctgctttcctgtttgtacagatacatcatggcaccacgcagtaggccttcgtctaaaaggcctctctggttcatcgtgttggttgcatttgtctgtgcagtagccattggagcctacctttatactccacggcattacacagcatgttatctggtaccatcagaagcctgcaattctcggcctcctccagaacctgctagggtatacactgatgatgagatcgctgctcgtgctatcatgagagacatcatccgggcacggccagtgcagtcaaagaatccaaaaattgctttcatgttcttgacgcccagttcattgccatttgagaaactgtgggaaaaattcttcatgggacatgaagaccgatacaccatatatgtgcatgcatcaagagatagaccaattcatgcaagtccagtattctctggcagggatattcgaagtgaaaaggtgatctggggcacaatttctatggttgatgctgaaaagcggctcttggcccatgccctacaagaccctgaaaaccagcattttgtcttgctttctgagagctgtgtgccacttcataactttgattatatatatagttatctcatggagacaaacgtcagttttgttgactgttttgatgatcctggtccacatggagcaggtagatattctgaccatatgttacctgaaattgtgaagaaagattggagaaagggtgcacagtggtttacagtgaaacggcagcatgcagttcttattcttgctgacaccctttactatgggaagttcaagcgttactgtaagccaggaaatgagtggcataactgctattcagatgagcactacttgccaactctcttcaatatggctgacccgactggaattgcaaactggtcagtaacgcacgtagattggtccgaagggaaatggcatcccaaagtctacagggctgtggatacgagcttcgagctgctcaagaacatctcgtccattgatgagagcgtccacgtcagcagcaacgcgaagcatgtagcgcagaggaggccgtgcgtgtggaacggcatgaagcggccctgctacctgttcgcgcgcaagttctaccccgaggcgcttggcaacctgatgaacatattctcgaacttcaccgttatctgagcagctgaaggaggcaactctgtcggatcagagtccagacgtcgctacctacctgctgccgcaactctagtagatagattgctggtgatggctgctgagctaaggttatttgccagctcttgagacggcaagttttgctggtgtggaacgttggctagaatgtgacgtgtggacttctgttgttgatactgctgcagatgaattgtgattaaattttatgatctttcatctaaa

SEQ ID NO: 175932 - DNA, 359 bp, Zea mays
  Clone ID: MRT4577_92044C.1
cggtccggcatcccggtcgccccgcgtccgccgcagcgggaggccagtgctgatccctcgccagcagtacgtgacgaccttgccagctctgctgtcgactccgccacctgaacatgtcggctgctcgccagagctgatactcgcgcgtatctgggaagaccggttttgtggggggggggtgagtctccttcgagttcgggggtggaacttagcgacaggccctccgacacctataaggaggctgttcttcttgatccgtgaccctcaagtgtggtgtgatgagctaccttccttcgacggctgcctttgctctcctcttcaggttgacggtcctggcctctatactacttggttcctgt

SEQ ID NO: 175933 - DNA, 664 bp, Zea mays
  Clone ID: MRT4577_92045C.1
ttgctgacaccctttactatgggaagttcaagcgttactgtaagccaggaaatgagtggcataactgctattcagatgagcactacttgccaactctcttcaatatggctgacccgactggaattgcaaactggtcagtgacgcacgtagattggtccgaagggaaatggcatcccaaagtctacagggctgtggatacgagcttcgagctgctcaagaacatctcgtccattgatgagagcgtccatgtcagcagcaacgcgaagcatgtagcgcagaggaggccgtgcgtgtggaacggcatgaagcggccctgctacctgttcgcgcgcaagttctaccccgaggcgcttggcaacctgatgaacatattctcgaacttcaccgtcatctgagcagctgaatggaggcaggaacacagctaagcaactctgtcggatcagagtccagacgtcgccaactacctgctgccgcaactctagtagatagattgctggtgatggctgctgagctaaggttatttgccagctcttgagacggcaagttttgctggtgtggaacgatggctaggttggtgcgatttgcgaatgtgacgtgtggacttctgttgttgatactgctgcagatgaattgtgattaaattttatgatctttcatctaaaaa

SEQ ID NO: 175934 - DNA, 793 bp, Zea mays
  unsure (1)..(793): unsure at all n locations
  Clone ID: MRT4577_92046C.1
agccaatagatcacctacctttctcacccttcatccaacggcgccagcacgcacgagcagtgcgccgccatccgttgcgccgtcgtacgcagccagctggagcgccgcttcccgccagccagccggagcgccgccgcccgcgagagtcccgcccccggcgtgtatcagaaccccccccctccccggcgccgcgcagcagagctccgtggcgcgcggcctcgccgngcagcagagggccgcctccagccagctcgccggctatggctgccgctggagatccaccacctcctatttatgctgtgggtgctgcatggacatgaggtgaaatatttccatattttcattcttatgcaccggacgtctgtggttgatttttgaccactcgttctttttttgtcaattattcttttatttcattattatctttttgttctctttttccggtattttgttctctttattttttgacttcttttttatagtatttttctgtttctctttttttttttttgttttcattttttttttggtcgattttttccttgtctgtttttttgtcatccttctttttttttgtttatttttttcttcttattttatctttttttttcttttttttatctgcttcgtttcctcttttttttttttactctctccccttctctttttatttatattttttcttttttttctgtttttttttttttttttcttttttttttttcttttttttttctttttttaagtttttattcgtttctttttcccatttttttttttttttttttttttt

SEQ ID NO: 175935 - DNA, 1676 bp, Zea mays
  Clone ID: MRT4577_92047C.1
gtaaaaaaaatctttttatatatataggtgcaaaacctcttctcggcttcgagggagtcaagcagaagcagaagcgctgaagcagcgcgtttgcagactgcaaagacccctgtgaatttgtgatgtactgaggtgttgtccagccaacagtcctctgctcccatcttccgtcccccctccacttagatctcccgcactccgccgtaatcgctcttgctccctgtcgttacgctcggctgctgccgcgagctgcccttggttcgttgccgcctccttcgtctggcccctccccgtccaccgcccccctccggtctcccggtactggccgttaccggcacgattcctgcgcatcggtgcgccgcgggtcgttggtgacgctcggcctatcctgacggaggttcgtcgccctcgactcgcgcgggccgctcctctgcaacgccaacggtcagacgcctcccaaggcgtgcgtgtgggacggcatcaggcggccccgcgacctgctcacgggccagttctaccccggggcgccgggcgacctgatgaacatattctcgaacttcaccgtgatctcacccgctgaaggaggcaactctgtcggatcagagtccagacgtcgcgtcatgaagacagatacaccatatacgtgcatgcatcaagagatataccgagtcattcaagtacagtattcgctggcagggatattcgaagcgaaaaggtgatatggggcacgatttctatgcttgatgctgaaaagcggctcttggcccatgccctacaagatcctgaaaaccagcattttgtcttgctttctgagagttgtgtgccacttcataacttcgattatatatatagttatctcatggagacaaacgtcagttttgttgactgctttgatgatcctggtccacatggagcaggtagatattctgagcatatgctacctgaaattgtgaagaaagattggagaaagggtgcgcagtggtttacagtgaaacggcagcatgcgattcttattctcgcggacaccctttactatgggaagttcaagcgttactgtaagccaggaaacgaatggcataactgctattcagacgagcactacttgccaaccctctttaacatggttgatccgactggaatctcgaactggtcggtgacgcatgtcgactggtccgaagggaagtggcatcccaaagtctacagggctgcggacacaagcttcgatctgctcaaggacatcgcgtccatcgacgagagcgtccacgttagcagcaacgcgaagcatgtcgcgcagaggaggccgtgcgtgtggaacggcatgaagcggccctgctacctgttcgcgcgcaagttctacccagaggcgctggacaacctgctgaacatattctcgaacttcaccatcatctgagcgagcggtggatcggggaggggtttccgtcctccctcttgagtgctgcggcatcactctagtagatagattgctggtgatggctgccgagctaaggttatttgccagctcttgagacggcaagttttgctggtgtggaacgttggctagaatgtgacgtgtggacttctgttgttgatactgctgcagatgaattgtgattaaattttatgatctttcatctaaaatccaatgtcacgcacatattaattggtaaaaaaaaaaa

SEQ ID NO: 175936 - DNA, 134 bp, Zea mays
  Clone ID: MRT4577_92048C.1
tgcacacctggggtccgtaaaggaccgcccttaccatctcacttccgtcccggttttacttctcccatcacaaaacttgctagatggcagaatccaacctaacttgttctggaaaacgtacgggaattcccgac

SEQ ID NO: 175937 - DNA, 355 bp, Zea mays
  Clone ID: MRT4577_92049C.1
gagagaaaaagggacctgtttatattggggaaggcacaaacaaacgccaaaaaactttaaggggggaggaaaccccaaaaacagagcaaaaaggggccccccccatggtgggctgtgggaaaaaccccgggggggaggccaaaccaagggggggggaaggcaacaatcggggcagcgggaagagggggcccgcacaaggcccaccgggccggtaaaaccgcaccccccgggggggggccaaaaagggaacagggctcacaacaactacctgggtgaaagggggaagccgttgccgctggaaaaaaccagcaggcttcaatgccgcccggtgggtgaaaggaacaaaatgctgggg

SEQ ID NO: 175938 - DNA, 503 bp, Zea mays
  Clone ID: MRT4577_9204C.1
tgggtacctcgaggccggccgggagtcacctaccccatccaaggtcctcccgaaggcccaaaggccgtcgccgaccgccagaccaccatgaccgcgcagttcttcctcctcgccgcacactgccgccgccaggacccccgcgaacttcgcacgctccctattcgtccgcacgccctttccactcaggccacttcatacgccggctcgcagtgaggagccgccaccgacagggagctcgtcgtcgaggacgccactaagaacggcgtaaccgtactcaaggaagcgtctgaggaagagggagtggccacgctcacgaaggacgacgatggacctacatagctgtgaatgtgcgtatcacgtggactatacccctggacgtcatggcttccacctccacgaggtagatgatactaccaatgggagcatatcgagaggaccacattataatccacacaagctgacacgcggagcaccagaagacaaatcccgccatgggggagacc

SEQ ID NO: 175939 - DNA, 322 bp, Zea mays
  unsure (1)..(322): unsure at all n locations
  Clone ID: MRT4577_92050C.1
gcggccgggngcgagcgaggcaccgcacatctatctgtcaagcgacgccgcggcctcggatcagtagtcggaggcgaacacccgcatggcggcggctggcggcggcgcaggagggaaggtatccttcaagatcatcctcacctccgaccccaagctccctttcaaagtgttcagctgtgcccgaggcggagccctttaccgaggtgctcaagtactccgcggaggagttcaaggtcccgccccagactcagcgccattatagccaacgaaggaatcggcatccacccccagcggagtgcaagccacgggtgtctcgaacatg

SEQ ID NO: 175940 - DNA, 233 bp, Zea mays
  Clone ID: MRT4577_92051C.1
aaaaagcaacataaaaagagaaatacaaaattcaaaaatatagcaacaatggcggacccggaatgggggcattcttatgctccttgctcttgctacatgcgagggtaacacaaacattggccctcaattctcgcaagctaatgtagctaccctgaataccccataccttccatccatgatcgatttcctaagcgaaaacccaggccttgatctttacaggattcaccgtgcaa

SEQ ID NO: 175941 - DNA, 431 bp, Zea mays
  Clone ID: MRT4577_92052C.1
agaacgagccctaaacaaaaaaaaaaaaaaataaacaaatctaaaaaaaaataaaaaaaaaaaaaaaaaaaaaaacaaatataaaaaaaaaaaaaaaaaaaaaaaaaaaaaaaaaaaaaaaaaaaaaaaaaaaataaaaaatctttaacactatttaatgcaatgtgggagtataaaaaaaaaaaaaattttgttcctcttacccaaacacccctggggggaacttttcttaatttaattaccactcggggggggggaaaaatacttaaaagggggcccaattccccttaaaagggggggtttaaaaatcaacgggcccccctttaaaaacgatttttggggaaaaacccacagggtcccacccataaagcctgcgtctacaagggccccttttcccctttggggatttttataaaagccccctggccatc

SEQ ID NO: 175942 - DNA, 207 bp, Zea mays
  Clone ID: MRT4577_92053C.1
gttataatttcccacctaacaatatttggcgccgtacaacaacaaacgcaaccaacacttacatatctttattcccaacacgaaattaggattatacaatctcagatcccgaagcagagccgcgcaccttttaaaacaaaaccagcccacccaccaaaaaactgacgccgaggaggtttctccccacccaggtggggagcccaaaat

SEQ ID NO: 175943 - DNA, 1510 bp, Zea mays
  Clone ID: MRT4577_92054C.1
tagatatatattgggaccctcgaggccggccggaaaggacccacgcgtccggcaatggccaacaccacatgcctccgctcccgcctcctcgtcctcccaccgccaccggcgccccgcaccgtcgtgtcctttcgtctccgcccatgcgctactacgatctcctcgtcctcccgaaagaggagaccccgtctcgcggcacgggcggcgccgcccggcggcgctgtggccccggcgtcggccgcgtcgaaggaggatgaccagggggagatgggcagcggcgggggcctctctgcggatgatgcagagaggctgtgtcagtttctgcgggccgacctgccgcacctgttcgacgacgtcggcatcgaccggtccgcgtacgatgaccgcgtgcggttccgcgaccctatcacccgccacgacaccatcgacggctacctcttcaacatccgcctcctcaagctcctcttccgccccgacttctacctccacgccgtcaagcagacagggccgtacgagctcaccacgaggtggaccatggtgatgaagtttatgctccttccctggaagccggagctggtcttcactggcctgtcgatcatgggcgtcaacccgaagaatctcaagttcaacagccatgtggatctttgggattcgatacaaaacaacgagtacttctcttctgaaggactatgggatgttttcaaacagctacggatttacaagacccctgacatagaaacaccaaattaccttattctaaagaggactgcacattatgaggttaggagttatgcgccattcttagtggttgaagcaaaaggtgataaactgacaggatcgtcgggcttcaacaatgtaacccggccgggatttggcaataatgcttcatctgaaaagattccgatgactacacctgtcttcactcaagcttctgacaacacactttcagatgtatccatccagatagttctgccaatgaacaaagacttggacagtttaccagctccaaatacagcagttactttgcggaaggtagaaggaggcattgctgcagtgaaaaaattcagtggacgaccaaaagaagaaattgtgctccagaaggagaaggatctgcgctcccagttacttaacgatggattgaagcctcatccaggctgtttgcttgcacgttacaatgatcccaggacaaagagcttcttaatgaggaacgaggtgcttatacggctaattgacttcacactggagttgtaatcgtcaatactggcatcagatcgatgtaacacactgggcttggagcttccagtgagtcattagaaaggagaattctgattctatttgtgtactttacctgaaaagaagtcgaagggttggctacagtagtgagagttatctcaccaagttacaggtttaagtttgatgcttcatgtaaatgtaaactctaaaaggtaataagctccatgctaaaacgccaggtcattttgattcgtttatgggggaaaaatattgatta

SEQ ID NO: 175944 - DNA, 271 bp, Zea mays
  Clone ID: MRT4577_92055C.1
gggggtccataggataagttggaagagtaagaacaaatcgggaaaacattatccagagagccaatgtgcgttcaacaacaatgggaccacttgagtggtaaagactgcagaactctggctcaccggacggtggaggaccatacccccattccggaacagggttccgccgaactttgcgcgaggacaagaacccatttttatttgaatctccaggatgaacaatttccttctttcctaacggggggtgcggaaatgagctttcgtaagctta

SEQ ID NO: 175945 - DNA, 597 bp, Zea mays
  unsure (1)..(597): unsure at all n locations
  Clone ID: MRT4577_92056C.1
agtctttaacttaaattataaaattagaaagtcttttctcttaaccctagatagaagatccccaattcgccgaatctctcggcaacgcgcctagacccctgattctctcggcgacgcgctcggcagatctatccgggacgaccctcgcatccccgtcgtgcgggcggtggtggatcagtcgggaccggaaagatgcagaaaaataagagggcgagtggtcacgcaagtagcttgagaaaggtgcaaagcaccatcaaaaagaaggaaaaaattggaagtagtcgcaaaagaggcattactactcggaaaggacacctgagagagaatatatttggctactcatcgcctgatcgggatatttctagcaccaagttcgaagagcgacaatttggcaatgtatatgaacctggtcaagctgactggtgtgaactaagtaaaagactagcttcacatttgtctgtggaagttgtctcacttgctttgttcgatggagataagatgttatatgcatgcacgggtatagttctaccacgtgngacatcaagactggacctaacaagattcctgacttcatcacagttggttgcagtctttaat

SEQ ID NO: 175946 - DNA, 1459 bp, Zea mays
  unsure (1)..(1459): unsure at all n locations
  Clone ID: MRT4577_92057C.1
gggacgcgcgcatctacctggccgacacgctcccggtcttcgtgcgccgggtcatctacctggactccgacgtggtggtggtggacgacgtgcgcaagctctggtccgtggacctgggcgagcgccacgtggtggcggcgcccgagtactgccacgccaacttcaccaagtacttcaccgacgccttctggtccgaccgggagctgcgcgccgccttgcgggaccgccgcccctgctacttcaacacgggcgtgatggtcatggacgtggcgcgctggcggcggggagggtacacccggcgggtggaggagtggatggcggtgcagaagcggaagcggatctaccacctggggtcgctgcctccgttcctgctggtgctcgccggcgacatcaggcccgtggaccaccgctggaaccagcacggcctgggcggcgacaacgtcgagggcaggtgccggagcctgcacccgggccccatcagcctgctgcactggagcggcaagggcaagccctggctgcggctcgactcccggaagccctgcaccgtcgactacctctgggcgccctacgacctctacaaggccgcggccaccgcgctggaggagtagtagtgacccgtccgtccatgctaagcaagctacaccggaatgcgggggtcttggcggccatgcatgggtcaacgatcgagatcgacccggggcacgacggcggccgacggcggcgaggagggagacgatcgatccaagaggaggtgtgtccgtgcgtacgtgtgtgcagcgagcagctagggcatatgcattatttcagaagagaactagctactccgatcaagatgagcgacgaaggattgtacgtatattgctgagaggagatcgaagagacggtgatgagttggcggaagatcgatgcatgcgtggatgatcatcacagccaatcgtacgtgtgtaaaaggtcggccggaggggggaataatcgtgcatgagacacctctctcgctcgctcttcctctcctacgtcttaattcattgggttcgtcgatccgagatcctacgtacgtcgtcgtttttgtattgtatatattataggtcatcatctcgtgggggtcatcagatctggcgggttggtggtgtgttgtaatttgtaaagagatcgattaggggtgatgcggtggaggggatactacacactaacaaaaccgagttgtatactgtactactaaactagagatggtaatggtgacgtgattcccgatttcctggaatttttaggatggagatggaaaagtttcttcccctataggatgtaaacgggaaaaaaaatctccaccgacgggtaaacgaggacgggaatggtgaaacattccctattcccgtggagacccgttaaacttaaatttgatgatgttttcatgtaacggttaatgataaaaataaataattaccttatcaagtatnnaaaa

SEQ ID NO: 175947 - DNA, 192 bp, Zea mays
  Clone ID: MRT4577_92058C.1
gcaagacccaaaaaccgggtccgctatttttatcttttaaaaaatccattccaaaggccctttttgactccatttaactttaaaccctaaaaatgggatttttttttccctactctcaaaatacaccctgtttttctggttaggggtggggaataaaagcctgccgggggggcagatcttatgctcaaattg

SEQ ID NO: 175948 - DNA, 700 bp, Zea mays
  Clone ID: MRT4577_92059C.1
ccggccggggaactttcttcaccgcaatccgccaaaatgcccgagatcaccacccttctgttcgactgcgacaacaccctcgtcctctctgaggagcttgccttcgaggcttgcgctggcctcattaacgagatctgcgaggctcgtcaagtcgagatgcgcttcactggcgagaccctcatcaaggagttcgtcggtcagaacttccgcggcatgctcaccaccctccagaagaactacaacatcgagatctcacctgaggacatggagacctatgttcgaaaggaggaggacgccgtcattgccaagctcaaggaatctctccgaccttgtgttggtgttgatgagcagctcgagaagcttgccgcttctggcaagtacaccatgtccgtagtttcttcctctgccctgcgccgtgtccgtgcctccattgagaaggtcggtcaggacaagtacttccagggcgatgttgtcttctctgccgctacaagtctcgagaagcccaccagcaagcctgatcccgctatctatctccacgccctagagaaacttggcaagaaggccgaggaggccgtcgctattgaggacagcaagagcggcacccttagcggcactcgtgccggtatcaaggtcattggttattggtggttcttatgctgaggataagcagcccgagatggagaaaaccttgagagatgct

SEQ ID NO: 175949 - DNA, 370 bp, Zea mays
  unsure (1)..(370): unsure at all n locations
  Clone ID: MRT4577_9205C.1
aatgcacgcgtgacataagctaaaaacctntaaagcggccagacctttaatttttttaatttttttattaatattttaaaaaaaaataaaaaaaaaaaaagatatttttattttttttttttttttttttaaaaaaaggcaatacacttggaaaacttcctaaaaaaaggtgtggggggcaaaaaaaaagctgaaaaaataactggctaaaaataagtataagaatactaaacgtaactacaaaaatatgcactgggcaaaaaattaaaaaaaaaaccaacaggttcaaactttggggaaaataagtttattttggtcccataccgatttttccaaaaactccgggaaaaaacaaaaaataataccgttt

SEQ ID NO: 175950 - DNA, 242 bp, Zea mays
  Clone ID: MRT4577_92060C.1
ctctgtctgtctagcgcagggtatgcttcctggtggagggtcaaagttcctgcattgatggcgaccgacgcggctgagattcacgatccggtgacgaggcggtccccagaacccccgaggaggacctgtggcgcccgacgactgtgcgaatcctaccaaggccataaaagcctctgcgcggaagtatgcgtgccaacctcgacccacctcacagaacgcgagagatgactctcggaggcatg

SEQ ID NO: 175951 - DNA, 195 bp, Zea mays
  Clone ID: MRT4577_92061C.1
attcggctcgagcgcaaaagatcaactccattagtaataatccagagctcatgctgctagttgggggggaattttagaacaaattccgcgcattacagtgacaagccaatatttagattaacacataattgcagaagatgatctagcaaattaggagtgaggatgctcgttttaataacgtccactgcataccaa

SEQ ID NO: 175952 - DNA, 300 bp, Zea mays
  Clone ID: MRT4577_92062C.1
acgctgacactttttcagtcacagaggtacgaggaaatggttgacttcatggacatcgtagcgggagctgttgactctgaagagctcactgtcaaggatcgcatccttctgtacgatgcatacaagaacgttattgtaaccattcgtgcctcatgacgcatcatttccttcatcgatcacatggaggaggatcatgccaatgttgaccatgtaacactcatcaataactacctcccaactattgaatctgacctcaacacatatctattataacatcctcaatctatatgaataatatct

SEQ ID NO: 175953 - DNA, 150 bp, Zea mays
  Clone ID: MRT4577_92063C.1
aaatttctttttttgaccaaagaaaacatccttggcgaatgctttacaagaagggcgcctctcacaaatccaagaacgccacctacgactttgaaacacgaaagccccgcactgcccctaataatacactctccgacccaggaggccaac

SEQ ID NO: 175954 - DNA, 379 bp, Zea mays
  unsure (1)..(379): unsure at all n locations
  Clone ID: MRT4577_92064C.1
tgccttttcagtattggacaatgctaatggaggtacaactccaaggacaagaaggtatagtgcanatggagcaggtggtgatgcttctgtataacttacacggccgtgcaggcacgcagctgccgcgcttggtgatttgatatttgtgtatgacggtttacgtggaggtgccgatccacagatttagtttgaagagaaaatagtagcagaagaaaaagttggcgctcgacaattttttcggaatcatcttaaaaggctgaccatcaaataaaaaccaggttaaaaacacaaaatgtaatatatatgtaagtgaaatttggtttgatgatattctcttttagacaaatagagaattatttattttcccatttttagtagc

SEQ ID NO: 175955 - DNA, 342 bp, Zea mays
  Clone ID: MRT4577_92065C.1
gggacgcgcccgcgaccgctgcgcttttgcgacgaggatgccatggcatggcgcgctccttcaggagggaggttttgcttcattcatcccctttactgttttcgaggaccttagtatacagggtgcgtcactttggagaaggtactttggcgcacatacctttggtgactgtgccagacagaaaaaactcaccacgacagtgtcgactaaagagcctttttgaacgagcggtgatcaaaacggtccgagcctgagaaaatttataccaaaccccccagagaatctggtgctttgggggtgggtctggggccttaaccacacacaaaaaaaagtttgtttttt

SEQ ID NO: 175956 - DNA, 2173 bp, Zea mays
  Clone ID: MRT4577_92066C.1
gtccaattatatttcagagaacgaaagcaacatgttttgcttatggccaaacaggtagtggcaagacgtacacaatgcaacctttgcctctgagagctgcacaagacatggttcgtctattgcaccaacctgtctatcggaatcagaattttaagttgtggcttagctattttgaaatatatggtgggaaactatttgatcttctatctgacagaaggcaactactgatgagggaagatggcaagaaacaagtttgcattgttggtctacaggaatttgaggtgtctgatgtacagatcgtaaaggaatatattgaaagaggaaatgcagctagaagcacagggtcaacaggggccaatgaggaatcatcaaggtcacatgctattctacaactggctgtgaagaagcatatcattgtaaaagataccaggagacagagagatcgtgatgctaatgaagctaaaaatacaaaggctgtggggaaaatatcatttattgaccttgctggaagtgagcgtggtgctgatactaccgataatgatagacaaacaaggattgagggagcagagataaataaaagtctgttagctctcaaggaatgcattcgagcacttgataatgatcagatacacattcctttcagaggaagcaagcttactgaggtccttcgtgactcatttgttggtaactctaggacagtgatgatttcttgcatttctccaaacgcaggttcatgtgaacacacactaaatacattgagatacgctgatagggtcaaaagtctttccaagggcggaaatacaagaaaagagcagtccacaggaccaactaccacttctagccgggattctttgtcagctttatcatattcattgcctgctgaagctgaagaaattcctaatcaagttcaagagaagagaccagtcgatacttataggaagggcactgaaaattttatctccaacccttctgtggagtctgaccgaaattcctttagtacgattccaaattattccaatagagggagagaagaaaatggtgcagcatctggtaatgacagggagagctatgatttgaagtccagccaacctgcttacactagtaagccacagttggttcagaattcagcaaacacacaggaggaggagaaagtcacaaaagtctcacctcctcggagaaaggcttatagagaagacaaatctgataggcagagcaactatatgaaaaaggataatggtcctgagacaagtcgggttgggtataagatgcagcaggcaaagcagctgcaacagcaacaaagaccagcatctgcttcagcctcatcaaggcaatctgaaaaggaaagttcttgtgatgatgtagaaattgatgcaattcttgaggaagaggaggccctcattgcagttcacaggaaggagatcgagaatactatggagattgtgcgggaagagatgaaccttttggcagaggttgatcaaccaggcagcctgattgacaactacgtgacacaactgagctttctgctgtcacgcaaggctgcaggtttggtaagcctccaatcacacttggcacggtttcagcaccgcctcaaagagcaagagatccttagccgcaagaaaccttccagatagtatgctcaacaatggctctggattttgcctggaaatcttattgcttggagctcaatcgcagtctattagttggttttctcctgtgcgctccagtaaatgttagacccaagcaaagcagtgatagagaggacacatgggagttgcttgagggtgtggtgatcttgatgttgaggatggtgtggtcctggttgatgtctccactttgtgtttgtcagggttgacaaccagtttggtagtagtcctttttacagtggggctgcttgggtgtttttttttggcagatgtcatgtatggcttgcccactttgcctttttttttcttttccccattttgtacgagaaactggaatgtctggaatgttgtttgcagacaccggtgggtcgatattcaccgagggggtctgtggaaaccgatacattgttgtatactagtcggttgaccgtgcgttacaacggcttacaacaatatccacgtaaactattcataaaaaatttttaagattttttaaaaaaaaaaaaaaaaaaaaaaagagcggccgggcc

SEQ ID NO: 175957 - DNA, 896 bp, Zea mays
  Clone ID: MRT4577_92067C.1
tgtcacgcaaggctgcaggtttggtcagcctccaatcacacttggcacggtttcagcaccgcctcaaagagcaagagatccttagccgcaagaaaccttccagatagtatgctcaacaatggctctggattttgcctggaaatcttattgcttggagctcaatcgcagtctattagttggttttctcctgtgcgctccagtaaatgttagacccaagcaaagcagtgatagagaggacacatgggagttgcttgagggtgtggtgatcttgatgttgaggatggtgtggtcctggttgctgtctccactttgtgtttgtcagggttgacaaccagtttggtagtagtcctttttacagtggggctgcttgggtgttttttttggcagatgtatggcttgcccactttgcctttctttcttttccccattttgtacgagaaactggaatgttgtttgcagacaccggtgggtcgatattcaccgaggggtctgtggaaaccgatacattgttgtatattcgttaatgatattatttgcattgaggaaaaaaaaaaaaaaaaaaaaaaaaaaaaaaaaaaaaaaaaaaaaaaaaaaaaaaaaaaaaaaaaaaaaaaaaaaaaaaaaaaataactaaaaaaaaaaaaaaaaaaaagaaaaaatcacacaacggaaaaatcaaaaaaatggaacattaaaaaaacaatgacatttaaataaaaaagaaaaaccatagccaaaaaaaaagaaaaaactcctggaggtgacggggggggggattaaaaaaacagagaaaaaccttttcttgcaaaaaaaagaatatatttgcccaccacccgagggagaatttatcttggtgcgggggatggcccatatatggggggggccaccaagagccc

SEQ ID NO: 175958 - DNA, 303 bp, Zea mays
  Clone ID: MRT4577_92068C.1
attcagaaaaggattaaaaatataatatcattcacaactagatcatttacagatagatagctagatctaaatcattcacaaaaactccagagatgatcaataacaaaagctctaccagcgacattatttcacggcgaggcaaaattgtatctcgttttaacacacaagttacaataatttcacaatattgcctttcaaggatatagactaaaactgcggtgcttgggttaattgaaacaatattccctttaacacaaataattgtatcaacatgggatttgtttaaaatgggtgaaacgtaaa

SEQ ID NO: 175959 - DNA, 2144 bp, Zea mays
  Clone ID: MRT4577_92069C.1
aattcggcacgaggagagcggcacgaggcagccagcgagcgccccctccggctccggccctcctcttcctcttcccccaattcccattcccaattcgccctcctcaaatccggcgccgcattcccgacattccgcagatctgggatccgccgccgacggatcccctgccgcccgcaacgacccgggacgcgcgtgatcccgccgcctagccgccaagttggcgcctcagcggaggtcgcagcgcctcgccggcggcggcgcgggctctgccgccgccgccgccgcgcagccgcccggagcctctagcgcgcacgctgcgacgggtgactcgggcgacgccgtcatggcgcgctggctgcagtccgcggggcttcagcacctcgcaacgtcctccgccgccggcgctggcggcgcggactaccgtggtgggatgcctgggtttgggggcgctggcgccggaagcatgctgtcgagcctgctcatgcagggctatgggccagaatcaattgaagaaaagcagaggctttatacgcttctgagaggtctaaattttagcggagagtctgtacccacatcaatctctgagccttacacaccaacagctcagagctttggtggtgggaacctgtagaggggttttattcgcctgaacttagaggggatcttggtgctggacttctagaccttcatgctatggatgatactgggcttctgtctgaggatgtagcatcggaaccatttgagccatcaccttttatgccgaaggatattgatgatgatgatgaggatgtgatagcagggagtcagcaagcctcagtagataattatggtgtggtgaccagtgaaaaagagaccactgctagagaaaataatgtagcaaagattaaagtagtggtaaggaaaagacctttgaacagaaaggagctatctcgaaaggaagaagacatcataactgtggaggattcatcatttttgacagtttatgagcctaagctgaaggtggatctgacagcctatgtggagaagcatgaattttgttttgatgctgttttggacgaacatgtttccaatgatgaggtttaccgtgaaacagttgagcccataattccaattatatttcagagaacgaaagcaacatgttttgcttatggccaaacaggtagtggcaagacgtacacaatgcaacctttgcctctgagagctgcacaagacatggttcgtctattgcaccaacctgtctatcggaatcagaattttaagttgtggcttagctattttgaaatatatggtgggaaactatttgatcttctatctgacagaaggcaactactgatgagggaagatggcaagaaacaagtttgcattgttggtctacaggaatttgaggtgtctgatgtacagatcgtaaaggaatatattgaaagaggaaatgcagctagaagcacagggtcaacaggggccaatgaggaatcatcaaggtcacatgctattctacaactggctgtgaagaagcatatcattgtaaaagataccaggagacagagagatcgtgatgctaatgaagctaaaaatacaaaggctgtggggaaaatatcatttattgaccttgctggaagtgagcgtggtgctgatactaccgataatgatagacaaacaaggattgagggagcagagataaataaaagtctgttagctctcaaggaatgcattcgagcacttgataatgatcagatacacattcctttcagaggaagcaagcttactgaggtccttcgtgactcatttgttggtaactctaggacagtgatgatttcttgcatttctccaaacgcaggttcatgtgaacacacactaaatacattgagatacgctgatagggtcaaaagtctttccaagggcggaaatacaagaaaagagtagtcctttttacagtggggctgcttgggtgtttttttttggcagatgtcatgtatggcttgcccactttgcctttttttttcttttccccattttgtacgagaaactggaatgtctggaatgttgtttgcagacaccggtgggtcgatattcaccgagggggtctgtggaaaccgatacattgttgtatactagtcggttgaccgtgcgttgcaacggcttacaac

SEQ ID NO: 175960 - DNA, 380 bp, Zea mays
  Clone ID: MRT4577_9206C.1
cccacaggtactgtggtgctatggatctcggccgcgtcggcaaggacaacaaggcacaaaagtgtgccgcctgcttgccggtcaaggcacagatggacggcgcgaacgaccgcgcgacgaagcgtcgccgggaagagaagatgtcgtttgctctgggctacgattaagcatcgccgcgactgattctctcattctacgcgagcgtagcgagcgaacatcatcgcgagcgaagggagcactctcacgcatcgacagcctataaaccatatcatttatgaacaacggcgtttggacattcttcatttctcataacgacacacggcattctcattttcgataccctacatctacacaacgtcgcggcgcgctacactcgagcg

SEQ ID NO: 175961 - DNA, 3214 bp, Zea mays
  Clone ID: MRT4577_92070C.1
aattcggcacgaggcccaggccccccaactctcttcctcctctccctccccacaccaattcccattcccaattcgccctcctcaaatccggcgcccgcattcccgaccaccccgcagatctgggatccgccaccgccggatccctcgctgcccgcggcgccccgggacgcgcgtgatcctacccacaaccgtcaagttggcgccccagcgaaggtcgcagcgcctctccggcggcggcgcgggctccgccgccgcgcagccgcccggagcctccggcgcacaggcagcgatgggtgactcaggcgacgccgtcatggcgcgctggctgcagtccgcggggctgcagcacctcgcgacctcctccgccgctggtgctggcggtgccgactaccgcggtgggatgcctgggcttgggggcgctggcgcggggagcatgctgtcgagcctgctcatgcagggctatgggccagaatcggttgaagaaaagcatagactttatactcttctaagaggtttaaattttaacggagagtctgcacccacatcaatgtctgagccttacacaccaacggctcagagctttggtggtgggaaccctgtggaggggttttattcacctgaacttagaggggaacttggtgctggacttctagaccttcacgctattgatgatactgagcttctgtctgaggatgtagcatcggaaccatttgagccatcaccttttatgccaaaggatattgatgatgatgatgaggacgtgatatcagggagtcaacaagcaccattagataattatggtttagtgaccagtgaaaaagagagcactactagagaaaataatgttgcaaagattaaagtagtggtaaggaaaagacctttgaacagaaaggagctatctcgaaaggaagaagacatcataaccgtgcatgattcatcatgtttgacagtatacgagcctaagctgaaggtggatttgacagcttatgtggagaagcatgaattttgtttcgatgctgtcctggacgaacatgtttccaatgatgaggtttaccgtgaaacagttgagcccataattccaattatatttcagagaacaaaagcaacatgttttgcttatggtcaaacaggcagtggcaagacatacacaatgcaacctttgcctctgagagctgcacaagacatggttcgtctattgcaccaacctgtctatcggaatcagaattttaagttgtggcttagctatttcgaaatatatggtgggaaactctttgatcttctatctgacagaaggcaactattgatgagggaagatggcaagaaacaagtttgcattgttggtctacaggaatttgaggtttctgatgttcagattgtcaaggaatatattgaaagagggaatgcagccaggagcacagggtcaacaggggccaatgaggaatcatcaaggtcacacgctattctgcaactggctgtgaagaagcatatcatagtaaaagataccaggagacagagagatcgtgatgctaatgaagctaaaaatacaaaggctgtggggaaaatatcatttattgatcttgctggaagtgagcgtggtgctgatactactgataatgatagacagacaaggattgagggagcagagataaataaaagtctgttagctcttaaggaatgcattcgagctcttgataatgatcagatacacattcctttcagaggaagcaaacttacagaggttcttcgtgattcatttgttggtaactctaggacggtgatgatttcttgcatttctccaaacgcaggctcatgtgaacacacactaaataccttgagatacgctgatagggtcaaaagtctttccaagggtggaaacacaagaaaagagcagcccacaggaccaactaccacttctagccgggagtcttcgtcagctccatcatattcattgcctgctgaagctgaagaaattcctaaccagattcaagagaagagaccagttgatacttatcggaaaggcactgaaaattttacctccaacccttccgcggagcctgatagaaattcctttagtatggttccaaattattctaataaagggagagaagacaatggtgcagcatctggtaatgatagggagaggtatgatttgaagtccacccaaactgcttacactagtaaggcacagttggttcagaattcaacaaacacacaggaggaggagaaagtcacaaaagtctcacctcctcggagaaaggcttatagagaagacaaatctgataggcagagcaactatatgaaaaaggataatggtcctgagacaagtcgggttgggtataagatacaacaggcaaagcagctgcaacagcagcaaaggccaacatctgcttcagcttcgtcaaggcaatctgaaaaggaaagttcttgtgatgatgtagaaattgatgcaattcttgaggaagaggaggccctcattgcagctcacaggaaggagatcgagaatactatggagatcgtacgggaagaaatgaaccttttggcagaagttgatcaaccaggtagcctgattgacaactacgtgacccaactgagctttctgctgtcacgcaaggctgcaggtttggtcagcctccaagcacgcttggcacggttccagcaccggctcaaagagcaagagatccttagccgcaagaaacctcccagatagtatgatgatcagcaatgactctgtccttgtgccttgtaatctgattgcttggagctcagttgtggtccatcagctgttttttacgtgtgcgctccagtaaattctatagccccaagcaggccaagacatgtgggagtggcttagggcggtcttgatgtcgagggcgtggtcctggttgatatcacctgacactttttgtcagggccgataaccagtttggtaatagtcctttttctatacagtggggctgcttgggtgtggttgtttttggcttgcccacttttacctttgttttctttttcacatattgtacgagggaaagctggaactgggattttgcagatatcagtgggtcgattttcgctggaggggtctgcggaaacagatacattgttgtcgtatattcattactgatattatttgcattgcggaaaaaaaaaaaaaaaaaaaaaaaaaaaaaaaaaaaaaaaaaaaaaaaaaaaagtactctgcgttgttaccactgct

SEQ ID NO: 175962 - DNA, 256 bp, Zea mays
  Clone ID: MRT4577_92071C.1
gccgcccgcgggccccaattcccggttcccgccacgccccacgcgtccggaaaatcacattagcgtcatacattaagtgacaattaattttgcaaaggtgagatatttaccatgtggttcttcgtaactttaggtgttgttcggttatttcaattccatatggattgaaagtgtattaggatgtattttgatttgctatggatttaaaccgtctcaataaaaaaaaacaaatactaaacaacaaaaaacccacacc

SEQ ID NO: 175963 - DNA, 585 bp, Zea mays
  Clone ID: MRT4577_92072C.1
gcgaagatacggaaacatcgaggctcgccgactagggtttgcgctgctcctctctcccgtccccgtcgacgccgaccaggcgccccgccgcgatgccacagtccgtcctggtcgatcgcgcgaccagcgagtcgctcatcgggcccgactggtccctcaacctcgagatctgcgacgtcctcaaccacgacccctcgcaagctaaagatgtagtcaagtctatcaagaagcggattggacacaagaattcaaagatccagctcctcgcactaacactgctggagacgctgattaaaaattgtggagattttgttcacatgcatgttgctgagagagatatactccatgaaatggtgaagattgttaagaaaaagcctgattatcatgtaaaagagaagatactcattttgattgacacctggcaagaagcttttggtggtgctcgtgcaagatatccacaatattatgcggcatatcaagaactgctgcgtgctggagccgtatttcctcaaaggtcagagagttctgtgccaatctatactccaccacaaactcaacctctacagaactaccctcctcctgctt

SEQ ID NO: 175964 - DNA, 350 bp, Zea mays
  unsure (1)..(350): unsure at all n locations
  Clone ID: MRT4577_92073C.1
gagaatctcacctccagnaaaatggcacaaacaaacatagnagccaggcatccggcagcgcccactggggctcctgggtctctgagatcaagcgtacgctactgtaaggaccacgtccctctaatgatgaggaacataaactactggcgcaaccataattagtgcattgcagtgcatgaatatttctgggatacgtacaataagcagagcgtcatggtgaggaccttagatacaacagcagaagcatgcagagcatatagattacgctgctgcgctgatgagcggacacaacgccaacaccaacctgccaatccaaaggaaccagcacacggggaacctaccccagccgc

SEQ ID NO: 175965 - DNA, 450 bp, Zea mays
  Clone ID: MRT4577_92074C.1
ggccgggaagagggctcaaccccgaccaaaaggggaccacccgtggcaattgcaaagccccaatctacagccccccaaaacaggaggccccacccaccccaatttagggtttaaaaaaaccaaactatggcaacggggcaaaacctaccccacaaaggcccccccccttgggggattcaacccacgggcccaaaaaactaaacccagcccggccgggcttaaaacattgcaaaaaccgcctctcgctgaaagccccaaaggggggagggaaaacataaaatcaccctttttttcgccttcccgagcccacaaaaacggccaaaaaaaaccgccccccccccttgaaagaacccaacggagccccccccccccctgaaatccctaaggccgccctctttgggggaggcgaattcttaaaaagccttttttccttccctgcccgcccctttt

SEQ ID NO: 175966 - DNA, 344 bp, Zea mays
  unsure (1)..(344): unsure at all n locations
  Clone ID: MRT4577_92075C.1
tgttggacgtgtttaacactcccactaccaccttgaggggactttctggcggagaagcacgagccaagatgatgctaacacaccgacgcacgttgcccagaggcaacatatgcgtggaaccagcacaaagcacancaacgagcgcgcgagagctcctaacaacaatggggacaaggaaaaaaaaagagtaaacgagacaagcatggttcctagtagtatacttttcttctctaacaaatgaaggtttcactttgtcaatgcgacgagtagctcggtctttttaaccttgcttgctggttatgccaaggtaatatctcttaaaaacactaatttgggccttcctc

SEQ ID NO: 175967 - DNA, 357 bp, Zea mays
  Clone ID: MRT4577_92076C.1
cctcgctcccatgctttgggaagctacgaagcatggcgtccgtcaccgcccgcgccccggtcgcggcccttcgcccgtcgtcggcatcgctcaagtcgtcgtcggccttccttggccactctagccgtccggtcggtatcgttttgtccacgaggcgcatcctcaaggcggaggcccagggcgagtggcttcctggcctttccttcccctcctaccttgacggtagtcttggttggtgacaattggcttcatccctatgtgcctgtcagatgacctttttatcctggggtggttttatgctcattttatgtactgatatggctcttgcatcatcatttttttacaatctcttacttt

SEQ ID NO: 175968 - DNA, 399 bp, Zea mays
  Clone ID: MRT4577_92077C.1
gcacaaaacttgatcctctacatcgaccgccctcttctttttttttttttttaattttattttcccttttttttttttttaaggtttgaggatatatttttttataccaattaatatatccttacatcatatgcaatccgatcaaccaacattcacacagacacacgtacgtacatgagcacaaagacttacgccaaacatgcacagagagatatcaaactgaataactctgttactctctctctcacacacaccacacaatacctatgtatagcagccagctcgtcctccctcattattgttcaaccaccaccacaagctaaatagatactaatcatatccatgggcggcgatcgatgtgatcaacacttgcaaaaggaaacacttgcccttgccacc

SEQ ID NO: 175969 - DNA, 291 bp, Zea mays
  Clone ID: MRT4577_92078C.1
cgacaagatggcgtgcacaaacaatgcgattagagccttgttcctcctggtcctcttctgcgtcgtgcatggtgagaaggaagagtcaaagggcatcgatgcgaaagcgtccgggcctggtgggtccttcgacatcaccaagttgggcgcctccggcaatgtgcatgacagacagcacgtatgctgagcacgaagcatgtgcatcggcgttcggcatgcactgggaagcagacaatgctgatacccaacggtgacttacttgtctgacatctcaacttctcaagcccttgc

SEQ ID NO: 175970 - DNA, 184 bp, Zea mays
  Clone ID: MRT4577_92079C.1
gaacaactaaaaactgaaatttatacatctttcgggaattacatcatgataattccaaaaaaggaattggtttgggttgccggttggacactccaggggatcctataccttgatccatccatttacaccactttgagattacattacataatggtaatcaagcttgtctgctcgacatgttaat

SEQ ID NO: 175971 - DNA, 372 bp, Zea mays
  Clone ID: MRT4577_9207C.1
cctaaccctcgcccttgtggaggtcggccgccaccaccgggccaggcccttgagtggccactccgatggcgccccctgcgtgctacccgggctgctgcacgggctgttgctccatctgcgcgtgcgccgaggaggaggaggacctgtgtggccgcctgaaatgggtccagacgccacatgggagggcgtgcgaaatccaggaggagtacgttggaagacggagcagagggaacctgggagcgcgagactccttcgtgcgcagggaggaggttaagcgggatccagtgctgtaccgcgtcgtcatgtggcgcaggtttatggaggatggtccaacgggaacaacgggcatggggggcttctaccactggcagc

SEQ ID NO: 175972 - DNA, 2982 bp, Zea mays
  Clone ID: MRT4577_92080C.1
ttattttttgaacaacttgcaaaagcattaaaatgtacgtgcacagacatgtagttatgtttaacattctgtcgatgagagcaacgtgggctttgccgagcctcctcctcttcctcgccttctcttcttccttttgcaaagcctcagcctccgcctccacaaagcaagacaaggtctacatagtgtacctgggcaagcacggcggcgcgaaggcggaggaagcggtccttgaggaccatcgcacgctgctgctctccgtcaagggcagtgaggaagaggcacgggcgtcgctgctgtacagctacaagcacaccctcaacggcttcgcggccatcctctcccaggaagaggccacgaaactgtcagagaggagcgaggtggtgtccgcgttccagagcgaggggaggtgggcgccgcacaccacgaggtcttggcggtttctgggcttcgaggaggggctcgaccgtcgcccccccgacgacggtggggatcagtggctgctgccgtcgtccctcgacaaggccagcgaggacatcatcgtcggcatcctcgactccggtgagagaccgcgcgcttcttgcaccgtgttcgtcgtttcttgttttgttcatctgcatgccacggatttggccggagtcgaggagcttcagcgaccaagggctcggcccggtgccggcgcgctggaaagggacgtgccaaggcggggattccttcccctcctcgtcctgcaacagtcagtatcactatcaccggtgctcgacccgagagtcaacccacggtctcactctcgctctccgctcctccacatccatctggcaaactttgaccggagtcaattcggagcaacgcgcaggaagatcataggcgcgcgatactacctcaaggcctacgaggcgcactacaacggcggcctcaacgcgacgtacgcctaccgctcgccgcgggaccacgacgggcacggcacgcacacggcgtccacggccgcgggccgcgccgtggccggcgcgtccgcgctgggcgggttcgcgcgcgggtcggcctcgggcggggcgcccctggcccgcctggccgtctacaaggcgtgctggcccatcccgggccccgaccccaacgtcgagaacacgtgcttcgaggccgacatgctggccgccatggacgacgcggtcggcgacggcgtcgacgtcctcagcgtctccatcggctcctcgggcgccccgccgcggttcgcggacgacggcatcgcgctgggggcgctgcacgccgccgcgcgcggcgtggtcgtctcgtgcagcggcggcaactccgggcccaggcccgccaccgtgtccaacctcgcgccctggatgctcacggttgccgccagcagcatcgaccgcgccttccacgcgccggtcaggctgggcaacggtgtgacggtcatgggtcaaaccgtgacaccgtaccagctccccggcgacaagccctatcctttggtttatgcggcagacgcagttgttcctgggactcccgctaatgtttccaaccaatgcctgcccaactccctggccagcgacaaggtgcgaggcaagatcgtcgtgtgcttgcggggcgctgggctgcgggtggggaagggcctggaggtgaagcgcgcgggcggcgcggccattctgctcggcaacccagcggcctccggctccgaagtccccgtcgacgcgcacgtcctcccgggcaccgcggtcgccgcagccgacgccgacaccatcctccgctacatcaactccagctccagcccgaccgccgtgctggacccctccaggaccgtggtggacgtccggccgtcgccggtgatggcgcagttctcgtcgcgtggccccaacgtcctggagcccagcattctcaagccggacatcacggcgccggggctgaacatcctggcggcgtggagcggggcgtcgtcgccgacgaaactcgacggcgaccaccgcgtggtgcagtacaacatcatgtcggggacgtccatgtcgtgcccgcacgcctccgccgccgccgcgctcgtcaaggccgcgcaccccgactggagctccgccgcgatccgatcggccatcatgaccacggccacgaccagcgacgcggaaggcggcccactgatgaacggggacggctcggtcgcggggcccatggactacggctcgggccacatccggcccaggcacgcgcttgacccgggcctcgtgtacgacgcgtcgtaccatgactacctgctcttcgcgtgcgccagcagcgccgggtcccagctggaccgctcggtgccgtgcccgccgcgcccgccgccgccgcaccagctgaaccacccgtcggtggccgtgcgcgggctcaacggctcggtgaccgtgcgccggaccgtcaccaacgtcggcccgggcgcggcgcggtacgtcgtcgccgtcgtcgagcccgcgggcgtatccgtgacggtctcgccgagacggctccgcttcgcgcgggccggcgagaagagggcgttcaggataaagatggaggcggccagcagggggaggagcggcgcacgcgtggcgagaaggcaggtcgtggccggctcgtacgcgtggagcgacggcggcgcccatgtcgtgaggagccccattgttgttatcttcgactgatcatcgttcggtaagctagtggctagctcgcgcggacagagaactctggacgaggataggtttagccataccttgttcgaagcagtggatgcaaggcaatgaaaaccttcggctatgtgtgtggaagaataatcacatcaagcaggaaaaaaatccagttgtcttatgtgcctgaaaatatcacgaatttgtggcgcatatcctgtattcctgtgacgttataaaccactacttgatgttatattctcggtcgatccatccccccatagtgctaagtggtggtagccctggttccacgatcgacgcagacaatgcatgaggacgcgtgcgtcccccccgg

SEQ ID NO: 175973 - DNA, 128 bp, Zea mays
  Clone ID: MRT4577_92081C.1
agataaagtaccgtggtctactagtgtaaaacatcagccaagactgcatgcgcttggtgcattgcaccttatgactgcactgactaggcagtccccgcacctaagttgtcatggttgtcgcttccagt

SEQ ID NO: 175974 - DNA, 574 bp, Zea mays
  Clone ID: MRT4577_92082C.1
ttcacttctctaggtgcgcaccgaatcagagggtctgcctcctcctcgtcggcgaaaagatgggcggtgccgcttctgacaaaagacatcgtgcaagaacgggtctagcatctcatgaggccccacctctaccgctacatgtgccttaatccaagctcgcgcaggccaaacggttttgattcccgtctcagcagcaaagtcaaggcatgcaccttgatccccaactttggttatcggtctcacaagtcgaccaaggcctacctccccaacaccttcaagaagtttctggtcctcaacgtttctgaccctgagtcgctcatgatgcacaacttcacctactgcgctgagattgctcacaaccccgccactaagaaacagcaaggaagatctttcgagcttgctgctcagctcgacattgtggtcacaatcaagcttgctaggctccgcagccagggaggaccactagtctggtttcttgtcttaacgacgacctgtcatgttgccattcctttctgcaagaaactactttgcttgtagtttggtatcactgaaaacatattcactcctacctttt

SEQ ID NO: 175975 - DNA, 240 bp, Zea mays
  Clone ID: MRT4577_92083C.1
cacaaacgtccgaggtaacactagcacaggcggaaacagcgaggaggagaactacgactgcctgaaggagagcgacgggctcgcggacctgctgaatggtgtgccggacacaaatgtcacatgggccgctaacagcgagaaatctgaccggaggtgaaagcccacccagggccttgggcgctaggccgcaactgacacaggggatgctgaggacggctggaggggaaagatgtacgcctg

SEQ ID NO: 175976 - DNA, 363 bp, Zea mays
  unsure (1)..(363): unsure at all n locations
  Clone ID: MRT4577_92084C.1
cattgggtacctcgaggccggccgggatcgtgtgtctggagacaatgncgtcgatatctgatgagtctactcctgcacgaatctttggtgacgatagctgacgtgacaagaagcaccggtggctgattaaggtcggtcgaccctttccactacgaacggtggttgatgttccggatcgagtggaccccggcagatgaaggagaagagcgaggaaggacggcttcgtcgagatggtgctgtcgaggccttcagccaagcacggagacaagggggacatgctggttcgagtcccacccctactattcctagaacaacgggacgctgcccgctctgtatggactcctatctcgatgggcctctcga

SEQ ID NO: 175977 - DNA, 228 bp, Zea mays
  Clone ID: MRT4577_92085C.1
cactggggggttttttacagtctcttttttttcagcaggagctgctcgtgccccgagaaccctatgctctgtgcggatgtttctgagctgaccggcagatggccttcaggccgccgctcgtctagttgtgaagtccgcgacgagggcgttcttaacgtcctggcgggcgactgcgactactggtagggtgggtgggcctgtccagggcctgccatggtcggctcggtc

SEQ ID NO: 175978 - DNA, 2990 bp, Zea mays
  Clone ID: MRT4577_92086C.1
ggatccggcacgcggaggaccagtgatcgatcctgctaaatggcgacggaagagagatctccccccacccaccccgacccttcctcctcccctcggcctctccggcgggcgggcaattcggccatggatcccccacgcggaggaacagtgattgatcctactaaatgtcgattgatgagtgtggatgaaaaacgagaacttgttcgtgatttatcaaagagcccagaaagcgctcctgacaggctccagtcatggacacggcgggaaattgtagagattctttgttctgatcttggaagggagaggaaatatactggtttatccaagcagagaatgctagattatctcttcagggtggtgtctcgaaaatcatctggtccagtggaacatgtacatgagaaagagaaagggaaagataaagagtcaattcttgagcccaatacaactaaccatcagtcccctgccaaacgaccgagaaagagtgacaatccatcacgattaccgattatcacaaacaactcagcagcatctgatgtaactgggccaactaataatctacgcttctgccaaaatttagcttgcagggctattctcagggacaatttttgcagacgctgttcatgctgcatttgttttagttacgatgataacaaggacccaagcctctggttgtcgtgtagttcagaccaacacttacaaaaggatacctgtggtttctcatgccatcttgaatgtgctctaaaggatgaaagaacgggtattctgcagagtggacaaggcaagaaacttgatggtggctattattgcattcgctgttggaaacagagtgatttgcttgggtgctggaagaaacagctggtgatagcaaaagatgctcgacgattggatgtattgtgtcatcggatttatctcagtcataggatccttgtctccacagagaagtacttggtattgcatgatattgttgatacggcattgaagaaactggaggctgaggtcggtcctttatctggagctccaaatatgggtcgtggaattgtcagtcgacttactgttggtgccgaagttcagaaactttgtgctcaagcagtagatgctgtggaatcattgttctcgggtgtatctcctgctagttcaaaaattcagcggccatgcatgatgcgaccaaactttgtaaagtttgaagctataacccaaacatccgtcatggtatttttggatttggttgattgtcctatgcttgcccaagaggcaacttcttttaatatctggcaccgagtggctgttactgaatcgtacccatcaaatccgactggcataatacttgcgccattgaaaaaattacttgtcacttggcttgcaccggctacaagctatatctttaaggttgtcgcgttcaagaactcaattgagttgggttcatgggaaattagaatgaagacaagctgtcaaaaggatgatccaaggggttcaatgccaggtggtaccggactaggacaaaatagtgagagcccaaaggcaaacagtgatggccagtctgatccttcctcagagggtgtggactcaaacaataatactgcagtttatgctgaagtgcaacggataaaatggacgactttggccacaaggatagtttctctgaagtgtcctatgaatactgtgtaagggtggtcaggtggctggagtgtgagggctatattgagacaaacttcaggatgaagtttcttacatggtttagcttacgtgccaccctgcaagagagaaagatagttagcgtatatgtggatactcttatcgaggaccctgtcagtctctctggccagctcgtcgacagcttctcggagaggatatatagcaaaaagcggccttccatgccttctggtttctgcatggatctgggtgattgttggacctcgatattctggttctgtgcctcccactgcaccaagaagtgtggaaaacagcaaagacaatggtggaagggcctccaaacccaaaccttgtgacatagttgttcaaaatggctcttcaaagcctgaaagggaaccaggcaattcgtcaaacaaaagagcaacggataaaatggacgactttggccacaaggatagtttctctgaagtgtcctatgaatactgtgtaagggtggtcaggtggctggagtgtgagggctatattgagacaaacttcaggatgaagtttcttacatggtttagcttacgtgccaccctgcaagagagaaagatagttagcgtatatgtggatactcttatcgaggaccctgtcagtctttctggccagctcgttgacagcttctcggagaggatatatagcaaaaagcggccttccatgccttctggtttctgcatggacctgtggcattaaggaactgcaagctcctaccgtttgctttgtagggagcatattcgggcccattcttttgttgcagatcgttgcattgattcttcattggaaatttcgctgaagtatttgacttgcacatcttcattgaaactttcctttgcaatgacagtaggttatgttattgcgggcaacttctttttccttttttttttcttcatttgctccataataggttacagtgctcccatgttaatcttagagcatcaatgtgctgcattgttcagtcagcttagggcatgccgtcatgaattttgtggcgtgtagcttgtctgaagaagaggatggttgccaggctggatcaggaatgcgcctgtgggacgaagcaggcttcgtgtggacgctgacgaatccaagctaaccatgtcttgtcggtaaaatggttgtgctgtatcttcggggggatttgcattttcttgctgactcttgctgggaatgggaggaatgatgtttaaggtgcagaacgtctgccttaatttaatgttatgttgactcatgctcctttaaaaaaaaaaaaaaaaaaaaaaaaaaaaaaaaaaaaaaaaaaaaaaaaaatctcgagggggggccgg

SEQ ID NO: 175979 - DNA, 992 bp, Zea mays
  unsure (1)..(992): unsure at all n locations
  Clone ID: MRT4577_92087C.1
gggtacctcgaggccggccgggaaatccgactggcataatacttgcgccattgaaaaaattacctgtcactgggcttgcaccggctacaagctatatctgtccggttgtcgcgttcaaaaactcaatcgagttgggttcatgggaaattagaacgaagacaagctggcaaaaggatgatccaaggggttcaatgccaggtggtaccggactaggacaaaatagtgagagcccaaaggcaaacagtgatggccagtctgatccttcctcagagggtgtggactcaaacaataatactgcagtttatgctgatctaaacaagtctcctgaaagtgattttgagtactgtgaaaatcctgagatccttgattcaaataaagcttctcatcaccccagtgaacgtattaatgacttgcaaaatatacagatggctgcagatggggtaacagaagtcactgagctggaagaagcacctgggctctcagcctcagccttggatgaggaacccaatgcttgtgttcaaacagtgcttctcagggattcaaacccactagaacacaatcagagaactgtggttcctagatcacatgatacatctaatatactggctggacatgagttggtgattgttggacctcgatattctggttctgtgcctcccactgcaccaagaagtgtggaaaacagcaaagacaatggtggaagggcctccaaacccaaaccttgtgacatagttgttcaaaatggctcttcaaagcctgaaagggaaccaggcaattcgtcaaacaaaagagcaacggataaaatggacgactttggccacaaggatagtttctctgaagtgtcctatgaatactgtgtaagggtggtcaggtggctggagtgtgagggctatattgagacaaacttcaggatgaagtttcttacctggtttagcttacgtgccaccctgcntgagagaatgatagttagcgtatttggggcttctcttatc

SEQ ID NO: 175980 - DNA, 399 bp, Zea mays
  Clone ID: MRT4577_92088C.1
ctatagccgactgacatctgctacgaccggctataacgcggctagctcaaatgcagacgcggacgccatccatactccatctcgtgcattggctatcaaagcaacggacgctctcatgggcaccggaccttggaagaattcaatgacaaggtctgcaaagtcctagctatagttaccctattgtcgcatctgtctctacgctcaagaaggtaccgctacgcgcatcacatcggaatctgaactgccaacctacctcacagccgatccggagcacctggcccatatagtaccataactcctcagatacgctgtgaaggacaaacttgaagtctcgcatcgtccaacgccacgtgcatgctggcgatccggaacgacgaggagctcgataagctgctgacc

SEQ ID NO: 175981 - DNA, 240 bp, Zea mays
  unsure (1)..(240): unsure at all n locations
  Clone ID: MRT4577_92089C.1
tctatacaggcacctaaattgaattcttttaacttttttctacaacatcctcacttctaaaaccctttccttacccaacttaatcctcttacatcacatacccctttcctcaactttcctaataactaacatgcccacaccactcacccttcccaacacttactcatccttaatgcccaatttaacacaccctctancaacccattaaacacccctattattgttattacactcaacctt

SEQ ID NO: 175982 - DNA, 375 bp, Zea mays
  Clone ID: MRT4577_9208C.1
aggaaacaaaatgttttaaataataatcccaaacctccggaaaaaaaaacaaattttttccatacccattttgttggaaacattaaaacttgttgctttttttttgacgatccaatttttttatttaaaataagggccgcccaaaaagtttttttaagcccaggggtcttttaatgagcttgatcgggaaactaatttaatttttttggaaagctcattgggggagttttgggggttaccggaatcccccccctccaaatagggggttttttttttttttagggctcccaggggggcttttaattttaatggccaaaaaaaatttttggcctcctttaagggggggcccacaattattattttttgaacaaaaac

SEQ ID NO: 175983 - DNA, 357 bp, Zea mays
  Clone ID: MRT4577_92090C.1
ctcagcatccgttactacaccgataggtacttggataggatcctgtacaaggccacctacaaggccaccaccaacaaaaccacacagaaatggccaatggccaggcgcatcgccttgctggcagctgttcctggcgcttgccgtggtggttgccgacgctctggcgcacgctgccaggcctacggggacgcctaacgtgacggcgatcgtgacgaagatcctgcagaacagcatgcacatgcccatgttcatgcagatgatgaaggacacgcagctggacacgcagctgaacagccagctcaacagctcgtacgccagcaacagcgggtggtacacgatgttcacgcccaccaacaa

SEQ ID NO: 175984 - DNA, 302 bp, Zea mays
  Clone ID: MRT4577_92091C.1
cccaccaaacgggggggttcttcaaaagaaaagggggccggccccgttgaccaaaaaaaacggtctgccaccctttcggggcccaggcgcaggggttccaaattgtcaacccccttctggggggggcaaccctaagaaaaaaaaaaggccggggggggaaaaaaacccggggttgccccccctaaaaatttattggggaaaagtggcaagcggcccaaaaacttacctgtggcatagaaattttgaaaaaaaacacccccccctgggttgtttttcagaggggccaacaccactggttttta

SEQ ID NO: 175985 - DNA, 180 bp, Zea mays
  Clone ID: MRT4577_92092C.1
ctgaacacaagcatgtatcaggctcctatcatttgacagtttgcatttagcttccatgcgggagatgagtcttcggaatttccgacaatttcccttgttatggatgcctgtcaggcatgcataacccaaaccaaagacctcctaagaggtgcgtgtgctcacaactggtagaaagccccc

SEQ ID NO: 175986 - DNA, 609 bp, Zea mays
  Clone ID: MRT4577_92093C.1
cgtgctgcgatgagcagcgcgcgggaggaggagaagaagatcaacgcggagatgaggagcaggagaagcagcaggcgaagacgagcaccacgagctcgctcccctccagcagcgagcgctcctccagctccgcttgcaacaacctcacggaaggaggtaggtgccgcgcccaacccgttgctggttaatcagctgaagttgttgctgccctgccccgcatggcaccccaggagcggagagcgacgaggagatacggcgggtgccggagatgggcggcgcgtcggcgtcggcctcgtcgggcgccggtgcggacgagcttcccaagggggaggacgacaagcaggggcaggtggccgcgcccaaccagttgctggttaatcaaactgttgcttgctttgcacctttgatttatcaggaaaaatttgaatgtttattacattcccattggacatttgttactgtttggttgcgactttgcttagcaattttcctcaggaatcttgtgtttcctatgcgttatgggcctagacttatggctattctaatttatttaggctgattggaagaagtgcatttctcaaatttattctagaaactgggtcagagtga

SEQ ID NO: 175987 - DNA, 161 bp, Zea mays
  Clone ID: MRT4577_92094C.1
cactggtggctgccctcactgtctgctacatctcagacttcttcaaagcccgacccccacagcactgtctgaaggaggaggagctggaacggaagcccagcctgtcactgacgttgaccctgggcgaggctgaccacaaccactatggatacccgcactcc

SEQ ID NO: 175988 - DNA, 205 bp, Zea mays
  Clone ID: MRT4577_92096C.1
agaacaaacgccaccgaaacgcgttacggattgattaacatggaccagcttgtccaacacagcacgacaacatagtacaacaatgtaaacgggccgttgaagccggcattttgagcggtgctcgcctatattaaaacggatggccaactaaagaattaaatcaccgatcggacggattaggaaacctaaatagaagcacattccc

SEQ ID NO: 175989 - DNA, 276 bp, Zea mays
  Clone ID: MRT4577_92097C.1
gggggaaaagctggatgattaatcaaaaattggaaaaaaaaaatgtttttcaaaccaagtgcactgagcatttggtcatggattgcctaaaacttcggtttttccagctaaaaattgcctgaattggccagcaaatactttaacattttgattaactggttttggggcactccggggtctaaattcttttttttaagaacacattgttttctttaaagtttcctgcagttttccacttttttttgccccaacggggatgtcacatccaccgaaaaa

SEQ ID NO: 175990 - DNA, 2589 bp, Zea mays
  unsure (1)..(2589): unsure at all n locations
  Clone ID: MRT4577_92098C.1
gatgatggcctggaggcccaacctgtgactaacctggattaggtgagataataatcccctcggggtactgtagcatatatatataggcagtcaataatatatgggccttaacacccncctgtcaaactcaaggcggaagtgaaggatttgaagcattgagtttgagtagatgaaactgatgttgtgccctagtttgtgcttttgtgaagaaatccgcaagctgtaattctgagggcacatattgaagatcaatggtcttctgatgagtgatgacaatgagatctagtgaatgagacatcaacaccaatgtgttttgtgagttcacgcttcactggatcatgacagatttgtatagctccagtgttgtcacagcgaagaagagtaggcgagtcacaagaaacacctagatcagccaagagccaacgaatctagataatctcagcagtagtagtagccagggctcgaagttctgcttcagtactagatctagatacaacagcttgcttcttggatttccaagcaacaggggatgatccaagaagaatacagtaaccagtgatggagcgacgatctgtaggatcactggcccaggtagcatcagagtaagcatgaagctgaagtggggaatttgagtcataaaataaacattgtgttttgtccctcgtgaattatgagaaaaaaaatatctggcctggtgacagtaaggtaaactaagctgccaacaagatgtctatattgagatggatcctccaaaggtgtcccatcagtcggacaaagagataagtgaagatccataggcgtggcaacagtgcgagtatcactaagacaagaacgatcaagaaggtcttgtatgtacttggcctgagaaagataaataccattttgagtctgcaaaacctcaatgcccaagaaataactgagtgcccccaagtcagacatttgaaattccttactcagagacgccttcacatgagcaatatggtctggatcatcgtcctgtgtcttttgaaaacctctggccacaagacgagctttatatcgctcaatagacccatcagatttggttttaaccttgaagacccatttgcacgtgataggtacaacaccagcaggtaacggaacaacatcccatgtacatgtgcgatgaagggcatttaattcatcagtcatagcaagctgccactcaggtataccagaagcctctttataagatgatggttcaacaatgactacaccagcacgggaaaacccataacgttctggagctgcaatagccacggtcacgaagatgatacccatctcgagaaatacgcatgcgacaagaagatgaatcataacatcgttagcctttatgttcagggatccaaaaactcgaaggtggtcatatcgtggaggagttttgaaaagaacttcaccaggtgttttgccaaagagtttggatgacagttgtctttgtctattgatgaggtaaaccgcagtagaaactgcttcaccccaaaaatgtgaagggacaaaagaagatatcaacaaagtgcgagtagtttctataatgtgacgatgtttgcgttcagccacaccgttctgtgcatgagcactagggcaagaaagctgagcaagagtaccctctgaagtaaaaaaatgcgctggagatgtagccaaggaaggaagccgcaaagagtctaagatgtagaggcgaggagcagctctacggcaacggccagtcccaatcacttcccctgtgcgaaggtcagtaccatcagctgtctgcactgaagcaccatctatcacaggtgtagtagaagccaactttgactgatcagatgtgacatgaaaggaagctcctgaatcaagtacccaggccgactctgaagtacaggcggacggagtggtagcaacaacaactgagcctctattagatggtcctggaccacaaccacgagcagcacgtcgtgcacggaaatcagtcaacttatcagggaacttgacaaagcaaagctcagatcgatgattggtcttgccacaatgatcacaaggcttaaaaatattcttaggtttctgggcagcagccaacacactgtgaggattaccaccagtagaggacagagaattaagacgagtctctatagcaagtaaatcagacaacgccttagccattgtgagagtgtcagaaccctgaagtaaacgagcacaaagagaatcaaactcggcccgaacgcccataacaaatctgtaagtgaagaccttctcaataaacttataagccggacacggatcagcggtacaagcaggcaccattgatgtcaaagcactcatcaggcgatcaaaggctgagtagtactcatcaatactcatatcattttgctcaataacatgtgtctgctgcatgagagtgtaatagagcaccacatcattaagctgccatgttttgatatcaacagcattgcgacgatcatcagcaagaacaggtgccgcatcagtcaaatggaagagtaatccatgtccccggagtgcagtcttaacacagaaagcccactccgaataattttgaccatcaagagtgatattgaccacaatagcatttgtcgccat

SEQ ID NO: 175991 - DNA, 410 bp, Zea mays
  unsure (1)..(410): unsure at all n locations
  Clone ID: MRT4577_92099C.1
ctacaggacactgcctagccatagccaggcagccgtccagttgtagggagatgaaacaggccaaaagcgaccggatggacgcgacggcacgcgcgccgcgcgaaacggcgatcacaactttttggcaaggccggggagatgtcgcagctctatctttctctctatctctgtctctctgcagctggcggctagcctgcgcttgcgtagcgtggcggtgcgcggcctcatgattgcgtccgtgcagcccccacggcggaacggtgagcgcgcccgtcctttgctgccgccgnactgccgcctgcctgcggggaccggnatgatggatccgctgccctgcgcgcccgagccgcgagggagagcgccagggccagccggccaggtgcccaggtccccgggcctgttcctacaag

SEQ ID NO: 175992 - DNA, 214 bp, Zea mays
  Clone ID: MRT4577_9209C.1
agatgtggagaacgaggcctcaagcttttttttttttttgattaaaaccaaacactttattatgacacatgcatatattattggtcataccacacgtgataatgcgtgtcgatttactgcattattacatattttgtatagagagagtatgtttgaggtgatttcccagcagtaagtaaacacacattatggcgggatggtatggggagacgct

SEQ ID NO: 175993 - DNA, 140 bp, Zea mays
  Clone ID: MRT4577_920C.1
gcgtgcggacgcactctggcacacccgcgggagctgcctgctgccatagtgggcatcatgggccgaagtacctgcagtcggggcgtgctgcgcgcgcagaccacctacaactagaagctgttcacacggttaggggaggc

SEQ ID NO: 175994 - DNA, 5658 bp, Zea mays
  Clone ID: MRT4577_92100C.1
tcaaggcggaagtggaggatttgaagcattgagtttgattagatgaaactgatgttgtgccctagtttgtgcacttgttgacacctattcaccttactacccagaccggttcaatcacgcagccgccctcttctaggtacgagcagcttttttgagccctatcgctagtgacgagtgcccactaggatcaaggcgcagtggtaatcgatggcttcttacagctggtgatactctgaaagggagacgccaaacatggtcgttgttaacgagtgcaactgtcaacatagcaatttgacggcttattgtaccagatgaaacagaaggggaacaggagtcggcatcggtagcagaccaggctataacttgttgagggcagcccgggttggacgaggtgaagaaggtgatggtcgcgaaatccgagttgaacagtctgcccacagtggcagccccgggcgcagatggcgaagaggcagggcgcagtagacggtgacgttgagccggattcacagaaacgtgcagcaagcaaacggcaacagggcgcagcactgctggagacgccggcagaggacggcaaacgggcgcagcactgacgagagacagaatcgggcgcagatgaaggacagtgctggtagcagcactgtcaggagcgggctgatgcaggtaattcggcggagagaggtaaatagcgcaggcgggagaagatccgccctggcgaaatccgcccctggcggctgacagcacaggcggtgctggcgcgctgggagatgccgccctggcggaggaccagcgcaggcgggagaagatccgcccctggcggtcatcaacatatagtaatagcaatgtgcgtcctcgtgaagaaacatgaatgaacaatgcaggatcatgatcactagaatagaaaccacaagccttgatgacagaaacaaatctctcaaaccaagcacaaggagcttgtttgagaccatacaaggctcgacggagatgacatacatgccctgatggaacctctatcccaggaggtggatgcatatagacttcctcatgtaaatcaccatgaagaaaagcatttttgacatccatctgagagatagtccaagaagatgaggctgcaacagcaagtaaagctcggacagtagtcagatgggccacaggtgcaaaagtctcatcatagtcaataccctgtgtctgttgaaaacctttggccacaagacgagctttatatcgctcaatagacccatcagatttggttttaaccttgaatacccatttgcacgtgataggtacaacaccagcaggtaatggaacaacatcccatgtacatgtgcgatgaagggcatttaattcatcagtcatagcaagttgccactcaggtataccagacgcctctttataaagatgatggttcagcaatgactgcaccagcacgggaaaacccataacgttctggagctgcaatagtgccacggtcacgaagatgatacccgtctcgagaaatacgcatgcgacgagaagatgaatcataacatcgatagcctttatgttcagggatccaaaaactcgaaggtggtcatatcgtgaagttccgaaaagaacttcaccaggtgttttgccagagagtttggatgacgattgtctattgatgaggtaaaccgcagtagaaactgcttcaccccaaaaatgtgacgggacaaaagaagatatcaacaaagtgcgagcagtttctataatgtgacgatgtttgcgttcagccacaccgttctgtgcatgagcaccagggcaagaaagctgagcaagagtaccctctgaagtaaaaaactggcggaaattatcagataaatattcaccaccagaatcagaacgaaaggttttaatgtgagtggaaaattgagtgtgaatcatacgagcaaaggttttataaatagaaatcagctcagagcggcgtttcatgaaataaatccaagtgtagcgagaatgatcatcaataaaaataacatagtatttatatccatcttttgacacaaaaggtgcaggaccccaaatatcagagtgaaccaaatcaaagggttgaacagaatgagaatgactagtaaaatatggaagttgtatttgttttccaagatgacaacccttacaatgaaaatcagactcaaccgaagtatgacctaagcaacctgactttattagagtagacaatctagatccacacaaatgacctagacgatgatgccactgggcaaaagatgcaacagaagcaagggtagctgaaagcacatgcgctggagatgtagccaaggaaggaagccgcaaagagtccaagatgtagaggcaaggagcagctctacggcgacggccagtcccaatcacttcccctgtgcgaatgtcagtaccatcagctgtctgcactgaagcaccatatgtgataggtgtagtagaagccaactttgactgatcagatgtgacatgaaaggaagctcctgaatcaagtacccaggccgactctgaagtacaagcggacgaagtggcagcaacagcaactgagcctctattagatggtcctggaccacgaccacgagcagcatgtcgtgcacggaaatcagtcaacttatcagggaacttgacaaagcaaagctcagatcgatgattggtcttgccacaatgatcacaaggcttaaaaatattcttaggtttctgggcagcagccaacacgctgtgaggattaccaccagtagaggacagagaattaagacgagtctcttcagcaagtaaagcagacaacgccttagccattgtgagagtgtcagaaccctgaagtaaacgagcacgaagagaatcaaactcggcccgaacgcccataacaaatctgtaagtgaagaacttctcaataaacttatgagtcggacacagatcagcggtacaagcaggcaccattgatgtcaaagcactcatcagacgatcaaaggctgagtagtactcatcaatactcatatcattttgctcaataacatgtgtctgttgcatgagagtgtgtaatataacaccactgtcctgaacaaaacgctctttaccatcattaagctgccatgttttgatatcagcagcattgcgacgatcatcagcaagaacaggtgccgcatcagtcaaatggaagagtaatccatgtccccggagtgcagtctcaacacagaaagcccactccggataattttgaccatcaagagtgatattgaccacaatagcatttgtcgcaatattgaattcaatggaaatcagtgaaaccaaacaaaccagaggagccgcagctgacagcagcccgacttggacgagttgacgaagatcctgggcagcgaaagtcgagacctgctgcagataatctagatcaccgcgactctgcccgcaatgacagccacctacgcagaagcagcgacgacagcgacggtgcagagatctgcagtcctgcccggcacagaagtggcgcgggcgcagcgcagaaatggtgacggcgtagagcagggcgcaggcggacggcacagatctgagacggacgacgcagatccggtgacggcgcagagcagaaatccggcgagatccgatcgagatccgctcctggcgggcacaggaagaaggcggcggactccttgcgggcacaggaagggcggcgaccgaccgagatccgctcctggcgagcacaggaagggcagcggactcctggcgggcacaggaagagggcggcggactcctggcgggcacaggaagagggcggcggacggccactggcggcgggcgacgcagagaagatccgcgcgcaggaagaagacggcgaactccagacggggcccctagctgcgggcgacgcagacaagatccgctcgggactcctgctaattttctcaatccttttctttccatgttctgcctcactttgtcactgtggttccagtgacctccagccgcatgcaagttggaaagcaagacgtatccaccttcttctgctgggtcaagacgaaggagttcttttgaagcaatttctgcaacttcaatattttgaccagccaaacttgcatttaaaatggaaccccatatagaccgacttggcctcatcggcatcctcctagccaaagctaaagcatcaatcagcctacctgaccgtgcaaggagatcaaccatacacccaaaatgttctatccctggttcaatactgtatctttgcttcatagcatcaaaaatcttacatccttcatccagcagaccagaatgactgcatgcactgagaacagcaagcagtgtgacaccattaggtgctacgacctcagtttgcatcttccaaaatagttccaatgcttcagtcccatggccattgaatgcaaggccagagatcatagctgtccacaatgtaacatctttgtccaaagctttctcgaacacatagtaagctattttaacatttccacatttgcaatacatgtctacaagagccgatgccaaaaaagcatcctgatggccaaattctttcactacccaaccgtggacactctttgcatgattcagtgatcccttacctgcggccgcagaaatcaaggtaacagcagtcaccttgtccagatttacacaactggcaagcatatcatggaatagcttcatcacttcattgaaacctttgtatctagcatatccagcgagaagcgtgttccaggatattagatccctggaaggtgcctcagaaaaaaatctgctagcaaggtccaacatgccagcatttgcaaaacctgaaaccatggtgttccatgaaatggcatccttctcaccagcttcaccaaagattgtctttgctgcgttcattctcccacattttgcatacatgtccaaaagagcatttaccagaatcaacccatgatctcctgcatccattctccgcacgatgacaccatggacagacctcccaataagctcgttcttcaggcgcccacagcaagtgagcagagcaacagccgtatactgatcaacaacaatcccccggcttgccatatcacggaaaaaccacagcgccttcagggtgcacccttcattcacatacccagatagcatgatgttgcaagacacggtatccaacaccagtgcagaacggaacatcagctcggcggtctccacatccccggcgtcgatgtacatcttgatcagagagttccgcaggtacacgcgcgagtgcaaaccactcacaacgacatgggcgtgcacctgcctcccggcggacaggcgttccaccgacctaagcagagcgaggaaggtctgctggtcggggaggacggacgacgcgagcatggaccggtagagagccgccgcctgggtcgacgaggaggagtcgcgcgccgccgccgcggagagcatgagattatagatgtagagattggggcggggcgtgaaatgctggaagaggagctcagcctcgcgcgtgaggcgcggggaggacacgacgatggcgtaatggaggagccggctcatagggaacgtctccatggcgaggccaaggcggagcaggtgggcaaggatggcccggaacggccgcgccccgcggcaccgctcgaggagcaccagcgcagggtggcccagccgcagcgagacggctgggtcccacgagcgccccgcggcggcagaggccgccat

SEQ ID NO: 175995 - DNA, 248 bp, Zea mays
  Clone ID: MRT4577_92101C.1
tctacttgtccgcggacgcgtgggcggacgcgtgggcacgcttattttggcgcccagcacgaaactccctacgcccggatcccgaagaaggtccccgcggtcgaactcggcggggaaatgagccctaagacgtccgctttcttgggcgacgacggacaagaggacctcgtgccgtacgccgtcaccaacggcgcagacccggaccgcgactacgtggcgctcttcgtacccgagaagggcgcccgcag

SEQ ID NO: 175996 - DNA, 968 bp, Zea mays
  Clone ID: MRT4577_92102C.1
agcagcacagcctgctcctcggaattcggcacgaggagccgatgagatgaggtgattgaggtccgtccaggacaaaaaagcgaaacgactccttcagttccgtcccgttcgtgacgacccccggtcccgggagggggagggggagggggagggagaggcgaggtcatggcctccggcaccggctccggccagccgcaacccgcagcagctgatgctgacccgggagccggcgacaacaagctcgtcttcgagacgccgctgcagccgcagcccgtgagggaggactacgtcgagaacgccgtcaagttcctctcccacccaaaggtcaggggctcccccgtcgtctacagacgatccttcctcgagaagaagggcctcaccacacaggagatcgacgaggccctacgaagagtccctgatcctgaacccatcactacggctaccgcttctccacagcagcaggttggcagccagaatcaatcagctggggcgcaaacttatgcgccagcgcgatctatgcacccagcaaccgctggccctgtcgtccgaccccggttcagctggtaccaagcattcctcgctgcagggctcttgcttggttttggtgctagcacggctgtctttatcaagaaactgttccttcctaggctcaagtcttggatccgcaacgtcgtagcacaaggtgatggcgctgaaggcaaccaacttaagcacaggattgatgaggaaacggctgaggctgtaaaggcttctgcttcagctgtttctgctattgccaaaacaaaccagcagctgcttgcttcaagggatgaagaaaagaagatacttgtgacattaacacaagctctagattcccaagccaaggagttaaaatccttgaccgagtcaatcaatcgtaccagggaacccataaacattaccagagacgataggttttctcagcaccgcccactggaagaccatgtccc

SEQ ID NO: 175997 - DNA, 210 bp, Zea mays
  unsure (1)..(210): unsure at all n locations
  Clone ID: MRT4577_92103C.1
cacgcgttctttgacctctgccgntgctgagttcggagccttcgtcgcgntgtctggngccggtgaggaggacatgaagcccgcggtggcgggcggtgcccacatcantctcaaggtcaagggacaggatggctgtgaggttttcttccgctttgngtggtcctccctgttggggangctgttgaacgcgtgctgtggccgtctgtctgt

SEQ ID NO: 175998 - DNA, 439 bp, Zea mays
  Clone ID: MRT4577_92104C.1
caaaaaagggaaaacatacatgggggactaagggcggagttgggggggcggttgcagcaaaaaatataaaaaagggccccgatcacgggtttactaggtggggcagaaaaaaaaaaaggggggggggggcccttttttttatggggacaaaaaaaccggggggagcccccgttttgccccaaaaaagagggggggaactttttgaaaccccacatgaggggggggaaattttcctcggggggaaggaaaattgcccaaagggggaaaaccccttttttttgcccaaaaccaaatcccggaacaggggaaaaccccggtgcctccaggagcttgggggaaaaaaaaaagtttggtgttttgccggctttttttgcccccccaaggggttttgggggcaactgtttttgggggaaaaaaacatacctccttttgggaaaag

SEQ ID NO: 175999 - DNA, 365 bp, Zea mays
  Clone ID: MRT4577_92105C.1
cgccctctgcgatgcccaaggcctccggtgccgtcccggcgtccaccgtgtcggatcctccggccatcgggtttgccgcttccaaccttcagacgttgccgccgtccgcggcctcgggctagatcgctggcgcctaccgcccgcccaccgtcgccgagagtccttctggtttggggcggaggatgccggtggcggtggcagaggcggcagcgcagggtcggctgatgcctggtcagggcggctggtcccgctctgttgctccgcgtgcggcgggctgtgccctactgtcgccgtctgcacgtcggacgctgtcccgaggatctggctgtccgtcttcccctgtcgcggcccttttgcggctaggg

SEQ ID NO: 176000 - DNA, 282 bp, Zea mays
  Clone ID: MRT4577_92106C.1
ggatcgatccacacgttcgggtgatcccgaatagttcaatgattgcgcgctatgcctgcaatgggcggtagattgcttgggtgcttaggggacatgctggggcgctcgaattcccagcaaaggttatacgctgcatgcccctatttgcccagcactttaagtgggggcgccaggaggatgcacacgagttcctccgctatgttgtaaatgcctgtcacactgttgacctccgcatgcgcaaggggttacttgcagcaaatgccaatggaaactatggtgagg

SEQ ID NO: 176001 - DNA, 672 bp, Zea mays
  Clone ID: MRT4577_92107C.1
ccctccctcgagtttttttttttttttttttttttttttttttttttccctttttttttttttttttttttttttttttttttttggggggaaaaaaaatttcccccttccaaaaaaccctgaaaaatttttggccccagggaaagggccccttcccagtatgcccaaaaaaaaaaaagggttagggcccccaaccaaaaaattccttaaaaatttttttttttgggccccgtgaaaccttcccccccccccaaaaccccaaggggttcctgggtttaattttaaaaaaactttcgggttccccaaaagggtgttgaccaaccattaaaccgggggaatgggttttttttgctttttggggaagggaccccttttaaacctgccgggtttttccggcccccctttgtttgtttaccccccccttttttttttgacaagttccttttttttttgtcccccaaaatttaaaaatttccgggggccctcaacccccccttaaattggtttaggccaaattggccggccttttttaataaagggtaaccccagtttttttcaaggggccaaactttttttttgttgggcgcaagttggccttatcccccttggaaaaaaaccgcccttgggaaactttcctttttattggctttccagaacaaaaaagggttcccc

SEQ ID NO: 176002 - DNA, 454 bp, Zea mays
  unsure (1)..(454): unsure at all n locations
  Clone ID: MRT4577_92108C.1
acaccacctcacatggctatggcttcatacaaacagcaaagccaatcaaacacatagagaggctgcatacttagctttctgtgagttcaaccaacgtcgagaccctgcagcaggttcttcagactacgacgcacgcacaccggtgttcttggagaccgaaaaaagggtaaacgggagcaggatggatccggcagtcagtcacgtccagagctctggattcttccgtccttccttccagcgaggttggggccacactagctgccacggtgtcgtcccacctatatgtccccaagaagttcgctgggcctgaaccaaccaacagtctttctccctcatgctctgtcncaataataatactacgtacgtaaagtcgcaaacagtggttggattcagcaatgatgcatgaatgtgctattgcccattgtantcncaccatgttgctcccacgcggccg

SEQ ID NO: 176003 - DNA, 523 bp, Zea mays
  Clone ID: MRT4577_92109C.1
aattcggcacgaggcccacgtgtgcgttcgttgcgcgtgacacgccgagggatcgatcgatcgtatcggggtcccatccttagcatggccatgcgcgcggcctgcctcaagtgcaacgcacggtgtgttgcggccgctgcggtgcagctcctgtccgtggcctccggttctcgtttcgtgcggtgcgcgctctaaaggaccctgatgctcgtggtgcgctgacagcaaggacgaccacacgagggggccatgttttaaatgttgctatacggcacgctgaccgccaccatgttggacgccgagtcgctctacaacctgcacccggcctctttcggggccctcaagttcatccagaagctcgcgcaagggatggaggtcaccttgggtgtcggcaagggcgccaccaagatctatgccaccgacgatctctagatggcccttgtggtgcggacccggttgatcttcaacgagccctggatccttggtcggtacgagtacttccacatctactgcgcgcacatgg

SEQ ID NO: 176004 - DNA, 168 bp, Zea mays
  Clone ID: MRT4577_9210C.1
gcggacggacaagaagaagccgatcatcttcactatggctcgtctcgaccgaattaagaacatgacaggcctggccgaggtgtacggcaagaacgcgcgcctgacttagctgtcctacctcgagatcgatgctggcgaccacggcgaggagttcaactggcagaaagt

SEQ ID NO: 176005 - DNA, 405 bp, Zea mays
  unsure (1)..(405): unsure at all n locations
  Clone ID: MRT4577_92110C.1
cagaaacttatttttttgcagctccacttcttagttcgtgacttcacaattttttgtgctctaaataaacttcctncacttntctnttnaaatatacattctanctcttntaatttcacaagattnnctntcatcattatatnttctacttcaaaacatattatacctaccatcttaatttccatttccattctacantacactttttcaaagtctttttacaatcacataccctnnataantcctnttctctatancaatatntntactcttactaattcttatttctctcctcatttataacattcaaatacattnatatattttatccctttatttcttttaaaccttttcccctttctttacttnaatccaaattctatttatataaaactacctacaatc

SEQ ID NO: 176006 - DNA, 331 bp, Zea mays
  Clone ID: MRT4577_92111C.1
aaaaaaaatacttggctggttttgttttcaggaaaaggaggcttatttggcaggcatacatgaaatgggaaccgttagacaacaattttacaaaagttacagttgcaatggttaaacaatttgccaagaacaagccgtaacaagagagaaacgcaaggggttcctttgtacaacaatatatttttcttccagggctgttttgttcttggtgggcacaaacgggatattggtggccacggcgtaaaaagactttccgggaacgaccacctttaatttcgttccaagcttttgcatttccgaatttacgtagcctatatgcgttttttttttt

SEQ ID NO: 176007 - DNA, 2572 bp, Zea mays
  Clone ID: MRT4577_92112C.1
tcacccgcgtccgccggcgcgtgggttctgtatacaattcaggaaaggctgtttcttcccacagtatccataataaaaaaataaagtgccctataaagtgctcttgcccctatcctggcattgcaagtctgaggtttgacctcacggcaatcatgtccacacaaggcatgacaaacagcaatagtgataggcatttgaaagatcatctccatagtgagaatcctaaagaaatgttgcagcctggaactttagacagtccttctcgtgttcatgaaatggatagcccctctagagagtcattggaagggtgtttacttcgatttagcctctgttttttgcatttatgggatgttgattgcgagctagacaaattacttgtagatgagatgcaagtttgcaagccagaaggctgccatatagcaactggggtggtaggagacaaaggctcatttacattgatgttcccaggcaaagaagccactcttgagctttggaagtcttcagccgaattttgtgccatgaggtcactgtctataatatctcttgctcaactcatgattaaattatctcgttcttgtacaaattctagcagtgctttggcagcattttatacaaggcattttgctgaaaaggttccagatataaagcctccatccctacagcttttggtgagcttttggcaacacccttcggaacatgtgcgaatggctgcacgttccttgttccactgtgcagctccccgttctattccacaaccactacgagtaaacaaaaataaagtggtcaatgcccccttgtcttcatcagataatatgaatgttcttatatgtgctgtgcagactgcctctgtatccaatcatggagagttgaaggaagatgatgaaaatgttgataaagatgatattgacactgctaatatgatcttatggttggaatcatttgaaaatcaggagtggttatcatggataggaggcacaagccaggatgcagtggcgtcaaatatcatagttgcagctgctttggtcgtttggtatccaagtgtcgtgaaagctaaactttcaagtttagttgttagtcaactaatcaagttagttatgtcgatgaatgatcgatatagttcaactgcagctgaacttctagcagagggaatggaaaacacttggaaggcatgcttgggtgctgagatcactcattttatgagtgatatccttttccaaattgagtgcctaagcactgcaccttctagcaatgctatcaataaaactgcagtggccattacaatgcgagaagcattggttggcacccttttaccaagcttggctatggctgatgtaacaggattttttggtgtaatagagagccaaatttgggctacttcgtctgattcacctgttcatgtcgcttcaatcaaaaccattatccgtgtagttcgaggtgcgccgaagtccttggtcccatacctcgacaaggcaatcaactacattctacacactatggatccaagcaatctaataatgcgaaaagcttgtattatcagttcaatgatggctctaagagaaatggcacgtgtatttccgatggttgctctcaatgagtcaatgacaaagctagctgttggtgatgctattggagagatttatgatggtacaattcgagtctatgacatagaaagtgtcacaaagataagaattcttgatgcaagtggaccaccaggccttccaagcttacttgcaggatcatcgaatagaacaacaaccatactgatatcagttctgagtttctcaccggatggagagggtctggttgccttctctgagaacggattgatgataagatggtggtccttaggtagtgcctggtgggagaggctgagcagaagccttactcctattcaatgcacaaagcttatctatgttcctccatgggaaggattttcacctaactctgctcgcttgagtataatttctagcattttagatgataaacctggaaggtcagagaaggaactaggcgaggcggataatctgaagttattgcttcataatcttgacctttcataccgtcttcactggattggtggaaagactatcaaacttacgaggcatggccaggatttgggtacatttcagttgtgatgggcttacccatgaatattgagttgctttgtagtgttgaaagacagctaattcgatggctggcaagtctaacaagaatcaccagtacattcatatgtcatgtgaggtaccttgatgtttctttgactgttaaaagcattgtctggtacagttcataaattggatccctatgtatggtaaataaaaaaactgaatgcaatttgattccatgttacaagactgctattcacatgcagcccaggtaagtttcatctgtttccatgttacagttacagaactgcattcacatgcagcgcccaggatggggctcatctgtcacacctttgagctacagagttcaggatgcttttagtttagttgtggttcgcttgatatcatcacaatcatatacatattttgtggatgattggctatacttcatactttggagtttttgc

SEQ ID NO: 176008 - DNA, 649 bp, Zea mays
  Clone ID: MRT4577_92113C.1
attgggtacctcgaggccggccgggaaactcacttactaatctatctagccttcactacccccttgcttgcataccgaactaacatcttcctcatctcatcttcgatctgttcccctctcaaatattaccataacaacgatgctgcgtctcgtcctctacttctccaaggtgaacggggctgtagaggtggctacaccctagtgggcactatcctcgcaatggatgccgaggagtgctggcatctctctgccctctcttgaaccacgcgatcccgctgcaggttattgaccgaggcaagaaacgtgatcctcctcacatgctacctgctcggaaagatggcaatcaacgcgctccctgcagggcgctcctatgtaaagagtgcatggagccaaacgatggccacgatgctgagaaatcgggggatgacctggactggctggacttcttctacatacgactggaactgcaagtagccagatgcgagatcacccactggatgatggagaccatgcggcgagatacagcaaacgatgtgacttaagctctgcctaagtatcatgtgaaatgcatttatcgagaacctctctctgttctaaggagactatatatgacgctctctccgctcttactcgtcatgagcccttcttt

SEQ ID NO: 176009 - DNA, 331 bp, Zea mays
  Clone ID: MRT4577_92114C.1
gtcatcgtgctacattgcatagcaaattgtaaaatcaatgttagtgctctgtgagtagttaagtgcatcatgcttagatatgctgctcagattaactaatgtacgatacaagtactgacaagtaatgagatagattgcacaaaatcatgaacttctttcaaattcatctgttttcttgctggtatacaaagaccaatatgagttatgcacgaaaattcatatgtttctgcttaaaagaagggaattcatttgtgaagtatgttatcttcagacttgcatatgatgattggtttctcgaatgatgtttctagggatgctcttatgtgaaata

SEQ ID NO: 176010 - DNA, 1678 bp, Zea mays
  Clone ID: MRT4577_92115C.1
agccggccggcggggctcctcgaggccgggcggtactcgtcaactcctgctgttcacgggtttgaagcgaaaattcgcccaaaccaggccggcgacggacgcctcctcgttctccacgccgccgccgccgccgccgccgcgttggctaggttgacctgaccgatcttgacttctctaggctcttgcatccccgacgacggaaatagcctccgagtttccaacagggtggctccggtcgaccacgaagcctcgatctgcatgacgaggctactcgtcatcctgttcgccggggcgaccctagtagtcgccaccaccgcgcacgagcaccatggtgaggcgcccacctgcgccggaggcagcgagcacgtgcttgcggagttccgccccggtgaggtgaccgtggacgggcacaacgaggactgggagagcgtggaggcctcggagttcgcgctgctgccggctctagatccagacgatgataaggcctactccggcggcaagatcgccgtaaaggctgtgcatgatggcgtcaacgtcttcttcttgcttcaggttgatggggcttacgcttacactaaaggggaaagtaacaaatgcccttctgttgctctgatgttccaagttggagagaaagccacattttacaatatgggaggatgcaaagatatgccaggttcatgcacaagtaaaagttgtagaggtcatgaggttgacattatgcacttctcaattggaaatgctatccctggacgactttacggtggcaatcacatagacaatgcagctgggaatggaaacgacagatttggtcaccttgttgatgtctatgcatggaatccacattgccgatacctcgatggagtgggccctaaagagaacaattcaaatgctcaaaatgattggcatggggcttggtggcacagttcattgaccttccattcaggctttgttgatgacgataatccttatggacaacaagatgagaagggtacatattattttgagttttcaagacccttaagaacaatggatcaatttcagcaggatgcacaattcacaataggacgtcccagcaatatgtccgtagccttgtggtacccagacgatggcaaagcatggagcaactccgatcattactcagccagctgcaactggttggttttggatatacaaccttcgtccgaagctacgtattaccgtccagctcctaatcgctcttgggatgctgcaactggctttgctttacttctttcagtggtagccatttgcatgtccatctttgtgggctaccgattttctaggaacaggagcactgcccagtttacaccacttgaacagatccagtttgctgaagaacgccattgattggaattgagattaggcgaagcatcaagcaacaatgtttcatctgttccaccattgtacctccaaagttgacagattgctgcattgaagttttgaaccgggttgttgtgatccagtatagggagatattgaaagcatacacgatacataatttaattacagactgccggtttttatcgtaggaaacaatttctatatgctatacatcaaaccggttattggcggctcatgactttgacgattgtttcattggttgcataatatttgaatatatctaaatttggttcgaaaaaaaaaaaaaaaaaggccccta

SEQ ID NO: 176011 - DNA, 564 bp, Zea mays
  Clone ID: MRT4577_92116C.1
tatggaatttccagcgactatagatgctaggagcgaatccttgcttcgacatactatgaaacaacgcacgctgaaacaaacaacacagcgaaagacaagcgaaaacaacagaccgagggctcttctactaaaacccctcccccgcacaatggatcggaaattcccagccaggagaatcggctggatccgcccttccaaaaccctacaatgtggaatccgccggccgacatagggccgactcgggactaggcaaacctgccggcagaccccccccgccgcattggagaccggctcgacctcaagaggcacgcccagcgcgcggcgcggaaacaagggaggacgttgaccgcttccgccgcaggcgcccgagctcctagtggtagctgaccacgctgggtggggaccctacgggggctccctcccgagacggggggctttccagcataccgccattgcctcgggaagaccttgtatgggctccagaaacggtggaaacgcgctactacgggtccgtcttcaagcgaggacccgcctactgcggcctgaaccaacatcccggtgagg

SEQ ID NO: 176012 - DNA, 578 bp, Zea mays
  Clone ID: MRT4577_92117C.1
ggccgcgggttttttttttttttttttctttttttttttttttttttttttttttttttttttttttttttttttttttttttcaacaacacggatcagggaagcacaatacacggggctatatatgcacaataggggcatccaaaattacacgaaacaaccccctttccactccgaccctgggttaaaccagtcattttccgaccaaccaacagcattcaacaccgaccccgggaatgcctttttatctggggaccaccaaaaattatgggcgcaggacgacttaacccgcccacttaagaagcaaaaaaaaaaccccacatgtggactcctccttttcccaggtcccagggcagggcagggcaagccaccgccatccgaaagtccccctcctaatttgctgcccgacttgaagccatggcccacccccaggatgtttatgaggatcagcgccattatgattcccaacaccaacagcttgatcttcatgttttggagccacattttccgccgcaccttggggccctgctgcctgaaatttgggcctgaaaacccaaattttcaattttggcgacaag

SEQ ID NO: 176013 - DNA, 335 bp, Zea mays
  Clone ID: MRT4577_92118C.1
cacctcgtaagctgaatcggtcgaggctcgttttcattgttggttggttggtctgcttgctgttggttcctcccgctcgcccgcccgcaaagcaaacacgcatggaggtacaccggagtctccagtcacgaccaactgcccttcaaacggccgctttttggggcctttccttcggggactcaatctggtcccccgccggccggcgcaacaacagcaacgacgtcctcttcgccggcttcgcgtcgcccgccgacgccgccaagagcaacgccgtcgtcgggctcaagctcaacgacggagggcccggcctcatcggctccgggaagctggccttc

SEQ ID NO: 176014 - DNA, 220 bp, Zea mays
  Clone ID: MRT4577_92119C.1
acatcggggaaaaattttgccagcttttaaaaatggggtttgatactcttaccccatgagcggcttatttggggtccgtccccctttcaaagggttttttagcctaaaacccgcaattctttttaacaagccatcccaatgcttttaattatgttgggtgaacaggccctattttttggggtcttaagcaccctattattcccaactgtggggttggagg

SEQ ID NO: 176015 - DNA, 2622 bp, Zea mays
  Clone ID: MRT4577_92120C.1
ccccgaggctggccgggaaataccccttgacggagcctccctccgaaatccgcctctctcctatcatcggcctgccgcctgctcctcctgcccccattaacgccgccggctgccgtgccgccgcgtcctgctccccgccaccgcgttcctcgcccgaagcaccgccgcggcctcgcgccaccgcccagaaaccatctccgggcctcgttcgaccgaagcgccttgtgtcatatttccgcgacctagccgccgccgccgctgccgtcgtcgtcatcctcgctggcggtgctgtacctgcgtgcagcgcagatccatccgagctcggattgatttcttcctttgctgtactgtcataaccgaactaaaacagtttctgagaggaagcatcgcgattgccatggaagatgggagaatggatcagccatttatggctgctatcaatagccagcctttcgtggaggatattgagccagtgaagaaaagccagtgaccacaaacatatattggagattagggcgtacaccttgagcctatctcatactttcctttgttattcatatctgctcttttggtcttccccagccgtttgtctgaatataatttttttaaggatctgtggtaataactggtaatctgttcaggacctgccagcttgccgaatcccatgttttgcaagtttttttagaactcgaacagtattctattttcttcccgaggcaatttcgagctggcaataatagttctaaccttgaacaaggagccaagtcttggagtcaatattttatgctgccatgcacatttcatataaggtagtggttccatttccttgctgacataagtttccttatctctgatagctagattattggataacttgtcgatggcacaaaaagtagcacgcggataaccataacaaaggggacagaaacaaagcacaaaagttgtaggccccagtacaaaagggatagaatcaatgactgctgctgacgcacactacactactaggtactaaaatattagaatcatcactgctgactcggtctactaggaaagacgatggattcttgggtaaaagcgcaaccagcatagactctcatggacactcgcctcttaccacgttttggagatttacgtaacaggagcttaagtaatcaaatttgttgaatggcttcgcccagccgctccaggacagggatggtggggggtgcgcctaagaactgcttactacgtggacacctctatgtacttcgatcattactggcgattgtgtctactacctcagcctctgcctcagaagcaagcacatctcaatccctatagatgtgactggagataccctccagcgccggtagggcgtggtttgatccactcgactgccggaggggtgctcggagggatggcagaggttgtgctcccgtgggtgctccgtggccagctgccagccagcttgcactacacgagcccataccatgttgcggcacagaacgtgaaccccaggctgatggatcagccatttatggctgctatcaatagccagcctttcgtggaggatattgagccagtgaagaaagccagtggggacatgcctgcgacaacaggaagcggatgcttcgaatgcaacatctgccttgattttgcatcagaaccagtggttactttctgtggtcatctctactgctggccttgtatctacgagtggctgcgccctggggtggagtcagctgccagcgacaacagcagttcggcaaggcggcaatgtcctgtatgcaaggcaacactctcaacggacacccttgtgccactatacggccgtggaggcaactcaaagaagtcacttgatggcatggccatcccgcgccgccccatggtacaccgggagactgttgaggagcaacagaatgcacagagcaatgtcaatgaccagcactaccaccagagcatggaagacaactctcagcgccagccattgctgcaagcgcaccaccatcccattcccactgggtttgacttcatctaccctccagcaccagtagggcgtggcttgatccactcaactgccggaggggtgctcggagggatggcagagattgtgcttcccttggcgctccgtggccagatgccagcgagcttgtactacacgaatccataccatgctgcgacgcagaacgtgaaccccaggctgaggcggcatcagatggaaatcgagaggtccctgcaccagatctggttcttcctctgtgtgtttgtggtgctgtgcctgctcttgttctgagacaggactattctatacgcctctctgtagatattgaagagggggaggagggatactaatggatgatgcgtatagtaaacagggtaatggtctgtgtcgacaggcatgtgcttaagcatgctgatgtagagttgtaatatgatgagacatgggaggtgaaatgcatatttcattcttctctatcactgtcggcctgttaggttgcctacctgacatcttcatgttaggtttagcatcatctgttgtgtattggttggtgtcactgccaagggccttttgatttgtatataaatagaaaatgatggtttgtctaccaaaaaacaaaaaaaaacccacgcgtccgagaacgc

SEQ ID NO: 176016 - DNA, 365 bp, Zea mays
  Clone ID: MRT4577_92121C.1
tgggcgatcatataaccgtccattcttatccttatgagtacgtaaaatggagcattggaggtccctactaatcagagttgctacgccctttgatttagatttatacgatgaatcaattacatattgtagccatttaccctttaacgtttgtttatctttccgccgccaatgggtttcctgcaaaaggactatttgggcccgttcacgttgtaaccggtctaacactttacgtctctttattggggtgttaagtcctccaacattccacgagagcacccggaaatgtgtagcggatttagcactagaccctgcaattccatccgtggtcgacataggtgtaaattaacccaccccccatttttgat

SEQ ID NO: 176017 - DNA, 468 bp, Zea mays
  Clone ID: MRT4577_92122C.1
atggggaaaggttcgggggggggggccaaaaatataaaaaaaaaatggcccaacaaaaaaaggggggagaccacccagtttcaaacaaaacaaagaaaattcgggggaccctgcattatattaaaccaaccaaccccaacaaaaattatgaccccaacaccacggggggaacgaaagggcaaaaaaaccccctttgggagctttaggggggaggggagccacaccccgccccaataaaagcagcccaggaaaaaaaaataaaggggaagctgttttccccaccagggggcttccggatgcccccgagggtttttcggggagcgggggttccatcggggaaaaggcactgccactcatttccttaaattttgaaaagctaaaaaacttctggggggaggaagggacctcccccttgaaaaggtggtacccggcaacccccgaaacctcgggggggggaatttttttggg

SEQ ID NO: 176018 - DNA, 551 bp, Zea mays
  Clone ID: MRT4577_92123C.1
cattgggaccctcgaggccggccgggtatgttacttacagtatgtgaggatattgacgaggtcagtttctcttgattagtgcagttgtttacttgattctcgtttggtctattagcatactttagtgctttataaataggcatattgatttaaatctaagagattgaatatttttttctgagatccaaaatgctgaattacattaaaagaatattcttaattttgatggacctaaacagccaagttctgtaggtgcagagtttgcaacatgccgacacattaacagtttttaaaatttatttagtaactttgtttatacatgcaggctcaagcatcacttgagcgggatgatgaggatgtatattttgatgatgaatctgcagaggttgtaatctcctcccttcgccttggagacgaccaagaaaggtttattctttactatttaatctgattactgttcttccttttgtaagcacatttgatgtttgcaataagaatggactaatgaagatgccgtttgcagtgattcgctctttacaaattccaaattg

SEQ ID NO: 176019 - DNA, 108 bp, Zea mays
  Clone ID: MRT4577_92124C.1
aaaaacggaataatacttttctctaagcattacaataggtcattcatgtcattgatcacactgacacattttcccaatgatgatacttgacatattattacctaatta

SEQ ID NO: 176020 - DNA, 433 bp, Zea mays
  unsure (1)..(433): unsure at all n locations
  Clone ID: MRT4577_92125C.1
gccggccggttttcgggaaagggngaaaaaaaaaaaaaaaaataacaaagaaaaaaaaaaaaaaaaatagaccacaaagaacaaggggccctctagaaataaagggcccccccgaggcaggaggaaccccaaaacaagggtgaatcaaaaagacagcttaataagggggggaccggtacccaggggggcccgtaacgaaaggggtcccgggggcccactggtcccgggtgtacaacggccggcgtgggaaaacgcgggggttggcaaaattaaggggtttggaaaatatccccctttccccaacttgcccctttggcaaaagggcccaattgatcggagttcccaacagttgcccctccccaacgggggggggaaatggaaggggatagaattttgtaagggttcgggttatgtttatgttaaagtagatttt

SEQ ID NO: 176021 - DNA, 1134 bp, Zea mays
  unsure (1)..(1134): unsure at all n locations
  Clone ID: MRT4577_92126C.1
gacagatgatgatgatgatgatgatcagctacctagctagctccatcattgttgccatgcatgtggtgttcttggagctccgtgtaaactaatccacgtgtgttcaccgtaccggcggcgtgcacgtatcttagagctagaaataagaaaaggcctgctgtcgttcgttgctcagcaactgccatggatttggttgtatatttccctaagaaccatcggttgaagtatatatatatgccttgtttgatggattattccacatcaagtttgttagctatcttttgaggttcaaatcgactgtttgcagcacattattgcagagcatacactaccttgacttggatatataactaaccaaatgaatggatggatggtgaggttcaggaagctgtgggtctcaagggatgaacggcatgaacgagagcaagctggtggatctgctcaacggctccgagtacgtgccgacctacgaggacaaggacggggactggatgctcgtcggcgatgtgccgtgggagatgttcgtcgaatcatgcaagcgccttcggatcatgaaaggatcagaagccattggcctggcgccaagggccatggagaaatgcaagaacagaagctgaggagaagacggacggacggaagcttgcatctcagcaccaccaggggtggatggatgcaagaagaacaaatctccatggcttttgcagctctgctcgtctctgtatcatactcgtcgtccctgcccttcaggcctctgtatctccctgatcaatgaagtcgttttggtgtgtcaactgttctctccgtgcccagcttgtcagtgaaagagtcagtcagtgtccatcaagtctcatcttgtcctatacagaagagagaagccatgcatgaacatgtacctgtccaaaaaaaaaaaaaaaaaaaaaaaaaaaaaaaaaaaaaaaaaaaaaaaaaaaaaaaaaaaaaaaaaaaaaaaaaaaaaaaaaaaaaaaaaaaaaaaaaaaaaagaaaccaaaaaaaaaaaaaaaaaaaaaannnnnnnnnnnnaaacaaaaaaaaataaataaaaaaaaaaaaaaaaaagggggnnggggggttttttttttttttttttaatttggggagaaaaatttttttttt

SEQ ID NO: 176022 - DNA, 328 bp, Zea mays
  Clone ID: MRT4577_92127C.1
atactgagcactatgctgtgaaacgaaacaagggagagacatgcatattactaacagggacttcagcgataacaccatacatggtgcagaaacaacaggcacgagactgacacacgcacctataacaataagaaacacatcaagaagagtctgggctgtctcaagaggagccttagtaactctaatatgcaactactacccaaaggtgcgatgctttcaacacatgaggagctaaaagaagtgactaataaccactgttatctaataactggacgtacttgatgtaaagcttacagaggaacactccaggaccatacagaggacgcgg

SEQ ID NO: 176023 - DNA, 405 bp, Zea mays
  Clone ID: MRT4577_92128C.1
gggggaaaaaacagggagggcccaatttcgagatttcgccgaccagaaagcgaatgcataatttttttataggggcacccaagcttaattaccgggggggcttttaacaaggccgcgtacggaaaaaccccggccgtgcccaacttaaaagcggtgggggaaaaccccctttgcccccggggggtaatagcgaaaacgccccctcccatcgccctttccaaaaaaagcccaacctgaatggaaaaaggggccccccccggacgggggcattaaaggaggggggggggggggttacgccccgggtgaccccctccctcggcaagggcctaaacccccctactttacgtttcttccccttctttttaaccacaagaggggggttttcccgagaggctttaaaagggg

SEQ ID NO: 176024 - DNA, 302 bp, Zea mays
  Clone ID: MRT4577_92129C.1
agctcggaattcggctcgagcagcgaaatgttcaggatataaagcaggagaaaagaatactatgtcgacgcttacaggaaaaccatgaggaggaaggaatacggggggggccacggcagctcatgagggagggagagagccggctgctccggcggcggaagggcaaagccagcattgagcaccatactgagagggatacgcggggcgaggggaaacgtgattagctcagattgtacggagcatgagggactaatattgcaaacaggacatggagccgtaagaaaaaaaacaaagggcggccg

SEQ ID NO: 176025 - DNA, 428 bp, Zea mays
  Clone ID: MRT4577_9212C.1
gattcccggtcgaccagcgtccgctgcatcaccaccaccacagccccgtgtcgggttccaggggccgtccacctcttcgcatcccggagcccaccggcttcttggctcgccgccgcgaccggacgcctcttcgctggcttcgtgcgcacgctctcggtcctgcgttgactacgcgccgcccaccagccctcgcccggaggtcggcgccagcgagctcgcgttcgagctcgacgagaacctcgcggaggctagccctgcctgcgagccatacgcccaagagctgctcgcgagtgcccaggatcgccaccgcatcttccacgaggagctggtcgtgaaggccttcttggaggccgagaaggctcaccgtggccagacgcgcgcgagtggtgacccctacttgcaacattgtgtggagactgctgtgctac

SEQ ID NO: 176026 - DNA, 521 bp, Zea mays
  unsure (1)..(521): unsure at all n locations
  Clone ID: MRT4577_92130C.1
gccggccggaatcccgatcagcntcttcccattgctagcatatcattaatgtctattatgttttcttaaaaaaaaaaaaaaaaaaaaaaaaaaaaaaaaaaaaaaaaaaaaaaaaaaaaaaaaaaaaaaaaaaaaaaaaagaaaaaaaaaaaaaaaagaaaaccacaaagaaagaggggccgccagaaacaggggggccccccccgacggccgggcgggggggcgcgggcccgggaccccccggccccgggggggggcccccgcgcccgggggccgcggcaggccccccccggggccgggaaacccaagccgcgcgccaactcagcggcggggcacaacccccggcgggccccagcaggcccgccgggggaggaggcccccacgggcccccccccccacccgcctgagcgggccggctggggggggcccccggggggaatgcccatccggacaggcgggaggaaagaccggggggcgggcggtgctttaaagccaccaggaggcccgacgcccccccgccc

SEQ ID NO: 176027 - DNA, 300 bp, Zea mays
  Clone ID: MRT4577_92131C.1
caccctattaaagtaaattccgtccgtcctaccagtgtggccgaaactaattgttccatgtcctccaaaaagaaaggatctcgttccaataccataccctttaatgaaggtgcttttccccccaatttcctatttatagctctaatactatagctggaatgacctatatgaccggaaccacctaaacatctatatgacccgaacggaacctcaacctatatgtatatgaccggaacctacacaacctactggacttgctttgctacttgagcctaagctatatgatctgaaccaacccta

SEQ ID NO: 176028 - DNA, 665 bp, Zea mays
  Clone ID: MRT4577_92132C.1
actcttcactagcctctgctcctctgaaaggcggcggcgacttcctcttccacctacctcgccatcggccgcaaaaccctaaaccccgccccctccgtgtccctggccggccatgaggagtatattgtgaggggtgggagggatctgttcccgctgttaccggaggccttcaagggaatcaaacagatcggtgtaatcggctggggctcgcagggtcctgcgcaagctcagaacttgagagactcacttgttgaggcaaagtcagatattgttgttaagattggtctccggaaaggttctaaatcttttgaagaagcccgagcagcaggattcaccgaagagagtgggacgctgggtgatatatgggagactgtatcaaacagtgatcttgttttgctactgatatctgattctgctcaggctgataactacgagaaaattttctcgcacatgaaaccaaacagtattcttggtttgtcacatggatttctccttggacatttgcaatctctgggttttgatttccctaaaagcatcagtgtgattgctgtatgccccaagggaatgggcccatcagtcagaagactttatgttcagggcaaagagacaatggtgctggtatcaatgctagctttgctgttcaccaggatgttgatggaagggca

SEQ ID NO: 176029 - DNA, 345 bp, Zea mays
  Clone ID: MRT4577_92133C.1
tttttttttttttttaaaacgaagagcgagagcgacgatagctcagtaatattttaatccgtctcgaaggccatgattccatgaacacaatcatgatttccaattccggcattacttcgagcacctcgcgagcgacgcatgagctttcttctcctttccaccaaaaggtcctagagtctttctctcctacagcaaatggtgatgcagtggcgaggaagtaaagcgtccgtgcccatagcatggctgagcaatgacagcggtgtccaagcgctgtgaagcaacgacgaggtcgacggtcggtggcacggaggaaaccaagatcaaccgtgacagaggagctacgac

SEQ ID NO: 176030 - DNA, 663 bp, Zea mays
  Clone ID: MRT4577_92134C.1
tgggtacccctccgaggccggccatgaggagtatattgtgaggggtgggagggatctgttcccgctgttaccggaggccttcaagggaatcaaacagatcggcgtaatcggctggggctcgcagattggtctccggaaaggttctaaatcttttgaagaagcccgagcagcaggattcaccgaagagagtgggacgctgggtgatatatgggagactgtatcaaacagtgatcttgttttgctactgatatctgattctgctcaggctgataactacgagaaaattttctcgcacatgaaaccaaacagtattcttggtttgtcacatggatttctccttggacatttgcaatctctgggttttgatttccctaaaagcatcagtgtgattgctgtatgccccaagggaatgggcccatcagtcagaagactttatgttcagggcaaagagatcaatggtgctggtatcaatgctagctttgctgttcaccaggatgttgatggaagggcaacagatgtagctctagggtggtcagtagctttaggttctcctttcacatttgctactactctagagcaggagtaccggagtgacatttttggcgagcgaggtattttgcttggtgctgtccatggcatggtggaggctcttttcaggagata

SEQ ID NO: 176031 - DNA, 3168 bp, Zea mays
  Clone ID: MRT4577_92135C.1
gggacgtgactgtcctactgtcgccaacttttctgccctacaatcccgtcaatcccacacataaagagctcacggacgcatctccggaaatcctctctttccagccaccctcactcttcactagccctctgctcctctgaaatggcggcggcgacttcctcttccacctacctcgccatcggccgcaaaaccctaaaccccgccccctccgtagccacagccgccacctccgtctccttccccgccacgcagcacccatgcctcgtcgccgcctccgcggaccgccgccgcgccgtggctgcgaaggtctcgtcgccgtcggtcatcggcaccgccatgccgtcgctcgacttcgagacctccgtcttcaagaaggaaagagtgtccctggccggccatgaggagtatattgtgaggggtgggagggatctgttcccgctgttaccggaggccttcaagggaatcaaacagatcggcgtaatcggctggggctcgcagggtcctgcacaagctcagaacttgagagactcacttgttgaggcaaagtcagatattgttgttaagattggtctccggaaaggttctaaatcttttgaagaagcccgagcagcaggattcaccgaagagagtgggacgctgggtgatatatgggagactgtatcaaacagtgatcttgttttgctactgatatctgattctgctcaggctgataactacgagaaaattttctcgcacatgaaaccaaacagtattcttggtttgtcacatggatttctccttggacatttgcaatctctgggttttgatttccctaaaaacatcagtgtggttgctgtatgccccaagggaatgggcccatcagtcagaagactttatgttcagggcaaagagatcaatggtgctggtatcaatgctagctttgctgttcaccaggatgttgatggaagggcaacagatgtagctctagggtggtcagtagctttaggttctcctttcacatttgctactactctagagcaggagtaccggagtgacatttttggcgagcgaggtattttgcttggtgctgtccatggcatggtggaggctcttttcaggagatacacagaacaaggaatggacgaggactcagcatataagaatactgtagagagcatcactggaattatatcgaaaactatttcaaagaagggtatgcttgaagtgtataactctctgactgaagaaggaaagaagcagtttattgaggcctatagtgcagcatattacccatgcatggacatattgtatgagtgctatgaagacgtctcttctggaagtgagattagaagtgtggtgttggctgggaggagattttatgagaaggaagggctccctgctttccctatgggaaaaattgatcaaacacgtatgtggaaggtgggtgaaagggtccgttcaaccaggccacaaggtgatcttggcccactgcatcccttcactgctggagtgtatgttgcactaatgatggctcagattgaggtccttaggaagaagggccactcttactcagagataattaacgagagcctgatcgagtccgtggactcgttgaacccgttcatgcatgctcgcggtgtggccttcatggtcgataactgctccacaactgctcgtttgggatctaggaagtgggcaccacgcttcgattacatcttgacccaacaggcgtttgtgactgttgacaagaaagcaccgatcaaccaagacctcatcagcaacttcatgtctgaccctgtccacggtgccatcgaagtctgcgctcagctgaggcccactgttgacatctcagtgaccgctgatgcagatttcgtgcgtccagagcttcgacagtcttcataagcttgtatggatccgcagtgtgactgcaatggctagtttgtaagaacttaatatgcctgggcttttgaactcttagattgtgcctgtattgctcgtgcttgcaaatcacaacagtaccacaccgccaagagtttacttttctggtcctcaagcacgagcaatacaagcacaatctaagagttcaaaagcccaggcatattaagttcttacaaactagccattgcagtcacactgcggatccatacaagcttatgaagactgtcgaagctctgggcgcacgaaatctgcatcagcggtcactgagatgtcaacggtgggcctcagctgagcacagacttcgatggcaccgtgcacagggtcagacatgaagttgctgatgaggtcttggttgatcggtgctttcttgtcaacagtcacaaacgcctgttgggtcaagatgtaatcgaagcgtggtgcccatttcctagatcccaaacgagcagttgtggagcagttatcgaccatgaaggccacaccgcgagcatgcatgaacgggttcaacgagtccacggactcgatcaggctctcgttaattatctctgagtaagagtggcccttcttcctaaggacctcaatctgagccatcattaatgcaacaaacacgtatgtggaaggtgggtgaaagggtccgttcaaccaggccacaaggtgatcttggtccattgcatcccttcactgctggagtgtatgttgcactaatgatggctcagattgaggtcctaagaaagaagggccactcttactcggagatcattaatgagagcctgatcgagtctgtggactcgttgaacccgtttatgcatgctcgtggtgtggccttcatggttgataactgctccacaactgctcgcttgggatcaaggaagtgggcaccacgcttcgattacatcttgacccaacaagcgtttgtgaccgttgacaagaaagcaccaatcaaccaagacctcatcagcaacttcatgtctgaccctgttcacggtgccattgaagtctgcgctcagctgaggcccactgttgacatctcagtgactgctgatgcagatttcgtgcgtccggagcttcgacagtcttcataagctcgtatggatcttcagtgtgtcctgcaatggttagtttgtaagaactaatatgtgtgggcttttgaactcttagattacctgtattgctcctgtttgaggaccagacaagtaaactcttggggtgtagtactgttgtggtttgcaagaataagaataaatggttgatacc

SEQ ID NO: 176032 - DNA, 781 bp, Zea mays
  Clone ID: MRT4577_92136C.1
cagtgattaattatgacaaggacaatccttccctagcagaaggcaccatatttccatcgatggttgattgttgaaatgcacttgctacttattgcattaagggtgaatatgactttgaaattgacaaaagtgagccaagtaggttgagagtgcactgcacatatgagaggtgtagatggaggatgcatgcctctaagatgcgagatagcacactcattcaggtcaaagtgaacccttttcctcacacatgtccaagtgttgaaagaaaagagactttgaagatagctaagagcaggtggtgcgctgatgtaatgttggattgggtgagagacaacccatgtattggtccaactgcattgataaagaagatacatgagaagtatggaatgaaggtgccttacatgagagtgttttatggtaaggaaatggctctagacaagatttatggtccatggaaggatagttttaagttgatgtacactttcaaagcagaagtggagaaagcatgtccaggaagtgttgtagagattgacaagcacactgtgtagtacaaagtgaggaagatgattatggagaaggaatgctttagaagggtttttgtttcatttaaggcttgttggaagggctttttagatggttgtagaccatatttagcagtggatgcaactgctttgaatggaagatttagaggacaattagtagctgcttgtgccattgatgcacacattggctctttccagttgcatatgggcgacagcaacggaattcgagctcgggcccg

SEQ ID NO: 176033 - DNA, 597 bp, Zea mays
  Clone ID: MRT4577_92137C.1
taaaaaaaaaaaaaaaaaaaaaaaaaaaaaaaaaaaaaaaaaaaaaaaaaaaaaaaaaaaaaaaaaaaaaaaaaaaaaaaaaaaaaaaaaaaaaaaaaaaaaaaaaaaaaaaaaaaaaaaaaaaaaaaaaaaggggggcccttttttaggggttcaatttttacttccccgtctttgaaaacctttactttttttatggggcccccaaattaaaataaatggccctcgtttttaaaccttttagcttggaaaacccttgggtttccccatttaaatggttttgcaaaaattcccctttttgcaacttggcttattgcgaaaaaggcccccccggttggcctttccaaaaatttccccatcttaattggatattggaaccccccttttacgggccttttaatcgcgggggttgttttgtttcccccaagggggccttttccatttgaaagctccttaggcccctttctttaggtttttttcctttcttttttcgccactttggccggttttcccttaaaagttttaattgggggcctcctttaaggttcccatttaaggcttttacggccccttaccccaaaaaaattcatttgggga

SEQ ID NO: 176034 - DNA, 396 bp, Zea mays
  Clone ID: MRT4577_92138C.1
gtacctcgaacgcggccggggaaagaactttcccaaataagtgagcttgttcgagctctatccaggctcgtctgctgcaacaacgcaacagcacaggcatgtaggaggaaggaggaggacctcctcctagaagtcacaagctctcatatcgccagcccatcgctacggcggcgcagggctcgcacaacaaatactacaaggtagaccccgaagcagtccgcgcttctagccagataagctatagaccaggcccttctatcgcgccggagccaccgagtgaggctcaaaattcctcttactctacaactccatcctcaccgacatggtgcatctcaatgtccacctccaagtgagacaccgtcgatttctagtgaatcccctgcaccctacgcagca

SEQ ID NO: 176035 - DNA, 386 bp, Zea mays
  unsure (1)..(386): unsure at all n locations
  Clone ID: MRT4577_92139C.1
gcgagcccctcttcaccannaagcaggcgttcaaagcgaataccaacgaaatcctgaatggacattnntggagcttcgtcgttgcnncttcgacagtctaatccgtgagaaatatatacntatatatatttacccatacatatactgtactgctgctgtgcggtgccnnnngcgtaggcttttggcgtgatgaatnngtcatacaataaagaagggtgcgagtgtgctttgcgggtatttcatgtgtatggccatgcgatcttgagcacaatgacgtttgggatgcttntctttaagggcttctcgtgcgatctttctatattttggaaagaaagcttgtaaaataaatatatcgctcatctaggtggtgggcgttggcttgtatg

SEQ ID NO: 176036 - DNA, 418 bp, Zea mays
  Clone ID: MRT4577_9213C.1
ggccggctgcgagcgggcgaacacggccttgggaacgtgcgagatgcgcccttcacgacggtcctgcctcgagtacacgcttgggttttgttatatatatgttggtaaaagggcatcaatcgaagtggttacaagagggccggggggttagccgcagactgctggtttacaagcaacaactgtagctgcggcggggggggggggcggacgctgcatttcgttgaactaatgggacgagctgaacctggtggatttttgccggggggttcagcgccgacaattgggccagtgggctgagggaaagccggtgtcgttggtggcacataaacaggctgatgggttttagccagcggtgggcggatgacgccgggtccattttacaacgtcggcaatttgggccatttgtccaacttggctt

SEQ ID NO: 176037 - DNA, 851 bp, Zea mays
  unsure (1)..(851): unsure at all n locations
  Clone ID: MRT4577_92140C.1
aaaaccgttgtctatacctcagtacctcacctcgtgtccgcgaaggccgccgcaacacccccacgcacaaccgccgtcgtccatcccctcctcgcccggcgtctgcgaccgcatacacacaacagtcgtcgcccatcccctcccgcgtcgcgtaggaaccacccgaagtccaccatcgtcagtttgcggggtcgcacgggttccagatctgggcaaacagtgacctatgcaattcttcggtggctcatcgttgacgtcgatcgtgcaggaggcgaccccaacccttggcagcgcccccgttctaatagtggccacccacggcggctgtgctgccccccgcccgggtccacggtctcggtcaccaacccatcgtctccccccgtccccggtgcgtccgacattgttgccgcggacgaggtctgcaccatcttcatggatctgcctgcagatgtcaaggaaacggcgctgcacaacctgttgtgctggctcttgggattcgaggtgtctgagatgaacttcaagggcaaccagcccatgggctttgcgctcttctccactgtgcaccaggccatcactgcaaaggctatgttccaggtttgcttcaattcttgttgtgnggatgagatgtgaccccaactggcactcgtcatctacagaatacggtgtttgatgctgagactaaggtgctgctgcaaactgatatggccaagaagaacctcttcgtcaaaagatgtgagatttgtccacttgtctttcacatggtctctctactatcgctctaacagaatggtagtaccacgagcaagctaacctggatttgacgagatgagatagtttgacttaggatgatt

SEQ ID NO: 176038 - DNA, 340 bp, Zea mays
  Clone ID: MRT4577_92141C.1
ggggggaaccaacacccaacaacttttggaattattcccgtggggtggagggacctttaaagccacggatcacaaaccggtgggggcacggggtttcaaaatctgcaccagttttcccggggggagaaaactgaattattggtacaaacccctccgcctaaaaaaagaaaaaccccggcaaatttattactcttgcgggttctgaacccacaggaaaaaccggtttgggttttctaaaaaaccggaccctccaaataggggcccggttttgcaactcgatccccaaaggcgggggaggagacaatcctttttcaagcttggtttgtaattttttgggggg

SEQ ID NO: 176039 - DNA, 177 bp, Zea mays
  Clone ID: MRT4577_92142C.1
ccgtaagctcggatttcggttcgagcaaaaagttttccaaccttaatagggtttgttcagatgcaaaccagggttgtggtatgaagtatatctatctcattctttaaactttttggagtgaagactgttgtaaaacagaatgcactatacacaaatgtgaattatttatattactgg

SEQ ID NO: 176040 - DNA, 267 bp, Zea mays
  Clone ID: MRT4577_92143C.1
ctggactcaaaaacatcccttccgaactatcctctgatgtttccattcccctgtagggtggggggcttctgaaggcctcctacccctccctccagccctacgtttttaccttctcaaacctacatctatacccttacaacgtgcaagcatacatattgttcctctaccccacactgtcaacaaagtcccaaccttctcgaggcttccaccccgtcttcttcagcttcaatgccgtactgtcaaccttgcttaaccacttctaccctc

SEQ ID NO: 176041 - DNA, 4348 bp, Zea mays
  unsure (1)..(4348): unsure at all n locations
  Clone ID: MRT4577_92144C.1
ggtaccctncggggccgnccgagnaacgcatcgtccccctcccttttcggcgccccaaccacaaggaacagccgaacaggtcggggtcaagccatcggaccttgattccgcttgccctcctgctttatcccgccgccgccgtcgtcgtctcaaccgcccactccttcctctccctgccgctcctgcgaatcgcgaaatcggagacccccggaccgccctccaatgacgaccatgagcgacgatggtgaccgcacctgcccgctctgtgccgaggagatggacatcactgaccagcagctcaagccatgcaaatgcggttatgatatttgtgtttggtgctggcaccacatcatagacatggctgagaaggaggaaacagtgggccgctgccctgcatgccgcacatgctatgacaaggacaggatcgtcaagatggctgccacttgtgacaggacagtggcagagaaaaatgcagagaagaagcacaggacccaaaaggttaagccaaaggcagcaccttcagcagcagcaacatcaactgtagaatctaagaagcatctggctagtgtcagggttatccagagaaatctggtgtatataattgggctacctgcacatttatgcaatgagagcgtacttgagtgtagggagtactttggccaatatgggaaaattttgaaggtttcagtttcccgtccgactgggcctccctctcagcaggcatcagcaaacagcaatattagtgtgtatattacttatgccaaagaagaagaggccatccggtgtattcaagctgtacacaattttgtcttggaaaggggaaagtgttaagggcatgctttggttactacgaagtattgccatgcatggctgcgaaacatgacatgtgggaatccagattgtctctatttgcatgatgtaggcagtcaggaggatagttttactaaagatgagatcatctcagcatatacaaggactagagtccctcagatggcatctggtgtttcgcaaagacgcacaggcactgtgttgcctcctccaggagatgatttctcttacagtgcggtggtttcagccaagcatacatttaagaatggaacacttaataccaccagtcagcccagactttcacctccaaacagtagttctgggaggtccacgcttccatcagctgcctcatgggggcagcgtgatttgaatgccaggacaacagctactggagcgacatcgtcacaatctcatacaaaaccaaaatcagaatcacaaagtaatccattttcaagttcttcagtattttcctgtacaaaaacaccctcttcatggaatgatgatacaagtacagcagcaaaaatatctgaaggacagcaactgtcagaaaaagagtctagaaccttgcagccgtataagcctggtatttcaaaggaaacacaagctttatcatcactggagtcatcactggacatagacttctcaacaataccttcagcttggaatgacgatgacattgtagtaccagatgtgatgccaaaaggaagtgatgaaaatcaagttgcaaataaaaatggtgagctaacccatccagcatccaagtcactggttttatctaagaaagacataaaaatgaacattaccagcaaaactccttcagattttgtatcaagtccagcaatatctaaatcagatgtaagtactagtgatggtgaccactcactcaccaatattactcctaaatgccttgcttcaaatgctgtagaatgccaatctagtcatactgctgtggagaaaatgttggaggatattggatccaaggacatcgacatggagaagatatcttctcagatatcttcagtaacattaggtggcaacgataagattcagagtatggcaggaaatcagcaaccagatgtaatgccatgcacatctattgatgtgcccatggatcagaattttggcagagaccgatctcatctcaatcttaacgagcttttattgccttcagaaaataaggatagtattctttcttgtcaatatagttctgataagcgtcttgcttggagtttgaagatgcaaaattgtagcgttactcctttaaatgatacaatagactctgcaatgctcactgacaaacctcatagtatactgctggaaggttcagagcaaccatcatatccaccatttgttgaatttcctagtacatgggatacctcattgtggaatgatacagaaaataacgctgcatcgacgattgacactataacttcttcacagatgcagccagggttttcttcaactgataacacttatgccttgctaaatggaggtcaagatgggctaggtactgtatatacacatgataatgtttctgtatatacacatggcaatgtttctggacatcctggaatgggaagtcatcaccatagagcaatgggttcattaagaaacaatagtataggaagttttgacaagaccataagcgtaaataagtatgaaagaagaataatttctgatacgttgtcagagtttaatccatgggatgattcatattcgactgctaacaattttgctaggatgcttagggaatctaaaaataatgatgtccattgcattgcgccttcatggaaatcaggaaccgggatcaaagagtccagattttcatttgctagacaggataaccaaggaaacttgtttgattcatctctcagaaactgtggtactggtactgagcagaatttcagtttgctaccccagaattctcgaggaaatatttaccagaatggccttgcattccaatctctagagaatgaattttcaaacaataactctcctggtgtattagatatggcaactactggtacatcgatgtctaaaatatctgcccccccaggattttcggcaccaacaagagtaccccctcctggattttctactgcatttccatcccaggatagtttgaaccccactcctgtgtttccttctggaattttgtgccatggcgggtctatcccccctcctagattctcttcattttcttctggaatttcaactcaggaagtgtctaagcctcctactagaccgccttctccattttcttctagattttcatcacaggacggtcttgacccctcttctagattccctttttcttctggattttcatcacatgatgggtctaatcagtcgtatggctcaacgaacccagaaaatcttctccggggtactgttcagggtggcaacagtaatcattatcaatctcagtttggaaggcactcaagtgacatggagtttgatgatcctgctatattagccatgggcaaagggctgatgcctggaattggcgattcagggctggagatgaaaaatactcctgcttttcaagcacagttgcaaccagcaagtagtgatccaagatttcagttacatgtacagccaaatgtgcagtctcgtcaaaacatgagattcacagaccctatgcaagatggtttgaaccatatgaacgataattacctggcatccagatttttagctcagaaccagggtcctctatctccttatgtgcagattccgcaacaacccagaaactcgcaggttataaatggtcactgggacgggtggagtgatttgagacaagggaataacgctcctatgtcagacatgtccaggatattatatccaagtgaagtgaacaagttgcatatgctgggttcaaatgatgtccataacagagcctttggaatgtgatcgtctcctgggataatgtgcgactttgagctgacatgttcaacttggggcgttttgtgcaagtaactggttgcacaacacatagtatacctgaggtggttaatggtgttgtgctcatgagctggcacacgactatttattgctgttggagttgaccaaaatgaaccttagttttggtccatccatttggaattaccaggttcattctcgtctatgatttgtgaagcttgaatgaaaagaaagattacgtgcctgagaagaacaaggcagctgaagttgaaatagatagagatatgtctattatgggatgtggtgtgacttgcgagcgaaagagatgaagaagattaggtgggcttggcttgatggcagcttgttttttcttgtgtcttgtacatgatgatattggtcggtggttgtatatgacttgtgatcgacggtggctgcattaacctgtagtggttgcccttgctccttcctgcctgttttgtttgcagctcctcctgttttgcatagtttatgctgattaagggaattggtgttgtcttggnaaggggaaagtgtaaagggcatggtttggntactacgaagtattgccatgcatggctgcgaa

SEQ ID NO: 176042 - DNA, 206 bp, Zea mays
  unsure (1)..(206): unsure at all n locations
  Clone ID: MRT4577_92145C.1
ttcatggggatgtaaggctgacggccnagccatgaacatcctgtgtgacataacccataccgtctgatatttcgcactggatgacgagtggatgtgcttgtcggtgatgtgagcgtccgtgaacatcctggcaatggagtgcagcctgagcgagtgactgatggttctttgatgatgtccgctgggatacgcaatagtgctcaatc

SEQ ID NO: 176043 - DNA, 1429 bp, Zea mays
  Clone ID: MRT4577_92146C.1
ctcgaggccggccgggccgggaggacttacgcacgacgcctcttcttcttcttcctcgtgcagcagctgtccatcgccgctgggttttctttgttggcattgggttttggaggagaggtcaaggctgagactcggagacgaaatgggtcataggatgttcagtcccttgggcttccttcttcttgccatcgtcgtcctctatggtggaacagagcagaggcgagcggaggcagcagaaggagggagcccgcacaggctgctggccaccatctcggtgtccaagccgtcctaccccacggtcaccacgcccatgtcggcctacggcgacccggtctccacgccagccaccccgtactcaacgttcccgtcgctggcgaccgggaacggcggtgccggtgccggtgcaggcggcggtgctggtgtaggcgggggcggcggcgggggcgctggtgtaggcgggggcggcggcggcggcgggacgtggtgcgtggccagccagagcgcgagcccgaccgcgctgcaggtcgcgctggactacgcctgcggctatggcgccgactgctccccgatccagcagggcgggagctgcttcaaccccgacaccgtccacgaccacgcgtcctacgccttcaacagctactaccagaagaaccccgccccaaccagctgcgacttcggcggcacggccaccatcaccaacaccgatcccagttcagggtcgtgccagtacccatcgtcaagcggtggcgctcagagcacgatgccgccgccgtccccgacgagcatgccgccgacagtgcccaccgccccgatgaccccgacgccgatgacgccggacaccaccccgaccaccggcaccccggtctacggattgtccccacccgactacggctcattgtccccacccgactctggctcgatgtcccctcccggctacggatcgacgtctcccccggactacaacgacgtcggcgccgccgcgacgacggggcagggcggcgcggcgctggcgctggcgcttctgtgcgtcctggtcgcgacagtatcgctgcacgtctccaaatgagagcggcggcataggaggaaattatgcatgcctgtttcggttgagacgttacatggcgcgccccgtgcgtggtggctgaaagacgcacgcacaggtccatcgccgaggatctccggtggtgtgctgcccggcgccgggggagcattcgagcagtgttgcaagtctgcttagtgttgtataagaaatgaggcgagcttctagcagcgcccgagttctagcagatgcaccagatgtttatacatacatacatacatgcttatataatggccattccactattgtacttaggagtatatgagaaaatttgtttccttgccctctccatttgctcatgctaaataatatagttatgattaggtaagc

SEQ ID NO: 176044 - DNA, 728 bp, Zea mays
  Clone ID: MRT4577_92147C.1
atggcacatcagttttcgttcgctgtcgcctctgatcgttcgctcccgccgtggctcgaaatattctcgttttgcgctcgctccagcaccacatttatggtgtacgccgccgccgaggacaaggctacatggaggaggcaaggctagacgatcttcaccgtcacgctactggctggtacgttccaacaggtgtctgctcgtgccgctaccactggtgctgggccctccggcagagctaccgtcgacgatgcaaccctgttacactactgctccctccaactttccttcgtcgccgtatacatgcttcacgctccctcacgattgtgtctagccatctgcgtcacgatccctcacctcacgcccacaacatgtgttggttttagctgccgcgctctagctgcttgatgaaatgtccgtttagaacgaatacgaagaatgttgctggtatggagttcgttgaccaatggaaaaggaagagacaggtaaagaatatgcatccgacgtcaaaatttgttttctcctaattaacttatgagggcactaatctcgaattttaaataattattttgttcatttaattccaatactcatgtgttttccaaacgaaatataatgcaattttgaggaaaaataaagtattttaagaattctgttagcactgtagatatagaggactagatttagaggatactgttggagatgagaaagatatacagaataaaatcttt

SEQ ID NO: 176045 - DNA, 212 bp, Zea mays
  Clone ID: MRT4577_92148C.1
ggccgaccatatatggcgactcgccatcctcaccgaaccctagccgtacacgcgacttaaatcaggtcatcgaccatcggttagacaccgtcgattacatgaaccactagaacagatcgggtacattgatcacacctcgtcgtccgagagacggaagccaggacctttggcaaaatggagcaggaactcaaggacaaggcaaaccgaatctg

SEQ ID NO: 176046 - DNA, 2591 bp, Zea mays
  Clone ID: MRT4577_92149C.1
atccaaggacatcgacatggagaagatatcttctcagatatcttcagtaacattaggtggcaacgataagattcagagtatggcaggaaatcagcaaccagatgtaatgccatgcacatctattgatgtgcccatggatcagaattttggcagagaccgatctcatctcaatcttaacgagcttttattgccttcagaaaataaggatagtagtctttcttgtcaatatagttctgataagcgtcttgcttggagtttgaagatgcaaaattgtagcgttactcctttaaatgatacaatagactctgcaatgctcactgacaaaccttatagtatactgctggaaggttcagagaaaccatcatatccaccatttgttgaatttcctagtacatgggatacctcattgtggaatgatacaaaaaataacgctgcatcgacgattgacactataacttcttcacagatgcagacagggttttcttcaatcgataacacttatgccttgctaaatggaggtcaagatgggctaggtactgtatatacacatgataatgtttctgtatatacacgtggacgtggtaatgtttctggacatcctggaatgggaagtcatcagcatagagcaatgggttcagtaagaactgatagtataggaagttttgacaagaccataagcgtaaataaggatgagagcagaataatttctgatacgttgtcagagtttaatccatgggatgattcatattcgactgctaacaattttgttaggatgcttagggaatctgaaaataatgatgttcagtgcactgcgccttcatggaaatcaggaaccgggagcaaacagtccagattttcatttgctagacaggataaccaaggaaacttgttggattcatctctcagaaactgtggtattggtactgagcagaatttcagtttgctaccccagaattctcgaagaaatatttaccagaatggtcttgcattccaatctctagagaatgaattttcaaatagtaactttcctggtctattagatatggcaactactggtacatcaatgtctaaaatatctgctcccccaggattttcagcaccaacaagagtaccccctcctggattttctactgcatttccatcccaggatagtttgaaccccactcctgggtttccttctgggattttgtctcatgatgggtctatccccctttctagattcccttcattttcttctggagtttcagctcaggaagtgtctaagctccctactagactgccttctccattttcttctagattttcatcacaggatggtcctgatcccccttctagattccctttttcttctgggttcacatcacaggatgggtctaatcagttgtatggctcaacaaacccagaaaatcttctcgggggtactgttctgggtgtcgacggtaatcattatcaatctcagtttggaaggcactcaagtgacatggagtttgatgatcctgctatattagctgtgggcaaagggctgatgcctggaattggcgattcagggctggagatgaaaaatactcgtgcttcacagttgcaaccagcaagtagtgatccaagatttcagctacatgtacagccaaatgtgcagtctcatcaaaacatgagattcacagaccctgtgcaagatggtttgaaccatatgaatgataattacctggcatccagatttttagctcagaaccatggtcctctatctccttatgtgcagattccgcaacaacccagaaactcgcaggttacaaatggtcactgggacgggtggagtgaatcgagacaagggaataacattcctatgtcagacatgtccaggatattatatccaagtgaagtgaacaagttgcacatgctgggttcaaacgatatccataacagagcctttggaatgtgattgtctcctgggataatgtgtgactttgagctgacatattcgcttggggcgttttgtggaagtaactggttgcacaaaacatagtatacctgaggtggttaatggtgttgtgcttatgagctggcacacaatatttattgctattggagttgaccaaaatgaaccttagttttggtccagccagttgaaattaccaggttcattctcgtctatgatttgtgacgcttgaatgaaaagaacgagaagaacaaggcagctgaagttgaaatagatatagagatatgtctatcatgggatttggggcgacctgtgagtgaaagaagcttaggtgtggcagtttgtttttcttgtgtctgtacatgatgatattggtcggtggttgtagtataatttggtgatcggcggtggctgtattaacttgtagtggttgctcttgctccctcttgcttgtttatgttaattaagggaattgaggtgaaggtctagtgttacccatagcataataatatacgatacataactggtttctttgctagcattaaaaaaaaaaaaaaaaaaaaaaaaaactcgaggaggggccgggacactggtttctttgctagcattacttcatttgtttcaacaacagcaaaaaagaaatcccttaacctttctt

SEQ ID NO: 176047 - DNA, 403 bp, Zea mays
  Clone ID: MRT4577_9214C.1
tgggtacctcgaggccggcgggatagagttttgctcgaaatgccctgcttcccttctcgagacgaatctggtgtgagtgagatcggcgtcgcaataatgctcctgctgctctctatgactcatctgcgctactgtgctcgctgctcagggccgtctccctatgagcgcacaccgaagtccacatcagccgcggcctgagccgtcatcgatgacaacacggtgttcgacaccgccgtctactgtggcatcggctctgccgtcgtcgctgaggaggacgacatcgtgatgtacgagtaatggtgtgggtatttgctgctgatgctgctgaatctccggctacaccaccagaatcaatctcgtggttgaaactccttgacctggtctgacaaggacgacatcgaac

SEQ ID NO: 176048 - DNA, 267 bp, Zea mays
  unsure (1)..(267): unsure at all n locations
  Clone ID: MRT4577_92150C.1
ctgaagcgtaccacaaaaaacgcccgattcgtctcgcaaaatcgccgccgccatcgcctactccaccagacgccgatagttccgccttcctttcctgctgcgcgcctgtcgccatggtgaagcggtggcttcccctcgaggccaaccccgacgtcatgaaccagttcatgtggggactgggggtccccgaggacgtggggttctgtgtggggggggggctcnatgacnanttgctcnccatggtgccccanccggtgctcgcggtcc

SEQ ID NO: 176049 - DNA, 364 bp, Zea mays
  Clone ID: MRT4577_92151C.1
acgcccacgcgtgcgcgaaaaccctgctaaacttatgtatctgccaaaccaacgcagcgcacgaaccgtccttcacgatatcaggacaccacacttaaactactcggatatgctatgtcaatgcaatggactgtccattacattaggaagtacatgcgaatcttgcactactctaactgatccatctgtgcacttacaatcacgacccatatcatagtcacttcattatgacacattacctgaatgcactaatataaaccatctatgaacaatatgaccacgttaccaactttcgcaagataagagcacccgaatctaacttcgcgcaatatctatgatacaagctcaccctctcatacattca

SEQ ID NO: 176050 - DNA, 392 bp, Zea mays
  Clone ID: MRT4577_92152C.1
tcgttaagactgtccaggagcgcgtgcgggtatcgattcttaagatggaccgtgtgtacacccacttataccccatgaggactctgacaccctgtggaatgtagaagaccagagagctgcacgtggcagggcgacttaccttcacggtgtgggtccacatgcatagcgtgtactgtaagcacgtcctgccgacaacgcactacaggcaccctatctacacgctggagattgaacacctccacatccaggggatgcagatgaaggcggcacgcctggggcgggctgagccacctatgctgcaggaggtggtggagtacatgctggacatggacatcgacatgatcaacctgatgggtagcaaggacaaactttaccgaagcacctgcgtcttc

SEQ ID NO: 176051 - DNA, 312 bp, Zea mays
  Clone ID: MRT4577_92153C.1
taggcccccattccagcccccaccaagccccccctgtacagaagcgccagggccaaagacttcatcgcaaagttcatcaccatagtactcgatgaccgcgcgctcgaccacttcaggctctagctacctgactacgtttcagattcgtcctttcatttgctttggtctctaaaaccaaacccccccttagtttgttgtggtaataattcctgtatcaattatgtcataaataaaagctagggaaccttgtataaaaaaaaaaaaaaaaaaaaaaaaaaaaaaaaaaaaaactcgaggagagtgggcggtacc

SEQ ID NO: 176052 - DNA, 311 bp, Zea mays
  Clone ID: MRT4577_92154C.1
cgcgtcagggcaaggatcaaaagtcgcagactaccgcaattactgccctgtaaaaccacagtattccatcatcatacataagtcatccatacctagatcagtaatgctcaaggtctaatgaccaatttacatgcaatcaatgcaaccctgaaaactgttgatgggccctcaactaacgactgcaggggtcaaagggctactaatttcaacatcattcccaacatcactggagctgctaaggctagttgaaaagtgcttcctgtcctcaattggaaagttgacgtggaatgtctttccgtgtcccaacctgt

SEQ ID NO: 176053 - DNA, 1843 bp, Zea mays
  Clone ID: MRT4577_92155C.1
gtcgtccgctcctctcctctcccccacccgtcgtctccttgtcatccttgcctgcggattggggcggcacggcagtcggcacagcctctcgcttctcccgcgcgcgagccctttctccacggccgcggcatgacgttgccggaggcgaatgccggtgcgacggcgcagaggaagaagaactcaccagagatggagttcttcagcgagtacggcgatgccaacaggtacaagatccaggagatcattggcaaagggagctacggggtcgtctgttcggctattgaccaacatacgggcgagaaggtagccatcaagaagatacagaacatcttcgagcacctgtccgatgctgccaggatcctccgcgagatcaagcttctccggctgctgaggcaccccgatatcgtcgagatcaaacacgttatgctgcctccgtcgaggagggactacagagatatttacgttgtgtttgagctgatggataccgatcttcaccaagttattaaggctaacgatgacttgacgaaggaacaccaccagttctttctctatcagatgctgcgtgcattgaaatatattcatactgctaacgtttatcatcgtgatttaaagccaaaaaatatattagccaactgctaactgcaaactcaagatatgtgattttgggctagcaagggttgcatttaatgactctcataccacagttttctggacggactatgttgctactagatggtacagggctcctgagctgtgtggatctttctttagtaagtattcaccggctatcgatatgtggagcatcggttgcatttttgcggagattttgactgggaagcctttattccctggtaaaaatgtggttcaccagctggatttgatgactgatctcctgggtacaccatcagcagatactatttcacagattcggaatgagaaagcaaggaggtatctaagcagcatgaggaggaaacagccaatacccttctcagagaagttccccaatgcagatcattcggcgctcaagctcttacaaaggcttcttgcatttgatcctaaggatcgaccaacggccgaagaggcattggctgatccctactttaaaggcattgcaaaagtggagagggaaccatcctgtcagccaatttcgaaaatggaatttgagtttgaacagaagtttaccaaagaggatgtcaaagaacttatattccaggagatactgcagtaccatcctcagcttctgaaggattacaagaacggctctgaaaagacgagttttctatatcccagcgccgttgacaggttccgtaggcaatttgctagcttagaagaaaatggagagaggaatgccgcgcttgacaggaaacatgtttctctcccaaggacaacaaccgttcactccactccaattcctgcaaaggaaggtccagcagcaacctcccaggttgctcaaaggattccagcagctagaccaggaagagtggtaggcccagtattgccattcgagagcgcaagcgtcaccgatcaacacatcgctcgacgggtggcaaggaacccagctgttcctccagcaacgaacacctcgtcagtctactgctaccacctcaagtcggacagctccgacaggcaggagcatcatctagagcgtgagaaagatcgaaggcagtataggccagggcagcatttcatggatgccaaggtagcccctgagatgggccgggatatacgcccgtcacagtactatgtctcaaggggcttgcccaaagctgatctaacagacagggccaccctccataggagcgctcttcatggcgttgctcccttcaatggcatcgcagcggcc

SEQ ID NO: 176054 - DNA, 663 bp, Zea mays
  Clone ID: MRT4577_92156C.1
gtccttcggtgtggacctccctccgtctcccgggcggaagcggaagtaagcggacggggcgtccacgtccgccatccatggctgccacaggtacgcttgcccttcttctcccagtgaccctctcctcggggccctcccaccgcacgcgcgccttcatgcagatcccacgtcgtcagcagccgcgacgcctcacagcggcggccaccgaagcttcctcctacaacctaccatctcgctcctcaccggaggcgccggagaccaggcagatacgcctggagacggagtcagcactggagtggggcggcgtgtgcgagcggctggcccacttcgccgccactgctgcgggccgcgccgcctgcgagggagggcgcgtccccgtcgggcggagccgggaggagagcgagaggctgatcgaccagacggcggcggcggtgctgcttccgacgccgctcgatttcggcggcgtcgaggacgtgtccgcgctcgtcgctgcggcggtcgcgggccgcgcgctggcggtgagggagctttgcgcagttgggcgcagcatccgtgccgtgcgggcagtgttccaccagttgaagaggcttgccgatgaaatgccggatggaaggtactcttctcttgtagatatactacaaggttgtgacttcttaactgaac

SEQ ID NO: 176055 - DNA, 808 bp, Zea mays
  unsure (1)..(808): unsure at all n locations
  Clone ID: MRT4577_92157C.1
tctgctcctctcctctcccctacccgtctccttgtcgtccttgcctgcggattggggcggcacagcctctcgcttctcccgcgcgcgagccctttctccgcggccgcggcatgacgatgccggaggcgaatgcctctgcgacggcgcagaggaagaagaactcaccagagatggagttcttcagcgagtacggcgatgccaacaggtacaagatccaggagatcattggcaaagggagctacggggttgtctgttcggctatcgaccaacatacgggcgagaaggtagccatcaagaagatacagaacatcttcgagcacctgtccgatgctgctaggatcctccgcgagatcaagcttctccggctgctgaggcaccccgatatcgtcgagatcaaacacgttatgctgcctccgtcgaggagggactacagagatatttacgttgtgtttgagctgatggataccgatcttcaccaagttattaaggctaacgatgacttgacgaaggaacaccaccagttctttctctatcagatgctgcgtgcattgaaatatattcatactggtatgcacctctaaaagattccttattttagcctgaaaggtctcctgactagcattgnacagtgtgatgtgcctgcttttctgttttcaattaggnagtatggaacggtntctgattagcantttgcacatgagttcaacnntctagtggctgagtgctaatcaatcctaatgacttaactttccatgggtgtaattgtactctcgatcattcctttgcttctcagnttacctttgggggt

SEQ ID NO: 176056 - DNA, 836 bp, Zea mays
  Clone ID: MRT4577_92158C.1
gcgccgttgacaggttccgtaggcaatttgctagcttagaagaaaatggagagaggaatgccgcgcttgacaggaaacatgtttctctcccaaggtaacatataccttcttttccttccaagtcattttttcggttgttgagattgataaatcagggtaatccattagctactcaataggatttatcaactagatataggatgatgatctgatgacgtgttggcctagggtgtcacagaaaatttgctcaaacttgactgctgaccttgatttgctgcttgcaggacaacaaccgttcactccactccaattcctgcaaaggaaggtccagcagcaacctcccaggttgctcaaaggattccagcaggtaactggtcacatttcctaatctgtggctacccatcagtctattttttcagtcactcctgagttttcctgacatgcttcatctctccaatcttgcagctagaccaggaagagtggtaggcccagtattgccattcgagagcgcaagcgtcaccgatcaacacatcgctcgacgggtggcaaggaacccagctgttcctccagcaacgaacacctcgtcagtctactgctaccacctcaagtcggacagctccgacaggcaggagcatcatctagagcgtgagaaagatcgaaggcagtataggccagggcagcatttcatggatgccaaggtagcccctgagatgggccgggatatacgcccgtcacagtactatgtctcaaggggcttgcccaaagctgatctaacagacagggccaccctccataggagcgctcttcatggcgttgctcccttcaatggcatcgca

SEQ ID NO: 176057 - DNA, 505 bp, Zea mays
  Clone ID: MRT4577_92159C.1
ctcaggctgctgcttttgaagcacgccgctgatacactcacatgactcgagtagacgccggctcctcgccgcaacgatccggatacgaaggtagtaactataacctgacacaccaccgacgctctggactgcctggaggctaaccgcggcgaggaagcctagctggccggtgaagacgttgctaaggataacaataaggtgcttcgaggagacaacagtcgcaagcctggcgactaccgactgcctcaatgacaaggcagatctggacagagtacctggatctgcaactgcattgtctacattgcactagctggatctcgatgataataccgctgcgggatcaggattttacttatgtgttcatgatgatgatgatgctgatgagaatgaactatatctgtaacgacagaaaactgtggtggacaataacgcagctgatgaagcagctaccattctcaatggctttattaaaaagtaaagaaagtgcataatgctacggacgaat

SEQ ID NO: 176058 - DNA, 793 bp, Zea mays
  Clone ID: MRT4577_9215C.1
atcctaattcgcggccgcgggtcctgctctgtctgccgctccgtcctacagggtttcctcgccttctctcttttgtttctccctttcttcaccagaatccgcacgggaaaatcatcttttccccctacattttcttccggagggttttttttgaagaaccttatccagttccacgtcagtgccgccaatcctttcctcgatgcccacgccgcacataggcatcggacgctccgctgtgagccactacaacccctcgcacccaggtcaattctgcatcgcgtctcagcctctcccttgccgatccataccggccttcgtcatcttcgtcttccaccctcactatcgcgcgttgctccagctgcgccaccatcgtatgtgcgagcgctctggtcgacgcatgctattgtgtttccctccctccttttgccattgcatttttttgcttacacattacccgatcgttactaatttcaattgcaactatttgttgttcaattgaacgacatcttcacgctgctactttggatgacaaaaaatgccaagtactcttcacaaaatcacgctgggaactctgggacctcttcacgctacctctgtattccattccaattcttctacacacatctttatgctgctacctctaggcactcatctgctgccaaccaattgttcttcacgctggggactttaagaactctgtgacatcttcacgttgcctactctcggaacacaggtcatattcgtcctctgctgcagacaaagttcgtgagcaagaaacgagctattggaattt

SEQ ID NO: 176059 - DNA, 752 bp, Zea mays
  unsure (1)..(752): unsure at all n locations
  Clone ID: MRT4577_92160C.1
ccggccgggctggcgcatacccgctgcgccgttcccagggctctgcgtgcaggtgtgccgcgtccacgccgctggcttgtgctgctcaggcctctgcaggcgcgtttcggcgattggaatgccgcgcagccgatcggaccagcgctgctgctagccccgccgcgaccatcttcgtcgagcttccgtccgagatagattgcgatctattcctgagcttcgaggaatcgaagatcaagcgttggtgaccaagtgatcgaactcttcgagttctacgaggatgaagaccctgagcatttgtttggtgaaggccacctacctctatatataaacatggccatacgttgagcagtcaaacaacatcaatctcgcatccatggcgcttctcaagagtcaagataatagggctctcttcttgttggcgatggtggtcgtggccatggccatcgtgttggcaccctgccctgcgcacggaggagacgatgagaggtgcacgcatatgccggggtgcaacatcagccgttgccggagccagtgcaagcagtgggggtacgccaaccctgtgataaactgctggaacacgccaccgaacacggagttggacacatgctgctgcttcagtaacgctgcaagaaaattggcttgatttttaacgctagctgtcaactccatgtgtgctggagcttgttgactgatcgcgatccaaatgtatcanaataaaatttgaatggaaaaaaaaaaaaaaaaatttgcgg

SEQ ID NO: 176060 - DNA, 239 bp, Zea mays
  Clone ID: MRT4577_92161C.1
tttttttttttttttttttttttttttttttttttttttttttttttttttttttttttttttttgggggggagacccggaagccgacagcacgatttcaaaaataacaaaggaaatctggtgggtaacaacaggagcagcaagccagcaaaaggaaactaggcaaagaggtaggactacaagaacaaaagaatatgtggggggcccgaaataaaaacggtccaaaaaccctacaggac

SEQ ID NO: 176061 - DNA, 276 bp, Zea mays
  Clone ID: MRT4577_92162C.1
ctcgcgctcgcagcggcggcgggcggcggctgcttctccgtctcctccttccccgcaaacttgtctcgtattcctagcgcaggcggggaacactcccggcctccgcccgagcggagcggagcgtttcgtccgcgccgctgactccgaggagttcattttgccgcgctgtctccctgaatcctacacgtccttctcgcgtttggctcgactggcgcgttgattccttcttctttcgttgttgatgtgcagatctcccattctctttttacaagaact

SEQ ID NO: 176062 - DNA, 530 bp, Zea mays
  Clone ID: MRT4577_92163C.1
ccttccaaaaacttctttttggacctttacctcatagccattttaaaggggggcccccccatggtggggtggtgggtaaacccctgtggggttggcaaaaccaggtgggtggatgggcaccattggtggcatttgaaaggggggcccggcgttgggcttagcggccgggtgaaccggcaccacctgttgttggttaaaaagaggcaccggggctcacataacttacctggttaaagggtagaagtggtggctgctgaaaataaccaccaaattcaaatgctgttagtgggtgaaagggaaaaaattgctgggggtgggcacaacctacctggttaaagggaaatggtggtggcaattaaccaccaaatttcattgcacccatttggttaattggaaaaacctgtttttgttgaaagtttccacaagggtttgttaccccaagttgttgaatttgttggcccctgtttttttggccccccaattggcccaagggtaaccggcccctggggtcaccccggaatttccggccc

SEQ ID NO: 176063 - DNA, 356 bp, Zea mays
  Clone ID: MRT4577_92164C.1
gaaacacgtctggcaccccttccatccatttctgcagcacatccgggcagcctaacgaatgggtttcgcgccacagctgcggtcctattctacatcctcgccgtcgctgccctcaccgcggccgaagcactggctgagtcaccgtatacaggcagtactgccaagtaaccggccgagtcacctaaggcaggcagtgctgctgctcctgccaaggcacccgagtctgctgccacgagaactgcccctgataaggcacctcaagccggctccacgccctgcgatgccgctgcctaatcgtaatcgacgagtaggaagtttggaccagttgccgagccgaccaccggcgtctatacacc

SEQ ID NO: 176064 - DNA, 657 bp, Zea mays
  Clone ID: MRT4577_92165C.1
aattcggcacgaggcaccagttcctgcggtcgtgcccttggcggtcattttgagcgcctacgaacccctcaggtatatatccaccgcgagaggatcgcctcaccctatgcaccttccacctggcccgaaaggatgggcggtggccggaagcctcgggccactgcaacacccgctgcagccggaactagtcctgctacagctagaggagccccacgcgcacgccatgttgctgcccggtcaccacctcacaccccgggctgcgtctcgtaccacaaaaacagcccattagcactgaaaacctacctcctgggcttgattcaccgacctgccacagccggcgtggaggcaatatccaacttctagcgacggacacagcactgcaggaagtgttccaactgattcatgcagcacaaggtttcaagctcatagcaaaagaaacagtctcctttggttctattgacagctatgaccggagaaatacagcacctgcctctttatctgtcaaggcaaacgactgtgtcggcagccgattaaagtcaattgggcatatacaagtactacgatggaggacacactacgtcattttatatttttaatggggatctttgccccgaaatcactgaggctactttgtttgcatttatctttgaatactct

SEQ ID NO: 176065 - DNA, 1024 bp, Zea mays
  Clone ID: MRT4577_92166C.1
ccggccgggaaccccacgttttcccccacgcccccatcctttcgattaccattgccctacccacgtacgcgcagatccgtccgctccaatcccccttccccatcgtctcgcgacgccctcgccgccgcctcgcccccaacgatccactcgcccccacaacgattcgcttcgtggtgaagaagccacccgcgcctcgccggaaacggaagcagcaacccctagccacgctgaccctccacggcgccggcgatggggctgaagcggcctacggcgggagcgggggaggcagcagcgcagaccatcacgttgtccatgtcggccatgtgggacacggtgcgcgccgccatgagggaggccgaagcagcagcactggagccaactcaaaggtgagatactcttcgattggatcttgatctcgcttctcagttctaaatcccctgcagaaacgacgccgctggtgtccatctccggcgtggcgccgccgccattttcagctgtgtatcggctgtagctcagtcgacatcttctgctacagccctcccatctctgcagaagatggaaccgtggatggagggagcattcctgcggcggatggagcagcgggcctaactgcaggtatcttcggactcagattatgaacatgaagtacgatcaggacgaagcttaagctagacgaaggaggattgagatgaaggacgggctgatcaccaagctgtacgaaggatggtgcatagccgaagctatgcgcaggggagcttcggcatggtggcagaaaggggaaccgacttaaagatgaaaagactacttaggccttgacagatccccataagtcattagcaaatgtagtggacatgaatgtaattttacatgggctgcgtcccacgtctataaatagatgaacagtactcccgtactgttcacgctgacttggcatttgcttttgcgtcacacttgtattttcatctccttccaagtcgaaggtacatttgtaaaaaaaaacaaaaaaaaaaaaaaaaaagcggcc

SEQ ID NO: 176066 - DNA, 473 bp, Zea mays
  Clone ID: MRT4577_92167C.1
cggtagacggctcatgaaatgaagggcggacctattggatggcgtttgctgtttataacatgacttaccgtgaggtgacaaaccagtcaagtgacgacttaacggctgccaaacccaagtggacagcccgagcataggtcgaacaactagcaccgctgaagcgaccaagtgatggagcggtaagtcacgacatgtacgggagtaccgggcgtccatcagtatgaatcttcagtgggtgtggaacgcgcccctgccgcggaaaaactcatcgttccgggcgatcatgctttggatgctgtcggaaaaaaagaaaacagggggtaagagattgaagaaagcgacgatgatgtgggcatcagcctctgcgaccaggctgcacagtaatcacataattgttttggccaaggaaccagagggaaaccagaggcatgttagattttaagcttgttatatgtggaaagactggaaagact

SEQ ID NO: 176067 - DNA, 2451 bp, Zea mays
  Clone ID: MRT4577_92168C.1
ctcgaggccggccggggattcttattgccctagacacgtacgcgcagatccgtccgctccaatccgccccggtcacccaacccacgttttcccccacgcccccatcctttcgagggaccattgccctaccacacgtacgcgcagatccgtccgctccaatcccccttccccatcgtctcgcgacgccctcgccgccgcctcgcccccaacgatccactcgcccccacaacgattcgcttcgtggtgaagaagccacccgcgcctcgccggaaacggaagcagcaacccctagccacgctgaccctccacggcgccggcgatggggctgaagcggcctacggcgggagcgggggaggcagcagcgcagaccatcacgttgtccatgtcggccatgtgggacacggtgcgcgccgccatgagggaggccgaagcagcagcactggagccaactcaaaggtgagatactcttcgattggatcttgatctcgcttctcagttctaaatcccctgcagaaacgacgccgctggtgtccatctccggcgtggcgccgccgccattttcagctgtgtatcggctgtagctcagtcgacatcttctgctacagccctcccatctctgcagaagatggaaccgtggatggagggagcattcctgcggcggatggagcagcgggcctaactgcaggtcagttgttcgatcaattatgcaactcaccatactcagtcaattattagactatttgcttggtttgatttattttttactcggcgtatattttggttgatgtagtcagcatcttattgcatatctgtttttgttgttctatgtttgctttctatttcttagaagcatttgttacataaattagtatggctcctaatggctgacgtttgtaatgcattttgttagatagcacctcattttgtcgacctgcgcacgttcttctgtaaaaaaagtgacattaactccctcactccagtttattatcccatgatagaataactgtgaaaaatctgtcaaacccactgaacgctattatacataagctggcaaacaaatctcttaattgcactgcacccttttgtatattcagggaattgatacatagttaattcaggtggcacgtgacgcaagtcgaagtacatgtctgctggcagatgtctattcttattgtcttcagggtagctgatatataattttgttttgaaaagtagagaaaatccatgcgctacaaagaataactgctttggttccttcataacacatgtctggttcttaaatcggctggttcttaaatcaatggacccctgcatgtttttttttttccccagatgcactttacacaaaacattgatacaagtaataattaccaaaggtctacaacatcaaaaagaacaaaaaatacagggcctacaggaacaaataattccttttcctttgttgttgcggtctgataagctaacttcagaacaattgctgctgtttgcatgacattcgggctgtagaaccaagtcctgccaaatctgtctgttctcagctttttgcggcccttgtgtccatattgtgtccagacatcaatttattgttcacttcagatctctgccttgtcattatttttaaattatcagtgaggtcaatcgcattgcttctgtcaaatgcatcaggattggtggtccttgctgtatgttctgtcaaatgcttctgtcattatagcgggcagtcgttcccagtccacggcttaaattacgcgcacgattggtggtccttgccgtatcccgctgcaacgtggtggccgtggataggataggctcagatttacgatcattgggatttaaagaaaaaacacagtggaatgcatcgtaaattttgaaataaaggcataaatgttgggggccttcgtcctccgaaggtcctcaaaaacatgatttgacaatattttccaagtgaaatgtatgaacaggtatcttcggactcagattatgaacatgaagtacgatcaggacgaagcttaagctagacgaaggaggattgagatgaaggacgggctgatcaccaagctgtacgaaggatggtgcatagccgaagctatgcgcaggggagcttcggcatggtggcagaaaggggaaccgacttaaagatgaaaagactacttaggccttgacagatccccataagtcattagcaaatgtagtggacatgaatgtaattttacatgggctgcgtcccacgtctataaatagatgaacagtactcccgtactgttcacgctgacttggcatttgcttttgcgtcacacttgtattttcatctccttccaagtcgaaggtacatttgtaattcgatattgtctctatttttctatgatgatataataaagttaaattgatgatgttatatgattattaaaaaaaaaaaaaaaaaaaagggcggccgcttcgcgatcgtagcgc

SEQ ID NO: 176068 - DNA, 1038 bp, Zea mays
  Clone ID: MRT4577_92169C.1
ttgggtacctcgaggccggccggggattcccattgctctacacacgtacgcgcagatccgtccgctccaatcccccttccccatcgtctcgcgacgccctcgccgccgcctcgcccccaacgatccactcgcccccacaacgattcgcttcgtggtgaagaagccacccgcgcctcgccggaaacggaagcagcaacccctagccacgctgaccctccacggcgccggcgatggggctgaagcggcctacggcgggagcgggggaggcagcagcgcagaccatcacgttgtccatgtcggccatgtgggacacggtgcgcgccgccatgagggaggccgaagcagcagcactggagccaactcaaagttctaaatcccctgcagaaacgacgccgctggtgtccatctccggcgtggcgccgccgccattttcagctgtgtatcggctgtagctcagtcgacatcttctgctacagccctcccatctctgcagaagatggaaccgtggatggagggagcattcctgcggcggatggagcagcgggcctaactgcaggccagaaatggttctaggctggtatcactcacatcctggcttcaattgctggatatctgacgttgatatcaatactcaacaagtctttacaaatccgcttgggtgtctgaagggatgttttgattcagtctatcaaagtaggatagctgtaatacgaggactatattatatgccataggtgtataaagactgacttcggcttgacagcagaagggaatatgaacttatgcttaaaaaggctatttagacctgaacagattactatagaattattatcaagtgtaaagggcatgaatgtaattttgcatgggctgcgacccgtgcctataaataggtgaacagtacccccgtactggacacgctgacttggcattcgctttttgcgtcacgcttgtactatcatctccttccagttgaaggtacatttgtaattcaaagatgtttatgcctatgcctgataataatacataattacttatgtt

SEQ ID NO: 176069 - DNA, 411 bp, Zea mays
  Clone ID: MRT4577_9216C.1
agcagtggtaacaacgcagagtacctttttttttttttttttttttttttggtttttccctcaaaagggccagggttccttttaaagggaaaatgccaagaattaattgggcccaggggccaccacccaacccttcccttacgggtgccaaccaaaccagaagcctggttccggggccacttattaaggggggtccagccccccatttgcccttgaattttaggcccacttaccggcccgccccggaccggagggttgggttccccttgaatggccaccggtggtccccgtttcaaaaaagcctgccggggccgggggggggggttggttggggggggggattaccccccttcctttgggtggttcccacggtttagggccgatttccgcccccttgcggcccgttcctgg

SEQ ID NO: 176070 - DNA, 545 bp, Zea mays
  Clone ID: MRT4577_92170C.1
ttcaaagtaaggctctaaaggtaatggctgatcattaggatactgtatgaagtttaggatgataaagggatatgtacaaaactatggatactgtcaatgatggaattgtgtatgtatagaagaactgaatactgacaatggcaaagctaggttttgatctagggggactagaattacagatgctaattgaacctgtggtcacaatcagcaggagaagcatctagactacagcagaatttatggcctgctgactccacctgttgaggatggcaaactaccagcatttgctgtgggccttcactattcttctaccatgacagaaacagattgatcagagcccaatgagcttcatgaggttctacacgacgacgaccttgctaacacacttgaggaagacgtgacaaacatactgagtgaagtagagtccgaccaagaccgcaagatcaaatgcgaagagtaagaagcaacaataactaccgccacgaactggacaaaggctactggatctagttgacatggatgttaaacagcctcatcattaatct

SEQ ID NO: 176071 - DNA, 300 bp, Zea mays
  unsure (1)..(300): unsure at all n locations
  Clone ID: MRT4577_92171C.1
agcagccggccaancnagcancagcgcgcgggggcngagagcagagcgggagggcgccanggcggcancggnggcgccgagcagcgggcaccggangccggcggnggggcngggcgngnggcgganggagaaggcggacanccgcggccccaaccacacagcgcnccgcgncggcnaccgccaccnggacngcgccgcngaccaccagaacgaagcngaagnnggngacgcgcccgcagaggcannccagaccggacncgncaagcgggaggaccngnncaacacaaccaagcngnggaa

SEQ ID NO: 176072 - DNA, 513 bp, Zea mays
  Clone ID: MRT4577_92172C.1
cggaaccctgcagtacgcctgtcatgtactacgtcgctgcctgcctggtctggcgccactctcctcgcggcgctggtctcggtcagagccgccctcgatttcggtttctacaacaagacgtgccccagcgcccagaccatcgttcagataccgtgctcgccgagtttaccaacagctccggtgtctgtccggggctcctacgtattcactatcatgactgcttcggcagaagctgtcacagctcagcgctgagcgactccactgccaacaacaatgcggagaaggattggatcctcatcagccctggcctgatgttgttagaccatgaggacctagttaaggggttccttgaggcactgtgcccatgcgcagggtccacgcccgcatactggccttcgtgggcggggacagcagtctcgccttccggcggactttgctacatggtgccgttcgaacgccgggactgtctgatattctatgccacgcatgccctcatctagcttgcgatgccct

SEQ ID NO: 176073 - DNA, 244 bp, Zea mays
  Clone ID: MRT4577_92173C.1
tatcaattgcctcaaagatccttcattcttccaaaatgcaattttcaccttttgaacatattttacttcacttcataaaatcaccctttttaaatttaaaattgagaactttatactctttttctagtcaatatctatcatttacatttaaactacacattaagtctcaacagccttttatttaaatcataaattatatctctaaaatattcattcttactttcttctgaaaattttttgatct

SEQ ID NO: 176074 - DNA, 327 bp, Zea mays
  unsure (1)..(327): unsure at all n locations
  Clone ID: MRT4577_92174C.1
tccaagaagctgacatatgagcagaggaaggccagcctattgttncatcgtcaaccaactgaactcctccggaggtgcttatgacgactataaggactactagtaaagataattgccatcgaaataatgatatctcaatccatccatcagcaattgacaactgagttatgcgggacctgaagtactgcaataggcatttttggtgaagtactgggaggggaacaaaactgtatctgctagtaacgagcttgacctttcaatgcttactctttacattgaaacgctgccgtttggacaaaaaaaaaaaaaaaaagggctggtcgatag

SEQ ID NO: 176075 - DNA, 305 bp, Zea mays
  Clone ID: MRT4577_92175C.1
agtttctggtgtttgcgcacggcgggtccgaccgcagcgagccggtgccggtcgatcaggcctgcgagcggatcgcgcgcagctatcgcgcggtcgcgccgaacgcgccgacggtccagacgcggctcgatgccgatccgggcttccggctgccgacggcgacgctcgaccggatcctgtcgaacctgctggacaatgcgcatgcgtacggtgcgccgccggtgttcatcgagacggcgcgcacgccggccggctacgtgctgtcggtcagcgacagcggcggcgggattgcgccgcgcgacctc

SEQ ID NO: 176076 - DNA, 381 bp, Zea mays
  Clone ID: MRT4577_92176C.1
ttcccggttcgacgtcggatgtgagcgcgcgctcgtagttcgacgtgatccgtttggccatgtcctcggcggggaagccgttgggcgaccagacgatgctgacgaccggaatgtcgatgttcgggaagatgtcggtcggcgtgcgcaggagcgcgagcggtcccgcgatgaagatcagcagcgcgagcacgacgaacgtatagggcctgcgcaacgccagccggacgatccacatgatgttgttcctcgaagcagggcaagggcgccgcattcgatgcgacgagcgtgcagtctgacgtcgccgcgtagacccagccctgactggaagattacgaaactgctatctgcgtgccgcagcctcagatttcggaattgtcattc

SEQ ID NO: 176077 - DNA, 299 bp, Zea mays
  Clone ID: MRT4577_92177C.1
gtccaatatcttctacagtatgtctgctgctcggctctccgcggtggcacagtccaccgtgtatgccttctccgcgcgcccgctggcgggcaggggagcccgtggagcctgggctccctgcggggcagggtgctgctcattgagaatgtcgcgtccctctgaggcaccacgacccgggactacaccgatatgaatgatctgcagaagcgtctggggcctcgatggcctggtggtgctcggtttcccgtgcaatcagttcggacatcaggagaatggcaagaatgaagagattctgaatt

SEQ ID NO: 176078 - DNA, 184 bp, Zea mays
  Clone ID: MRT4577_92178C.1
cagacgcgttcgctccttatgcgccgagctttttctgcatgttttgctgactcgaggctgtcgcctcagagttcacaggctaatgctgctaccttgcttcccttaaacgttacgtccatgcttacttcatcatgtctaaacacagatattgatgcctactggctggaagacgccctgtttatat

SEQ ID NO: 176079 - DNA, 275 bp, Zea mays
  unsure (1)..(275): unsure at all n locations
  Clone ID: MRT4577_92179C.1
gtttccttcccggtcttgctgcctaaagcctctctttctgccattcgatcccgtcgtcagtccccgcccggcgtgccgcagacttccacgagggtggcctctactcggaccaacnnctgctggatagaaagaaggatagcggttaaaagccctcgtccccggcttgcgaagcgcttgcttgccgtgcggtctgctattgtgaccgtgcgcttatccccctaccgagctttcattgcatgtacccacgcnncctctttccttcttcnngcagtctt

SEQ ID NO: 176080 - DNA, 372 bp, Zea mays
  Clone ID: MRT4577_9217C.1
ccggccggggacctccttgcatcgacgcccctgtgccacgccgagagcctcgccatggagatgagacgagagagagagaatggggcagcaccgccgccaggagaattcaccggggagattagatggcgggatgccgtggccgccatggcgctgtccgcgcacgcactccttgtggcgctggtcgagcactgcctggacgcacaccacctcgggcagaagcgccgccggcggaaccgcggtgccgctgtccaggtccggcttcatccagaacatgcacgggggttgtcgcaggtgcatcctgctgccgggccgctggccaacgttggtgtgcacttcctcctaaaggaactagcctcctaagaacccgtgact

SEQ ID NO: 176081 - DNA, 1859 bp, Zea mays
  Clone ID: MRT4577_92180C.1
attccgttcatcggtcgattggtatggcgggtcgttgcggcgactcggctgcggcggcgccgttgctggagaacaaggcggcgccggcgtcggaggcgggcgaagggtaccaccaccacaactactactactacgtggacgggtgccccgggtgcgccgtggaccggcgcaaggcggcgagcccgggcatcccctacgccaacttcatatacgtctggatcgtcaccctctgcacagccctacccatctcatcgctgttccccttcttgtatttcatgataagggacctgaacgtcgctgaaagaaccgaagacatcggcttctacgccggcttcgtaggtgcctcgttcatgttcggtagatgcttgacttcaaccgcctggggaatagcggcggaccgtatcgggaggaaacctgtcgtcgtgttcggcatctcctctgtggtcgtgttcaacacgctgtttggcctgagcgtcaactactggatggcaatcgccacacggttcctgcttggtgctttgaacggcttgcttggaccaataaaggcttatgccatcgaagtctgccggcctgaacatgaagctctagcgctatcacttgtcagcacggcatgggggataggcctcatcatcggcccagctcttggaggctaccttgcactgcctgcagagaacttcccggctgtcttttcacctgactcggtatttggaaggttcccgtatttcctaccatgcctttgcacgtcggtcttcgctgctgctgttctagtgagctgcatatggatgccggagactctgcacaggcacaaagttcacgagagtacgagccaggacgttgaaaaggttcaagaaagcggcattaggaagaagaagagcttattcaggaactggccgttgatgtcgtcgataattgtctactgcatcttctcgttccatgacatggcttacacagaggtgttctctctatgggctgaaagtgacaagaagtatggtggactgagcttatcatctgaggacgttggtcaagttcttgcagtcactggtgccagtcttcttgtttatcaactctttctataccctagaatcaataaggttctcgggccgatcaaatcttctcgaattgcagctatcctgtgcatacctatcctctttgcctacccctacatgacatacatctcagaaccaggactgtcaatcattttgaacattgcgtcagcgataaagaataatcttgctgttacgatcattacaggcactttcatccttcaaaacaatgcagtgcctcaggatcaacgaggagctgcgaacggactgtccatgacagggatgtccttcttcaaggcacttgctccggcaggagcgggcattgtgttctcgtgggcgcagaaacgccagcatgcctttttcttcccaggtgatcagatggtgttcttcctgctgaacgtcgttgagctggtcgggctcatcctcacattcaaaccctttctggcagtgccagagcgatgcgatagtagatagctgttctttggaggatgaactatagaagttttggaatgattcaaaatttcatcgtgtatggcagcaataccagtgagacccaggaagaagcaagagctgtgtactggtaaccgtaagcggtgtatgcagtatcgctgcattagcatttgtgcttacgaaatgcacatgtatgtaggtgataaatgactaaatgtggccagtggatcgagttgttgctgcactgtgagtagtggtagtgtaagattcagcgactcgaaattgtgtgttggaaataaaattggtaggtgttagacgcgcggtatgagcgccaatcaaaaaaaaaaaaaaaaaagcggccccgct

SEQ ID NO: 176082 - DNA, 1520 bp, Zea mays
  Clone ID: MRT4577_92181C.1
aacacgatccttttttacagcctagaagagaagaattgcatcactacgctattccatccctcttgcatcaatcgaccccccttcaattcgatccatcgatctgatgttctgcagtttcaagctgaggagcctcctcttcctttggcgagctctaacgctggcgttggtctccttcatctcccaattcctctggtgaaccatcgctgcgacggcttggatttggttctgggttcgcagtctgcctcttgtgatgcatcaccatcgccggtggagggccgacgacgatgggatcaagggattactatgagatcctcaacgtcgaccggagcgccaccgatgacgacctccgcagggcctaccggcggctggccatgcggtggcaccccgataagaaccccgccggcaaggcagaggccgagacccggttcaaggagatcaccgaggcgtacaacgtgctcagcgacgcagacaagagggcggtgtacgaccagtacggggaggagggcctccggggagatgtgccgcagcccggcggcggcggaggcaccgacgacatcttcgcggagttcttcgggagcacgccgttcacgtactgcagcacggccagcagcgggaggcagcccccaccgcccccgaagtgggacagcgggttcggcagggcgttccggcgcgcccagggtggtggtggtggtgccgcgtcgtcgagaatggcgccgccgccgccgcccgtggagagcaggctggcgtgcaccctggaagagctctgcatgggcggcaccaagaagatgaggatctcccggaacttggtcgatgccagcgggaagacgaagacagagtccgagattttgtggatcgaggtgaagcccggttggaagaagggcaccaagatcacgttcgccggtaagggcaaccagcagtggaaccagctccccgccgatctggtcttcgtggtcgacgagaagccccaccccgtgtaccggcgtgacggcaacgacctgttggccgaggtccgtgtgacgctcgcccaggcgctgggcggcacggtcgtcgtcctcaccgcgctcgacggccgcgagctcgccgtcgacgtgggcggcggcggcgaggacgaggacgatgaggacgacgcgcccgtggtgtgccccggctacgagctggtgctgcctggcgaaggcatgcccatcgcgcgcgagcccgggcgccgaggcaacttaaggatccggttcgacgtcgcgttcccggagcggctcacgcgccggcagcgggcagagatcaagcgcgcgctcgaggacagtaccggtgtctgctagcaagtagcaatacaggtgtgatgtgtccgctgtccgcttggcgatgacagtgtggcgttgtgctcctgctgctgcgtgcgcctcgaacccttgaatatgggaaacagattcgtggcctcgtgggtgttgacgtccattttataaacactacactggaatgaactatttggtggtgctctctttgggggaaaaaaaggggaaagggggggg

SEQ ID NO: 176083 - DNA, 926 bp, Zea mays
  Clone ID: MRT4577_92182C.1
cccacgcgtccgcgagttgcagctgtgagtaaaatactcagttatttaatgattgaattccttctgttctctcggtatatcttagctgctacgcttgaccttgcagatcctgtgcataccgatcctctttgcctacccctacatgacgtacctgtcggaacctggattgtcaatcgttttgaatattgcgtcagtgataaagaataatctcggtgtgagtatttttttttgctatttatttttccttgctgcattgaagtttatttggttttaactattttcatcgttggtgtgcgatattaggtcaccatcattacaggcactttcatccttcaaaacaatgccgtgcctcatgaccagcgaggcgctgcgaatggactgtccatgactgggatgtcctttttcaaggcacttgctccagcaggagcgggcattgtgtgagtatgatcagttccaacagttctctacctgcactatgcttgttggagaatgatttgctctgcttgcttcatgtgatgcatggaacactgcacctgactgtttgtgtctggattcaggttctcgtgggcgcagaaacgccagcatgcctttttcttcccaggtgatcagatggtgtttttcctgctgaacgtcgttgagctggtcgggctcatcctcacattcaaacctttctggcagtgccagatctatgcgatagtaaatagctgtttctttggaggatgaactatagaagttttggaatgattcaaaatttcatcgtgtatggcagcaataccagtgagtcccaggaagaagcaagagttgtgtactggtaaccgtaaacggtgtatgcagaatccctgcattagcatttgtgcttacgaaatgcacatgtatgtaggttataaatgactaaatgtggcgcagtggatactagttgttgctgc

SEQ ID NO: 176084 - DNA, 1211 bp, Zea mays
  unsure (1)..(1211): unsure at all n locations
  Clone ID: MRT4577_92183C.1
ccggccgggaaaaccgcatgaacgtgtggccaagctggtccaggcgttcagccctccgtttatagatagccagcgagcgagcggagctgagctgagctctagtgatagactggtaggtcctagctgcgcgcacgtgcactagctaggacgagccatactgcgcgcgcggcattccgtccatcggtcgattggtatggcgggtcgtcggggcgactcggctgcggcgccgttgctggagaacaaggcggcgccggcgtcggcgtcggaggcggaggcgggcggcgggtaccatcaccacaacaacaactactactactacgtggacgggtgccccgggtgcgccgtggaccggcgcaaggcggcgagcccgggcatcccctacgccaacttcatctacgtctggatcgtcaccctctgcactgccctacccatctcatcgctgttccccttcttgtatttcatgataagggacctgaacgtcgctgaaagaaccgaagacatcggcttctacgccggcttcgtaggtgcctcgttcatgtttggtagatgcttgacttcaaccgcctggggaatagcggcggaccgtatcgggaggaaacctgtcgtcgtgttcggcatctcctctgtggtcgtgttcaacacgctgtttggcctgagcgtcaactactggatggcaatcgccacacggttcctgcttggtgctttgaacggcttgcttggaccaataaaggcttatgccatcgaagtctgccggcctgaacatgaagctctagcgctatcacttgtcagcacggcaatggggggataggcctcatcatcggcccagctcttggaggctaccttgcactgcctgcagagaacttcccggctatcctttccctgactccggnnatttggaaggttcccgtatttcctacatgccctttgcacgtcggtcttctctgctgctgttctagtgagctgcatatggatgccgtagactctgcacaggcacaaagctcacgagagtacgagccaggacgttgaaaaggttcaagaaagcggcattaggaagaagaagagcttattcaggaactggccgttgatgtcggcgataattgtctactgcatcttctcgctccatgacatggcttacgcagaggcgttctctctatgggctgatagtgactagaagtatggtggactgagcttatcatctgaagacgttggtc

SEQ ID NO: 176085 - DNA, 343 bp, Zea mays
  Clone ID: MRT4577_92184C.1
tggtcagcagaaggcacggggctctcgaacgcggggtttttttgggaccacgcggggtcggtaagcctacaccttggggtgggtctacgtgctctagcgtcttgtcagatacctgatgcctgatgcagactataccgaatgaggcggcatagcacatcattaatgacaagcttatgttggacggtaacccgttcctgaacctggtggttttagtgaccacgtggatggagtcccattgcgacaggcatagtatggactccattaacaagaactacatacagatgaactagaacccttttaccactgagcttcataacacggttataaacatgatagttttatc

SEQ ID NO: 176086 - DNA, 127 bp, Zea mays
  Clone ID: MRT4577_92185C.1
ctcctggagggtggaaagcgcatgccgggtccgtcgggaggatattgatggcggaaaaaccatgcttgacgcggcgagaggcgcagcgcgatcacgaacagatgttgcgcttcatggccaaccgctt

SEQ ID NO: 176087 - DNA, 224 bp, Zea mays
  Clone ID: MRT4577_92186C.1
ggcaaacgcccagaaggggaatgaccccagggggaaccacagcgccatggggggcattagaatcccagacctaagccatggaccgggagcgagcggcacagctgcatgatggtgcgccgcctagataacagcaaggatacacaagcttaaaacaaccgccctaaaacagtggtgacggttgatagaagaatgtctacactcagcagaacaaattatccaggagc

SEQ ID NO: 176088 - DNA, 246 bp, Zea mays
  Clone ID: MRT4577_92187C.1
cttaacaaacacagatccaggcctaaatgctcatacggtgccagtatcagtcaaacaggcacagtgcaagccttcaccaaataaaaatgcttcctttcccgggccggccttgcccaaaccttttcatggggttaatttggcaccccccctgggccctggcattaactttttcccaaaggaggggcccaaaattttataataggcggccctccgcattgggttattgttcttctttggtttattccc

SEQ ID NO: 176089 - DNA, 230 bp, Zea mays
  Clone ID: MRT4577_92188C.1
taccggttcggactgacccacgcgtccgcaagcccctgtacgacaccatggcgggtctggaggaaggggagaagagcgttgtcaagtgacacatgttggacctcagatcagatgaaacggtcttttctagtctctcgtgttcactacgaatgtgcaatagtgcaacatgtcgcgaggtgatgaattccacaaagacgaggtgacggagcagggcattcaaaagcccgcag

SEQ ID NO: 176090 - DNA, 519 bp, Zea mays
  Clone ID: MRT4577_92189C.1
gcctgcgggagccgggacggagtatagtgctggctcgacgagctttttttcggcgggcgtcctttggttgttccgatgaatgtaagaccagctgggttgggccccacgggatacaggaacaggaaaaggacgttcatggtatagatctcactgtcagaatcggacacatggcgctgagcatttgtatctgatcaaggcatgtggaccggacttggccaacacatggtctaagaacaccaccttggggatagactgacagagaggccatacgatgctcacggttgtgcaatagtgacaagccggacaacatggggataggcaagcaaattgcaaggatgttcggctcgtgactagacacactggtgaacattgtaggagctcagtggcaagctatcaccatggtggagttccgaggaatagtgattgacatgaccggaggatatgactggatcatatacatatgagagctgcagtgtacggaactgacagggagactaggacatgaacgacaaaacctga

SEQ ID NO: 176091 - DNA, 596 bp, Zea mays
  Clone ID: MRT4577_9218C.1
cgggccgggactccgcccgccttctcagaatccgatggcccaccttccctcctctccggcggccgctgtacccaccggccaccgcgtctcgccctcgcctcattcttgccgttccctcccgcagctgaagaccgtactgttgtcgataggagccgccgcgggtccccctaggcggtcatggaggggagtggaatcggtggccgcggctcccacgggctcggataacgccggacaagaaggcccgatagctcaagcgctttatgaccttattctcgaggacatgagatctggtccgccgtctgttcgtatccccatcccttactaaaactgtttggagttgtgcaaatgattacaagggtgaacactgatttgttggttgtcagagtttggtcaaaacgagaggttggacgaactcatagaagagaacaagtcggcaacagccgaaattgtcaaagagattgatatcttaatttgatgtacaataggacttaagggcctacaaacatttgtgaaaatatttgtaatatataactcgggaatatgttgcaatgatgtttaccgttacaaaaaaaaaaaaaaaaaaggcccctagggcc

SEQ ID NO: 176092 - DNA, 539 bp, Zea mays
  unsure (1)..(539): unsure at all n locations
  Clone ID: MRT4577_92190C.1
cgagacgccatatgcacgtcacgcacaccctatgggcctcacggagagcttgcctggagctacacaactctcatcctcagggacgatgttatgcgccatcaccgccgtagaagatcgccacgatcatcgaaggcggtcaacatgaaggtncgagtcgctagctgcgcgagcactcattcggcaagctcgctggagaagcgcaacgttcaggacctcatcctctccgatgcatctggaggagaagctgcatccagatgctgctgccgtacctgctgatgatgatgcgactgctgctgccccggctgtcgaggagaagaacgaagaggtcaaggaggagtctgatgacaacatgagcttcagcctgttcgactgaggagaccccctcacccagccattagcaaattttacttgtgctgtcaaagactatcttgtcttatgttatgtctctaggcttttgttacaactacccaagttttgagtttttgagatgtggctatggcatgaactcaaaccatcttatgagggtgaaacctgttttt

SEQ ID NO: 176093 - DNA, 339 bp, Zea mays
  Clone ID: MRT4577_92191C.1
tgacaccctcataagatggttcgagttcatgccatagccacatctcaaaaactcaaagcttgggtagttgtaacaaaagcctagagacataacataagacaagatagtctttgacagcacaagtgaaatttgctaatggctgggtgagggggtctcctcagtcgaacaggctgaagcccatgtcgtcatcagactcctccttggcctcttccttcttctcctggacagccggggcagcagcagccgcagcaccaccagcaggtgcggcagcagcaactggagcagatccgccaccagatccaacggagagcccgcgtactctgcgttgttaccactgct

SEQ ID NO: 176094 - DNA, 352 bp, Zea mays
  Clone ID: MRT4577_92192C.1
tacaactgggctaaccttataagcgttagccacagccttaggcgtctggggcataactagcaataggatttaagacttcaacacccgcacatagtgtgtcacaaaggtatccaactgtgaattatgcaggggcggtgcatacctgatatcatcaaaggcttgagaatattcttccactccatgctggtgcttcatactaaccaacgtccccatggcttgagggtattcttctacaccaaacttgtctctcacaacacgaataaactgaccccaatcaggcaatcacctaatgcataggtcttatacacttggaggcacttagaagcatttccttccatgtgcatggacgcag

SEQ ID NO: 176095 - DNA, 302 bp, Zea mays
  Clone ID: MRT4577_92193C.1
caacatgcttggtccaaatggattacataaattgttcagtagtattatgcttcgacgtgatcagtgtgataagaaaaagggaactccctctaaagtagcttttgggcttttgatctcttgtggagagtagaactgcaattggcaagcatttatcttgatcttcgcatcaaaaataccatggcggcgatgctccttcttgacccgacgacataggtgcattccccggggcgccatgatctttgatcttgggaccttgctcagatggtgagacaacattgtagtttgccggtgagggtgctatg

SEQ ID NO: 176096 - DNA, 1040 bp, Zea mays
  Clone ID: MRT4577_92194C.1
ggccattcagttgtcatcggagcacaatgcatgctatgaggaagttagacaagagctgcagtcatcacatcctgatgatccaattcggctcgagctcaaacacaatgtttggcgtgtgaagggtatcatccagatctcaagatctattggagatgtatatctaaagaaaccagagtataatagagaaccgcttcacagcaagtttcggcttcgagaaaccttccagaggccgatccttagttctgaacctcaaattactgaacatcgaatacagccaaacgatcaatttgttatatttgcttctgatggtctatgggagcacctcagcaataaggaagcagttgaccttgtccaaagtagtccccgaaatggaatcgctcggagactagtgaaagccgcgatgcaagaagctgccaagaagagggagatgagatattcagacctcaagaagatcgaccgtggtgtgagaaggcatttccacgacgatataactgtcgtcgtggtgttcatgccatgagcaaagctagctggagcaaaagcccctcggtttctcttcgagggggcggtgtcacccttcctgcggagtccctcgcacctttctcagctccggcatggttgaagagcaccaactgaagctgctgctactcttgaaaggaagagcacagtgcaggtctgcaggagagatgaaaaaagaacagcaatcaagtgtagcgttacacttgcacctgctgtgttgttgctcttcgcgaaactactgtcttgactctagactacgcctggtaattagtgcactgatagcgacgcaaatcctttcacattcttttctctccctcgacatgagatgagaattgagatactccattcatccaggaaaataggaccgattatggagaaaagacaaaatttaaccaacaattactcaatgtatgtgtaagtttaggatacaacttatattagtagatttattatattcaattgactccgagattatattaaaaaaaaaaaaaaaaaaaaaagggcggccaccgactagtgagctc

SEQ ID NO: 176097 - DNA, 806 bp, Zea mays
  Clone ID: MRT4577_92195C.1
ccccccggtcgacccagcgttcggtcgttgctctcctccctctcttttttttattgggttctttttctctctctctccccttggatttgcgcttgtgctcgtctggccgcatactagtatccacaccagagaggagacacctccgactccgacctgctcttgcatatagattgggcagagagtgagagagagagagcgcgcgcgcgcgctcaagggggggccaaaaggagttttttttttaatacagcttcttagcctgaatctctttgatccggagagcagccgccagcccaactaatccttgctgctagcgcgccggggctccgattgcgctccagatctgaggcacctgctcggtggattccaggaatccgagcaccaactcgacagggagagttctcagggtaaaggaagaggctgagagcgcgttggagatttggactataagagcgagcgagcgagcgagctgggtgccttgaggacgccgtcaagaaaccgcgtggaggggggggagggcgatgagatgagggatgctggccgcggtgatggactacttcagcacctgctggggcccgcggtctcgtgcggggcaccggggcaagggctccgacgccgccggccggcaggacggcctcctctggtacaaggacgccgggcagctcgtcaccggggggttctccatggccgtggtgcaggccaaccagctgctcgaggaccagagccaggtggagtctggatcgctctccctggctgactacggcccgcagggcaccttcgtcggcgtctatgatggccatggcggcccg

SEQ ID NO: 176098 - DNA, 2059 bp, Zea mays
  Clone ID: MRT4577_92196C.1
ccacgcgtccggcggcgtgcctcggagaaagcttgagtgcatactagtctctgcatcagagtagtggcctccgagctgctcttcaacacacagattcggcagagcctgccgagagagagtgaaaagagagggagcgcgctcaaggtgtggcgcaaggagatttttcttttatccagcttcttagcatgattctctttgatcccggagagcagccaccggtccaactagtccttgctgttggtctgccggaacttttgattgctctccagatctgaggcacctgctgggtggattccaggaacccgagcacgaagttgacaggggaggaaggaagaggctgaaagggcggtggagagagaaagactataagggcgagctgagtcccttgaggatgccgtcaagaaaccgcgtggagaggagggcgatgagatgagggatgctggccgcggtgatggactacttcagctcctgctggggcccgcgatcgggcgccgggcaccggggcaagggctccgacgccgccggccggcaggacggtctcctctggtacaaggacgccggccagctcgtcactggggagttctccatggccgtggtgcaggccaaccagctcctcgaggaccagagccaagtagagtccggatcgctctccctggctgacccgggcccacagggcaccttcgtcggcgtctatgatggccatggcggcccggagacgtcccggttcatcaatgaccacctcttcaaccatctcagaaggtttgcaactgagcacaagtttatgtcagcggacgtgatccggaaagctttccaagcaactgaggagggctttctttctctagtcagcaaggaatggtctttgaagcctcagattgcttcagtgggctcctgctgccttgttggtgtaatctgtgctgggactctctatgttgcaaacctgggcgactcacgtgcagttcttggaaggcttgttaaggcaactggagaggttttggccactcagttgtcatcggagcacaatgcgtgctatgaggaagttagacaagagctgcagtcatcacatcctgatgatccacatattgtggttctcaaacacaatgtttggcgagtgaagggtctcatccagatctcaagatctatcggagatgtatatctaaagaaaccggagtataacagagaacctcttcacagcaagtttcggcttcgagaaaccttccagaagccgattcttagttctgaacctcaaattactgaacaccgaatacagccaaacgatcagtttgttatatttgcttccgatggtctatgggagcacctcagcaatcaggaagctgttgaccttgtccaaagtagtccccgtaatggaatcgctcggagactagtgaaagccgcgatgcaagaagctgccaagaagagggagatgagatactcagacctcaagaagatcgaccgtggcgtgaggaggcatttccacgacgatataaccgtcgtcgtggtgttcctcgactcggatgccatgagcaaagctagctggagcaagagcccctcggtttctctccgagggggcggcgtcacccttcccgccaagtccctcgcacccttctcggctccggcacagttgaacggcacccactgaagctgctactgctcttgaaaagaagggcacagtgcagatctgctagagatgatgagagaagcagcaatcaagtgtagctgttgctcgtacacctgctgtgctgttgctgtttgcaaagctgccgtcttgactccgcctggtaattagtgtactgatagcgaggtatagaaattaggttatttgttagcgacgcaaatcctttctttttttttcttctccctctgttcttatctcttttctcttcatcatggaggaaacaggtggctgtaaatttgtccagaacatgttttccctaatagcccatcatatcccgctctttttcttgttgatatgaccaaggctggcagcatcgctgctcaagataatgtttggggcgcatgatttgaccaagtcgaatcattacttttgatgatgtggtgtagc

SEQ ID NO: 176099 - DNA, 188 bp, Zea mays
  Clone ID: MRT4577_92197C.1
gacatatttataacccaacgactcgccaaacatgtgtcacgctggttcaactggccataatgcgtcgacatctgcaacctcatagcactccgcggcgcagatcctactcattcaattacgtactcgatacagctacacccactgtagcagctatgcccatgctgatcgcttacttcacactggctatc

SEQ ID NO: 176100 - DNA, 451 bp, Zea mays
  Clone ID: MRT4577_92198C.1
ggcaaacaaaacagccccccaggcgaagcttttttttcatataaccaaacccccccaaaggggcctaaaacgacccacccccatgtcctaaccgcccgccccaaaaaactccaaaaattgcaaaccggggtacccccgggaagggggaaaccccccctccaaaaagggggggcccttaccacggccgggtttacaagccaaaacaacatggcccgcgtttatgggggcccttgaaacaaagggcaaaaaagggcgctgatccaggagccttgggccccaacagggcaaacaaaacagttgatttttcccgggactgaccaaggaccatgggcgggttttgcattgaactttattaccccaccccggacttaaaaaataagggctgtaccccaaagggggggggaatttaagaccccccccataaccatatggggggaaaaaaccgggcccc

SEQ ID NO: 176101 - DNA, 916 bp, Zea mays
  unsure (1)..(916): unsure at all n locations
  Clone ID: MRT4577_92199C.1
aaaaagctggccagttcgttaggcccagatgtacctgtatattgatagagcccatctctgccttgcttcctcggttgttcctcccccttcttttattaggtcttttttgtctcattggatttgcgcctgtgctgctcacctgagcgcatactagtctctgcatcagctgcatcagagagtagagacctccgagctgctcttcaacacgcagattgggcagagccgcaaggtgcctgccgggagagagtgaaaagtgagagagcgcgcgctcaagggggccaaaaggaatttttttttatccagcttcttagcttgattctatctgatccgggagagcagccgccagtccaactaatccttgctgttggtgtgccggggctttgattgctctccagatctgaggcacctgctgggtggattccaggaatcctagcacgaagttgacagtggagttctcaggtaaaaggggaggaaggaagaggctgaaagggcggcggagagagaaaggctataagagcgagctgggtccctcgaggatgccatcaagaaaccgcgtggaggggagggcgatgagatgagggatgctggccgcggtgatggactactttagctcctgctggggcccgcgatcgggtgccgggcaccgggaaaagggctccgacgccgctggccggcaggacggtctcctctggtacaaggacgtcgggcagctcgtcactggggagttctccatggccgtggtgcaggccaaccagctgctcgaggaccagagccaagtggagtccggatcgctctccctggctgacacgggcccgcagggcaccttcgtcggcgtctatgatggccatggcggccccgnagacgtcccggttcatcaatgaccaccctctcaccatnctcagaaggtttgcaactg

SEQ ID NO: 176102 - DNA, 381 bp, Zea mays
  Clone ID: MRT4577_9219C.1
cggctcgagggtgttcaatgtcacggcaatgaacaggcacaactacgtcctgggggatttcatcggcgctgcagggatcgtgctgtgtttctttggtctgctgtacggtggtttctggaggatccagatgaggaagacatttgggctgcccagaagcaggtggtgcttcggatcggcgtcactaacagactacacgcagtggctattctgctggccttgcgtgcttgcacaggaggtgcgcacggggaatctatacgacgcgaagaacggcagcttctatgagaaagttatggacggcgatggtgtggagactgatgcgggatcagtggatacggccgaattgccggtctcttgtggagtagaagaggcgaacggtatcga

SEQ ID NO: 176103 - DNA, 267 bp, Zea mays
  Clone ID: MRT4577_921C.1
ccggccgggctcgcgccgtcacttccctcccgaccactatcccaaaaccgtagcgccctcgcctgctcgccgccgatcgtgagtgcgagctccccatcttgctccgtcaaccatggcgacccagatcagcaagaggaagaaggttgtgagggacggggtgttgtacggcgagctaaatgagatgctgacctggaagatcgaggaggacggatactgcggcgcggaggagacctgtgcacaggtgtatattgggatgatgatagcgcc

SEQ ID NO: 176104 - DNA, 182 bp, Zea mays
  Clone ID: MRT4577_92200C.1
cacaatatacgcaacaggtactcgattatacatgcatcacatacggatgtagactgctagacttaagaataacctatagccatacatatattcgatataggagaatctggtagtgagcgcaattatggagactggcacaactgttcatgtgatggcatcctctgctgagaaacttagttagg

SEQ ID NO: 176105 - DNA, 576 bp, Zea mays
  unsure (1)..(576): unsure at all n locations
  Clone ID: MRT4577_92201C.1
cccggggcgaccacaggactcgcggtgaccagcctgagcacagtgtgtcacggtatgctagaacataacactgtcacactagtggtagctagagtagaggggttgttaataaatcaccaaacgatacgatgaggccactccttgtttcgcttgctctgattttcgtggttgccggtgtggcgcatggcgccggggagtgcgggagagcggctccgctgacagggtggcgctgaggctggcgccatgcgtctcgggcgccgacgacccgcagtcgacgccgaccagcagctgctgctccgccgtgcacgccatcgggcagagccccagctctgtgtgcgctgcgccgtcgtccgctgccgccggcaccgctggggtcaagctgggaatcatagcnncggaggtcgccaaattaccatcnncccaagcgctttgcaacatgnngccgatcgcccnncgtcggctacccaagtgcggagattaccacgctgcnncctgactacatcgtcagcaagcccggccgtgtgcagtgttatgacggggctgatgaacgagccacgcaaggcgttgtgttggaaa

SEQ ID NO: 176106 - DNA, 495 bp, Zea mays
  Clone ID: MRT4577_92202C.1
ggggggggggtgtttttttttttttttttttttttttttttttttttttttttttttttttttttttttttttttttttttttttttttttttttttttttttttttgggccaaggggccttgaatttttttcccccctttttttgaaataaggggggggggctccgaaaagctaaaaagaccctcaaacacaaggaggggggcaatcaatccaaattttcataacccggctagcgcttatgtccaaaagcgtggaaaaaaaaaatagttcatgatcccacaaatgggccctcgaccccattttattttaggggtcccggaaccccaaaaactaatactttgggggatgcccacctaacgttttaaaaaaaccatgcccggttaaaaaaatatggggccccccgttggccaattttttttcttttcaccacctggcaaatgctttacctttaaaaaaagaagggcaactgtttttttttcctggacccccctttt

SEQ ID NO: 176107 - DNA, 318 bp, Zea mays
  Clone ID: MRT4577_92203C.1
cacacatgtttcaaactatgtcagcaaagcagagcaaaccccggactctctggatcctatcattgttgcaaagctgaaagcagctgcaggcttggccaacatggaaacaaagaaatacaaacttgctgcacgcaaggttagtcattaattcactacacctttaaagcacgggtttcttcatgcgtctcctccacctgaaatagcgagtggtttctaccactacaacgtgtctttttatgttgtattaagaagagatattgtgtatgtgtgtgtatatatacacactaataattggaaaacaaaaaatcgtgtttgaat

SEQ ID NO: 176108 - DNA, 2688 bp, Zea mays
  unsure (1)..(2688): unsure at all n locations
  Clone ID: MRT4577_92204C.1
ctggccgggattcccttcctgcttcgacgattctatgtttatcacgcccaacaaagtagtgtagtttttcgacgccggcggatccctcgagccctagctaggaaagtagggttttcgatggattctctgagccggagggagcgggcacaccgcgccgtcgacgccatgaagcctctgggcttctcgaagaaggaggtcttcgccgtcctcaagaacctcctccagctgttcgataactcctgggagcccattgaggacgagtgctaccgcgccctcgccgatgctatcctcgaagcccgcgaccggccccagatgcattgcagcaacagtacaagaggggttcggcttccgccggagggggagggctgccggccccggccttctacttcccgtgacatccacgacggtctggatggtgggaccgaggcccttcgcatcaagaggacgaggatcagcgctagttgctctatcgatccccagtctcccgtctccgctgcggaagcccttgatgaacctataggcgtttcgtctgagctaagccatccacaaatggggacctcaacccaatgtcagcggcccactgcatatggtggcgtgccttcacatgggaatactgcacacaagaagagggcaatacaaatgatggatgaagatttccaacataccgtcttcttgagggagcctaaacctgaacctgatactgatgatctacaatgcagtgcccctgcatccagctgtcagaatgcccaacttggccgcattgcttcccacccgctcaatgccagcaccttagatgctctacctgttcaggctccgttaaagatttcaggagctaatggcaggacagtccagcattatagaagtacagcgccttcttcctttgttgaacctataaatagcaagacgaagcaacctcaaagtctggaaaatgggttggaccatgcaactatgatgcacaatgctgggacaggatctgcagctggaaaaacacaggaagcaccttgtttacacactcttgtagcttcatccactatgggtgaggtcgagatgtcgatcaaatgctgcatagacccatcaaaattccacatgcctgatnttagaagctgttttcaagatggttgaggaaaaatgccttcgctcacacaagagcctcccacctgatttttccatagccggtctcatcaagcagatatgccagtgtgtcgcacgactaggcagtgatcatgctgcagaacataataaacaatcagatgcttttggcaagatcagaagctcacaggataagccaacaacgagtagtgctccatccttggaaccaattgattgcatgaacagcagaagcgnggaatataaagctgtagaagaatcattgattgtggaagcttcatgagaatggcccaccaaattcaactacccatcagcaggcccatctggtacttcctcccaatgggtgtacccatgatttatctgacatatcaaagggaaaatgaaaggttaagtatatcagcagttaacgaatttggtagcgagaattgtttaccttccttttattatataccaagaaatcttgtttcccaggactcctatgttaactctgttgaaacaattggcgacaaggactgttgttctgattgctctggcaactgcttgtatgcctctgaaccatgtgcctgtgcaagaaaaactggtggtgaatttgcctatacacgagacggattggttaggacaaagttccttgatgagtgcatctctatgaccccgcgtccggaaaaacataatatgttcttctgtaaatcttgcccacttgagagtatcaggaacgagccttcaccagagctttgcaggggccatattattaggaattttatcaaggaatgcgggagtaaatgtggctgtaacgcgcaatgtggtaaccgtgtagttcaacgtggtataacttgcaatctgcaggtgttttcgacacgggaagggaaggggtgggggctacgcacacttgatgaacttccaaaaggagcttttgtctgtgaatatgttggagagttgctaacaaatacgaagctacatgaaatgactactcaaaacatgcacaatgctaggtactcagtgctcttagatgctggttggggtcctgatggggtgctgaaggatgaagaagctttattcctggatgcgacattttgtgggaatgttgggagattcatcaaccacagatgctatgatgcaaatttagttgagatccccgttgaaaaggagacgccagatcatcactattatcattttgcatttttcacaaccaagaaggtggaagcatttgaggagctcacatgggattatggtattgattttgatggtgataagcatcctgtcaaatcatttgaatgcctgtgcggaagcagatactgccgtggtagaaagcattcgaggacgcgaggcaaagctgcttcgaagtgaagtgttgactgaaagcagcggtgcatggttggtttgggaaagcgaacggactaatcagttttagaatgctttgttaacctaggtagctatgcattcataaagtgcccgctgtgcttgactgcagaacgtgaaattcaattagacagactgaaatgcaatgtacgtacgctactcctaaaccctaagccatctggccatgatctactgatgatgaggtgaatttgattaaactaaaat

SEQ ID NO: 176109 - DNA, 1878 bp, Zea mays
  Clone ID: MRT4577_92206C.1
cggttgcgtgggcggcgtaggggttgggggaggccagcagttcgtggaccgcagcaaggtgaggattcttctctgcgacggcgacgccagcagctcccgggaggtgctgcggctcctctgcaactgctcataccatgtaacttgcgccaagtctccgcggcaggtgatcaatattctcaactacgagggcggcgagatcgacatcatcctggctgaggttgatctgccggtctccaagtgcttcaagatgctcaagtacattgccaggaacaaggacctgcgccacatccccatcatcatgatgtccaacagagacgaggtgtctgttgttgtcaagtgcttgaggcttggtgcggctgagtacctggtgaagccgctgcgcacgaatgagctgctgaacctttggactcatgtgtggcggcggagacggatggtaaagggcactatgctgattctgcgttagagaagcatgctcagctgagatgcttgtaggagttgctgtacctgcatgaattattctttaaatcgagtgctggtgttggcagcttggtttgcccgagaaaaacttcttcaatgacaacttcgagttggtgctctcagaacctagtgatgcaaataccaatagcgccaccctcctctcagatgagacagacgataggcctaaagaaaacacaaatcaagaaacaggcacctcaaatcagcttgaatacgagtctaatccttccgttgctgagcgcgaccagagagacaagatcggtgctccaggctctgccctagatgccagtcaagcatgtaagatatttcagccggacctttattctgccaactggtcttcctttttgttgttaaccacttcttgagttctatatctccatctgttttctgataattattttaattgccagcgactccgggaagaatgttttcacgtcctataaaaactaacctgaaggttgctgagtcgtctgcatttctagcatatgttaagtcaagcaccccagccaccagctcatttgatagcggactacaaagaggtgacagccggttagattctttggataaccatggtaattgctctagtgcaacagatagaagtgacaccggtactgatgtaaatatttggaataaagaagcttttgagatgcctgtgcagtatcctatggtatgcttttcttcctctagcatgcatatggagcgaagcaatgaaggccataatgacacttcaggaactccacctgcataccatttcccattttattatccagggatggtagaacacaacatggcactttcatcagtgcaaaattttcaagcaaacataaacagtgctcaagcacatacaccaccagcgatgcttcatcagtacaatgttttctcccaatgccatagtttacccatgatatcatcatttcagtttaatacttctggcatgagtatgcactcaagtcatttaccgacgcaaaatgtgtggtcatcggcatcgagcacaccaacgcctgacgaaacatgcaatcgctccgagagaagggctgcagcacttgctaaattcaggcagaaaaggaaagagcgctgttttgacaagaaggtgaggtatgtgaacaggaagaaacttgctgagacgaggccaagggtgcgaggtcaatttgttaggcatgcaagcaatatggatatcataagcactggagatgatatatctgaagacgaagatgacgatccaacctccagggaggtagatatgatttcttctccagagtagtggagaggtcctcttgtgtgaaaaattagagtgcagatggttactgctcactttgttacaactcagtaggactagacaatacattcttctactggcaacaaggcaatacaccctttttgctc

SEQ ID NO: 176110 - DNA, 629 bp, Zea mays
  Clone ID: MRT4577_92207C.1
ggtacccgggcccttcctcgagttttttttttttttttttttttttttttttttttttttttttttttttttttttttttttttttttttttgggaaaaacgtaaacaactaaacagggaagaaaatcaaaggggcaaacattttttggggccccggaccacgaacaaacacaagcacaggcaaacccccccgtatacaaacaaaaaataacggagccacccttattggggcgtggagggggggcaaaaaaacgtacccgcgcaaaaaagggggggggctggatataactttcacacacccccgcgtagcacacggggggggacaacaatccgggggggatcaatcagccgaaaaagggggggtttttttcgccgccggccccctggggggcctggggggccttttttttttcggggggcccggggaagggaaaaccgccggagccaagggccgccgccgccgggaccccctccttaattttgggggggggggcgggctccgggtccttttttggcccgggcttctcgaaaaggggaaaggccccggggggaatgggccccgccccgccggggggctggtggggctaatgggggttttcccccttggactcggggaacccgttttcggc

SEQ ID NO: 176111 - DNA, 311 bp, Zea mays
  Clone ID: MRT4577_92208C.1
gccgcaaaacggcggcaaacaggcacaaaaagagactagggaccagggccaccaaccatcccttccagactatattttgttaggcgaccaggaaccaccctttctatttaaaaaaagcccggccaaccaagcgggggggggggcgcttttctaaatatggagcgggcaccccctgtgcgcaaaaagcaggaggggccgcataacccctgaggaaaggcaggcccaccctttcccgtttgttgccggaaggctttaattaaagggcgggggcaatgtctccaacgtccaatccttatcgggggctgagggat

SEQ ID NO: 176112 - DNA, 373 bp, Zea mays
  Clone ID: MRT4577_92209C.1
tgctttctcttgcgctggacagctctgtgcgccagatctgttgcagccttagggagccttgctccatactgtatgaaccctgaaatcggcgtggaattggaaggctgaagaacctgctgcacctgtagaatctcatcaacctagagaacagttaggtagaccaaggtatttgtgacgggggaatgaaccaccaaaactatgagggaaaaggtccgaccatattcactattcaatcaccctctttctggtgattgaggcactcacactccaaagcgggggtaaaagaggagaattgagctaacttgcatgagaaaagtgcacagagtgtttggaattgaaaccaaaatgcatttgctaatgaataggcatggat

SEQ ID NO: 176113 - DNA, 471 bp, Zea mays
  Clone ID: MRT4577_9220C.1
cgctgcaactaaaggccataacgagatcgtcggattgttgctcgagaacggagctgatgtgaattccttaaattattgcggccagacagcattgatgcaagcttgtagatacggacattgggaagttgtgcaaactcttctgctttttcgatgcaatgttacaagagctgattatttatctggaagaacagcgcttcatttcgctgctgtgaatggtcacgccaggtgtattagacttgtcttggctgattttttacctagggataaacttaactctctttctgaaactggtgttgtcactgcaaagaacaaatctgagcaaagcgcattgtctaaatttgtgaataaagcggctgatggggggataaacagctattcacaaggctggcttggatggattatttgattgtgtgcagcttttgcttgatcttgaggccaatgttttcgatgggacattttattttggaacat

SEQ ID NO: 176114 - DNA, 390 bp, Zea mays
  Clone ID: MRT4577_92210C.1
gacgaaccacaaacctgtgttcatgtttcgcaaactacacccatgttgaacacatttgtatacaaaaaggggctcccaaaagcccattcggcaacgggggtacaaagggccaatactcatgcaccatgttttgctgcacacgaacccctttgacaaaaaacgacacggttcatatatttcaaggttgtttctccaacacgcaaaacaaggtgggggcttgttcctgaataagaggcggaacccaactaaaacaacccccaggctgcatccttgatgcctatcaccagaggtggagctggtgggagctttagcccaaaagaaccaatcggctgtccttgaaaaatgaccacggtcctaactgccccactggaaatgcaccccattggcggg

SEQ ID NO: 176115 - DNA, 655 bp, Zea mays
  Clone ID: MRT4577_92211C.1
cgccgcctccgacatcgtccctctcttccccacgagaaacagataatccgccgccgttgagatgatggtgtatcacgatgctcctatatggcgacgagctcctgtcggattcattctcctacaacgagctcgagaacgacgtcctgtgggaggacgacggaaagaaggtcacccaacgacctgctgatgaggacattgttgccaatccatcctccgacggtggtgaggacgaaagcattgatgacacaactgtgaaggtggttgatattgttgacacattccgtctacaggagcgacctccttttgtctagaaatcaattgtgtctgacatcaaaaaatacatcaagaatctcactgctgtgttggagccagagaaagcggatgagttcaaaaaggatgtcgagggtgcagccaagtctctccttagcatgctgaaggacctcgaactttatgttgttgagtccatgaacgatgatgcgtctgtggtattcgcctattacaaggatgaagccacgagtccgacattcctctatttctctcatggtcttaaggagatcaagagctaggcgtgcggcgaaattagttacccatgttgcccactatcgacgcactattatgatatccaaaactacagaagccctggctgaatgaactc

SEQ ID NO: 176116 - DNA, 370 bp, Zea mays
  Clone ID: MRT4577_92212C.1
ggacggtccgcgatggcgcagggtcgtcttcttctcctcgtatgacctagatttcgtctcctgggggagagaccttagggtgctccaggtcagcaggtcacccggggcgtctccagatgacgtagagtcacctagaaattaagagatcaattcgaagaagagatcttgattgaagtacacgaagtagatcttgcccctcaggaggggtaaagatcatagagttgtcctggggtcggcaggccaccccaggacgaatctagacgacgtagagtcgaataggggtggaggtggatatgtggaaggctacaactagaactaagctacatctactcctagaacaggaaaaatagatagagtaattggttcgatt

SEQ ID NO: 176117 - DNA, 446 bp, Zea mays
  Clone ID: MRT4577_92213C.1
gtatttgtcggcaagatggctgccgtggtggacaccgagaacccggcggccaccgtcgtcgtggggccgccgtgcgcggtggacgacgacgacctgtcgcagcgcgccaactggctgcgcgcggcggtgctgggcgccaacgacggcctggtgtcgacggcgtcgctgatgctgggcgtgggcgccgtgaaggcggacgcgcgcgccatggtcatctccgggttcgcgggcctcctggcgggcgcgtgcagcatggccatcggcgagttcgtgtccgtgtgctcccagcgcgacgtggagctggcgcggctggaccgcggcgccgaggaggagaaggcactgcccagccccgtgcaggccgccgcggcgtccgcgctcgccttctccgtgggcgcgctcctgccgctgctggccgccgggttcgtcaccgactacaggctgcggat

SEQ ID NO: 176118 - DNA, 1158 bp, Zea mays
  Clone ID: MRT4577_92214C.1
acgcgtccaacggaggacatcgacctgcccctcacccgcacacgccccgtcaagaaggtggccctcgtggtcctgaccggcgagcgcggcctctgcgggagcttcaacaacaacgtgctcggggagggcggaaacccgcatcgatgagctcaggcaggtgggcctccagtacaccgtcgtcagcgtggggaagaagggcaacgcctacttccagcgccgcccctacatcccgttggagcgcgatctggaggtgagcagcgtgccgaccgtcgggaacacagggtttggtttggagacccaaaacccaatccatctgaacccatttccctcgctcccatcccgtcccgccccttgtctcttccgcttccccccgaccccatcatccagacgctgctccccatgtcgcccaagggcgagatctgcgacgtcaacggcgtctgcgtggacgccaccgaggacgagctcttccgcctcaccaccaaggaggggaagctcaccgtggagcgcgagaaggtgaagatcgagacgcagcccttctcccccgtggtgcagttcgagcaggaccccggccagatcctggacgcgctgctcccgctctacctcaacagccagatcctccgtgccctgcaggagtcgctcgccagcgagctcgccgcccggatgagcgccatgagcagcgccaccgacaacgccatcgagctccgcaagaacctctccatcgcctacaaccgacagcgccaggccaagatcaccggggagatcctcgagatcgtcgccggtgccgacgccctcgctggctgagcctgagtccccttggtggtgcggtgctcctgctatatataattctttttcctcattttctccactctgcctgtaattcctgataatagcacaaacgcaacggagttctgtgttccttgcgacacacaagaatttcaatccagagatgccaaaatgtataatcttgccgcaactgagacgtcgaagctcagtgtatttttatgcccaagtcttccaaatgtttggcacgaatcagctacggctcgggcatcctgcggcatgcaccaaacaccctacctagtacatgagtaaaggtgcaatagcaactaaaaaaaaaaaaaaaaaagcggccaaaaaaaaaaaaaggcccctagggcc

SEQ ID NO: 176119 - DNA, 680 bp, Zea mays
  Clone ID: MRT4577_92215C.1
ggggaacgcctctgaaattctcgcgctcgcttcccgctcaaccgccgcctcttccaatttcaagggtgtggacagttcacattgctctgttgatgctattgaagctgcaaaagcgttggcactgtccagcagtgctgttgtcgcggtatctggagctgttgatttcgtcactgatgggaagcaggttatcagcgtgagcaacggtgtgcccatgatgcagaagatcaccgcaacagggtgcgctgtgactgctcttattgctgcatttgttgccatggaaccttctgatgccatagttgcagcggcatgcgctcttgccatctttggtctggtgggagagattgggatggagtcagccaaggggcctgcctctcttaggatgcacctcatcgacgctctctactgcctcaatgaagaaacagtcacttctcgggttaggatttccttgcgaccatgatgcgcggacgcatgccatggctactgttttttcaggtaaatatggagtttcgaataataggaaggctgagttcattttctgaaatgtcttgataaccatgaaaatcatagacactcctttaaccttcacgactgtacgaaatacctagatgtgatgcccaagttgtgcctgaattgtcagctgtacatatttaatacagtaaaatggggaaccttgtttcttt

SEQ ID NO: 176120 - DNA, 855 bp, Zea mays
  unsure (1)..(855): unsure at all n locations
  Clone ID: MRT4577_92216C.1
gtacctcgaggccggccgggcaaacccaatccatccaaacccatttccctcgctcccatcccgtcccgccccttgtctcttccgcttccgcccgaccccgcgcgccgcggaccagcagccatgtcgtgctcccacctctccaccgcctggtcctcctcggcgctcgccagcagcgcctccaccacccgtcggcgctcccccccgcgctcgggtctcctggtgcggtgttccctccgtgagctccgcacccgcatcgactccgtcaggaacacgcagaaaatcacggaggccatgaagctggtggccgccgccaaggtccggcgcgcgcaggaggccgtcgtctcctctcgccctttctcggaggcgctggtggaggtgctctacaacatgaaccaggagatccagacggaggacatcgacctgcccctcacccgcacccgccccgtcaagaaggtggccctcgtggtcctgaccggcgagcgcggcctctgcgggagcttcaacaacaacgtgctcaagaaggcggaaacccgcatcgatgagctcaagcagctgggcctccagtacaccgtcgtcagcgtgggggaagaagggcaacgcctacttccagcgccgcccctacatcccgttggagcgcgatctggaggtgagcagcgtgcccaccgtccgatcctcgcctctcgcgagctctaccgccccatccatgaaggactcgcaggncatcttgcgactcgtctactcgctcttcgtctccgaggaggtggacaaggtggagctgctctactccaagtttcgtgtcgctggnggcgctccgaccccatcatccagacgctgcttcccatgtcngcccaaggg

SEQ ID NO: 176121 - DNA, 2168 bp, Zea mays
  Clone ID: MRT4577_92217C.1
gggcgattggtatcctcgaggccgggcgggttccctcgcttcccgccccttgtctcttccgcttccgcccgaccccgcgcgccgcggaccagcagccatgtcgtgctcccacctctccaccgcctggtcctcctcggcgctcgccagcagcgcctccaccacccgtcggcgctccccccgcgctcgggtctcctggtgcggtgttccctccgtgagctccgcacccgcatcgactccgtcaggaacacgcagaaaatcacggaggccatgaagctggtggccgccgccaaggtccggcgcgcgcaggaggccgtcgtctcctctcgccctttctcggaggcgctggtggaggtgctctacaacatgaaccaggagatccagacggaggacatcgacctgcccctcacccgcacccgccccgtcaagaaagtggccctcgtggtcctgaccggcgagcgcggcctctgcgggagcttcaacaacaacgtgctcaagaaggcggaaacccgcatcgatgagctcaagcagctgggcctccagtacaccgtcgtcagcgtggggaagaagggcaacgcctacttccagcgccgcccctacatcccgttggagcgcgatctggaggtgagcagcgtgcccaccgtccattgggtacctcgagcccggccgggccgggaaaacccaatccatccaaacccatttccctcgctcccatcccgtcccgccccttgtctcttccgcttccgcccgaccccgcgcgccgcggaccagcagccatgtcgtgctcccacctctccaccgcctggtcctcctcggcgctcgccagcagcgcctccaccacccgtcggcgctcccccccgcgctcgggtctcctggtgcggtgttccctccgtgagctccgcacccgcatcgactccgtcaggaacacgcagaagatcacggaggccatgaagctggtggccgccgccaaggtccggcgcgcgcaggaggccgtcgtctcctctcgccctttctcggaggcgctggtggaggtgctctacaacatgaaccaggagatccagacggaggacatcgacctgcccctcacccgcacccgccccgtcaagaaggtggccctcgtggtcctgaccggcgagcgcggcctctgcgggagcttcaacaacaacgtgctcaagaaggcggaaacccgcatcgatgagctcaagcagctgggcctccagtacaccgtcgtcagcgtggggaagaagggcaacgcctacttccagcgccgcccctacatcccgttggagcgcgatctggaggtgagcagcgtgcccaccgtcaaggactcgcaggccatctgcgacctcgtctactcgctcttcgtctccgaggaggtggacaaggtggagctgctctactccaagttcgtgtcgctggtgcgctccgaccccatcatccagacgctgctccccatgtcgcccaagggcgagatctgcgacgtcaacggcgtctgcgtggacgccacggaggacgagctcttccgcctcaccaccaaggaggggaagctcaccgtggagcgcgagaaggtgaagatcgagacgcagcccttctcccccgtggtgcagttcgagcaggaccccgtgcagatcctggacgcgctgctcccgctctacctcaacagccagatcctccgtgccctgcaggagtcgctcgccagcgagctcgccgcccggatgagcgccatgagcagcgccaccgacaacgccatcgagctccgcaagaacctctccatcgcctacaaccgacagcgccaggccaagatcaccggggagatcctcgagatcgtcgccggtgccgacgccctcgctggctgagcctgagtccccttggtggtgcggtgctcctgctatatataattctttttcctcattttctccactctgcctgtaattcctgataatagcacaaacgcaacggagttctgtgttccttgcgacacacaagaatttcaatccagagatgccaaaatgtataatcttgccgcaactgagacgtcgaagctcagtgtatttttatgcccaaaaaaaacaaatgtttcgcacgaaaaaaaaaaaaaaaaagcaacctaaaaaatgcaccaaacaccctaaatagtacatgagtaaagtgcaatagcaactaagacgagg

SEQ ID NO: 176122 - DNA, 747 bp, Zea mays
  Clone ID: MRT4577_92218C.1
ctgtgcggcgctcaggcggcgggccgggagaaaacgaggaggaaaaaacacccaaaaaaccaccttcttttcctgcgttcccctgctcgatccccgacgagaattcgctcccgaacccatcgatctgctctccgcagtccgccgatccgtggatcgatccgtgcgcgggctcggtccgccccgggttccgatctggtcgccgcctcgcctgaggagatgaacggcgccgggggcagccaccaccaccagcagcagaggctccggcagcagcagcagcaggcgctcctgatgcagcaggcgctgcagcagcagcagcagcagcagcagtaccagtccggcgtcctcgccgccgcggcggcggcggccatgacccaggtcgtctccccggatcctcgcctctcgatctgctggtctgcgtgcgcattgggcagcagtaatgcgcgccgatctgcttgggagattttttttctttgctttgagtatttttccttaagctgcctcgctgggttactgcacacttttttggtggtgggctagcggcagcactagttagagcttgatagatagggtttcttgtagctatttttttggtggaattggagcgagcggtgttgctgcacaagactttctgctgattgcgtgctggtgattgcgatctgctcgcgtacaaggtgcttgtgctactgcctctatcgttgatggattgttgccacttggaagacgtttgttagtaaggaaggcgtttag

SEQ ID NO: 176123 - DNA, 243 bp, Zea mays
  Clone ID: MRT4577_92219C.1
gtcagattgcacataacgcaacgaatgccgggcgcaagatccgagagaccgaaacagggcatggtggggccgttttatcatgggctatctgcgctgccgactgactggcgatcgtttttcctcacctactttctaggagacaatgtgctgaactcgggtgacagagatggggatatgtgacaccatagatggtgtaaacttatcagaggagtcctaatactcaaaatatatatgatctggcat

SEQ ID NO: 176124 - DNA, 492 bp, Zea mays
  Clone ID: MRT4577_9221C.1
aaggatccactattctgggccgttgatgccaccgggtggcaacatcgaagacatgctcaaggagcacgagaggcacatccaagaagcggtgcgcaaggcgcgactctgtaagggaagcaagtagctacatagagcagctgaaggcgctaggagaagcctcacatggactcacccagactcatcaaaagctgccatatcgaggagccgcaatagctgtctgtcacatgcaatgcaacacggtcagctattgaagtagtgagatgagacagctctcaccttttaaaattcataggtgagaaccttcgcttgtaatgcgatgagacattttaaaattgaagtgcagagaaatcgggaaggagaattgctaagccactgtaaagtttaggcacccttttttttgtaagtttgatgcagttgtaatagccactgtaaagttgttcatcgattttgctgacaaatctggattatggaaaacaacaggagctggatttg

SEQ ID NO: 176125 - DNA, 282 bp, Zea mays
  Clone ID: MRT4577_92220C.1
acccacgcgttcggtttccacagtatggctcccgtttggctacaccattgctcatactcaatggggcctgcgatacgtggcagggcacgagcgcgctatcacctagaacagctgagccgaagaagactagcccccaatgcaagcttgacatcaagatctgctccgccatccaactcacagccagccaaattctcaggacatatgttctgaaagcacaccgtataactcatgctcaactcatgctcatcaactcatgcaacgctcactgcgaattacgatcta

SEQ ID NO: 176126 - DNA, 237 bp, Zea mays
  unsure (1)..(237): unsure at all n locations
  Clone ID: MRT4577_92221C.1
gaggcgcaacncgaggagctacaacggcgacgactgttttttttttttttttttgatgctccgaagcccacggagagaacataacatgcggccacagccatggaattaggtacctgccagtctgtcactcacttcactcaccaacgtgctttcatggcgcgcggtaccgcttgtagtgaacctgacgtggggagctgctgctgtcacccttgccatatcggcagtctgggtgttcac

SEQ ID NO: 176127 - DNA, 801 bp, Zea mays
  unsure (1)..(801): unsure at all n locations
  Clone ID: MRT4577_92222C.1
ctctactaccaccacacctgcgcctccacagtccacactcaccgctgcgttcttccgctcgccccctcacaacgaaacctagagagtcccgcgcgtgacatggcggacggcgcgggctcggcgtctggtctggtggagaagctcgcggagctctcaacgggcggcgccgggcagaatcctccgccggcgggtgaaggcggagaggagttgcagctctcgaagaacgcgaagaagagagaggagaagaggaagaagctggaagaggagcggaggctcaaggaggaagagaaaaagaacaaggcggcggctgctgctgctagtggaaagcctcagaaggcatctgctgctgacgatgatgacatggatcccactcaatactacgagaataggctcaagactcttgattcactcaaggccgcaggtgtaaacccctatccacataagtttccggttggcatctctgtagtggaatacattgagaagtacaagaccttgaacaatggggagaagcttacagatgcgacagaatgtttagctgggaggatcatgaacaagagaacatcatcatctaagctattcttttatgatctttatggtggcggcatgaaggttcaagtgatggctgatgccaggacctcagagttggatgaagcagaattctctaagtaccactcgagtgtgaagcgaggtgatattgttggcatatgtggttatccaggaaaaagcaaccgtggggagcttagcctgttcccgaagaaatttgtcgtgctctcntcatgtcttcatatgatgcctcgacag

SEQ ID NO: 176128 - DNA, 498 bp, Zea mays
  Clone ID: MRT4577_92223C.1
cgtcccgcgccgggtcaggcggtcaatcacgcgttgggtatgccggagggtctgcccaccactgtgcatgccgtcactggtacccagacgactggggatgggcgcctgtttaaggactgaacgggtgcaagggctgttgagctgcaacatgatgcccagaaagactttttttttttttgctgaaagcaaactgctatgtgttctcaacggacagccgactgggatgccgttgctggtcccaaccgtagatgtgacaggtgatgatccgactgtgagaccaaggcaagtcagcaacgtctgaggagatcgaagcttcaaggacagcctgggcaacagggaggatgacagtcattctgccgttcttcaaggaggaccttgctctaacatctttgcagcgagagaggacgtttaccataacggaagctaaggcaagcattggctctgacgcgacatccagggaggatacagcctccgactacaacaactgatgatacacat

SEQ ID NO: 176129 - DNA, 331 bp, Zea mays
  Clone ID: MRT4577_92224C.1
acgtcgggagacggcagtgttcgtcgacaaggagcccaacgccttcgccctgcccggcggcaaggtcggcgtgaacaccggcatcttcaccgtggccaagaatcaggaccagcttctttgatttcccgctaaagatatccacctttttcggcgatgcggatgccattttcacggtcgttgatttgctaagccttttcaccgctgtgctgatttacaacatgcttttctactatctcactcgcatgattgtaagtccccactttgcgcagatattgtggcgcagggatatcgctccgtcgttgggcaaagagaaacgcgcatttaccttaag

SEQ ID NO: 176130 - DNA, 350 bp, Zea mays
  Clone ID: MRT4577_92225C.1
aatagcccatctttaagttgcggccgaccaaaagctaatccaggccggctctttcttcaacttagtaatagggaaaaaccttcaccgctccacaacttatagggactattagctaaacgcattctttccggtggtggctaaattgaaaacggcgcatgcttctcctttccaaagcatcactgcaagtaaaaacaatcaaggtgctcctgcccctgaccaactgcaactatccctgcacaagctgcattatccctcaagggtcctgtttcattctgaacaaatttacatccaatgcattaacgcatttgccattctttaacaaccccgtgcaaaggtttatcctttcaaaa

SEQ ID NO: 176131 - DNA, 831 bp, Zea mays
  unsure (1)..(831): unsure at all n locations
  Clone ID: MRT4577_92226C.1
cgggtcggccctgactccttaacgtgcactgcccactcgttcttgctttgtgcagcccacgattgatgcgggcgccgacctatgggtctaggtcgtcaggtagcgggacactagcggaagcatcaatgactgatgggcccctagcgccagactcctcaacaaactcgccgcaccttctggccacgacgcgagatcctcggcggtggcctcaccccaatttgggagccttgatctgggtataagactcgtcacgctgtgcctttgggaccctactcgaccatttagacgtttagatcatataccactaacccatgaatcggagagaatagtgcatcgccggcgctcggtcaccgtgagctcaaccaaatcgctttctgtcgccattccggtcaattggggaggttggaaggcttcactagcatgcagcgggagtaaccgtggtgtcggtgggaatccgtgaccagtgatgctcgtagaatttctcaacggagctcggttctgtggcagattttccccttcccatgggcagagcacggtgcgccatcaacatcggtatgaacttcccaacaaactcgtcttaacccctactgcattttagattcattaaacatgccggcgatggtcggggtaccgaattagcctatcaccggcattttgctgttgcggccgtgttgtgcggngtgaggcactcggccatcggggggagagaagacgaccccacgaccgttcatcctagaattgacggtgaggattagatctcgcacgacagaacggttgccactgatctactcatggacgagtccgattagattatgcgtaccttttcgcgcg

SEQ ID NO: 176132 - DNA, 219 bp, Zea mays
  Clone ID: MRT4577_92227C.1
cacatgaaacttaaatgtccattaccatgttacttctgtctacggtcaattattgcatgtttccggacatcgaatcttacaagaaaagcacaagagtacatcagcatatccaattacccgaggcatcaaaacgagtgtccacaggggttttttacatttaggtgagccgcaaaaagctcaatccattaaaaaaaaactatcctataattttaacaaccc

SEQ ID NO: 176133 - DNA, 179 bp, Zea mays
  Clone ID: MRT4577_92228C.1
gcttacgcgtgggcggacccgagcgcgttacacagggtgtattattgcaccaataggtctactcaggggcgttttaggggttaattaaacgcatacaaaaacaagaatgagccatcgaaccatcatcgtcaggtcatctaccgtgatctaaacatttgccacttccagcacaactagcc

SEQ ID NO: 176134 - DNA, 283 bp, Zea mays
  Clone ID: MRT4577_92229C.1
gtagaaggcagcctggcctttgctactgaggagaaagatggagcctgggtctcgagcccaccttcgctgtacctttgccacatggtactgtatgcttgccagctagaaggagggtcagggattttttacagtctgagaatgagtgtgtctgagtgaggcggtatccacattctcaacttcaagtcattgcagtgtctttttcccagaaaacaaggggttagatgttgcatttcataacactcaccgaagttctgtctactgatgcagcacaagagatgtaatg

SEQ ID NO: 176135 - DNA, 134 bp, Zea mays
  Clone ID: MRT4577_9222C.1
cgagataacactgccgaaccatcagggttctgttggtccttctactccttcaaatctgaattccaggttaccagggtctcctgctatggttttgggcaacaattcaccgttcccttcaacattgagtagtccta

SEQ ID NO: 176136 - DNA, 471 bp, Zea mays
  Clone ID: MRT4577_92230C.1
atgaaaagataatttattatgagatgaagtgatgatacgagttaagataatgattgagaattttattatgacaagcatgaacaggtgtgatgatatagcagatatgatataaatgggaggcacaagcatgcaatttaagtaataatggttgattgaaactaaaggaaagtaaccatgcatacagatagatgacttagtagtcagctttcttagactgatattaaacttgagttatgaatttatcataattctatatacagggatggaagatgcataccttgaatatgagaattctgatttttagattcgtttcacggacatagcaaatgaagcaaaggcagcgattggtatacatgaagaataaagtttggcggtcaaatacgagaaaaaagcctcaagccacggctggtgttgttggctgatcatgcagaatgatgtgttgcaccattggacaaggtccccttccaagga

SEQ ID NO: 176137 - DNA, 732 bp, Zea mays
  Clone ID: MRT4577_92231C.1
attgggacctcgagccggcgggtacgctgaaagaaacacaagggaggataggagggagacgaaggtagaagacgacgccaaaaatcccctccccctccccatatcctactccaataatctctcatcaggctattcttatgactgatcatggtctgaggattcggcagggcgcagccatgaactaaaaggcgtccgtctcctaggatgtctccgccaggtacaataacatattgtcaggtcttctacgggatcctgaaaatatagaatgcgcagactgcacgtctcagggtcctcgcatggggaagtgtgaatctagagcatctttatatggatgacatgctctggcattcataaaaacctgggggtgcacatatctcaggaaagatctgccaccctggatacatggctgacacacccagccgtatttattctatcgatgggaaacgaagaagctgatagctattgccaagcagagctgcctcctaactacgatagggttggaataaacaattgcatccgtgtcctatatgatcgaccagacatgggtaccaaggagatgtagacatcaaaatcttcctccagcgttcgagatgaaaagagccaacagcctccaggtactgctaatacgagtaggacatgtactgacatcttcgtttgagcaaaaccgtgcttcaccaactcttccgaacaaagttgcacatgcagctacaaggatatcctctcaggtatcac

SEQ ID NO: 176138 - DNA, 302 bp, Zea mays
  unsure (1)..(302): unsure at all n locations
  Clone ID: MRT4577_92232C.1
nccacgcgtccgnccacgcgtnncgccacgcgtncgcagatttgacagataaagatcagggggtgtattccaccttgcccgccgagttacaagcattggttacaaggttccaatctgtgtttgctcttcctgttggccttccacctgtccgtgattgggatcaccatatctctcttctacctggtgctcaaccatttcatgtgagaccatacagatatgcacccgcgttgaagactgaaatcgagcgccaagtccaagagatgttatcttcaagcattattcaacacagcaacagtgagttc

SEQ ID NO: 176139 - DNA, 113 bp, Zea mays
  Clone ID: MRT4577_92233C.1
acggaccgtggtcgaacgcgtcgggagagacatggccgacaacaggaaaactgtactgtacaatgctgactgcggcgacgatcatgagaagctagggacggcgtagacggcga

SEQ ID NO: 176140 - DNA, 468 bp, Zea mays
  Clone ID: MRT4577_92234C.1
gggaacgaaaggggcctggaaaaaaaaaaggggggggttaaaaaggtaatgggtaatttttgcccgggcctgaaacatgtttggggcccggggcctccccaaaaggggggaaccaaaaaaaggcccaaatgctccccaaagggggataatttttccttacacaaaaactacaatttttttttaaaaaaaacggggggggaaaaacttgggggggcctttgggtaaaaagggggaatttggtgccattcgccaaccaaagtttttttccaaaggggaaaatttttgttgccgtcgaaaacccccaattttttcccaggaagggaccaaaaaagcctccaaaagggggttttagaaaaaaaaaaaacccgggcggcccaatggaaaactttttttggtggtgccaaaaaaaaacccttcccccctaaaaggcctggcaaagggggactttgaaaggcccaagtttggggc

SEQ ID NO: 176141 - DNA, 686 bp, Zea mays
  Clone ID: MRT4577_92235C.1
acccatttcttctcccatatccttccgggccgcaccaccttccttcctcgaaccaccacctccaccgccggtcgccagatccaagcctccgagcgcccgaccccgagcccccacccacgaccaactccgcccacgaccaactccaccgcgcccctacccacttcccacgaccaattgatcagcgatgtaggtggtgccggcatgccgccgccggtaatggcaagcaaaaccgcgcgcccgacccccgcgctatcccggcctcctcgccggatccctcgacggccacccctcagctagatctcacagcggcctcccaccattgggacacccgtgattcgatagggcactgaccggatctgagctccacagggtcaagtacaacccacgatggagttacaggcagcgccgccactggcctccggccaaccgctccatcccctcgactaccatctcgtttgaccactccctttcctcaacgtccatctcggtcgccccctacctcctctcgacctcattaccgtccagccccactcccctcccttgcgggatccgctgctgggtacaacaagccatgaccgcgaactgtcgacgtgcagttcagagtttgcaaaaatcttggtactgtagctcatcgacggctgctgatgatgctacagcgagctgcaggagagctctacccccgacgc

SEQ ID NO: 176142 - DNA, 168 bp, Zea mays
  unsure (1)..(168): unsure at all n locations
  Clone ID: MRT4577_92236C.1
cgacgcacgcacccacgcacccggccagaagaccggccggcccacncggcggctacggaggagaccaccgcggcngtggagagggaccaccagaggcacgagcaccggacggcaacacacaccgggcaacaacgggcacgcgaccgccaccaacagcaagagcgacaa

SEQ ID NO: 176143 - DNA, 350 bp, Zea mays
  Clone ID: MRT4577_92237C.1
tatgtctcatagtacacgcactaactttgctaggaatagtggtcactttcgctttatagcatatacccataactgtaacacactcgagcccataactcgtgtagtcaaggcactatagtcatgataagcatacaagacaggggcgtcagtaatcaagataacgctgtaggggacagctttttgttagatatagctagtgcaacactctgtagtgatattggtacttgtgacaagctttcggtaggttcctcttgaggatctacagtgaacactacttgcactggctactgatcaaacagaaacacctggatctgtgtattccacaccacataaggttgcctataccccac

SEQ ID NO: 176144 - DNA, 1665 bp, Zea mays
  Clone ID: MRT4577_92238C.1
atgcctagggaaaacctcctcagcgagaagctcgccgacggaggaaccgacgccgaaatattcggcgacatcacgaagcaggggaacgagacccgacgcagcctgtatcccgagatgaaatttcggagggccattcaatggcccccaaacttcaaggtctccaacgtcgataaatacgagactaagcaggactcgggaggctggttggtcgtctatacaaccgctgcccgggccgttagggcaacggaagatgtgatgactgcgtatttacccatcgtcctcgggcaagacgcattgcaatggctgcgacatctaccacggcactgcatcgacgattggagcgacttcagtcagcgttttatcgccaacttccaatcactctccgacaaactggcgcagccatgggacctcaaatccattaggcgccacggggatgaaactcttcggtcgtacctcaaaaggtttcagaccatgagaaattgcatccccgaggtcgctgaagtagcagtgatcgaggacttctatcgggaatccaatgactctgtcttcgtccgagccatactgcaaaaggcgccgaccacctccgagcagctgttcatggaggcagacctctacatcaccgccgatgaatgggctcaggacctcatcggggagcgaagcctgctctgtctgcaccacggcgtgatgcaaaccagcagaccgacaagcgctgggagaagagacctcatgaagaggtccatgtcgctggaccacccgtctctcgttcccgaggtgcaccccgcggaggcgagcggacactggacgacatcctcgattcccagtgctcgtatcacaaggatatgcgccacagcttgcggaactgcagagacttcaagcattccgtcgggaatggccgacccttccaacctctaccacctcccccaccgcgaggagggcccggtgaacctcggcgacctcagcagtaggaagagggaggaggtggagcatttccgcacgtcgacgaagaggtcaacgtcatcttcagaggacacgggcaagtacccgctcctcgtcgatccggtgatccgagagagcagggtaaagaaagtattagtggacgggggaagcagcatcaacattaccttcccccggacactcttgggcttgggagttgcactcaaagagctccatgagtcagacactcctttcttcggcattgtgccgaccgaaggagaatacccgcttgggcacatctacatgcctatcacctttggaactctgaaaaactacagaaccgagttcctgaggttcgaggtggcaagcttcgactgcaaatacaatgccatcatcggcaggccaggattggcaaaattcatggccattctgcactattcgtgcttgatattgaagatgccgggacaacaagggatcatcaccgggcgtgctgacttccaaggcgccgcgaaatgtttccgagtagccatccaggcggccctcactaccaaaccactgacgacttcctctgtgcaggcaaactcaaagcctgagggagacctcgcaatacctgagaatgaagctcaagtcgtgacctctatacggccaactgaggaaatgaagaggatcaaccttgggttcgctgatgaacgcaagaccgccatcatcagctccagcctggatgacaaatag

SEQ ID NO: 176145 - DNA, 129 bp, Zea mays
  Clone ID: MRT4577_92239C.1
atcaactaccttcgggcggacgtcaagagggggaacatctccaaggaggaagaagacctcatcatcaggctccacaggctcctcggcaacagatggtccctgatcgccagccacctccccggccgaaca

SEQ ID NO: 176146 - DNA, 1024 bp, Zea mays
  Clone ID: MRT4577_9223C.1
cggacgcgtgggcggacgcgtggggtttcatcaaggctaagaaacgcggcggcacttggcgggccaggagctgaatctgtcaaacctggaaatgagagccatgtagtagccagtcgcgccattgatatagctgctcaagttaagcaacccacgcatagcacttcgaagagcacctgtgagaagttcagcgccgaggacagtgtgccagggttccgtgtagagcctcgggcactgccaacctcagcgcaggttcctgagtgtggatccacgtggaataacacaggggatcaccatcgttcggtcctcggccgcgtttgcagctctgttcgcgttgcgaggaagaaagggccatcgaattcgaatacgccacagtacgacgctgcagacttgaggaacggcggtgaccgcaaccagcgagcagacaggcctgccgtctcctctcagaagaaagaccagcaggaggaccgtggaaggaagtacaaaaggatccactattctgggccgttgatgccaccgggtggcaacatcgaagacatgctcaaggagcacgagaggcacatccaagaagcggtgcgcaaggcgcgactctgtaagggaagcaagtagctacatagagcagctgaaggcgctaggactaggagaagcctcccatgggctgacccagactaatcaaaagctgccatatcgaggagccgcaatagctgtcacatgcaatgcaacacgacggtcagctattgaagtagtgagatgagacagctctccccttttatatttcataggtgagaaccttcgcttgtaatgcgatgagactgtttcaaacgcccaaagtgataagacagctctcccattttaaaattgaagtgcagagaaatcgggaaggagaattgctaagcccccgtaaagtttaggccccctttttttttgtaagtttgatgcagttgtaattgcccccgtaaagttgttcatcgattttgccgacaactctggattatggaaaacaacaggagctggatttgaaccttcc

SEQ ID NO: 176147 - DNA, 593 bp, Zea mays
  Clone ID: MRT4577_92240C.1
gaaagagaacctttctagtggaaggacatcattttggctaaaagatctttacagaggagttgcaaaatgtattgttgcagaatgataagttgctacagcaaacctatcccatattcttctcttatgccaagaacaaaaacatctgtctccaagttcatctcatcagtctttggagtagcacttctatttacccctgtcttcacaagcgtatcaggaattccaagatctcaacgcaatgcttgcaactgaacagatcctcaacaattcaagagatcaatgtatttacatattttggggggtggggggcacacaattttagctcaaagaaaatttatcgtcttccatacagaaacatgcaaccactagatcactttgtttggatatggaaatccaagtgctgcaataagttgagagtttttatctggctactccttatggataggcttcacacacgtaacattctatttttttgcttgtcaatccactcaaaattgttgggcttagattcgaattcagtgacagcttcattgtgatttcaatggcatgctaaagagagtgtgtcaccgcagtacatgcctgaaagtcagattgat

SEQ ID NO: 176148 - DNA, 184 bp, Zea mays
  unsure (1)..(184): unsure at all n locations
  Clone ID: MRT4577_92241C.1
tctcccttggcgagcgtctgtgaccancaaggtgtggtagcttgtctcgagagtcaatgcattgttctacgctacataactacacacactatctcatgtgctattttggaccgctttaacagccctaataactgcaaagccatttctcactttcatgtatcacacaaaacatatattcatactt

SEQ ID NO: 176149 - DNA, 244 bp, Zea mays
  unsure (1)..(244): unsure at all n locations
  Clone ID: MRT4577_92242C.1
gcgttcggtnttttgtngtgaaggctttctgtggggatgaaaacctatttgccctgcanagttgcgtctgtgtggtttgaacattgtggatgaatgtgatggtttgttcttagccgttgtggttgtgggaagcatattgttgttgggtaccgtgtgatgttgtcgtgtggtagttgttttatgaccggtgggtttgggagtctctcttctttgtttaaccttggtgtgtgtggtggtggttgtg

SEQ ID NO: 176150 - DNA, 478 bp, Zea mays
  Clone ID: MRT4577_92243C.1
cgtccacacctgcgctgccgtaagcggggtcttcggagtcgccgccgccgacgtcaaaatccttgtcgcggcagcgatcactgctcccctctatgatagcgtcgcgtgagggcaggcggtagctccctctgtcgatccgcgcatcgcgtgcccggtagcggctattagagcccatagctcgtgttggttgcctggcaagcgcagctcgatcaccgtgccggcgccgtgtggcatatcatgccgtactatgggcgctgttctgctctgggtctactggagtgcatttgctatatttttgactactactacattggatggcgctgaacgacattgcttcacacaataatggttatgactgggtgcagtatgcttcacatgtgaaccccgacatgtccgacgcgagacaataaggcgtctatctgtgatggcgcaagcagggatggattctgctccagtgtatgagaacaacggcattgcc

SEQ ID NO: 176151 - DNA, 1537 bp, Zea mays
  unsure (1)..(1537): unsure at all n locations
  Clone ID: MRT4577_92244C.1
cgttgctgtcgacgccggccgggaaccccgccgcccgcggcgtctgttcctttcgtgccgcttcgtggtggcgccgtggcgcccaccaccacctcacctctcagtctctcaccacctatagcaataccacgagtccacgatccatggaatagactagactacaccgctcggccggtgacgacgacggcgacagccgacagtctatccccaactacgctctgcaccagcgccttatccgccgcctggggtttgttctggcgcggtggcagttgataaaggcggaagggattagagcaaggagagggatcggcgatgagcttcgcggatctggaggcgggggctctcagggcgcccctcgggaggaaagcgagagggggccccaacgacgcgcgagcgctcgtcttccagataaccaccgcggtggcctcgtaccgccgcctcctcaactcgctcggcacgcccaaggacaccatcacgcttcgtgataacctgcataagactagtcagaacatccttcaattagcaaaggatgcgaaagataagctccaaaaggctgctgaagcagacaagagcactgatacaagtgcagacaagaggatagctgatatgaagcttgccaaagattttgctgccacaatggaggagttcaggaaacttcagagtcttgcgattcagagggagacggcatataagccagttgttccacagaatacgcagtcaaactattctacagatgagcgaagttccgaatctggtaatatgcctgagcagcgtgcattactcgctgaatcaatgagacaagaggtgctgcaattggacaatgaaattgtttacaatgaagctataattgaggaaagggagcaagccattcaagatatccaacagcagattggtgaagtacatgaagtgttcaaagatcttgctacccttgtgcattcccaaggaatcataatcgaggaaatcgacatgaacattgaaaattctgcagcagtgaccaaagaggcaaagacagaggtcgccaaagcagtcaagactcagaaatcgaattcgtccctgatttgcttgcttatggtcatatttggggtcgtgctgctcgttgtgattatagttttggcagcttgagacatgcaaccttttctcttacagagctattccgcggagttcagaattgaagattgttcgtggttcttatctaaccatcatatcgtgtgccaaaaaaaatgtcaccaacggattttagaagcccccccccccccctttacatttcatggcttgtgagtgagcggttctctttgccatgtcatgtcatgtgtgagtcctttttttcatggcttgccttgagtgaacactgatgttcttttgcttctttggatttcggaagttcgcttggtgtgatttttgtaaccctgtaagtaccccgatcaaataaagcaaagagatggttacgcgtaaaaaaaaaatgtttgttggggatgaagganaggctcgagttcctggacgcggacaagtgcgagtgcaagaacacgctcatcgaggc

SEQ ID NO: 176152 - DNA, 313 bp, Zea mays
  Clone ID: MRT4577_92245C.1
tgaggaccacgcgcactaatttccgtccataaccttatctcggtcccatcgccggcaatcttctccgtcgccgcttatggatctctcagctggccaggctgccctctccgagagttctactccaccctctcctcactctgagacggacttctcctccagggcgcggcccgagaattacccagcgacgaatgacgctactctgtccgcctgcttgcccaacactacatcagtgacctgaatacagcgcgggtcatctgaaactagttgccgaagcaggtcgaggtactaactgttcggagctcgacgctggctg

SEQ ID NO: 176153 - DNA, 214 bp, Zea mays
  Clone ID: MRT4577_92246C.1
attcggctcgagggccccgccgaagaggtgcagcgcagccgcgatggaccgcagacagcgggtgctcctcagactccccagcctactcttctgctccgacgtgaccacgctctgcgagcggaacccgccgccgagccaccggacaaatacaaggccatagaagtactagaacggcgccaaaatcaacttggtgaccaacgtgaacgtaaatgcg

SEQ ID NO: 176154 - DNA, 1128 bp, Zea mays
  unsure (1)..(1128): unsure at all n locations
  Clone ID: MRT4577_92247C.1
ggggggnnnttttttttttttttttttttttttttaagcctgcatagatcacctcgctgggctgcatgcttaagccattataaaccacctcagtgcataaacaatcttgcaacagaatcaaacagaatatcccaaatagaatcagagaaacaaaaaatcaagtgtttgggggaaattgaacaaaatattacttaacaaaacctactcaaaaaatcatcccctcactactgccaccgtctgacttcgtttccacaaaatccgcctcttgtttattgctaataaggtacacaagatcacccaggtgctgcacttgcaggcccgtcttctcacacctgtcgaagaagagtgattgatgacccttgccgattcttctgcgccagctcattagaaacaccggtggttttgcagatatttgtgtccctgatttgtcagtgatggttatgcagccagatttgtgatccttctgcttgtactcattcaaaagaaaggacactgtcttgaccaagttgtcatactgtttgacatagagtaggatatcacttgcaatgacaatgtcccaatttggtgtgcaaactggaaatggatctccccacgtgtgtctaatatgaggtaacacatctaaggcattcgctctgcaattgtaagatatattcttttcaatttcgccgtcatcataatcagaggttgtaatgttcacctcaaatgccttcctaagaaagatcgccagtgctcctgtcccacttcctaattccaggactcgccgtccatccaaaattgaccggttcttaaccagccaagtagcaaatgaaaatgtccccggccacaacaggttggcgttaagctcatgacatgagaactcccttacactcagtttcatgtcagggaagtcgtggactctctcctgatactccaacgccaccggcttctccccatcggagcagatttgcatctcatctcggtcgtcgtcgctgtcgtcgactccgtggaagagatcggcgggggagaagacggcggtatccatgtgtgctcttcgctgttgagggtgggaaggggaggccgaatgcgagagaagcaccggtcctcgtgccgtaggggaagtttctccccggccggcctcgaggtacccaa

SEQ ID NO: 176155 - DNA, 816 bp, Zea mays
  Clone ID: MRT4577_92248C.1
ggtgctgtcttttctgcaggattgaagatgagatgcaaatctgctccgatggggagaagccggtggcgttggagtatcaggagagagtccacgacttccctgacatgtgggacaggagcactggcgatctttcttaggaaggcatttgaggtgaacattacaacctctgattatgatgacggcgaaattgaaaagaatatatcttacaattgcagagcgaatgccttagatgtgttacctcatattagacacacgtggggagatccatttccagtttgcacaccaaattgggacattgtcattgcaagtgatatcctactctatgtcaaacagtatgacaacttggtcaagacagtgtcctttcttttgaatgagtacaagcagaaggatcacaaatctggctgcataaccatcactgacaaatcaggtactttctaaaccaatttgatcttgtaaatcattagaggatgctgtgcgaaatgtttctttttcacttggcagggacacaaatatctgcaaaaccaccggtgtttctaatgagctggcgcagaagaatcggcaagggtcatcaatcactcttcttcgacaggtgtgagaagacgggcctgcaagtgcagcacctgggtgatcttgtgtaccttattagcaataaacaagaggcggattttgtggaaacgaagtcagacggtggcagtagtgaggggatgattttttgagtagggttttggtaagtataattttgttcaatttcccccaacacctggattttttggttctcttgatctatttgggcaattttggttggatccttgtgcc

SEQ ID NO: 176156 - DNA, 410 bp, Zea mays
  Clone ID: MRT4577_92249C.1
cactatttttttttttttttttgacctttccgtttttttttttttttccatttttggaacatcaaccggggggcccttttttataaagaccataatgggaaagggaactttaagcattcctggggccagggggggaacaaaacctgggctttaaagggttgccgccctacaaatttttatgcataaagggtaaacttttcccagggcaaaaaaaacctttttcccctgtttaaaggggtcctctcatcaaaagggtgccgggcaaattttccgttaagaataaaaaaaatttgggaactaagcttttgaccgggtgttacaattcccctcccccaaattttttccttggggccccacaaaaaaaaaattcagccctggttttaaattaaacctttggtggtggggcaggg

SEQ ID NO: 176157 - DNA, 263 bp, Zea mays
  Clone ID: MRT4577_9224C.1
gaatgtgcaagccctatcggaagggaagtattacatgtcctccggggagacaaaaagaaaaaaactttctgtttaggcgtctctgctgcctcctgttcttcaatggcttctttttaccttttgagggggttcatgatctggtacttattgcgcaacaaatcaataaatggtattcgcatgcgccagatgcacggcaagtgtactccatgataatgggccccaaaagggggagatgcacttctgctgatcgggtggcacccggc

SEQ ID NO: 176158 - DNA, 241 bp, Zea mays
  unsure (1)..(241): unsure at all n locations
  Clone ID: MRT4577_92250C.1
ggcggggtttttttttttttgttnaagcgtgaaacactattgtactgagnagacatgaatagtggagaaacagaattanaggagtggggtaaaattgataaaagagttgtggggnngtngtaccagtgtttttgtggtnggataagtagtgtgggggggggggggggtaananattnnaaggtggaagagttnatgggtgagggaggaagaantgggggtgggggttgagggggtgggttg

SEQ ID NO: 176159 - DNA, 855 bp, Zea mays
  Clone ID: MRT4577_92251C.1
gccggccacctcgaggccggccgggccggggtatccaccatcatcgtctccaacttgcctctcgtgctccggctccggccatgccgcctcccaataaccgtctctgcgtagcactggctattgcgctcgtcgtcttctcttcgctgcacactccagctgctacttctgctgttgacggcgacactcttgcggcaggccaggcgctcgccgccggtgacaagctcgtctcccgcaacggcaagttcgcgctaggcttcttccagttccggcaaaacctgccaggcggcggcggcaccggtacgtccgcagccgtcgtcgtcccttcccccggctggtacctcggcgtatggttcaacaagatcccggtctgcactccggtctggatcgccaaccgagacaggcccatcaccgagtccgagctcaaggtagcccagctcagagtcgcatcgacagacggcaacaacaagctgctcgtcgtcgtcaccagtaacactaacaccagcgccgacaattccatcataatcgtcgccaacaccaccacgaacggtagcagcgtccatgtcgtgctcacggacaccggcaaccttgtcctcctgccgcaaactgaagccctactatcctctgcttcagcgcccgccgccagctcctcctcctcctcctcctcctcctccctgtggcaaagcttcgactacccgaccgacgtcgggctccccggcgccaagatcggctggaccaaactcgccggtggccgctacttcagccgccggttcatctcgaagaagagcctggtggacccgagccccggctcctactccatcagcatcgacaccaacggattcatgcagctgactcgca

SEQ ID NO: 176160 - DNA, 338 bp, Zea mays
  Clone ID: MRT4577_92252C.1
cccgggggggggtttttttgaagcccccttgcggaggcattcttatagcacatttgactgacacagcctctcaactagtacacgcgggcttaggcgggccgtgtacacgccaggcgtggtttttttttttcttcacacgtacccaggtggggggggggggggggagccatggccgccgtccgcgcatgcggctccccctcggtattcccacgtctcccttcgagggagcaggcgctcttggcggctgggtccctggcgactggcgagtgccgctcccggcggcccgtacgtccgcggctggcgttcactacccttctgtgtgtagctgtgtgccgcgc

SEQ ID NO: 176161 - DNA, 414 bp, Zea mays
  Clone ID: MRT4577_92253C.1
tctcgctcctgctatccctcctggccgttgccgcttacggccgtctcatatccaacgggggcgggttcgatcagctcctttcagtgatcctcctctcacggtcctttccggccgcggaggctggcaacaaggccctggagaagtgcgaacattcctacgggttgcttccctgcacataccagcgtgctaataaaccactacactcgcgctgacatacggatacctcatgtacaatgcggacacctacctgtcatccgtgagcgagctgctccttgagatcatcttgccccgcctagtaggcagtctgctccttcacattctacacgcccttcccgacgcgctcctagtgctcacatatggcctgttcgggagtaaagacgaagcacacagtcatgtactgatctgaatgggact

SEQ ID NO: 176162 - DNA, 184 bp, Zea mays
  unsure (1)..(184): unsure at all n locations
  Clone ID: MRT4577_92254C.1
agcgactggacgctcgcgaacgcgcactgcagcgtcgtgttcaggagcttagcgactggacgctcgcgaacgcgcactgcagcgtcgtgttcaggagcttatatcacgaccgacgttgtcntcaggaagatccccagagcccactccctgctggaatggtggacctgcgcggcggccgcgctcg

SEQ ID NO: 176163 - DNA, 218 bp, Zea mays
  unsure (1)..(218): unsure at all n locations
  Clone ID: MRT4577_92255C.1
gagtggctaacagactccatgatcagagtccttatgattcctccacttcaaaactgtccctcaaggagttgaaaaacatatttttccttcgcactatacagcgggttaaccacgttatnatacgcactggctgagaactcataacatagctgacgggtgaaacatggatcacttcacgagagctgggagactgtgctaattacagatgactaactgca

SEQ ID NO: 176164 - DNA, 278 bp, Zea mays
  Clone ID: MRT4577_92256C.1
catgttttatcttttttggtgcgatcggaggtacatagagcggtgagaggacaatggcacagctggcaagactgcgaagtgattgagctgttccgacagtagaccgagcgcctaatggctgaggccccggagctgaacgctaccaccttacaactccatggggtgctgtgccagaacatggatacataagcaccagccttggaaagagccagaacggtgtggatacaaggagactgagggccactgcagtatcgacgaggattatgcttggaggctgc

SEQ ID NO: 176165 - DNA, 284 bp, Zea mays
  unsure (1)..(284): unsure at all n locations
  Clone ID: MRT4577_92257C.1
ccacaacccccgagcncagcnaagcnccactccagcnccaancgcagncgcgaccagagggcgagagcnagcnagagggccgcgaaaaagccgancaanaggaccgcccnggggagccaccaggaggcgnaccacccgggcgcccncaaggcggcgnncgcngagnacaacaccacccncagcnncgacnacgccggccagggcnccggcagggccancagcaagcngaccggcggcggcccgacgaccccggcgggccggaacgcggcggcgagggcgcacgc

SEQ ID NO: 176166 - DNA, 1589 bp, Zea mays
  Clone ID: MRT4577_92258C.1
cattgggtacctcgaggccggcggccgggccgattggctctctcgaagccggaagggaggatgaaatggctgcgccccagcacgtccgcgccgctcccctcgcacgcgcgctccgcgctaccgccaccgccaccgccaccgccaccgcctccgtccccgtacccgttcccgtccccgccggcatcaagtctcaggggacttcccgccgcgcactgctcggcctatcggagcctcagctccgccagcttgccatcgatctcggccagcaaagctaccggggcaagcagctgcacgacctcctctacaaatcaagagccaagcaaatccaagaattcaaccacgtgcccaaggcgttccgggaggcgttgcttggcgctgggtggagtgttggccggtcgccagtgcaccacgccgtcacagcctcggatggcactaccaagatacttctcaagttggaggataaccggttgatcgagacagtggggattcctgtcgatgatgacaacaaaggctcttctaggctcactgcctgtgtttcatcacaggtcggctgcccccttcgttgctcattttgtgccacggggaagggagggtttgcaaggaaccttcaaccacatgagattgttgaacaggtgttggccatcgaggagacgttcaaacacagggtgacaaatgttgtgttcatggggatgggtgagcccatgatgaacctcaagtcagttctagaagcacaccaatgcttcaataaggaactaaaaattgggcaaaggatgatgacaatatctacagttggtgttccaaatacaataaaaatgctagcatctcacaagcttcagtcaacgctggcagtcagtctgcatgccccaaatcagaagctgcgggagacgattgttcctagcgccaagtcttaccccttgggagcactaatggatgactgcaagagttacttccttgaaactgggcgcagggtatccttcgagtacactctgctagctgggattaacgatgaaaaggagcatgccgaagagctagcagaactacttcgtatgtgtggaggtggttaccatgtgaacctgattccctataacccaattgaaggctccgagtacaagagaccttacagaaaagtggtccaagcctttgttgatgctttagaagcacgcaagataaccgttagcgttcgacggacccgtgggcttgacgctaacgcagcctgtgggcagctgaggaatgagtttcagaagaatccactacttgagattgaaccgtcaccctccacagagcggaccctcgtagctgcttaattgaaacacctatcaggttgatgcagcatgttcaagcatacggaatcgtcatttaatttatggggacattaggtgttgtaaagtgacagcaagttatgcataacgctagagaattttggaacgttctgtccgtgcccatctgatgtcatgagtggcaattacggaattaccacacttgtctcagatattataaacccatctttgttacagaaagtcaccagaaatgaactcctactgtccatgatctgttgcattcacaacaaaaaaaaaaaaaaaaaagcggcc

SEQ ID NO: 176167 - DNA, 408 bp, Zea mays
  unsure (1)..(408): unsure at all n locations
  Clone ID: MRT4577_92259C.1
tttttntttattattttttttttttttttttttttttggggtggggttttttttttttttttttttttctttttctcaagttggcccagttttaaatggggggaaaaatttatttaaaaaaaaatttttttttctaaactgggaacaacaacaggaaaacctttttgtcccaaaaagggggggggaaacatttttttcctaaaacggggaaaaaaaaaaaatagggggggcaaaacatttttgttttaaaaaaaataaaggattttaccccacccggtctgggaaaattggaatataaaacctccccaaaggggcagggggttgggccaacacaaatttttctattaaatccggaaggcctgccaatgtatatttggagctcttccaaaggagcccccttgggggtat

SEQ ID NO: 176168 - DNA, 1355 bp, Zea mays
  Clone ID: MRT4577_9225C.1
acactcacacagccatctctcccagtgtcccagctcagcttagcaatccgtctctctatctacaggcgggggaattaatagatggagggcaaggaggaggacgttcgcctgggcgccaaccgctactcggagcgccagccaatcggcacggcggcgcagggcacggaggagaaggactacaaggagcctccgccggcgccgctgttcgaggcggaggagctgacgtcgtggtccttctaccgggccgggatcgccgagttcgtggccaccttcctgttcctgtacatcagcatcctgactgtgatgggcgtgagcaagtcgtccagcaagtgcgccaccgtgggcatccagggcatcgcgtggtccttcggcggcatgatcttcgcgctggtgtactgcacggcgggcatctccggcggccacatcaacccggccgtcaccttcggcctcttcctggcgcggaagctgtcgctcacgcgcgcgctcttctacatggtcatgcagtgcctgggcgccatctgcggcgccggcgtcgtcaagggcttccaggagggcctctacatgggcgccggcggcggcgccaacgccgtcaaccccgggtacaccaagggcgacgggctcggggcggagatcgtcggcaccttcgtgctcgtctacaccgtcttctccgccaccgacgccaagcgcagcgcccgcgactcccacgtgcccatcctcgcgccgctccccataggcttcgccgtcttcctcgtgcacctggcgaccatccccatcaccggcaccggcatcaaccccgcgcgcagcctcggcgccgccatcgtctacaacaggtcccacgcatggaacgaccactggatcttctgggttggccccttcatcggtgctgctcttgccgccatctaccacgtggtcatcatcagggccctccctttcaagagccgcgactgattatacgtacattgtttattaccaacagcaacccaaaatcgatcaaacagcaaccatgcagcatacggatcatccttatatattaagctatatatgtatatccagcatgtcttgttaattactagtatatactagtaagtggtgcgtgctcgctcttccatcgctgtcgtcgtctcatctgctattgttcgtcatatatatatgtccatgtgagctagctagtgtatcacgcgcggaggccggttcagctagccatcagtctgcaatataatgcacttgtgacttctctgtttagttctctctcgcttgggttttgctacggtgaagtaaactaagcatgcatatgtgtaaaaattcaaattcaagtgtatgcatgcatgcatgccaataatgaaagttaagaagaa

SEQ ID NO: 176169 - DNA, 373 bp, Zea mays
  Clone ID: MRT4577_92260C.1
ttaataattttttttttttttttttttttttggggtgtttttttttttttttttggtgggtggagccaaaaaaagctgtttttttttaatgacggaaaaaactgccagggtttcaggtcctgggctggcaaggttaaaaccaaccaagaaaacattggaccccacagagactggactttaagctaattagttggggggctggcagggagcacagaacaaatctggacattcgttaagggttggatcattgcacaatgttaccacaacaacaactgggcatggggggggacatccgggttgtttaccaaatgcaggtgcatgaaatggggcgcgctgaatgacatggtcacacgctcagggtctttcacatgtg

SEQ ID NO: 176170 - DNA, 323 bp, Zea mays
  Clone ID: MRT4577_92261C.1
tattcggcacgagggccagccaggtgagccgaggcaggggggacgcgccactggccatggagcccgggctgagcatcgagtccggttctgccatccgcgtcgcggtgctccccgtgggcggcccgattccgccgccgcgcctgcgcgagtacgcggccctggtggcgcgccacgcgcgcatcgacctcgcctcgctccgcacctactacgcggagcaccagaagagccccttccagcaccagccctgggagaccggatgcctccgcctcaagttcgtgctcggcggctgcgtgccttgaccctgggaggacttgcagggctcg

SEQ ID NO: 176171 - DNA, 326 bp, Zea mays
  Clone ID: MRT4577_92262C.1
cccttcgggcagaatgcttgttctcggcacactatctagaacgccccaaccattcatggcgcaagcacggggtcttcttgttctcaccttctgctccacctcggccccgggctatcggtggcctcatcctgttgagaagacaagaaaatctagtgccttgacaacccacctgacctgtacatccaaagccgtcatctgttgcatgaactcgataggcggcacgaactccgtggtcgcctgaatgcctaccatagcagttccactagatcgaacctggccgttgactctcgactacgtacggtttagggttcaaggctgcatttctc

SEQ ID NO: 176172 - DNA, 414 bp, Zea mays
  Clone ID: MRT4577_92263C.1
tgacaggtatccaataaaaacgatgaccttaatcgaaaattttgctgatacgctgatgcaggacttagggtctactattgctatcgatgtagacaacggattgcaaatgggaaaaatggtataaaaacgctggatatttttttttgcctaaactacagctgtgctacagcaaattttgcttaaaagcagaaaaagtgatctatggttttgctgacaccaagctgggaaataggaagactgaatcgacctcttaagcggggaatgtatccttttttgctgccacatataaaatgctacccatgcatacctgggcaccttataacttatgtttggggatttgctacaaagatggtttcaatatataggggtactagaatgtctgtggaaaactaccgtataacgcacatttgagtg

SEQ ID NO: 176173 - DNA, 322 bp, Zea mays
  Clone ID: MRT4577_92264C.1
tgggagcaagcccgccaggttttactgacaaacatacagcaagccggcttctgagaaactgaactatattacacacaagtaaatggtgctactttgctatctgagaaactgaaaaactgaactgtattacacacaagtaaactgaactgagaaactgaactgtattacacagcaagccaacttcaggacaggaggaccaccccagaattcgctctagcaggtgctgctgctttgctatctggaaactgtaaatggcttcttattatctatcggtagtgaactctaaaaaaaaaaaaaacagtgttgagataatattatatat

SEQ ID NO: 176174 - DNA, 729 bp, Zea mays
  Clone ID: MRT4577_92265C.1
gggcagacgcacccaccatggctggcaatgttcggcagcccattgatgtagcctccttggagcgctacatcgaggctcatgttcctgaaataaggttcccttggacgtaaagcagtttggctatggacaatcgaatccgacataccagttgacggataagaccggaaagaagtatgtgctgaggaagaagcctccgggccagctgctgtcaaagactgcacacaaagtcgatcgtgaataccgcatcatccatgcactggagaacacagatgtccctgttccacgagcactatgtctctgtcaagacgaaaaggtcatcggcaccgacttctacatcatggagtttctcgatggccgcatcttcgaagaccccgtccttcctgacgtaaccccagaggaccgaacaaaaatgtggcactccgcaatcaccaccctcgcaaaattccaccgcgtatccccctcctccgtaaacctcgcctcctacggcaaacactcgggcttctatacccgccaaatcgcaaccttcaacacaatctcgcaatcccaagcctcagccaaagacaaagaaaccggcgaacccgtcggcaaaatcccgcatcaagacgacatggtcaccttcttcagcgaccaccgcacccaaccaaaggaccgcgcaaccttcgtccacggcgactacaaaatcgacaacgtcgtcttccacaaaaccgaaccccgcgtcatcggcatcct

SEQ ID NO: 176175 - DNA, 2292 bp, Zea mays
  Clone ID: MRT4577_92266C.1
attcctagtggatgtttctagagccgccgcgcaccctccagttcgtctcgctctcgctgctctgtctctaaaatccacccgtcccccacctcctcgccgcctcgcatcctttccccctccgcaagaaagaaagcgaagcaactctccgccgcctccgtttctccacagcccacaccacccaaacctctcgccgacaacagcctcggtccccgcgccaccatccgcaatcatgtaccgcgcggccgctagcctcgcctccaaggcgcggcaagccgggagcagctccgccgctcgccaggttggaagcaggcttgcctggagcaggaactatgctgccaaggacatcaagtttggtgttgaggcccgtgctctgatgttgaggggtgttgaggagttggcagacgctgtcaaagtgacaatgggtcctaaggggcgcaatgtggttattgagcaaagcttcggtgcaccgaaagtcacaaaggatggtgtgactgttgcgaagagcattgaatttaaggatagagtaaagaatgttggtgcgagccttgtgaaacaggttgctaatgcaactaatgacactgctggtgatggtaccacatgtgctactgttttgacaaaagcaatatttactgaggggtgcaaatctgttgcggctggaatgaatgcaatggatttaaggcgtggaatctcaatggctgttgatgctgttgtgaccaatctgaagggcatggccagaatgattagcacttcagaagaaattgcacaggtgggtacaatatcagcaaatggagaaagggaaattggtgagcttattgccaaggctatggagaaggttggcaaagagggtgtgatcactattgcggatggcaacaccctttataatgagcttgaagttgtggagggtatgaaacttgacagaggttacatctctccgtacttcattaccaactcaaaagcccagaaatgtgaactggaagacccattgatcttaattcatgacaagaaagtgacaaatatgcatgctgtggttaaggttttagaaatggctctaaagaaacaaaggcctctactgattgttgcagaagatgtggaaagtgaagcattaggtactctgattattaacaagcttcgtgcaggcatcaaggtctgtgctgtcaaagctcctggttttggggaaaacaggaaggcaaacttacaggacctcgctatccttaccggaggagaggtaataactgaagagctaggaatgaaccttgagaatgttgagcctcacatgctgggttcatgcaaaaaggtgactgtctctaaggatgacactgttattcttgatggcgctggagacaaaaagtctattgaagagagggcagaccagattagatcagcaattgagaacagcacttcagattatgacaaggaaaagctccaggaacggttggcaaagctctctggaggtgttgctgttctgaagattggaggagccagcgaagcagaagttggtgagaagaaggatagagtgacagatgcactgaatgctactaaagctgctgttgaagagggcattgtaccaggtggtggtgttgctcttctctatgcatcgaaggagctcgataagttgcagacagcaaattttgatcagaagattggtgtgcaaatcattcagaatgctttgaagacacctgtacacaccattgcctccaatgctggggtggagggagcagtagttgtgggcaagcttttggagcaaggaaacactgaccttggttatgatgctgctaaagacgaatacgttgacatggtgaaggctggtatcattgatccgctaaaggtcatcagaactgcattggtggatgctgctagtgtgtcgtccctgatgaccaccacggaatccataattgtagagatccccaaggaagaggcaccggctccagcaatgggtggcatgggtggaatggattactaagtgtcaagcacacccacgatacaacaacatcaaagcagagatgacgaggtggttgtcaggaggatacaattttgaggctgcggacgtaggacctcaatatctccaagcaatagtggggggataataaacatgagcagtagttgtttgagatctgaagctgtagatcaagattggattctgacaccttgtgctgaaccaagtgtagtctgattattacacattttttggctgagtaaaatcggattgccgttctgttttgccaaatttgccacgactggtgcttgtggggcttgctttgcttttgataatcatagctttctgcattctgatgt

SEQ ID NO: 176176 - DNA, 497 bp, Zea mays
  Clone ID: MRT4577_92267C.1
aaacagaacggcaatccgattttactcagccaaaaaatgtgtaataatcagactacagttggttcagcacaaggtgtcagaatccaatcttgatctacagcttcagatctcaaataactactgctcatgtttattatcccccaactgcttggagatattgagaggtcctacgtccgcagcctcaaaattgtatcctcctgataaccacctcgtcatcgaacacagaacagtaaagatgaacttgcaccgccaaagaaaaatctctgctttaatgttgttgtatcgtggggtgtgcttgacttagtaatccattccacccatgccacccattgctggagccggtgcctcttcttggggatctctacaattatggattccgtggtggtcatcaaggacgacacactagcagcatccaccaatgcagttctgatgacctttagcggatcaatgataccagccttcaccatgtcaacgtattcgtctttagcagcatcata

SEQ ID NO: 176177 - DNA, 464 bp, Zea mays
  Clone ID: MRT4577_92268C.1
ccccaccccaaaaacctgggccaacccaaatttttccccaaaccaaaccccggcgggggaaaaccgggggggggggaccaaagcccccaaggccgggggccctcacagggaaaacatccccaattccccaaggccccacctttgggccccgggaaaaaaccccccccggtccccaaacacatcccatttttcccttcgggggaaacaaggggcccttgggggaaggtttcggggacccaaagacccggtctttttggaaaaagagggggcccaaaatttcccttcgggcccaagggggaaggttgggttaaaggggggcccacctggggggggggaaagcccaacccaaggcccggttaagggctaaaacgggggggaaaaagggccccggcccctaaaaagggggggggaacccttaaaaaattaaccccctggaaaggggggggcccgggggccccctttgg

SEQ ID NO: 176178 - DNA, 2268 bp, Zea mays
  Clone ID: MRT4577_92269C.1
cgcaccctccagttcgtctcccccagctctgtctctaaaatccactcgtcctccacctcctcggcgcctcgcatcctttccccctccgcaagaaagaagcgaagcaactctccgccgtctccgtttttctccacaccacccaaagctctctccgaccacagcctcgcccccagcgcctccttccgcagtcatgtaccgcgcggccgctagcctcgcctccaaggcgcggcaagccgggaacagcctcgccgcccgccaggttggaagcaggcttgcctggagcaggaactatgctgcgaaggacatcaagtttggtgttgaggcccgtgctctgatgttgaggggtgttgaggagttggcagatgctgtcaaagtgacaatgggacctaagggccgcaatgtggttattgagcaaagctttggtgcaccgaaagtcacaaaggatggtgtgactgtagcaaagagcattgaatttaaggatagagtaaagaatgttggtgcaagccttgtgaaacaggttgctaatgcaactaatgacactgctggcgatggtaccacatgtgccactgttttgacaaaagcaatatttactgaggggtgcaaatctgttgcggctggaatgaatgcgatggatttaaggcgcggaatctcaatggctgttgacgctgttgtgaccaatctgaaaggcatggccagaatgatcagcacttcagaagaaattgcacaggtgggtacaatatcagcaaatggggaaagggaaattggtgagcttattgccaaggctatggagaaggttggcaaagagggtgtcatcactattgcggacggtaacaccctttataatgagcttgaagttgtggagggtatgaaactagacagaggttacatctctccgtacttcattaccaactcaaaaacccagaaatgtgaattggaagacccattgatcttaattcatgacaagaaggttacgaacatgcatgctgtggttaaggttttagaaatggctctgaagaaacaaaagcctctactgattgttgcagaagatgtggaaagtgaagcattgggcactttgattattaacaagcttcgtgcaggcatcaaggtctgtgctgtcaaagctcctggttttggggaaaacaggaaggcaaacttacaggaccttgcaatccttactggaggagaggtaataactgaagaactaggaatgaaccttgagaattttgagcctcacatgctgggtacatgcaaaaaggtgaccgtctctaaggatgacactgttattcttgatggagccggagacaagaagtccattgaagagagggcagagcagattagatcagcaattgagaatagcacttcagattatgataaggaaaagctccaggagcggttggcaaagctctctggaggtgttgctgttctgaagattggaggagccagcgaagcagaagttggtgagaagaaggatagagtgacagatgcactgaatgctactaaagctgccgttgaagagggtattgtaccaggtggtggtgttgctcttctctatgcatcgaaggagcttgataaattgcagacagcgaacttcgatcagaagattggtgtgcaaatcattcagaatgctttgaagacacctgtacacacaattgcctccaatgctggggtggagggagcagtagttgtaggaaagcttttggagcaagaaaatactgacctgggttatgatgctgctaaaggtgaatatgttgacatggtgaagaccggtatcattgacccgctaaaggttatcagaactgctttggtggatgctgctagtgtgtcgtccctgatgacaaccacggaatccataattgtagagattcccaaggaagaggcaccggctccagcaatgggtggcggcatgggtggcatggattactaatgcatcacacccacatacacatcaatgcaggttttttttagcggtgaagttcatcttcactgtttagcggtgcaagttcatctctactgtattttgttcgatgatgaggtggttgtcaggcggatacagttttgagtctgcggacgtaggacctcacaatagttccaaacggaatagtgtgagaataataaatatgaacagtagttctttgagatatgaagttgtagatcaagattggcttccgggcattttgtgtcgaaccaactgtattctgatcgttacattttttggctggggtaaaatcggattgccgttccgtttaaaaaaaaaaaaatttgctcgaa

SEQ ID NO: 176179 - DNA, 396 bp, Zea mays
  Clone ID: MRT4577_9226C.1
agggacccaattcacacaaagacattgggttttttttaggaattatatcacttaaaatatccaacatcggtggataggggcaacaagcactggcgaatgaaaaggccttggatgctcatgagcaaaagcatggtcacactcacaacccatttttactggttgagaagagacaccatactacctaaggtttatgatactgggaaacagtagggttttgggggcatgaagggctcgcttaacttggctcgggcttttttagggggttgcagttgagcaacttttcaatgggggcaacatggggcatgggcattcccctggagcagtgggggaacaattgcaaagcatccagagcatccccttttgagtagtcagcctggaggagggcaagggaaacat

SEQ ID NO: 176180 - DNA, 222 bp, Zea mays
  Clone ID: MRT4577_92270C.1
ggaacttaaactcagtgcggtgggacaaatacgaaagtgtgtgtcccagagctgccagtcacaggagatgtgttccacctgtgagaaaagggcccacactgtcggcaggctggaaaaaaaggacccagaggctggggagtcctccgggggcctactcgggaggaagggatgcacacacacagaacatggcgcactgaagatctctctgagtgatcactgcac

SEQ ID NO: 176181 - DNA, 705 bp, Zea mays
  Clone ID: MRT4577_92271C.1
taggtgactataaagatatgacgcctgccgcgtacgtaagctggatccttaagcggcgccttattcttcgtgtgtgtcttgcggtgtttttcttttttttttgcttcaagcaactctttattatttttaggacttatattacatcactgcaatcttacaaacataatttttttttaaaaaaaaaatcaatcagagcgaaaacaaatggaagcaatctgaatgcttcttattgggaattttgagctatacaaatatgtgaacctgtaaaaaaaatatagtaaatgaaggaatcaaatgccgttttcgtcgtcgacgtctattcgctgagttttactgaattcgctgaaacttgtccctgttcacgcgccccctgagccgtacttcttgccgaagaaaatgagctgcagctggtcgtagccggcaagcgcgccagcgccggcgatggcgcgtaggacgttggccccggcgcctttgaagagcgacttggggccctcgttcctgacgatctgggcgaaggcgtccatggagctcttgtacttgacggcctcccccgaggtcatcatcatccttctccggatagtgtccagcgggtaagaggccagactggcgccattggtgatcatccagccgagcgccaggctcgcgaagaagttgtcctgcaacttctccgtcagcagcaccggcttcaaggagtcgtacatgccg

SEQ ID NO: 176182 - DNA, 323 bp, Zea mays
  Clone ID: MRT4577_92272C.1
ttgttttttgttgtgttgacaacaccccactgtcacagaaatttcaatcgcctgctgggccatcttgcgttttcatcatgaacaacaacaaagcttacagtcccaagctagttggaacaggctagatatctcttgcagattgagccaaaggaatacatttttttggggggggttgcaaatcccgaagtactgctctgttctaatgcaaaagcctcagtgttcgccgcctccttgttgcaaactgaccaatacacagtctgccccagagggacccttaaccttaacggatgcttgttcgcccttccccacaacaattccttctt

SEQ ID NO: 176183 - DNA, 356 bp, Zea mays
  unsure (1)..(356): unsure at all n locations
  Clone ID: MRT4577_92273C.1
aaaccacatacgcgtggggggggaggaagagagagagaaagggagatggtggggctgcagtacgatcttgttgggaacccattgggcgcggtgcgcgccacctttgtgaggacggtcgtcgccgttgcagtgcagtttggaggagctgaccctgttgcggttgttggggggggaagactggggcgccggtgaccttttncgttcctttctttttgagcaagacggttttggcaaggttccggtgttggatttgtgaaattttggattgattaaacctgaaaccttggttcggttttggggaatggttgaggatatgcttgggaatgagttctacattggtggttttaaggatgggt

SEQ ID NO: 176184 - DNA, 327 bp, Zea mays
  unsure (1)..(327): unsure at all n locations
  Clone ID: MRT4577_92274C.1
ttttnttttttttttttttttttttttgggagggtaaaaaaaacgcccaaagccaccgggacgttgtaaccggttaacggaacaactggcgcagtaccaaacgtgaaacatttgcgtgttcatggactcacttgggggccaacaaccccccaccatatatggccggacttgaataatattggaggaatgctcaggctgccaaaaattacaccaattgttatccctaccgtttctttataccacacctgatttgattttcagcttaccctggttatgctaccttacttaccaaaccttatataagggtgtatatatatatgcatgcct

SEQ ID NO: 176185 - DNA, 283 bp, Zea mays
  Clone ID: MRT4577_92275C.1
gagaggagcagcagacagaagaaggggaggcgcaacggtgtacacgcacgtacggtagacagaagagagatggcgatgcagctggcggcggcggcggcagtggcgctggtcgcggatatgggcgtgctggcgccccgagcggcagagcacacgctcaactgcgcggagaagcttatcccatgatctccgtatatgaacacgatagagaacccgacggatacctgctgcagaccgttcaaggacgctgcccagaacgaccgtcagtgcctttgctacctttacg

SEQ ID NO: 176186 - DNA, 215 bp, Zea mays
  Clone ID: MRT4577_92276C.1
ccgggccgacccacgcgtacgcttggtcctactactgattcttttacaccatgttttcccctacgaaatcacatcgaagaggagacatttaaaagagaggaagggctcttcaatatgcactttacatactactctcttatacaccccagaaaataaaagaaccacttcacaatctcataggcgtcaaagctctgctagatcttactcaaacaaca

SEQ ID NO: 176187 - DNA, 1716 bp, Zea mays
  unsure (1)..(1716): unsure at all n locations
  Clone ID: MRT4577_92277C.1
caccagggcgatggggatagggggggtttcattaatgggagctcactactgaatgtttgaatcacagttttgttccccgtgtttaacatgtgctgtggattactctgttttttgtgtggagatgagtttacgttgttgatcacatgaaagaagttttttttcacttaggagggggaggtgggtgttacagagcaaacaccaaacaggttctctacgggacccttatattttgtgtttaatgtgggtattatgacgacttcacatcaagcactatcctgaatcctgaatgttcctgaaatgatttgttgagtggggtacagaccaatgtgccttgttagtagaaacaaaatgactaccggagatgatctattatttctgtggctcgcaataaatatccttgaaatctggaatcactacaggatctgcaactatatctgcagcccatcatgctacagtgctctcttgcctgccgctacgagccaacgactcgaacgcatacactccaatggcagcgacggtgatggcctccatgagccccctcgcctccgccacccccggcgcgcgtcgcgctttccctgtacggctgctccaggcttctacactcgcgccgcgccggcgcgccttggccgtgagggcccagagcgacgacgccgagccaaaagaggaggtggcctcctcctcgccttctccgtccgccaccccggcgccaaagtccaaggcggcggcgacggcgagccccgggctgtgggacgcgctggcgttcagcggcccggctcccgagcgcatcaacggccggctcgccatggtgggcttcgtgtccgcgctcgccgtcgaggcgtcccgcggcgggggcctcctctcgcaggccggcagcgggtccgggctcgcctggttcgcggccacggctgccgtgctgtccgtggcgtcgctggtgccgctgctcaggggcgacagcgccgaggccaggagcggcgccgtcatgagcgccgacgccgagctctggaacggccgcttcgccatgctcggcctcgtcgcgctcgccttcactgagtacctcaccggcgcaccgttcatcaacgcgtagaggcggttcagtccaagccagtgcttatatattttggaagttggaactgtgtatgctagtcagctatagcggcaccatgcccgtagtaggagcctagctacagttggacgagctactttttattgggatttactagtcttgggccatttacttctcttcttattaaagtccactcataaatcagaaatccaattttatctgacgggaataagggcggaagacactagtcaaagttgtttaggctatccacactcgtacaaccctaaatttttactctaaaaataatattctatcctgatcagcgagattctttactctataccacaattctccgcactcatatttactctatatctaaccctatccctgggaacacactacacgtcctccacgtggtccaaccaggcgggcgcggcatcggntgccgtcctcgtgcacanggatagagcagcaccgtacgagcggtaagantggcgtacgccgcggtgcatgcatttccangcgtttcaattccgtgnaggtatgccttggntaaatttgggggcttccatganggtggggnnttacattaaatcngttaaggtttaaatgattaatggattnttaaaaaaaaagggggctaaggcaagttg

SEQ ID NO: 176188 - DNA, 531 bp, Zea mays
  Clone ID: MRT4577_92278C.1
gttctcttcacaaatgagtcagtaagtacaagatgattaagggagacaagtagaacaattcaaaatggagggatagagaagggtggagtcattagttcattacaatagggctatggctacttctgctactatacatgtgttaatgtatgatccttgtaggaagggcacttggttccagataccatgacccttgtggtatatcatgatctttgatgtcaacaatgacaaaagcaggaacacggtgggaaaagctgagcatttcagaccttggaatccaccttgtcaaacagaaatcctccactgctaccctatgaaaaaaggtaaagcaaccttttacccgagccaagctgcacacatttactccattttcatcagagtattccgagaggatctcaaccatgcgaggttcacatttgtcaatgtcagtggtattcaaggtgatcctccaattttttagcattgcccatatttcccccttttgggggaatatacggtaaaaagatctttttgcactccagtcacactctacag

SEQ ID NO: 176189 - DNA, 2151 bp, Zea mays
  Clone ID: MRT4577_92279C.1
ttgggtacctcgaggccggccgggattatgtgcctcctttccttactggcaacacaaatgaaacttcgtcccgcactctgagccttatcggaacagaatcttcaaatgcattcatgggaagcaaacccacaaattccaacacccctgcctctaccgccgctgcagcttcggccagcatttctcagcagcagcagcagcaccttcagatgcaagcgcaacaaaagcaccagcagcatcagcagctaattcagcatcaccatctgaatcggcccagatctgctgcaccaagtacacagaacagtgcaggtgggtaccaagaccgtataaacatggctaattttcagaatatgatgtacccatcaagtgctgcccaagggagagttcaatccccccagttgaaggcatcctcagggagagggacaccttcatctactgctacgactacccctgccgccacaccccctaatttgattatgatgaagaacagtagcctccaccagcaacaagcaaaagtccctatgcaggctctctacactcctggtcaccaatcacagacttccttaagttcatcaaaggtaggaccttctctaacaaacctttctaccggaggaggggatctatctcgatcttcaaacgcccctgttgcttctggttcaccatccaattcggtgtccaaaagtaccggtggcagcccacccgccacaggaaatgcaaagggtgttcagcagcctgtccaactgccatcaccacagcagcagtcagccaagaactccgcgtcgacgtctggctccaggactactcccacgaatcatttcagtatggccatgccatccatccttggccagcagcctaatgcatcgcctggttccaatcctgggagcaagcagcactcacatacgcagccagcatcgatgaaacagcagccattcccgcaaggccatttcttcatatccaacacctacgctcctccggctccgggagccggaggtgctgctgccctaggcctctaccagaagcgaccaggcgacaagacgcagcagcagcagcagcagcaggcatcgcaccagcagagcgccatgtcagctgccggcggcaataacgtgaaagcactccatccttcatccggcgggtttatgcatctcgcagcccagtctgcaggtggcatggcgcacacccacgtgtcggcggggcaactgactttcggaacaatgccgacgcctttaaaaccgtcaagcgaccagaagcctgctgccggaaaataaacagtccagacgaccatgcatcggagtggtaaacctgaactggtttttgcctgttcagcggaagcccaaatggcagaatcgcaacaacagtagcagcggcagctcaaaagaacccgcatggaagctcaaatggcccgcttggttgctggtgatgaggaaggaaggaggggtgccgtgcaccagttcgttccgagcaagaagcagatgtctcgttaacttaaaacagagtattcagattccggaatggttgatgggggagtggtacttcttttgtgtagttggggctggttatcctcccatggtgtaaaggccgcggaggaggaggtgcatagaatttgtctcttagcccgttttttattttatgcatggatggatggcccaaaagctggtttctccccctctctctttcttgtagctttgctgtttccgttttcccccctttctttcttttgggtggttctaagctttaactaactggaggaagaaagattcagttagaacgcagatcaggtgacttcgttatgctgtctgttgatacacactctgcttggattgttttggcagctagatctaggaggagcaaaatatctatcccaagtagaataggtaggatcttccggccatgattggtgggtgacatgcttctgggtttgttgttgtaagtagctttgggaggggggtgggggaaaggaaatgaatgaatgaattgaaagtgactgattatggaataaaaaaaaaaaaaaaaaaaaatttattaattatatttaaaaaaaaatatataatataatatatattatatttttttttaaatttataaataaatttaaggggcggcctttttaaaggaccaaaatttacttccccttccattgcaaagatatattttttt

SEQ ID NO: 176190 - DNA, 445 bp, Zea mays
  Clone ID: MRT4577_9227C.1
ctttctcgtgcacctggcgaccatccccatcaccggcaccggcatcaaccccgcgcgcagcctcggcgccgccatcgtctacaacaggtcccacgcatggaacgaccactggatcttctgggttggccccttcatcggtgctgctcttgccgccatctaccacgtggtcatcatcagggccctccccttcaagagccgtgactgattatacgtacattgtttattaccaacaccaaccatgcagcatacggatcatcgttatatattaagctatatatgcatgtcttgttaattactagtatgtgctagtaaagtggtgcgtgctcgctcttccatcgctgtcgtcgtctcatctgctattgttcgtcatatatatatgtccatgtgagctagctagtgtatcacgcgcggaggccggttcagctagccatcgcgcagtatgccc

SEQ ID NO: 176191 - DNA, 269 bp, Zea mays
  Clone ID: MRT4577_92280C.1
gcaaactgctacgaggaggtcaaggaccgctgcaccctggcagagaagctggggggcagtgccgtcatctccctggagggcaagcctttgtgagccccttctggccccctgcctggagcatctggcagccccacacctgcccttgggggttgcaggctgcccccttcctgccagaccggaagggctggggggatcccagcagggggagggcaatcccttcaccccagttgccaaacagaccccccaccccctggattttacttctccct

SEQ ID NO: 176192 - DNA, 175 bp, Zea mays
  Clone ID: MRT4577_92281C.1
cccaaatgcaaattaaaagtggtggaaccctgttgggactcgctgtcctaagcgggggcacctataaagtggcgcattacaagggcgctcatcagctggggctttcagctcatggtcctgaaaggtctgctccattcaatgggggcggccgaacaacaggtactaagcttaaaaa

SEQ ID NO: 176193 - DNA, 455 bp, Zea mays
  Clone ID: MRT4577_92282C.1
aaaaaggaaattccccataatagttttgaatttttccataaacagcaccattttcaaagggtggcaaatcacacaggggttttcgttttgctgcacaggagcccccaaacacccacgcccgagcatggccagccagccagccagatacggtttttcgtagcgtttgcccagatccagtgacacaagcaaaaccacacaacaccatgggtgcttaacaattcacaacacatttcacatgtgcatttgcacccaaaggtgcaaacggtttttttacacttgggcctaagtttaataatccacgttctccttggaaatctcctaaagcaacatgcccttggactccggcacaaacaccgacttgagcatgcccagaaagttggttccggcaagcacaaaaagcgtgttgcggatgccaatccccggcaagtagccatggtcgggctttttggggtcct

SEQ ID NO: 176194 - DNA, 745 bp, Zea mays
  Clone ID: MRT4577_92283C.1
ccggccgggaccgcaaaaaatgaccgtctcaagctccccttccacgctgaccacattggttctctgatccgaccagaggcgctatcgcgcactcaggagcaggccgatgctggccaagtctctgctgagcagcccgtcgccactcaaaaggctgccattgccgacatcgtcaagaagcagcaagagcatggcgttcgcgctatttcctccggcgagtttgatcgcaagtactacttcggcggctttttcgagcgtctagggggtttcaaggaatatgagcctgtaccatgggacctcgtgcgcctctctgcgccgcccatcgctgccctcaagaaggctggcaagcagtaccccatggctgctatctgcgagtccaagattgagtacaagcaaagcccctaccttgagaactggaagatgctgcgcgagtgtgtccctcgcgagcagtgggccgagtgcaagttcaccatgccccctccttgctactttcacctgcgactcgcctctgggaagtgctacagccctgaggcttactccaacgacgaggacttctttgccgatctggccaaggcttaccgtcaggagttccagacactgtacgctgagggtgtgcgcaacatccagatcgacgaccccactctcgcctacttctgttccgatgagatgcttcaatctctgaggggattgagggtgttgacccctgacaagctggtcgacacttacctcaaggctcacaacgacgcta

SEQ ID NO: 176195 - DNA, 757 bp, Zea mays
  Clone ID: MRT4577_92284C.1
ctctcctactttagtaccctaggcgcttcacgaacgctatcgcctccgctccacgccccgccttcaggactactggaccttctgatactagatagacgcagaccgagaccttcaccttgcaagacgagatataccagctcctgctcagatcgcatcaacatcttctactcctacaaggacatgtgcctcggcatgttcatatcccactcctccgatgctgtgcacaagatgatgctggagatgctcacgctgaatgagcaagctagacgcacgatgccgagctcttcctccacatcatcgccgacaatgagcaccagacacctccaccatccctcgacagcgtcattgtcatgaccaagggcgagctcgtccacaacctcctcaccatcgccaggctctggatcaacgagtgcatgaaggccctcgccgcctgcgccgacgtgcccatgattgcgaagatcggtgcactattctactccggctagctcgtccgcgagaggatcgtcgtgaccaccaagcacaacgactaccacgaatacgcgtgggagtcgcacgacggtggctccttcaccgacaatcgcgatacgattggcgagcacgtcgatgggtgtaccaagatgaacctctacctcaaggacgacctcatggaataccttgaggagcgccgcatcaaggatctagttaacaatcactctgagtatatagggtaccccatctccctgtggactgacaatacacctacaagcaatttctgatg

SEQ ID NO: 176196 - DNA, 204 bp, Zea mays
  Clone ID: MRT4577_92285C.1
gcgcgacatcctctactactccggggtcgttgccaaggcctacagcagcctccaccgcagacgcccttcgtcacgcccccacggccgactatacaaccgcgtcgccgtgaaagagccgttcatgtactaccaccccaaccacacctacgcgtccaccacgggctacgccaactctggcggaggcacccgagacccctacatgct

SEQ ID NO: 176197 - DNA, 201 bp, Zea mays
  unsure (1)..(201): unsure at all n locations
  Clone ID: MRT4577_92286C.1
cggtggaggatacaaaacactcattccatatttataccgtggaaaactttctcttcatggtgcttatgcacaacatctggtggagtgtctttacttgcatcgtgcattcaatgatatccacgcttcatttaaatggctcaangcaaatggatcacccaacgtttgtcttactggctattgcattggaggggctttatcaat

SEQ ID NO: 176198 - DNA, 383 bp, Zea mays
  Clone ID: MRT4577_92287C.1
aatggagtttcaaatgtttttaataataaaacgctggtgcattggtaaattttgagggaggcgctagtttgtctctgataccttagtgtagagagataatcattcttgatgcttactagaataaatagttgagatataatcttctcttcagtgtcagatttttaactggacactccagaaatggtgggacagacccactatatgtagctggaaatgcagccgatcctgacactactttggttgtgtacatgggtttgtcaacacttgcatcacttgcaccaaagttaatgaagcacggcctgccaccagatacccctgctgttgcagtatagcgcgggactactcctcatcaactaatgttgtttgctttgtaaaggatcttg

SEQ ID NO: 176199 - DNA, 256 bp, Zea mays
  Clone ID: MRT4577_92288C.1
gcaagcgcctattattgccaaagccgccgagctgggatgttatatacttggaggtctaggacctcttataaaaacacatgctgacattgcgaccagactatgtaagatggcctcatcggtgaatttggttgaagagtatgtaaagagcttaaatatggaaaaggcggccaaaacagctatacgttttaaaagactctctgccgagtgacaagatgtatctaccgcctcatatataatgggattacacaagtgccaa

SEQ ID NO: 176200 - DNA, 169 bp, Zea mays
  Clone ID: MRT4577_92289C.1
aaaagttttgctcgtcgctgcaaacaaagacagggttattacagatatgtggctctggtctttgcacaaaacatagtgcacacactacctgccaactcaccattaaactaccatcaatccgggctcttcctatcctgagcaaacagaccagctcagttccgcttcaaac

SEQ ID NO: 176201 - DNA, 1562 bp, Zea mays
  Clone ID: MRT4577_9228C.1
aattaaagaaacaaaaattaaaccatatcatcatcatgcatccatccaccgccaatctaatctttgctaagtaggtttgcggcccgctataaaaagctccggcaagcccggcccggccgggacactcacacagccatctctcccagtgtcccagctcagcttagcaatccgtctctctatctacaggcgggggaattaatagatggagggcaaggaggaggacgttcgcctgggcgccaaccgctactcggagcgccagccaatcggcacggcggcgcagggcacggaggagaaggactacaaggagcctccgccggcgccgctgttcgaggcggaggagctgacgtcgtggtccttctaccgggccgggatcgccgagttcgtggccaccttcctgttcctgtacatcagcatcctgactgtgatgggcgtgagcaagtcgtccagcaagtgcgccaccgtgggcatccagggcatcgcgtggtccttcggcggcatgatcttcgcgctggtgtactgcacggcgggcatctccggcggccacatcaacccggccgtcaccttcggcctcttcctggcgcggaagctgtcgctcacgcgcgcgctcttctacatggtcatgcagtgcctgggcgccatctgcggcgccggcgtcgtcaagggcttccaggagggcctctacatgggcgccggcggcggcgccaacgccgtcaaccccgggtacaccaagggcgacgggctcggggcggagatcgtcggcaccttcgtgctcgtctacaccgtcttctccgccaccgacgccaagcgcagcgcccgcgactcccacgtgcccatcctcgcgccgctccccataggcttcgccgtcttcctcgtgcacctgcggaccaatccccatcaccggcaccggcatcaaccccgcgcgcagcctcggcgccgccatcgtctacaacaggtcccacgcatggaacgaccactggatcttctgggttggccccttcatcggtgctgctcttgccgccatctaccacgtggtcatcatcagggccctccccttcaagagccgtgactgattatacgtacattgtttattaccaacagcaaccatgcagcatacgaatcatcgttattaagctatatatgtataatatccagcatgtcttgttaattactagtatatgtgctagtaagtggtgcgtgctcgctcttccatatatatatgtccatgtgagctattgttcgtcgtctcatctgctattgttcgtcatatatatatgtccatgtgagctagctagtgtgtatcacgcgcggaggccagttcagctagccatcagtctgcaatgcactttgtgacttctctgtttagtcctctctcgcttgggttttggtacggtgaagtatataaactaagcatgcatatgtgtaaaaattcaaattcaagtgtatgcatgcatgccaataatgaaagttaagaagaagactccctgtttatgataaaaaaaaaaaaaaaaaagatgttgttgtaccgatttatttgatgtgtccaaacgttgtgactttggttc

SEQ ID NO: 176202 - DNA, 182 bp, Zea mays
  Clone ID: MRT4577_92290C.1
gaagcatgatgaagggagaaccaaatcatctgttctgagatcgatccagtgtacacatggggggtggggggttagcaggatgatcctgaccaatacgtgtggacacagcaatacggcaatcctgaatcaagagcaccacagacaccacatttaggaagaactgtaccatcattacacacata

SEQ ID NO: 176203 - DNA, 373 bp, Zea mays
  Clone ID: MRT4577_92291C.1
cgcggcataaccgggtggacccacgactccgccggtgatgctgggggacacacctgtagctcgtccggcgctggtagaccctccatgtcgcgcagagctcgttcatctgagaacagccccaggtgccctgcacctggaccggctcgacctgggaagccttctcgggcctctgggacttcctaaaacgaatccgagcgtccggcacattgatgtgcctggagacctggtactatcaggtcctggtgctcatcgccagcttgctccccaaccctgaactggcattggacgccctgtctgtatgcatgactgttaactagtaggtgctcatgatcgcagcagggtacaacgccgctgccatcgtgagagtgagcaa

SEQ ID NO: 176204 - DNA, 1106 bp, Zea mays
  Clone ID: MRT4577_92292C.1
ccgatctctctgatttatgacaggagccttttcccctgaaattacatgacatgtagaaacaggttgtagcgggtatttggttgtctatatattgtaaaacatttgattttgtctcttgcaccatttttatgggtgacataccattttcactaatgcatgatgtcttcgttttagtattttttttgtttaacttaacacgcattgtcaaatgttcagcacgaagaaaggggaaaaagaagaaggatcatttgaaggattcagctcgggatatggcattttcgtcgtcttgtttattgcctcaatgctatcttttgctatcagagggactctcgatgatgctagctgtcctcagaaacgaaagtaggtcattccaattaccaagtatcttcaacactgaacaagagagattcatgcagcactttgatcttcttctgaaagctcgagtccctgagcacatttccttctacagtttcaaggaatcatcttcccgggcaggcatgtcggatttggtgaagtacaacttcttcaaggaaattcagaagatagtgccctcactacggggcagctttgcaagtgaaccagaaaaactcgctgaggtccgtcggatagagcaggtggctgagcacaacaggatagccctaaatattatcagccaagttggagctggcgatccgtctctgagggtcacgcgtccgcggacgcgtgggcctcacttcgcagtggcagttgtgaagagatcatgattcaagtttggcatcgccaattctttacccttctcaatcttgatagtgatagcggatgattcttgttcacgtgttgctcacgtgtttattggttctccagagcgcaagcaacaccatgtgttttaggctgtacacaaacaccattagcaattttgtaggcaagataagaaaaaaaaaacatatgctggggaaaaaagtcctttcccctggcattattttgtaagcaaatttttttagctcactttgttatgcgaaacatgattatacagatgtgtaatttgagtcgtaattcgttactggtatgacaaggacgacaattttctttaaaaagaaaaaaaaaaagaaataaaaaaaaaaaaaaaa

SEQ ID NO: 176205 - DNA, 715 bp, Zea mays
  Clone ID: MRT4577_92293C.1
tattaaggacaagttttcaagtgttacctatgcagatctgtttcagcttgccagcgccatagctattgaggaaacaggtgtgccccaaaatccctatggtctatggaagtgttgacgttattgcccttgactatgcccgccaaacgggaggcttcctgcgtcagtgataatggttttttgactgttcttaactcatgccaattttggttgagtctaacttataattaagaacctagaactattgtgtatgaaagctgtggctgtcgaggcctagaacaatacttactcagaacctagaacaatacttaccatcgctcgagccggtcgaggcctagaacaatacttactcagaacctagaacaattttggctgtcgacgcacaagcggtggctgtggaggccgcggcagcgcagaaggccatcgctgggttgtggcggggcaggagagatgagtgggggagactgggagagtgatgagccttttctgtaattgagacagactccaccaagatttgggtccagagtttgtcttcacaatcaaacggtatcctcatgtattgcatcaggaggatccctgaaacttgattctttcctgtgtggccactaatggcatcctttatttgcatcaaggatttccctcaagatttatgcatgcatgtgtggcacaaatttctttgctctcctaagtgggattcgagaccgagccgacagcaacg

SEQ ID NO: 176206 - DNA, 963 bp, Zea mays
  unsure (1)..(963): unsure at all n locations
  Clone ID: MRT4577_92294C.1
ctcnacttcttttacactcgcgagcactctgtgtgtacatccttgtcttgttcttcgttattccccgtctttcttgtttccattccttctcaaatcacatcctgcgatccttgatgccttcgtcgagcattgatcatgttggtctactgcgttatgtactctgatgagcttattaagaatgctgtctacattggtacctttggtaagggtattcttgctgttgatgagttaactggtaccattggcaagctccttttcagtattaatgtttagatcgtgtatgagttccggttttcttttcttgagcttctgtttttgtgtcttgttgcttttcattacattatctgtgtgattctttttgaggatattttttatcatattattaatgatgttttgttttttgttttttgtttttattgattgtatgctgtttttttttttttttttttatgtttctatattgtgtcttttttttttatgtttgttttgcttctgatattggttatctttttctatttttttttttttttttttttgctgtttttttatttctattattgtcgttccttttttttatttttttttttttttttaattttttctttatatttccttttcttttttttttttttttttttttttatgttttttttttttttttttttttttatgttttttttttttttttttttttttttatttttttttttgccttttttttttttttttttttttttttttttttttgttcattttttttttttcttttttttatttgtttttttttttatctttttttttttttttttttatgtttttttttttttaattttttatttttttattttttttttttgatttttttaagttttatatttttttttttttttcttcttttcattttttctttccttttttatttgtatctttttttttttttttttttcttttgcttttttgttt

SEQ ID NO: 176207 - DNA, 763 bp, Zea mays
  unsure (1)..(763): unsure at all n locations
  Clone ID: MRT4577_92295C.1
gcacgagatgttcttgtaggttgaatagaagagtggaagcaccaagctgtaccaatggggcgtggaaaagtagagctgaagaagattgagaatccaacaaaccgccaagttaccttctccaagaggcggatggggttgttcaagaaggcaaatgagctagccattctttgtgatgcgcaaatcggagtcatcatattctctggcagtggcaggatgtacgagtactccagccctccatggagaatagcaagcgtctttgacaggtacctgaaagcccctagcacccgtttcgaggagatggacatccagcagaaaatcgtccaggagatgactaggatgaaggatgagaggaacagactgaggatgatcatggcgcagtacatggcggaggacctggcatcgttctccgcgcaggatctgagcaaccttgagcagcaaatcgagttctcgctgtacaaagttcgcctcaggaagcaagagctactcgaccagcagctgctcgagatccaccaaagggagatgcatatgccagcagagcagggcggctacctgtgcctcatgaacccggctgcggctattgctagcgggcagcaccagcaggctggcgagatggtgggaattaacccgaggccgttcccgtggtgggacgtgggagccagtggcagtggcagtggcagccagagccagcagcagctgctgcacggccgggacgccgcggagtcgtcgatgacggcgctcgggctgtcgncgcaactgcatgggt

SEQ ID NO: 176208 - DNA, 1401 bp, Zea mays
  Clone ID: MRT4577_92296C.1
gttaattttatttcatggccttggtgatttgaacacatgttcttgtaggttgaatagaagagaagagtagaagcaccaagttgtaccaatggggcgtggaaaagtagagctgaagaagattgagaatccaacaaaccgccaagttaccttctccaagaggcggatggggttgttcaagaaggcaaacgagctagccattctttgtgatgcgcaaatcagagtcatcatattctctggcagtggcaggatgtacgagtactccagccctccatggaggtgcgtgaagcattatttatttatttatttatgtatttatttctgaagcttgtttagtacagtaacatataaggtttagctttattctgctataaggtttaatgagttcaaaagattcatgagagcttcagaactgatttgcaattattcctgccaactacaatcttacaactacaatcttatgtttagtacagtaacatcagaagagacgatgattaggtgtgtggtataagaccggtatcatatattcttattgccagcggttaatagtttcaatagttattatttatgactgagcacccatgaggggttttacgacgtttttatatcgtgctatatatcactgctgcttctggttgcagaatagcaagcgtctttgataggtacctgaaagccctagcacccgttttgaggagatggacatccagcagaaaatcgtccaggagatgactaggatgaaggatgagaggaacaggctgaggatgatcatggcgcagtaaatggcggaggacctggcctcattctccgcgcaggatctgagcaaccttgagcagcagatcgagttctcgttgtacaaagtttgcctcaggaagtaagagctactcgaccagcagctgctcgagatccgccaaagggtacacaacattccaacctccgatccgtcgcttggtagcctgtacacatctctctttcaaaaggcccgagttgttgtgacacacaagagttctgtttcgtcctaaactttcgaaggagatgcacatgccagcagagcagggcggctacctgtgcctcatgaacctggctgcggctactgctagcgggcaacaccagcaggctggcgagatggtgggaattaacccgaggccgttcctgtggtgggacgtgggagccagtggcagtggcagccagagccagcagctgctgcacggccgggacgccgcggagtcgtcgatgacggcgctggggctatcaccgcagatgcataggtacagactccatccgcgacagcccaacctgcggcaggacaccgacgtccacggctggctatggtaagctgccgccgcctgtgcctggacactcatttgatgttgactgttgtggcagaggagtgcgttctcaaatctc

SEQ ID NO: 176209 - DNA, 202 bp, Zea mays
  Clone ID: MRT4577_92297C.1
gtgtctttgtgtttttaagtgctgaattctccgccgagagcatgcgtcgtctgtaacagattcatgacatggtccttgacagaaaaacaaaaagggccggtttcctcacagaagcaacccgccaacatgaatgcttaatttgggaacgacctgcatgttttccatgttggacacatacggagacatggtcttttattttttc

SEQ ID NO: 176210 - DNA, 395 bp, Zea mays
  Clone ID: MRT4577_92298C.1
gggaaaaacaaattttttgggcccccccaacccctggaaaacggggcccccggggaaggggtttttgggggaaaaaaaacggggacagatttcctttgggaaacggcccaaaattttaaggggccaaaaaacaacaggggcttttttttccccattttttggggggggcaaaaacttccttttccaagataaaaacccggcagccaggattttaaactttgtttttaaattggataagggctaaaaaaaaaagggggttcttacaggccccaatttaaaagggaaaagggcaaaaacttagggtcctttcccaaaaagattttaaaggaacccaaccttttcaaaaaaaaaattggcccattggggggaaaaaacttttgcaaaaggggaccctg

SEQ ID NO: 176211 - DNA, 434 bp, Zea mays
  Clone ID: MRT4577_92299C.1
gtggatcacctgacccgcgaatacaaggcccaccgcctgccgctggacctggacgaagtggaactgttgctggaagccgaaggcttgtttcagcgcggtctgcaccaactggacagtgacccgctggtgccaatcaagggcgcgcccgacctgatcagccggactcaaagcctggttgaccaacaactggaagccttggttgaccccccgaacaccggcctgggtattaaacccgacccgcaattgatcggccactttctgggccaaggcatggacattttgcttgaccccgaaaggctgttgcgccgcttgcaacagcaccccggtgagcgtcaggaacttaccggactggtggacgagttgaccaccttgggcgagggcgcgcatattgccgacctgcacagcattgacgaactctgtgaagctttgcttga

SEQ ID NO: 176212 - DNA, 247 bp, Zea mays
  Clone ID: MRT4577_9229C.1
cagacgcgtccgcccacgcgtccgcttcttctcgcactcccagacgggctcgtcctcgcgcggttgtcctgcctatcagggtgtaggggatccgactgagcatcctgcagtcggatgttgactaccggtgcttcgccgatggactcgaatgtgccacggactaccactacattgacacatgactacaccacctacgacaaggccttcgactctactaccatcctagatcacgatacgcatacgtacc

SEQ ID NO: 176213 - DNA, 122 bp, Zea mays
  unsure (1)..(122): unsure at all n locations
  Clone ID: MRT4577_922C.1
ctggcaggtggcagctaagcattctaattactacttggatacccagtcgagccnggcgccgtgcgctacaagagatcatcaagagagctactctgcttgatgatttcttgtagctgacagca

SEQ ID NO: 176214 - DNA, 322 bp, Zea mays
  unsure (1)..(322): unsure at all n locations
  Clone ID: MRT4577_92300C.1
ccgacgacgcgccgcgcggaagcctgcggtgatattggttaagcatttgtgatcctgtttttttgctcggatgccggtttactatgacatttatgacattttcatgtaggatgatcctattttatttgtttttttttaacttgtaaatggtgttgttctttttatatcctggngcngaaagaaacngngaagacaagggcgccaaggtggacctcccattttggctngcgcaagggcngcngncncnggaacaagcngngncaaaaaacccaccnccaagcnncacacagaaaacnnggaaggagaaccaagcngangcggc

SEQ ID NO: 176215 - DNA, 345 bp, Zea mays
  Clone ID: MRT4577_92301C.1
cttgcatgtaccggaatctctctcaatatccttttcacgactgtagcatatagccctgggagggatctaatctataacggacgagcgaatgtgctggaaaatctcatgcatcgaataggatatactccatcgaatcttctcaataatgatgtgtccatcatcctgaggccgctatgcatgtcagatattcatgaagcaaataactatgtggatccatgctttatcaagttcaatttgaaacgatgcgaatgcagattgacactttacaacttgagaaataaactaatggcagatctaatgttataatacattgtaaactctaaaattcttgtgtctgaaattttt

SEQ ID NO: 176216 - DNA, 312 bp, Zea mays
  unsure (1)..(312): unsure at all n locations
  Clone ID: MRT4577_92302C.1
ctcgagccggcncgggactcgcttcctgccttctgcgcctccatttcggcctctgtcccttgcaagttcaatctcacctccaaccatgggtaaagagaagtcccacatcaacatctgtggctatatggacatggtcgactcgtggcaagtaggaccaccacagtgacacctgtatctacaagctatgcaggcatctgacaagcgtgtgactctagagggtcgcagaaggaggatgctgaaatgaacaaccgcgccttccagaagccatgcatgctctacaagatcacgcatgactgcgagagagggatgcac

SEQ ID NO: 176217 - DNA, 525 bp, Zea mays
  Clone ID: MRT4577_92303C.1
gtggggtgacccgagtggccgcaggcaggtggcctctggtacctgtacctccaaagccgcgcgcggggcccggcagtctccactggctgtcgcctgggccccgccctgggagccaggagaggaagggggtggtggccggaagcgcaacctggccttgcttgccgcctctgctcgcgggacggtagagagaatggagagaatcgcctcgctaggagtagtacggagtgctgccgtgctggttggttggtgttcagctctctcatcttttgggacgggtggtcaccaaaaaaacagcatgtttgtagtgcgccaacattcgtgctgatcaactaatcactgcttgtttttggtggttgctgttgggaactcgtaacgaaaccctgtgtgcagtcaaaccggtcggacgagagggcgcggatcgaggcggccggcggtctggtggtgttcaacaacggccaccgcgtgcgtgggatcctcgccatgtcacgcgcgctaggtaccaatgtctggtgtacgtacatgatc

SEQ ID NO: 176218 - DNA, 171 bp, Zea mays
  Clone ID: MRT4577_92304C.1
gagccctctagtcggcggccgccctttcttttttggggcttttgaaagcaaacttggttgtggttccgacaagacaagaccgggacacactacacaggagagaaccataggtctgaaacctggccgagcatcatcagtgaaataagcgagctaacgatcacaaggtccgta

SEQ ID NO: 176219 - DNA, 806 bp, Zea mays
  unsure (1)..(806): unsure at all n locations
  Clone ID: MRT4577_92305C.1
taatatcgactgtggcccccctcaacctctgcttcgacggcctcgagagaagagtcgccggctcgccgccctgctccggcaccagcaaaaccgccaggtgatccccgacaaccagctagagcagctagccgctgcagcagaagggaccttcttatcgccgtgaaaaaaatggaaacaaaattctcggagctcctggattctgcagagaggactattggccttcacttttcctatgatatcaacctaacactttctgcacagaggctacatgatctcggcgatgaatatagagctcttcctctttggagacaggcagaaccaagatttctatggaatggctacttgttagaacctctaattgagaacaagctgaaccagtacttattgccagtaattcaaggcagttttcaaaatatccaagcagaagttggatcagagatggtaaatgtgaccctgattgcacgtaggtgcacacgaaggataggtactcgaatgtggagacgaggagctgatgcagagggttatgctgcaaacttcgttgaatcggagcagataatgcagtcaaaagggtttacagcatcctatgtacaagtccgaggttctatgccattcttgtgggagcagattgttgatttgacatacaaacctagttttgacattgttagacaagaggaagcgcctcgtgtacttgagaggcacttccatgatttgcaaaaaanatatggagctgtcttagccgttgatctgtcataccagnttggcggtgagggccgcctccgtgaaagatgtgcaaaatctattgaact

SEQ ID NO: 176220 - DNA, 952 bp, Zea mays
  Clone ID: MRT4577_92306C.1
cccacgcgtccgtcggactccacgcgggggccgcatgcagaaagacaaaacacaagtgggacaggcttttataaccctgtatgtgggccggccggggatgggcatcgccggcctcgagtgaagagtcgccgtcccgctccggcgacaacaccggcaagacagcccagcgatccccgacaaccagctagccgctgcagcagtagtggccttcttatcgtcgtggttataccgccatggatgagacaactgatgcaagcacttcgttgaaactccatacaagattgagactctgggagtttcctgactgttatatatttgaaccaattgatggcctggctgacttgtacttgtcagttagccgggccagcggaacaatgaatctagttcaagacttgccaccacgtggacccactacaaaacataaagttcaaacagtatatggtgtgataggagtgctcaaacttgcagttggatcatattttgtggtgatcacggatcgtgattgtgtgggatcctactttggacacgcaatttttaaagtgacaggactaaaagttcttccctgcaatagtgcacataacaccacctctgctgagcagaaaaaaatggaaacagaattctcagaactcctggatgctgcagagaggactattggccttcacttttcctacgatatcaacctaacactttctgcacagaggctacatgatctaggcgatgagtatagagctcttcctctctggagacaggcggaaccaagatttctatggaatgcttacttgttagaacctctaattgagaacaagctgaaccagtacttattgccggtaattcaaggcagctttcaaaatatccaagcagaagttgggtcagagaaggtaaatgtgatcctgattgcacgaaggtgcacacgaaggataggtactcgaatgtggagacgagagcttgatgc

SEQ ID NO: 176221 - DNA, 746 bp, Zea mays
  Clone ID: MRT4577_92307C.1
tctggaactcctgctctgaagggagattttgttcggtacgggaagcgaactactcagggaattctaaacgatttgaggaatgcacttgctagatactacttgaataacttcgttgatgggactaagcaggatgccatggatcttcttcaaggacataacatgacatctgttagtcgagacatggcagtgccaagcaaatcaggacttctggagagttatgcgtccttccgccttgcttttgcattggttatgggagctctagtgttcatgatgatgccactaagacaagcccggaatgatgctcgccatttgatgctgtcatttctttgggccggtctttgtattggcatctcacattttgtcagagccaacggccgcacgttcactaaccgacctaggtttcacaagtcacgccattgatggatgcaagatgaccgtttgctcgtcaagcgacgtcatagattgtcatcattcatcgaacttgttgacacaaattggtttgcatgaagtgttgcattttttttggcatggtacttgccctttgtaataagttttcttccatttcgtaactagtttttgtttcttcctctcctatgtctggtccatactgttctggccttctatggtcttcggtagaattcattggtaaaaaccatatgaagtgtattatgattttttcgtattgcatactcagtcctcggcatttgcaccagggatggctaaaaaaaaaaaaaaaaaaaaacaaa

SEQ ID NO: 176222 - DNA, 752 bp, Zea mays
  Clone ID: MRT4577_92308C.1
cgatatacaaatttaattagtattgcataatgatagatccacatcacataaaccatcaacaagcaccacaacaaaatcattcacaaaacctacacatgttattatgttttgcacatatttgcaaacactttacaaaatcattcacaaaagtactaacgcttcaagtgattcgcaaaagccttcataaaagcactccaacttcttgtatcctcttgttttaaggcacaagcttgtaggggttgtgatgtcgccacttacttgatgctaacaagacatttccgtcaccaaagccatcttcaacacttcgcctataaaaaagatcaattctctttttcaattgcctgtcgggacgaggaggcctagcaggggagatgcgatgcgaggagctggtgccatagtgggctactggtcactgccggcgcgttgtgcattgccctggtccccgcctccccggaccggaccccggccgccccctcccgcggtcccgcccggcctccgctccggactctcttgcatatgggactgtgagatgacccgccgcgcgccgcgtaaaaacctctgggcatcgagccacttccgggcgtggcagtggcactagggtcggtgcaggcacatcgggggagggcggctcggccagggctcagccgttgctgctcggtcgggacagagaggagcgaggcgagggaagggaggagaggtgaggggagagagaagagggaagggagagatagaggcggcgacggctgggagag

SEQ ID NO: 176223 - DNA, 1154 bp, Zea mays
  unsure (1)..(1154): unsure at all n locations
  Clone ID: MRT4577_92309C.1
atgcagaaagacaaggccggcggatcatggcacagcttttttgaccttgtctgtggcccccctcaacctctgcatcgacggcctcgagagaagagtcgccggctcgccgccctgctccggcacaccagcaaaaccgccaggttatcccaccatggctgagacaaatgatgccagcccttcgtcgaaactccatacaagattgagactctgggagtttcctgactgttatgtatttgaaccaattgatggccttgctgacttgtacctatcagttagccggaccagcggaacaatgaatctagttcaagacttgccatcacgtggatccactacaaaacataaagttcaaacagtatatggtgtgataggagtactcaaacttgcagttggatcatattttgtggtgatcacggatcgtgattgtgtgggatcctactttggacacgcaatttttaaagtgacaggactaaaaattcttccctgcaataatgcacataacaccacctctactgatcagaaaaaaatggaaacaaaattctcggagctcctggattctgcagagaggactattggccttcacttttcctatgatatcaacctaacactttctgcacagaggctacatgatctcggcgatgaatatagagctcttcctctttggagacaggcagaaccaagatttctatggaatggctacttgttagaacctctaattgagaacaagctgaaccagtacttattgccagtaattcaaggcagttttcaaaatatccaagcagaagttggatcagagatggtaaatgtgaccctgattgcacgtaggtgcacacgaaggataggtactcgaatgtggagacgaggagctgatgcagagggttatgctgcaaacttcgttgaatcggagcagataatgcagtcaaaagggtttacagcatcctatgtacaagtccgaggttctatgccattcttgtgggagcagattgttgatttgacatacaaacctagttttgacattgttagacaagaggaagcgcctcgtgtacttgagaggcacttccatgatttgcaaaagaaatatggagctgtcttagccgttgatcttgtcatacaggtggncggtgagggccgcctccgtgaaagatatgcaaatctat

SEQ ID NO: 176224 - DNA, 551 bp, Zea mays
  unsure (1)..(551): unsure at all n locations
  Clone ID: MRT4577_9230C.1
aattcggcacgagggtcctcggcttctcctaaaagctcgacgcgatggcgacgctggtgcggccgcccgcgctgcacgtccgcgccgtgagcggcggcggaaacaaggacagggtggcgccgcagcggccttggtggggcggaaacaagcccatctcaccgccccagtcgggcggaagcggggcgcgaggaggcgcggccggcggcggcgtccccctggaccaggtgctaggtgtgctccgccgcgacggcgaattcgtccaggccgccgtcggcgccccgctccgcgacgtcttctggctccgcttccttgaaaagaagcagcggaagcagcagcagccgaaacctaagcacaagcctttccggcagcagcaggaagaggaggaggtggtanntggtggaaccaagtcgcccccggccttcccgcccccctcgtacccgtcaggggtttgtcgtgcgtggagctaatggcggccgacttccaggccctcaaggtgtacgccggtagcgcgcggcactctctcgcgcgccgattcctcggtagcaatagca

SEQ ID NO: 176225 - DNA, 2019 bp, Zea mays
  unsure (1)..(2019): unsure at all n locations
  Clone ID: MRT4577_92310C.1
cggccgcgtgggcggccgcgtgggcgcgggcggccgctcgcgatctagnactagtgctagttggagctgtagtattagccaaccagccagcctccgatctccatatggaggaggctgcgcccgcggcggtcatggagcgggagcgcctcacggccgagatggccttccgcggcgcggacggagctcggcgggacggcggcgacccggcgcccagcatcgtcatcaagatccgccgccggctcccggacttcgcccgcaacatcaagctcaagtacgtgaagctcgggatccgccacggcggcagccccacgtcgctgctgccggcgctctgcgtgccggcggtcgcagccgccgcctactcgttcgtccgcctcgacgtcatctactactccgtcgacctgctcacctgcgtcgcctggctcggcaccgcgctgctgctgctcaccgtctactacctcaagcggccccgccccgtgtacctcgtcgagttcgcgtgctacaagccggaggagcggctcaagatctccaaggagggcttcctgtacatgacagagagcacgggctgcttcaacgcggaggcactcgagttccagaccaagatcaccaagcgctccggactcggcgatcggacgtacctcccgccgggcatccaggcacggccgccgcggctgtctatggaggaggcgcgcgcggaggccgaggccgtcatgttcggctgcctcgactcgctattctcggccacgggcatcgacccacgccgcgatgtgcgcgtgctcatcgtcaactgcagcctcttcaacccgacgccgtcgctggcgtccatggtagtgcaccgctacaagatgcgggaggacgtcaagtcgttcaaccttggaggcatggggtgcagcgcagggctcatcgccgtggacctcgccagggacatgctgcaggcgaaccccgggtgctacgccgtcgtggtgagcaccgagaacatcacgctgaactggtacttcggcaacgaccgctccatgctgctgtccaactgcatcttccgcatgggcggcgctgccgcgctgctgtccaaccgccgcgccgacgccgggcgcgccaagtaccggctgctacacacggtacgcacccacaagggtgccgcggacgagtgctacggctgcgtgtaccagcgcgaggacggcaccggccgcgtcggcgtgtcgctggcgcgcgagctcatggccgtcgccggggacgcgctcaagacgaacatcaccaccctgggcccgctggtgctcccgatatcggagcagctcaagttcctcaagtccctcgtgctccgccgcgccctccgctcccgcggtgtccgtccgtacatcccggacttccggcgcgcgtttgaacacttctgcgtgcacgccggcgggcgcgccgtgctggaggaggtgcagcgcagcctggggctcagggacgcggacatggagcccagcaggtgcaccctgcaccgcttcggcaacaccagcagcagctcgctctggtacgagctcgcctacgccgaggccaagggccgcgtccgccgcggccaccgcgtgtggcagatcggattcggatccggattcaagtgcaacagtgctgtctggcgcgcgctccgcgacgtgccgcccgtgcacgccgacggcgccggcggtggcagcaactgcaacccgtgggtggacagcattcagagctacccgccaaaagagtacatctgatcgccatcttctttgtggtgaattaatcacgtcctgttggatcagttgtactagccgcgacgcagtagtgcacgagaactgtatgtatggtgattttttttttgtttcttcatcaggtaggagctgaatcttctttcttctacctttacatacagtagtgcatgcgagaacaaggcgttgccacgcattggattaccgagtgctgtggcttcttaatgattgcggaccggtagacgtatttaaattgagattatggtaagtatggtagatgaacaacaaaaaggagcagttgtag

SEQ ID NO: 176226 - DNA, 342 bp, Zea mays
  Clone ID: MRT4577_92311C.1
cccacgcgtgcgacacggcccaaattcctacgacacttctgctcttcaccacttcttctcccatggttcgtaggccaaactacccggaacactcccgtttcgcctctctcgtcctcctcttggtggctctgttctactgtcttctggtctatgcggatgtttccacactattgaaccccaccgtaaatcctcaggattccagctttgagtctttggaatccgaggcgggtattgattttggggaaaagaacggctagtgttgcagaggcattgagaatttggagctgtggggtgcagctgtgaaatggcggtctgacttcaagtttaattcctctgtggaat

SEQ ID NO: 176227 - DNA, 325 bp, Zea mays
  Clone ID: MRT4577_92312C.1
gctaattatagcccacttattccgggaaaaagagtgttttctggtccagttgccgtttccgaatctcgagccgacacggctatgggtcttagaccggatcggtggaagaaggagacatcagcataaaggtccgcctccgacttgtttacccatggggctacagggtcctatctcgaggaagtagacgtggccctggccggcggaactagccagaggggcctcctacgatgcccacgcgctccctctgaggacgtccacgtgcatccgagctgggccacgcatagcgacatgctgccccacggagactagtgctcggcggtggaca

SEQ ID NO: 176228 - DNA, 667 bp, Zea mays
  Clone ID: MRT4577_92313C.1
tttatcttcaatatccaatcccctacctctacagtatatcccgtctccgacgactcggctccgctccttaccttaccagccatgggcaagatcaagatcggaatcaacggtttcggaaggatcggcaggctcgtggccagggtcgccctgcagagcgaggatgttgagctcgtcgccgtgaacgacccattcattaccacggattacatgacctacatgttcaagtacgacaccgagcacgtgccaatggaagcacagctacatcgcctttaaggacttcaagacgcttctcttcggcgagaagccggtcacccgttttgtgcattatggtactccgaaggagttcccgtggtgtgagggctgtgctgtataatgtccttgatgtccacctatttcttctcttttttgacattagcttatttttaattttattgttttttttatattagtattttatatatttcttataatattttttacttttatttttttttttactgttttcaattattaattattattttattttaattattctatatttttttatttttattcttttttatattttattttattttattttataaatttatctttattttaatatattttactatattattttttttattttacttttttcgcttttttattattttctatt

SEQ ID NO: 176229 - DNA, 2538 bp, Zea mays
  Clone ID: MRT4577_92314C.1
acactatagaagagctatgacgtcgcatgcacgcgtacgtaagctcggaattcggctcgagcttttttgaccttgtctgtggcccccctcaaccggccgtgatggcccagcttttttgaccttgtctgtggcccccctcaacctctgcatcgacggcctcgagagaagagtcgccggctcgccgccctgctccggctacaacaccagcaaaaccgccaggtgatccccgacaaccagctagagcagctagccgctgcagcagaagggaccttcttatcgccgtggttatcccaccatggctgagacaaatgatgccagcccttcgtcgaaactccatacaagattgagactctgggagtttcctgactgttatgtatttgaaccaattgatggccttgctgacttgtacctatcagttagccggaccagcggaacaatgaatctagttcaagacttgccatcacgtggatccactacaaaacataaagttcaaacagtatatggtgtgataggagtgctcaaacttgcagttggatcatattttgtggtgatcacggatcgtgattgtgtgggatcctactttggacacgcaatttttaaagtgacaggactaaaaattcttccctgcaataatgcacataacaccacctctactgatcagaaaaaaatggaaacaaaattctcggagctcctggattctgcagagaggactattggccttcacttttcctatgatatcaacctaacactttctgcacagaggctacatgatctcggcgatgaatatagagctcttcctctttggagacaggcagaaccaagatttctatggaatgcttacttgttagaacctctaattgagaacaagctgaaccagtacttattgccagtaattcaaggcagctttcaaaatatccaagcagaagttggatcagagaaggtaaatgtgatcctgattgcacgaaggtgcacacgaaggataggtactcgaatgtggagacgaggagctgatgcagagggttttgctgcaaacttcgttgaatcagagcagataatgcagtcaaaagggtttacagcatcctatgtacaagttcgaggttctatgccattcttgtgggagcagattgttgatttgacatacaaacctagttttgacattgttagacaagaggatgcgccttctgtgcttgagaggcatttccatgatttgcaaaagaaatacggagctgtcttagctgttgatcttgtcaatacaggtggcggtgagggtcgcctccgtgaaagatatgcaaaatctattgaacctattcttagtgaagatctaagatatgtgcacttcgacttccaccgaatttgtggccatattcactttgagcgtctgtctcagctgtatgatcagatcaaggactaccttcagaaacataagtacttccttataaatgataaaggagagaaaattgaggagcagactggcactacaagaacaaattgtatagattgtttggatcgcaccaatgtaactcagagcatgattggtcgaaaaattctggaaagccaacttcaacgtataggagttcttagtgctggtgatacaataagcaaacatccagcctttgatacaaactacaaaattttgtgggccaatcatggagatgcaataagcattcagtactctggaactcctgctctgaagggagattttgttcggtacgggaagcgaactactcagggaattctaaacgatttgaggaatgcacttgctagatactacttgaataacttcgttgatgggactaagcaggatgccatggatcttcttcaaggacataacatgacatctgttagtcgagacatggcagtgccaagcaaatcaggacttctggagagttatgcgtccttccgccttgcttttgcattggttatgggagctctagtgttcatgatgatgtcactgagacaagcccggaatgatgctcgccatttgatgctgtcacttctttgggccggtctttgtattggcatctcacattttgtcagagccaacggtcgcacgttcactaaccaacctaggtttcacaagtcacgccattgatggatgcaagatgaccaatttgctcgtcaagcgacctcatagattatcatcatccatcaaacttgttgacacagattggtttacatgaagtgttgcgtttttttggcacggtatttacccttttgtaataaggtttcttccattttgtaacaagtttttgtttcctcgtcgcctacttttgcttcatagtgttctggacatcatggtctttgttagaatttacttgtaaaaaccaagtgaatatgccttcagcacatattattgtattatgatttgttcatgctacaaacgaagtgaatacgccttttgtgatttgttcatttgtaataaaaagtttgaatactccttttgtgaaaaaaaaaaaaaaaaaaggctcctaaaaaaaaaaaaaaaaaaaaaatcgagggggcggcccccaactatgggatttgctttaccgggaaatt

SEQ ID NO: 176230 - DNA, 2218 bp, Zea mays
  Clone ID: MRT4577_92315C.1
gagctcggcatctccacggcgtccgcttaacacccaactcatccgtaagaggcgacatcacatcgcgttccgccgcctcacacgctagttggagctgtagtattagccaaccagccagcctccgatctccatatggaggaggctgcgcccgcggcggtcatggagcgggagcgcctcacggccgagatggccttccgcggcgcggacggagctcggcgggacggcggcgacccggcgcccagcatcgtcatcaagatccgccgccggctcccggacttcgcccgcaacatcaagctcaagtacgtgaagctcgggatccgccacggcggcagccccacgtcgctgctgccggcgctctgcgtgccggcggtcgcagccgccgcctactcgttcgtccgcctcgacgtcatctactactccgtcgacctgctcacctgcgtcgcctggctcggcaccgcgctgctgctgctcaccgtctactacctcaagcggccccgccccgtgtacctcgtcgagttcgcgtgctacaagccggaggagcggctcaagatctccaagtcggccttcctcgagatgaccgagagcaccggctccttcaatgaggcggctctggacttccagaccaagatcaccagccgctccgcgctcggggacgagacgtacctgcccccgggcgtccaggcgcgcccgcccaggctcaacatggcggaggcgcggatggaggccgaggcggtcatgttcgggtgcctggacgcgctgttcgagtccacggggatcgacccgcgccgcgacgtgcgcatcctcatcgtcaactgcagcctcttcaacccgacgccgtcgctggcgtccatgatcatcaaccactacaggatgagggaggacgtcaagtcgttcaacctcggcggcatggggtgcagcgccggcctcatcgccgtcgacctcgccaaggacatgctccaggcgaaccccggctcgtacgccgtggtgctcagcaccgagaacatcaccctcaactggtacttcggcaacgaccgctccatgctcctctccaactgcatcttccgcatgggcggggccgccgcgctgctgtccaacaggcgcgcggacgccgggcgcgccaagtaccggctgctccacacggtgcgcacccacaagggcgccaccgacgagtgcttcaactgcgtgtaccagcgcgaggacgaggccggcaaggcgggcgtctcgctggcgcgggagctcatggcggtggccggcgacgcgctcaagaccaacatcacgacgctggggcccctggtgctgcccctgagcgagcagctcaagttcctcaggtcgctgatgatgcgccgcgtgttccgcgtcgggggcgtgcgcccctacatcccggacttccggcgcgcgttcgagcacttctgcgtgcacgccggcggccgcgcggtgctggaggaggtgcagcgcagcctgagcctgcaggacacggacatggagcccagcaagtgctccctccaccggttcggcaacaccagcagcagctcgctgtggtacgagctggcgtacgccgaggccaagggtcgggtgcggcgcggccaccgcgtgtggcagatcggcttcggctcggggttcaagtgcaacagcgccgtgtggcgcgctctccgcgacgtgccgccgctgtcgtcgtcgaccggcgccgcagcggggccgccgggcaggaagggcgcgcagagctgctgcaacccctgggtggacgacgtggacaggtaccctcccaaggcgtacgtctgatgggccagggccacgtcatgcggcataacaattgtatgatctgatacgagttccgtcacgacgaaggaagaagggcgtgtgaggcagaaaattatacttgtatgtttttttcatttgttttttcttttgcttcgttttcttttctttttcccagtagattgccgtgagtagacagtgctggcttttggaattcagacgtgtatgtggcgtaaaatgaattccaagagctagcagtgccattctttatcttctcagcctaccctatttgttgtctagtccttttgtcttctctttggcgttctagacgcccgggaagtagaatggacagacgaacaccaccagtgtgcagttcacatgactagagagaactatcgaccaagtgtgaattactgattcaagtaaaaaaaaaaaaaaagggcggccgctcgcgatctagaac

SEQ ID NO: 176231 - DNA, 276 bp, Zea mays
  unsure (1)..(276): unsure at all n locations
  Clone ID: MRT4577_92316C.1
tcccaacgnacatctttgcttaaacgtgaagaatctcactgtgaaggatctgaagcgcgagtatgtggcctccaactccaaggatgatactgccaaggacgctgctagctatacctcccaggtcatcatcatgaaccaccctggccagattggcaatagctatgcaccagttctggactggcacacctcacacattgctgtcaagtatgctgagctcgttaccaagattgataggcgatccggcaatgagctggagaaggagccacatttctcaag

SEQ ID NO: 176232 - DNA, 109 bp, Zea mays
  Clone ID: MRT4577_92317C.1
cccaattcttgaggtttttaagcaatgagcttgagagttacctgtagattctagttttgctagggagcaaactgcttcctagtagaaagccatttccgggaagagaact

SEQ ID NO: 176233 - DNA, 332 bp, Zea mays
  Clone ID: MRT4577_92318C.1
gccaggtatgtgaggttcgactgggaacaattaccgaatgtcactgagactaccggggacggccacgacgaactgagcttacgacacgatccttaagaacctctacatcatctaccacaagcgactaatgggtcgactacaccttcaacaactaacgtgacgttgtcacattgaagatcatactgtatcgtcagacacgaactgtccgcggcttcgacttcatcaccttattgaccaacgacgacatacgcaatgccatcgaaggcatgaacggcatagagcttgacgggcgtatcataaacgctaaccaggtccaattcctcagagggcgt

SEQ ID NO: 176234 - DNA, 240 bp, Zea mays
  Clone ID: MRT4577_92319C.1
atgacgcccgaggagatactcaaaaaattcgtgagcgggtgcatgatggtaaaggaggcacgatatgtggatgacgccttgaacggtccactacccatctacgagccgcaacccattgctctcaaagcaacaagcagcaaggaggcgctaccaagcaaggaacaagaaaagtatgggaagagggagaagaagaaggtttacaagaaggcgaagggcgaggcgcaccttggaaaagaatga

SEQ ID NO: 176235 - DNA, 908 bp, Zea mays
  Clone ID: MRT4577_9231C.1
gcctcccaagtcccacccccactccctcgctcaccagaggaactagcggaccaggcaaagccgagccgcaccgcaaccgcgaagatcttgcgtggcctccttttcccagctcgtcactgtgccgctcgtgccctacactcccggtccgcccaaccaataatccatccatccatccatccaccaccaccccgctgcggcgatgtgcggcggcgccatcctctcgggtttcatcccgccgtccggggtggcggcggcggcggcggcggccaagaagcagcagcagcagcagcagcggtgccgtgtgactgcggacctgctatggccggggcccggcagtaagggagctcctccaaaggatgtccaaggagatagagcagtaaaaaagcgcggccggaagaaccagtacaggggaatcaggcagcggccttggggcaaatgggcagctgagatcagggaccctaacaagggcgtccgcgtctggctcggaacctacaacaccgccgaggaggcagctagggcatacgacgccgaagctcgcaagatccgcggcaagaaagcgaaggtgaattttcccgatgacgcgacaggcactcgtcacaggccaacgaccgatgagatctttaacaacctgaagaacgacgacaacaacaacaacgatgatctgtttgcgatgtttgcgttcggtgacaataagaagaaggttcctgcagcgaagccagccgccgccgagggtggcagtggcagtggcagcttcctcgtccctgcgcctgcggtggcggtggtgcccggtaataagaggaggtcgtccgcgaccaacactatgctctccgtctccgacgaccagcgcagcaactcctacggctccggctcctccgacttggtggggtcgtggtcgtgggacgacgacg

SEQ ID NO: 176236 - DNA, 867 bp, Zea mays
  Clone ID: MRT4577_92320C.1
ggcgtttaaaaaatgggcaccatcatttttgaatctggctacacttccaggatattgtgtttctggaaccattggtcataagttgatgtgtgggaaacctacaagggttgattacgaggacactcatatcgatgtcagatgtgagatccatcagctagcattcagtcctcatacagactccaaagggattatggatctgacagaatacctgtcacccaaacatgtaatgccggctcgttcatggtgaaaagcctcagatggcttttcttaaggagaggatcgaatctgaattggggatgccttgctactacccagggaataatgaatccgtctccattccgacaacccagaaccttaaaatgagtgctacagaaaggttctttatggtacatgtttgtcagaagagattggcagtgatgaggcggcgggggagggcgttcttctgatgcagaaacacaagtctccgaaaattctttgtgaggatgagctccttgaggtgctgggcatgggtcggcatcttgtccagtttgaaccaatggtctccagaattgtagctgctgttgaatccgagttgcagcgggctaaggcagcggatttagataacgatgggaaatgaatggaacaatataaatgtacattgccataattttggctgattactgtttcacctttctttcccaaaaatgcgagtaatgtcctacaccacttcagcactattactgacaagtctctttaaggtccttgggagttaccaaggtatacaatatctagagagctactatcgcataaaatagggatttggtattctgtttggatagcgaaatttgaaataaaagaagagataggccagctgtcaaagacagcctc

SEQ ID NO: 176237 - DNA, 1032 bp, Zea mays
  Clone ID: MRT4577_92321C.1
aactcttgtctgaaatagtgaaagaacacaatataaaatatcattatattaattcattaagagacagatagtaagttccaatattagtgagctactaccttaattgcacttgtcaggactccatcctttccacatgtgttcagccatctgtattctcctttaccacttctgcaattcaaaacgttcatccaaagttgtctgatagcttcttttgcagccttcagtaataacttgtcatgtgatattgatgtcttgcgatgctgatctctatagagctcaacagcacactgtccatgaggcagccaatccacaggagcgacatttactgcttccgcacagttgaaaccacagttgaatccagaatggtatgctcgtggtagtgtcagaacaaactcacctgacttctgaacagcacggtaaacagaaactccttctgctttcagaacagatggagataactgtgtaaccagctcatgaagtaggtcaggctgctcttcaaacagtttgggtaagttttttctcatagattcttccagctttactgcctcaccaccaggaacaccataccaaacttttggttcaccaaaatgcatataatttaaagaataaagaaaatggtcttccacatgccagcaaaatgaagagaagcacattcctacataaagccacgggacaacaacaccagatatatcgtcttcctcaaatgagataacagatccaggcagccgtggcagattattcaagttccaacaagacacaccatatggatcttgcttatttccatctgaagaagataatttaacaaaaccactaccaaaggttgcagtgtccaaatcagcaccataatccacctcaacttcatcagcagggcctatgactatccgccaatattccccctcaatctcctccactgatggttcccatgttttatgtggttcttaatttcacaaatagaaatttcatcactcgttttcattccaaaatattcctgcttgaactcatcagcaatttctgaaactcccggacgctggg

SEQ ID NO: 176238 - DNA, 2622 bp, Zea mays
  Clone ID: MRT4577_92322C.1
cattgtgggcctcgaggccggccgggctggttactcccttcgatttttatcttcgggggggggaaaaaaaccccggcctgccaccctacttcatcctcgagtcgacttgtgcgccgccattctccgtcgccgcggtctcgcgggcccgccgccgtcctagccgccctgtccccgccctctccgtctcgcgccccacgcggcccttgtccatcttttccgtcgccggctcgtgcggtccgacgcctgccaccggttcctcctctcgagaaaggcggcggcgcccgagagagcttctttgagggaggataaggcggcgcggagcgtctctgagcggctcaggcccctccggcgctgagctttcctccggcgttgtgtgtgcctgagttgttgactcccaattgaagcgtggtcaaattacctcggctccggtatgggttggagctctttatgggttgctaaagcgtttagagtgtggctctaggcgtggattttcaccaatggcaatcgagtgcctcgtgctaggggcggggcaggaggtgggtaagagctgcgtggtggtgaccatcggcgggaagcgcgtcatgttcgactgcggcatgcacatgggctaccacgacgaccgccactacccggactttgcgcgcgcgctcgctgcctggggggcgcccgacttcaccaccgctatctcctgcgtggtcatcacgcatttccacatggatcatatcggggcactgccctacttcaccgaggtttgcggctaccacggccccatctacatgacgtatccggcaaaggctttagctccatttatgctcgaggattatcggaaagtaacgatgggtcagagaggtgaggaaaagcaatatagctacgaagatattcttaggtgtatgaagaaagtcacaccaatggacttgaagcagactgttcaagtagataaagaccttgtgatccgtgcctattatgctggacatgttataggggctgccatgatttatgcaaaagttggggatgctgctatggtatacactggggattacaatatgacaccagatagacatcttggggccgcacagattgatcgtctgaagttggatgtattgataacagagtccacatatgctaaatctatacgtgactcaaagcctgcccgagagagggagtttttaaaagcggtacataaatgtgtttctggtggaggtaaagttctaattccaacgtttgctctgggaagagctcaggaactatgtatgttactggatgactattgggagaggatgggcttgaaagttcctatttatttttcagctggtttaaccattcaagctaatgtgtactacaaaatgttgattgggtggactagtcaaaagatcaaggacagccatacagtgcataatccatttgacttcaagcatgtttgccactttgaacgttccttcattaacaaccctggtccctgtgtactttttgcaacacctggtatgattactgggggattttcccttgaggcgtttaaaaaatgggcaccatcagagaagaatctggttacacttccaggatattgtgtttctggaaccattggtcataagttgatgtgtgggaaacctacaagggttgattacgaggacactcatattgatgtcagatgtcaggtcgattttcacgtcatttcatatcttgcaaaaaatgtacaactttaaataataatgacaagaacatggtcaaccagggggaagccatgtaaatcactagtgttttaaacactgttgaagtctggcttttaaattcgatccatatcaatccccacttatcgttctgcatgggtgcttactcgaggcccttagttgtctattgcagttggctggctgtggtcgtttttgtttctgtctctcagttttttgtgagtagtatgtctgtatgtattgaggagctttcctagtccccaaacagaaaagaaaactccaaagggattatggatctgacagaattcctgtcacccaaacatgtaattctcgttcatggtgaaaagcctcagatggcttttcttaaggagaggatcgaatctgaattggggatgccttgctactacccagggaataatgaatccgtctccattccgacaacccagaaccttaaaatgagtgctacagaaaggttcattacaagctgtgctgtggagcaaggtaaacgtagcctgcacaagcggaacctgatttatggtacaggtttgtcagaagagattggcagtgatgaggcggcgggggagggcgttcttctgatgcagaaacacaagtctccgaaaattctttgtgaggatgagctccttgaggtgctgggcatgggtcggcatcttgtccagtttgaaccaatggtctccagaattgtagctgctgttgaatccgagttgcagcgggctaaggcagcggatttagataacgatgggaaatgaatggaacaatataaatgtacattgccataattttggctgattactgtttcacctttctttcccaaaaatgcgagtaatgtcctacaccacttcagccctaaaaaaaaaaaaaaaaaaaaaaaaaaaaaaaaaaaaaaaataaaaaaaaaaaaaaaaaagcggccctcgagctc

SEQ ID NO: 176239 - DNA, 605 bp, Zea mays
  unsure (1)..(605): unsure at all n locations
  Clone ID: MRT4577_92323C.1
ctgcgcgatgcatcatctgtggttcacggccccccgctgcggcagccgtgcgaggaggagcatcggtcaggatgcatgcattgcatggcatggcatcgaagaggtggaggacctgatgcgcgttatgtcaggtgacgtgtccgggaatcattcagccttgcttcccctcggatcgcggatcaggacacgtcgaccggcaaggactccgcccgcgcgtgtgtgggggtggggagaggataggcgagccgcgagaggcttccccaccttcgcccatcccccgacgcgacgtgagagcggcgcggcgtctgtgtctccggcgccggcccgcgctatccgtccggtgcatggtgccgcctcgctctcgcgtgacatgaccagccgccttccgcgatcgtaggcgtcgcccgtgctccatcgcagcccggccggatggatgtttttcccccacttttctcgcgttaccaccccggaccgtccggntccgacggtcgagtgcgtcagntgtattgtacttanctttggcgaaagccgaaagctacttaattggtaccttggtgggcggggtaatctgtccacttctataatgatcccttcgcatgcagaaa

SEQ ID NO: 176240 - DNA, 294 bp, Zea mays
  Clone ID: MRT4577_92324C.1
gtcgccatgtccatcagccaatcaatgttcgtctctgtcctaatgctgcctcaagagcaccgattcccgaccctgggcgcagcgggggtcgccatgtgattttccagttcttctggaattgggggtgacccgacaaagactgcagatgcctgtctactccatcatttggtttactcttggcattggggatacatctaaattgtgggagatcctacatctccaatggctcggacttgtggcaaggattccactcagaacctctctggaatatgtgcctgatgtgcctaccactgg

SEQ ID NO: 176241 - DNA, 569 bp, Zea mays
  Clone ID: MRT4577_92325C.1
caggaaaagggcaccaaggccacaatgatcattattcaaggagcaacatcccatccaggaaactaagggagcaccacacccgacttcacacacaccacccagcatcccagcatccctctcaaccgactcaacacaaactactaacaattctaaaaccatcacccggatcaatgatggaacaagaccttgatgacaaggcaataacaattcttgattgaagggaatagcagcaacgaacgcccgtcgcctaggaaaaagcagactcttttttcgcctcctggtcaggggaaggaaacccagggaaaagacacaactccaagtgctccctttcgctcatcaggtgagatctctagtcgccgccgccgccgcgcgctcacttgctggaaggctctccctccacggccaacggcacggtgctggccatggtgcggtacttgagcgcgtacagcatctccaggtaccgccgggtctcgcgcctctccaggttggacacgtacttccagaaaccatacacgcccgtcagggtcatcagcctctccgagtacagcttccaggtgtatttctcctcg

SEQ ID NO: 176242 - DNA, 1220 bp, Zea mays
  Clone ID: MRT4577_92326C.1
gttggaccctactcttacatatccctatatgttccgagctgcatctttgatgaaaaggcaaagtgttgaagctgcattgatggagatcaaccggatacttggattcaagctggtgctggagtgcttagaactaaggttctgttgctaccttgatccttctacctcagcaacagttgtatgactgtggtagaagatgcattgcggtgtccctcagatagacttcggaagggtcaggctctaaacaacctcggaagtgtttatgtggattgtgggaagctagatctggcagctgaatgctacattaatgcactaaagatcggtcacaccagagcgcatcaaggccttgcaagggttcatttcctacggaacaacagagctggtgcatacgacgaaatgaccaagctgatagagaaggccaggaacaacgctttcggcatatgagaagagatccgagtactgtgaccgggagctgacgaaaacggacctgcagatggtcaccaaactcgaccctctgcgagtttatccttacagataccgtgctgctgtgctgatggacaaccacaaggagaaagaggcgatcgcggagctgaccaaggccatcgccttcaaggcggacctgaacctgctccacctgcgcgcggccttccacgagcacgtgggcgacgtctcgagcgccctccaggactgccgcgcggccctctcggtggaccccaaccaccaggagatgctggagcttcaccaccgggtgaacagccaggaaccctgagcgcgctcccacggtgtacgtgtacatacaggacaggaagcccctcatcatagccaaccggccataccggtgtatgttttgtaccatacacagcagatcagatcaatgtaaggacacagtagaaagccacattagatccctccccttgaaaaccaaacaccccattccttgtgtccctaattattagatatatatatgtgttgtttgctatagcctccccttagtaagttgttgctgctgattgtgattaagcctcctaattgtacccgccatgtgccccagcggcccgtgcttccagaatcaagaagttttgactgtaccatgtgtatgtaagtgaaatgggggaacaaaggatggtggaagcttttgtccgcgccaaactgtcaagcatgcaggcacctgttcttgccgagcacttgattgattgcatataaaaaaaaaaaaaaaagcggcc

SEQ ID NO: 176243 - DNA, 469 bp, Zea mays
  unsure (1)..(469): unsure at all n locations
  Clone ID: MRT4577_92327C.1
taggnacagaagcccctcatcatagccaaccggccataccggtgtatgttttgtaccatacacagcagatcagatcaatgtaaggacacagtangaaagccacattagatccctccccttngaaaaccaaacaccccattccttgtgtccctaattattagatatatatatgtgttggggggggtggggctccccttagtaagttgttgctgccgattgtgattaagcctcctaattgtacccgccatgtgccccagcggcccgtgcttccagaatcaagaagttttgactgtaccatgtgtatgtaagtgaaatgggggaacaaaggatggtggaagcttttgtcaaaaaaaaaaaaaaaaaaaaaaaaaaaaaaaaaaaaaaaaaaaaaaaaaaaaaaaaaaaaaaaaaaaaaaaaaaaaaaaaaaaaaaaaaaaaaaaaaaaaaaaaggggggggccgtttttaga

SEQ ID NO: 176244 - DNA, 2358 bp, Zea mays
  Clone ID: MRT4577_92328C.1
gaatgcttgattttgccaataagttttgctgcaagggcctcaaggatgcctgtgagcgaaagcttgcttctttcatctcttcaaggcaagatgctatatatttcatggagtgtgctcttgagctgggctgttccattcttgctgcttcatgcttacaagtgctcttgaatgagcttccagagtgcttgaatgatgaacaagtggttaggatattctcctctgcaaataaggcacagagattgacaatggttggcaatgcatctttctccctatattgccttctcagtgaagtctccgtgagtaccaacccaacatcggatgtcactgtgagtttcttggaaaaactggtagagtcggcatcagattctaggcagaagcagctggccttacatcagctggcatgcaccagatttttaaggaaagattaccctgaatctgagtgcttgttcaatgctgccttttctgctggccatctttattcgttagtgggtttggctagattggcctctctgaggggtaataagcattttgctctcaagttgctagactctgtgatgtcatctcggtggcctcttggatggatgtatcaagagagagcactctatttggatggtgataacaagttagaaaatcttaacaaggctactgagttggaccctacccttacatatccctatatgtttcgagctgcatctttgatgaaaaggcaaagtgttgaagctgcattgatggagatcaaccggatacttggattcaagctggtgctggagtgcttagaactaaggttctgttgctaccttgcccttgaggattatagggctgccttatgtgacgtgcaggcaatcctcactcttgccccagattatcgtatgattggtggccgggttgctggcaagcagctgagaatgctagtgctagagaatgtagagcagtggacagctgctgactgttggatgcagctttatgatcgctggtcatctgtggatgatatagggtccctctctgttatatatcaaatgttggagtcagataccgccaaaggagttttgtactttaggcaatctttgcttcttctcagattaaactgtcctgaggcggcaatgaggagtttgcagcttgctcgtgagcatgctgcgagtgatcatgaaaggcttgtctatgaaggatggatattgtatgatactggccactgcgaggaaggattgcagaaggcagaagcatccattgcaatacaaaggtcatttgaggcattttttctgaaagcttatgctttggctgattcgagtcttgatccttctacctcagcaacagttgtatcacttctagaagatgcattgcggtgtccctcagatagacttcggaagggtcaggctctaaacaacctcggaagtgtttatgtggattgtgggaagctagacctggcagctgaatgctacattaatgcactaaagatcggtcacaccagagcgcatcaaggccttgcaagggttcatttcctacggaacaacagagctggtgcatacgacgaaatgaccaagctgatagagaaggccaggaacaacgcgtcggcatatgagaagagatccgagtactgcgagcgggagctgacgaaaacggacttgcagatggtcaccaaactcgaccctctgcgagtctacccctacagataccgtgctgctgtgctgatggacaaccacaaggagaaagaggcgatcgcggagctgaccagggcgatcgccttcaaggcggacctgaacctgctccacctgcgcgcggccttccacgagcacatcggcgacatctcgagcgccctccgggactgccgcgcggccctcctggtggaccccaaccaccaggagatgctggagctgcaccaccgggtgaacagccaggaaccatgagcggagcgccgccatggtgtacatacaggacgtgataggaagcccctcatagccaaccccccgccataccagtgtatgttttgtaccatacacagcatgtcaatgtaaggatagtagaaaagccactttaggtccctccctggctccctccccttgcaaaccaaacacctacattccttgtgtgcctagttagatatgttgtttgccatatagcctttcccttagtaaattattgttgtcgactgtgattaagcctcctaattgtacccgccacgtggcccgtgctgccagaatcaagaagttttgactgtaaaaaaaaaaaaaaaaaaaaaaaaaaaaaagacggtaccctgtgtatgtaagtgaaatgggggaacaaaggaaggtggaagcttttgtccgcgccaaaccgtcaagcatgcaggcccccgttttttccgagcccttgattgattgc

SEQ ID NO: 176245 - DNA, 443 bp, Zea mays
  Clone ID: MRT4577_92329C.1
ggaaaccaaatgcaaggattagggcattaaacaaccaaagccgcacaaaacatagacattgcaggtcaaaagcctggaacaatccaaaaaaaaccggaccatgctcccaaaccatccgggtacaaaacttaaaacagcaggggtacaaacaaaagtatcacagtttgatgaatttgaaaaaggggacttggccctgcaccccaacaccttaccccttgaacttgccaaaaaacccctgcttctaaacgggagtccggaaacaacccgccccaaaattggacaaaggggccaaaaacctgaacctgatctaccccagggccagccgggaagtatgcttaaagagggaccggcggagggcaaacacccttttttttggacccacacacgaacccttgaaaaattaaggaaatcacccttaacaaaaccataatgggggaaaaccc

SEQ ID NO: 176246 - DNA, 192 bp, Zea mays
  Clone ID: MRT4577_9232C.1
ttctcgaggccggcgtggaggtgcgacagggggggcggggaatttaagggccaggaggcccctcaacagacaaacagcatgtgccatggtagcaaggagactcactgggagaggccgaggctttaagttcatagggtatatcttaatgctggcactagtgagtctgggacaccgatggaaccttctctcata

SEQ ID NO: 176247 - DNA, 469 bp, Zea mays
  Clone ID: MRT4577_92330C.1
attcggctcgaggggttgtcaacaatttttttcgcaaactctggcccgagcccaagaggggttcaatttcccagtccgcccaccgatcgaccttcacgccaggctcggtctctatcgaaagtgcaacgcgcggttgtgtgagaggagagtaggaagatgagcggagtgcttctacgtccacaagaggctggccgatatccaagtagggaacgcgtgctgggaactttactgcctcgagcactgtatgcatcctgctggccaactgcctgtggataagaccgtgcgacataaagattatgcctcaaggaccttctttagccagactggtgctgagaagcactttccccgtgcaattattgccgatcatggacgctaggaagacagccctggtgactattgcctgaagagactatttcgtgaactctgtattcgtgatggataccagtgaggctatccgttccactggacc

SEQ ID NO: 176248 - DNA, 690 bp, Zea mays
  Clone ID: MRT4577_92331C.1
ccggccgggacatttcggaagctagctagctctgctcggggctcctccttcccagtaacaactaacaagtctacacacaggggacaccacaagtacatcgccaccgacggaggaggaacaacaagaaccccgatgacaattgcagccgcggtgaccgcgcccacgtccgcgccagtgcacgtcgcgccgcgccacgccagccccgcggtccagccgcgcgccgcgccacgcagggagccgtcgccgctgaaccccaacgcgccggcgcaggcgctccgctccgccagccccggcggcggcgggtcttccgcggccacggacggcgccagggctcacatcgccaaccttgacaaggtgctcgggaagccgccgcaggtgccgaggcccgcgaacaggcagggccagggccagggccaggacggcgagcaggagccgctcaacgtccggcacggcctgctcaacgcgctcaacctctccttcttcgtgcccatgcccgggatgcgggcgcggacggccgccgacgagcacatgtcgccgcgcagcctcatgcacatgcagcagctcctctccgccgactccccgggggccttcccgcggtgcaccaatcccccgtgctggcgcatccttcacggggagggcggctgggagggcctgcttgaccggtggactcctacctccgcgggagctcct

SEQ ID NO: 176249 - DNA, 204 bp, Zea mays
  Clone ID: MRT4577_92332C.1
atgggaaggaaaagtagagaaagaaatgccaattacaggccaaagcgttatttgccaagttttcttagaatgaattttaccaatgtatgagttcttgttaacagaatgtgtaacggaaatactgaaagacttttgcttaaagtggcattattgactgctgatgtgatgctactgtaactgcaataaattttttaattgttgcaa

SEQ ID NO: 176250 - DNA, 545 bp, Zea mays
  Clone ID: MRT4577_92333C.1
atcgatgcaagcgagagctcgaatcgccgggggccatggagggtgtagaagagaagaagaaggaggttcctgctgtgccagaaacccttaagaaaaagcgaaggaatttcgcagagctgaagatcaagcgcctgagaaagaagtttgcccaaaagatgcttcgaaaggcaaggaggaagcttatctatgaaaaagcaaagcactatcacaaggaatataggcagatgtacagaactgaaattcgaatggcgaggatggcaagaaaagctggcaacttctatgtacctgcagaacccaaattggcgtttgtcatcagaatcagaggtatcaatggagtgagcccaaaggttcgaaaggtgttgcagcttcttcgccttcgtcaaatcttcaatggaacctttgtgaagctcaacaaggcttcgattaacatgctgaggattgtagagccatatattgcatgggggtacccaatctgaagtcagtaaatggactaatctacaagcgtggttatggcacaatcaatgagaagcgaattgctttgacag

SEQ ID NO: 176251 - DNA, 465 bp, Zea mays
  Clone ID: MRT4577_92334C.1
gccggccgggctgcgagggaaagggaagcgaatcaaagcgcgctcgacaagccttccaagtacagactacagagcagagcagggcagggagacggcgggcgatggggatgagcctcgcccaggcggtggcggcgctggtgggcacgtgcgcgcggcgcctgtcgcgggcggcgcgccgcctgcgcccgcgggacggggtcgcggcgtccttctcgtcccgcgccatcgtgccgttcctcggcggcggcggcgggggcgtcaagaagtcgctctcctcatcagcatcatcctcctcgtcgtccaagttgaagaggaggaaggcggcgccgaaggaggaggaggcgccgggggacgggctgtggcggaaggagatcatgatggcggagcggtgccagccgctggacttctccggggtcttctactacgacccccaatgccgcccgcctcgcgccggcgtccgccgcc

SEQ ID NO: 176252 - DNA, 256 bp, Zea mays
  unsure (1)..(256): unsure at all n locations
  Clone ID: MRT4577_92335C.1
tntttttggatgcattaggctaactattaggagaaaaatgttcctgcacgggaaaaatacgctgcaaagaactagtacatggaggacggcatgagaaaaaaacaacgaaccacaatgcaggtagtcacactaaccgagaacgactacatgacgggatgaggtcgtggaggaaccaactacacaaacggtcgtggaagtcaaacggcaagaaagaaagcacgagtttaatacaagtgaaggtaccaacacctggacc

SEQ ID NO: 176253 - DNA, 545 bp, Zea mays
  unsure (1)..(545): unsure at all n locations
  Clone ID: MRT4577_92336C.1
ctttcagatggagatgcgcgctgtccgcatgactgtagaaccataaaggatatgcttccttcgttcggtgaagattagttctcatagggggattgaagtgctgggtcagcaagctaagggaactgagagaatgctggaaaggattgggcaggaggtagcagcgagcctcaaggagctagaggcacactactactcatatgttgtgcgatcaccatcctatgattgaggttaatcttatcattccaggataaaatttcttgtgtttccaatatgcactcatttcacatatggtttaacagcgactgtttgttctatcattggagtatcactaagttgtagcagtgttaatgttatgtggaatgatttaatctcagtgctagttgtatcgtgctttacatatatatatatataggtgcatgatgcataattcataanaaaaaaaaaaaaaaaaaaaaaaaaaaaaaaaaaaaaaaaaaaaaaaaaaaaaaaaaaaaaaaaaaaaaaaaaaaaaaaaaaaaaaaaaaaaaaaaaaaaaaaaagggggg

SEQ ID NO: 176254 - DNA, 1269 bp, Zea mays
  Clone ID: MRT4577_92337C.1
gtggcctggccggtcggctcctagttccaacctccacctgcgccgcccgatagcaaaacgcagcgacctcgccccccctgccccgctcctccccttttcccggtagcagagacggagcaccgcagcccgccagaaaggaagacgaaacgcgccgcggcgcaacgcaccgcgtgctagtgaaagggcgcagcggaaggccgccgccgcgctgctatttagacaggaagcggggcgatcgaatcgcgtctctcaaccaatcgataaatctgccggtaggtcgatcaaggagagcgcggtccacgtctccgttccgttccgttgcggggaaggaaggaaggagagagaggagcgatggcgtccgggtaccgcgcggaggaggagtacgactacctgttcaaggtggtgctgatcggggacagcggcgtggggaagtcgaacctgctgtcgcggttcgccagggacgagttcagcctcgagaccaggtccaccatcggcgtcgagttcgccaccaagaccgtccaggtcgacgacaagctcgtcaaggcacagatctgggacaccgccgggcaggagaggtaccgcgccatcacgagcgcatactaccgcggcgcggtgggcgcgctggtggtgtacgacgtgagccgccgcaccaccttcgacaacgcggagcgctggctgcgggagctgcgggaccacacggacgccaacatcgtggtcatgctggtgggcaacaaggccgacctgcgccacctccgcgccgtctcgcccgaggacgccgcggccttcgccgagcggcacggcaccttctccatggagacgtcggcgctggacgccaccaacgtggagcgcgccttcgccgaggtgctccgccagatctaccacgtcgtcagccggaacgcgctcgacatcggggacgaccccgccgcgccgcccaggggcaagaccatcgacgtcagcgccgccaaggacgaggtctcccctgtgaacgcgggcgggtgctgctcgtcggcttagccctggtcaaacatacgctttgctgattaaggaagacataacgtgatgacaatctttgttgacttcgtcaagcggttgggggtggttggcgctcgtgatgtgtttgcagactagcaatcgctgtcctcgattgtatttttcgggctattttttgattgatgcacttgggtgacgcacacatttacaagtggcaggttatggaccatatggggagcgatttacactgatttggatgaaatattgacatgttttgac

SEQ ID NO: 176255 - DNA, 1583 bp, Zea mays
  Clone ID: MRT4577_92338C.1
tccaacctcccctgcgccgcccgatagcaaaacgcagcgacctcgccccccctgccccgctcctccccttttcccggtagcagagacggagcaccgcagcccgccagaaaggaagacgaaacgcgccgcggcgcaacgcaccgcgtgctagtgaaagggcgcagcggaaggccgccgccgcgctgctatttagacaggaagcggggcgatcgaatcgcgtctctcaaccaatcgataaatctgccggtaggtcgatcaaggagagcgcggtccacgtctccgttccgttccgttgcggggaaggaaggaaggagagagaggagcgatggcgtccgggtaccgcgcggaggaggagtacgactacctgttcaaggtggtgctgatcggggacagcggcgtggggaagtcgaacctgctgtcgcggttcgccagggacgagttcagcctcgagaccaggtccaccatcggcgtcgagttcgccaccaagaccgtccaggtcgacgacaagctcgtcaaggcacagatctgggacaccgccgggcaggagaggtacgcccttcttcgctgttgtacgctatgcaggttgcagatgcagctctaggatctgtgcaccatttttcagggcttcctggttagtagtaaggatttagttaatggttgctaatacggaaacttaagcgtaaccgacggtttccaacatacacctgtgcttctgattcgcatttcaaaaatgaaaccaaaccactggcctgttcatgactatgttttacggctgaatacgagattgatgtccatactactacagttgggagttcatgccgtaatgaatccatcaattaacatagcatcgcgatcgcgatcactaaaaagcgcgcgcgcttttcagattgttgcttgcgtatcacattttattcaactccagctaactttacgtgcgtttcgctagcgtgccattcagtgtcctcgaccctttcggcgatcgcagctgattgcttgtgtgccggcctcaggtaccgcgccatcacgagcgcatactaccgcggcgcggtgggcgcgctggtggtgtacgacgtgagccgccgcaccaccttcgacaacgcggagcgctggctgcgggagctgcgggaccacacggacgccaacatcgtggtcatgctggtgggcaacaaggccgacctgcgccacctccgcgccgtctcgcccgaggacgcggcggccttcgccgagcggcacggcaccttctccatggagacgtcggcgctggacgccaccaacgtggagcgcgccttcgccgaggtgctccgccagatctaccacgtcgtcagccggaacgcgctcgacatcggggacgaccccgccgcgccgcccaggggcaagaccatcgacgtcagcgccgccaaggacgaggtctcccctgtgaacgcgggcgggtgctgctcgtcggcttagccctggtcaaacatacgctttgctgattaaggaagacataacgtgatgacaatctttgttgacttcgtcaagcggttgggggtggttggcgctcgtgatgtgtttgcagactagcaatcgctgtcctcgattgt

SEQ ID NO: 176256 - DNA, 240 bp, Zea mays
  Clone ID: MRT4577_92339C.1
gctttttcgggcggttgcttcctttacccgtttccccggtccagttaagtttcggtgggtcggcggacttggggtttgtgcctggcttggtttggtttctttcttcgcaggcctctggttcgaattcgttcgcgggggaagaaatcggggcgcaaggaaaacgcgaacggatattctcaccggggggcacgctatcgcccaaaagccccaggggcccggttaacacgggctaccgggcga

SEQ ID NO: 176257 - DNA, 722 bp, Zea mays
  unsure (1)..(722): unsure at all n locations
  Clone ID: MRT4577_9233C.1
accatctacacctcccaactctgcctcccaactcccaagtcccacccccactccctcgctcaccagaggaactagcggccaggcaaagccgagccgcaaccgcgaagatcttgcgtggcctccttttcccagctcgtcactgtgccgccgccgccgccgccatgacctcggactacacctcctcggtcttagctccggcgtcttactcttacatgcaaggcggagcgccgaagagaatgaggaggagctacggcggcgcgccgcccagcctcgcacatgacgcggccatgcctggttttggccttgataaagtgagctaccactaccagccgttgccgttgcctccttattacgtcgggagcagcagcggctcgtcagacgacgcgtcggtgggcagccttggtcttctgcaggctgatggtgctccacaggatggggcgagcgctggggatatctggagcctcgacgagctgctcatgctggcagcagctggtgcttattgagaaccgcaagaaaaaaaaatgtgttggcgctgctagctggagacgagacgagggcgagaggcagttgcatcatccngccatccgctatcgttttgtctctcctatatctagtagtatacatgcttctggcagtcgactctatggcatgggnngtatagtgtgttgctgccgtctatgattggagcgagctcgagactggtcataattcacttttgctac

SEQ ID NO: 176258 - DNA, 1351 bp, Zea mays
  Clone ID: MRT4577_92340C.1
acctcggcccgtgcgccgagagcccgcagccggaacggaacggactggatggcgtccagttcgctcctcgcaatgggagcggagcggacccaaaaactcgaaaagtcgaaatccaaacccgctgatcagcttatccccttcgcaggagccaggacggacgaactgcgagtacacgagagaggacagaggagaggagacacaggcgacacgcgccatttgggagagggaaaggaatggagctgacgtcttcttcccgctccgtgctctcctcctgcaaccggccggtcgctcgagctctttgcaggacggcgtacccgggtgcaaggaggaaggagaagggaatagtatgtatcttgagcgaggagaaagaagtggtacaaaggacgatccggaggcgagctgccttttctttgttgctggcttcgccggtgctatcagtggcgttctcggcctatggaaagagtaaaaccatgaacccttacgatgaaaggcgtctgcttcagcagaataagaagattcaggaagccaaccgtgcccctgaggatttcccaaacttcatcagagaaggcttccaggtcaaagtagtgacaccggacaactatattacacgggcctctggactaatgtatgaggacattaaagtcggtacaggcgactctccaaaggatggtcagcagattatattccattatgtgggctacaatgaagcaggacgaagaatagatagcacctatattcagggttcccctgcaaaaattcggttagggaacggaacactagttccaggttttgaagaaggcatacgggacatgaaaccaggtggtaagagaagaattataatacctccagagcttggtcctcctgttgggccttcgacgttcttcagtgcgaagcagttcgaagtgttcgatgtggagctactggcggtgcaggactgccagcggaggacgatagcattttactctgatgtcgtgtgcagctgagcttcggtttgtctagtcttccgcctatggcacatcgcagcagcatcctgcacttttggctgctggtctgagttgccgtccaattgtgtatatatataagccagctgttgttactgcggctactgatgatgggcaatggtagtgtgttattagttcttcatttttgtcttgaatctcctgatggcgggatatgcgcatttggtgtttctgtttagaagttggcatgtgtaccttgatgttgaggttactcctggtcctacctctaccaaggactccacaccatctgactctgcttcttattcagtactaattcttgcgagtttggtggcggtttttgtaaactattttcaaatacctagtgatggtat

SEQ ID NO: 176259 - DNA, 367 bp, Zea mays
  Clone ID: MRT4577_92341C.1
ctaatgtcaccgtctaggcttcccaccaaaaaaaaaaaaaaaaaaaaaaaaaaaaaaaaaaaaaaaaaaaaaaaaaagagaaccagaaacctgaaccctatggtaaatttcccgcctgggcgggcttccgcgctttgggtctgttttctggggggtgtgtgttcccccctgacctttttcttcccctcactttgccccccgcctaacgtgtaaagcctgtaccgtgtaccgcctggtctgactgccatttcatagtggttaactttctgggcgcttcgcggtctgccagcctgccatgcgtggcgcctgcctgcctggccgttttcacgaatcgagcaccgtggcgcatggggcgttctgggttttg

SEQ ID NO: 176260 - DNA, 216 bp, Zea mays
  Clone ID: MRT4577_92342C.1
ggagtacatcgagctggcgcgcaagatcggcaagttcgacgaggacaggctggcgctacagatgcgtctgctgggcaaatccggcatctgggaccagtcgtacatgccgcgctgtgtgtttgagcccaacgcccgctgcgccaccatgaatgagggtcgcgccgaggcgttcacagacatgtttgcggtgctggacgagctgttctacaagagccg

SEQ ID NO: 176261 - DNA, 551 bp, Zea mays
  unsure (1)..(551): unsure at all n locations
  Clone ID: MRT4577_92343C.1
nggccgttgccgctgaataattacgctcacgatccgttttatagggggggtggagtgaatgcacatgcggtacaagcagagctgatcgggattcctcgtctctggtctgtctgtgctccaccacctgctgctggtgccatggccatgggtagtctcgccttcgccacggcgctcgtcttcgtcttcgtcttcgccatcgccgtgccggccgtcgccgccgccgcgcaggcccccgccccggcgcccaccagcgacgggacgtcgattgaccagggcatcgcgtacctgctgatgatcatggcgctggtgctcacctacctcatccaccctctggacgcctccgccccgtacaagctcttctgagcgagcagattttctcctccattttttggtaggcttttgtagtggatcactagagtaactgggggtggtggtgtgggtgtgtgggtgagattcggtacctattcattgccatgaattacattcggtttcgcgtgtgtatattaataaaaaaaaaaaaaaaaaaaaaaaaaaaaaaaaaaaagcggcca

SEQ ID NO: 176262 - DNA, 306 bp, Zea mays
  Clone ID: MRT4577_92344C.1
agggcagcgaaagctttgacattttgcaagctctggagatcacagaagccagagtgtagctacaaaaaaatgatcgatttcacacgcatccgcgcatacagtgtgccgagccagcgacaggtttggcgtcatgacgcttcagaagtcgagcaaaaacaagatgccaagggcagcgtcaggttcattatttgctaacccagacagcttcggcgcgacgacgacaaccctactcctatgaacagcaaaatctcctcctaacgctggtcgattggtgctgcagagcttctaccgtctccaccagttcca

SEQ ID NO: 176263 - DNA, 276 bp, Zea mays
  Clone ID: MRT4577_92345C.1
gtggtgtccttggccgtggggctaccgctcccctcggagcttacattgttgttgcggcggccgtacttcttgggaacacgtgagaggtcctggaatgtgcccgaggcgacattgacgggctactagttctgcttcttgcggctctctcgggtgcccttcttgctattttccttacggttcttctaggcctacccgcctgtggtatccatggatgaagtgccggagcccctatagcggtgccatctcgaccctcgggtggagggggaccgggtggag

SEQ ID NO: 176264 - DNA, 704 bp, Zea mays
  unsure (1)..(704): unsure at all n locations
  Clone ID: MRT4577_92346C.1
aattcggcacgaggcaaggccgcagcatatccgtagcaacgctgcagtactttcgtcacttctcaccgaaaaccaatcgccctcctccccacgcctgtggacccaaaaaaaatcaattcgattttctctcttccgttctccccacacaagaattgacctccgttttattgccgctcatctcaatctaatctctctctctagctcccccaatcgccagatcacagagagaggggaagagcgtgaggagggacgagaaagccaagctgtatagcgagaaagctcagttgagttctgttctgcttttgtcttcctctctcgctggatctactactcccaccactgcctctgcctcggcctcgttgctgctggctgcgtgcgtgactgcgtgcctttgcccaaagcaagcctgcctgctcggtggctcgcttcggttgcagctgcagtgacctcaccctgcctctatgcttgctctcccaccatgtgggggtggtcttcgcgctccaactaacccccaccagcagcgcatcacaccaccgcatcgcaccgcgatgccaaccctgggtggcgtcacgcggcccggcggcttcttccgcgcgccgcattgcaatgccgccaccgccgctggacggacccgtgaaggagtactagctagctagctagcccagcggcagcgggcgaggcgaagggagccgnaggtcgttctt

SEQ ID NO: 176265 - DNA, 699 bp, Zea mays
  Clone ID: MRT4577_92347C.1
gggtacctcgaggccggccgggtttcagaatccacacgccactgtcgcggtaacagagcagctagccaagagtagtagccgcgtgcccgcgtgcgcttcccgaaccccgagtcccgaccagagagagacacggagaggagcagacctgcccgtcgcaatggcgatgccaccgaagcccggcgacccgccgcagcgctcgccggcacgtagcccaaacctcaatctcccctgcccgctgccgccggtcccgggcggggcgccgccaccgccgcagcagcagccgggcgccgggctgcccccgccgcgcgtgggccaccaccgccgcgccagatctgaggtggccttccgcttcccggacgacctgcccggcggcgggggcggcggcttcgacgagatcggctccgaggacgacctcttctccaccttcatggacatggacaagatcgccggcgccgaccgcgaccgcgccgccgagacctcctcgccgccgcgcccagccaagcaccgccacagcgtctcctttgacggcttcggcatgggggctgccgccggcggcccgggcggccagcaggacggcggtggaggcgtgttcggagaggtgatggaggccaagaaggccatgtcttccgagcagctctccgagctcgccgccatcgatcccaagcgcgccaaaagaattattgcaaacaggcaatctgc

SEQ ID NO: 176266 - DNA, 642 bp, Zea mays
  Clone ID: MRT4577_92348C.1
gcctttgcccaagcctgcctgctcggtggctcgcttcggttgcagctgcagtgacctcacgctgcttctatgcttgctctcccacctgtggtggtggtcttcgcgctccaactaacccccaccagcagcacatcacaccaccgcatcgcaccgcgatgccaaccctggtggcgtcacgcggcccggcagcttcttccgcgcgccgcattgcaatgccgccaccaccgctggacggacccgtgaaagagtagttagctagctagctggctagctggcccagcggcagcgggcgaggcgaagggatcggaggtcgttcttgcagagcctgttccggaagcgagcgagcgcagcgccgccgacatgttcaagtcgcgatggcgcggcggcagggtcaaggccgtgttcaagctgcagttccacgccacgcaggtgcccgagctgggatgggaggcgatgatgatgagtggtgacgccgcaggacgctggccggccgacggcgcggtcggagcccgcggaggtcaccgagggcgcgtgccggtgggcggcccctgtcatggaggccaccaagctccccaccggcaaggacaagatctaccagttcctcgtctatgagaccgggtcgagcaagcggcgctgctgggg

SEQ ID NO: 176267 - DNA, 970 bp, Zea mays
  Clone ID: MRT4577_92349C.1
cattgggtacctcgaaggcggccgggacccacccgtccgggtaaggcaacatgcgtctgagcgagacagcgagacagcgtaaaggggcggccggcggcggggtcctgtagcacgctacagtgatgtgaggcgccgccaccaagccgggtgaggcaccaccgcttagatccagcagagctccaggcgccgccaacccctgcctccagctctaggcgtcatcgaggcgtcgaccgctgcctccagctggctcgcaggccacactgcgccgacttggcgactcggatccagtcgtcgacgccccctgccacgctgcgccgccgccctctgcctgggcactcgtgacctgcgtccaagaatgcagcagccccaccccggcgtatcaggtcccaacagcgggcactcctctgcgaccaccatcgtcggctcatcatcagcagcaagaggcacctcacgcccgaaccctcgatccgtggccccgtcgtgcagcccctcgccctcttctatgcgccatggatgtcgatgatatttgtgacattgacaacaatgtgtcccatgaagatgaaatacatggtaccggggaggatgctaatggtaacaacagtgaacacatggtggaggaggaccatgttcctgcacctattggtagtgaggtgaatgtcctctgccaacaagttattcgtggaaaaacaagtccatagatggagaccatcgtgtagtgaagcgacaactaacaaccaagtcaaccaataccccaacaagcaagtttatggcaccttcatttaaagcagcaaggtcaaacgacaacatggatttagtgccacaattgccatgctagagtactatattgtatgatgtaaacttattgatatattgttatgttagagtactatgttgtatgatatatacttattgttatattgtcatgttggaccaactgaattatagcgaaagtatgcattatccgataagt

SEQ ID NO: 176268 - DNA, 1004 bp, Zea mays
  Clone ID: MRT4577_9234C.1
atggggttgagccgtatagggcgaagtggggagtacagtggctcaccgcctttgagggaaggtggttgacgaggtgtgtggcgatgtgcagggcctctgcccagtagctggcagggagagacgcctggaagagaatgcaacggatcatattagtggtggtgccaatcatgcgttcgacccggtcgttctggggagatgtgtaggggcacgagagacacaactggacacggtgagttaggaagaaagagtgggaggcgtggttgtcgaacactcggcaattgtcacactgcagggcacggaccgggcgacgaaactgggtggagacccaggcgaggaagtgcgtgagggtggtgaacgtgtcaaacttcggcggaagaggaaaagtctatagagggtggaggttcctgccaaaatcatcagataggacccatattcttggagactgagtagaagagagtgccttcagctgctgctcctggagctcctttttgttgaggaaacgccccctggtccacggactcgcttcattgcatgacgatgccgagattcatggagatatggcttccgacctttcaccagtttattttgggcctccagttttgcgcgtttttgcctcctccggaggatagcattgtattgctttgcattgacaaatatgggttcctctgctgcaggcccaactggcaatggtaccctagtgtttgctgcaccactaatttggggatggacaattccatttgaagcgtatcctgcccacaccccgccataatatggatcagcactataagaagcacaaccctggaaaaatagtgggtagctggaaaaacttgttaggatttatgggcttggcccaattaagaatttctaataaatcccaggaaaatctcaaaagcccatataagtggatggcaaagggataggtgaaaccaatagcaccatattgctagctctagtggagtagagctagcttaaatatgtaagccacactcactcaccaagtcatg

SEQ ID NO: 176269 - DNA, 576 bp, Zea mays
  unsure (1)..(576): unsure at all n locations
  Clone ID: MRT4577_92350C.1
ccggccgggatcccagatcccgcactctctttcagaacccaacacgccactgcctagctagtagctagcagagcagctagccaagcaacccagccgagtagccgaccagagagagcgagagaggcagagaggagcggacctgcccgtcgcaatggcgatgccgccgaagcccggcgacccgccgcagcgctcgcctgcgcggagccccaacctcaacctgccctgcccgctgccgccggtcccgggcgggccgcctgcgccgtcggccgccgggttgcccccgccgcgcgcgagtcaccaccgccgcgccagatctgaggtggcctttcgcttctcggacgacctggccggcggcgtgggcggcggcttcgacgagatcggctccgaggacgacctcttctccaccttcatggacatggacaagatcgccggcgccgaccgcgaccgtaccgncgagacctcctcgccgncgcgcccagccaagcaccgccacagcgccttctttgacggcttcgggatggggggctgccgccggtggcctggcccggcagcaggacggcggcggaggcatgtttg

SEQ ID NO: 176270 - DNA, 402 bp, Zea mays
  Clone ID: MRT4577_92351C.1
attgtacattctctcttgcttgttttattttttttgatgcttgcaagctaaaggacaaccaacaacggggtggggagaaccaagggggaccaaaaacaaaagcatgtccgtttgcttggtcccacgcgggcccacaggcgccccggatcggaatctttttgggattctgaagacccacgcgggcaaaccgggcacacaacattaccagcccatacctcccttagggggggcttgcgataaagcagctagccggcccaacccataaaatcagacggcgggtcgcggccccccttggccagcacggcgggcccgtagcaggcgctatcggggcagaagttggaaatggggaaccggagccctacccggggcaggcgggggacctgggcgggggaaaagaccctg

SEQ ID NO: 176271 - DNA, 2211 bp, Zea mays
  Clone ID: MRT4577_92352C.1
caacgaggtcctcgaggccgggggggcgagatagcggacccgagggggcaccagaagcagccagcaagctcatgcccttcaaaagcctccggcagcccagcgccccagccagctagtggtgatctctcatctcagcagcgcgcctgaacgtgtgctccctgctaagctctgcgcctcgataggcaaaggaaaatcaaaccgatcgtcgtcagattaaatggccggtagcagcgcggagcagctcctctccaggatcgccgccggcgacggccacggcgagaactcgtcctacttcgacgggtggaaggcctacgacatgaaccctttcgacctgcgccacaaccgcgacggcgtcatccagatgggcctcgccgagaaccaactgtcgttggacctgatcgagcaatggagcgtggaccacccggaggcgtccatctgcacggcgcagggcgcgccgcagttccggaggatagccaacttccaggactaccacggcctgccggagttcagagaggcgatggccaagttcatggggcaggtgaggggcggcaaggtgacgttcgaccccgaccgcgtcgtcatgtgcgggggagccaccggcgcgcaggacactctcgccttctgcctcgctgacccgggcgacgcctacctcgtgccgacgccttattacccagctttcgaccgcgactgttgctggaggtcaggagtgaagctgctgcccatcgaatgccacagctcgaacaacttcaccctcaccagggaggcgctcgtgtcggcctacgacggcgcgcggaggcagggcgtccgcgtcaggggcatcctcatcaccaacccctccaacccgctgggcaccacaatggaccgcggcacgctggcgatgctcgccgcgttcgccacagagcgccgcgtccacctcatctgcgacgagatctacgcgggctccgtcttcgccaggccgggcttcgtgagcatcgccgaggtcatcgagcgcgacgccccgggctgcaacagggacctcgtccacatcgcgtacagcctctccaaggacttcggcctcccgggcttccgcgtcggcatcgtctactcctacaacgacgacgtggtggcctgcgcgcgcaagatgtccagcttcggcctcgtctcgtcgcagacgcagcacttcctggcgatgatgctcgccgacgcggagttcatggcacgcttcctcgcggagagcgcgcggcggctggcggcgcgccacgaccgcttcgtcgcgggcctccgcgaggtcggcatcgcgtgcctgccgggcaacgcgggcctcttctcgtggatggacctgcggggcatgctccgggagaggacgcacgacgcggagctcgagctgtggcgggtcatcgtacacagggtgaagctcaacgtgtcgcccggcacgtcgttccactgcaacgagcccggctggttccgcgtctgctacgccaacatggacgacgacaccatggaggtcgcgctcgaccggatccgccgcttcgtgcgccagcaccagcacagcaaggccaaggccgagcgctgggcggccacgcggccccttcgcctcagcttgccgcgccggggagcaaccaccgcttcgcatctcgccatctccagccccttggcgttgctgtcgccgcagtccccgatggtccacgccagctaggtagtcaccgagcgttcggtaagactggctgtaggttgtgccctcacatgactgcaaacaagtggacaaaaaaaaaagacaagactaataaagggcgtacgtagctagcttgacattacacagagacgttgcacaggcgtcggcggtaagcagctagtcaagcaggacgcatttgtcctcgattttttcgtgtatatatgtttttttttctgttttgccaaatcgcatgtatggtttggtttaacgttagtataaagcacgatagaataacgatcgggtatggtaatttagacctcccgatcaattgttcaaaacctgtcacgtaacttcaggatgacgaaggggcgaagtcccctatttcattaagaaataggaaagtatgaaacaaccgcacccacgcggtaggacctccaaaaagaacagccacggccagaaagttatctagactctaaacactatcgctagatcagtgaagagactatgataacagggaaagttttggcctacgaagagctacataagactttcttatatac

SEQ ID NO: 176272 - DNA, 267 bp, Zea mays
  Clone ID: MRT4577_92353C.1
atggctgaagaggggaagagtgacgatcttgctcttattgtgtattacaatgctgcggagagggccaatgtcgagaagattattaaagaaatcatggtcggtatatcagatgattcagatgtcaacgaagattttgattttagagaagacgtcggcgatgcagaagataggcccttaaagccgggccatgttgtcttcgtcaaatcgacaatggagaaggggcacatcaaggcgacgaagagcaatcattttaatgatatttctatt

SEQ ID NO: 176273 - DNA, 316 bp, Zea mays
  Clone ID: MRT4577_92354C.1
aggcaagggcccacccaccaaaaggggatgaacacccccgaaagccaccgggttttttacacagggtgttataacacatggggcaacaacaaatgcaaaaaagggtggggccttttttatttaaatggggggtccgacccatccgcaacccaaggaaggcaaggggaggtcaaccccaggaggagggccgggggggcaaagggatgggggaaacggttttttggaacccggggggggcggaaatggcctcccaccaagcctttacttgggggggggcggaaaaaaaccccgcttgggggtcttgctgaggtaaaac

SEQ ID NO: 176274 - DNA, 380 bp, Zea mays
  Clone ID: MRT4577_92355C.1
cagatcttaacagagtgaagtggacgcaacatcatatcgtccatcactacccctaccagatgaatcgagccgcgtataccaacaccacccaggctaggactatcagcctagaaaagaagtgaacttggtaacggccttggtgccctaggagaccgcgtgctcggcaagcttatacatgaggacgaggctcacccaggtctggatctcgtgggaggtgacggcggggtcatggttatagtgcgctagcttgtcagactcatccgcgagctgctcgaagatgtcttcgatgaacgagttcatgatggccataggcttggacgagatgccgatgtgagggagcacctggtgcagcaccttgtagatgtagagcttgtcaggct

SEQ ID NO: 176275 - DNA, 770 bp, Zea mays
  Clone ID: MRT4577_92356C.1
tccgggagaagcgagagagatccggagcagccgcagtcccaccgaccccgccgccggtcgccctccatctcctcgccgctgcctctcgatctttgtacagtttctctttccaataatcaagatgagccgtggtggtagtgccggtggtggtcaaagttctctgggttatctttttggaagcggtgagccccccaaaccagcagtggcaccagctgcaagtgctccacctgttgagaaaccatctgctgcaaagactgatgcgaccaagcaggttgctgctggggttaccagccaaaccaataactaccacagggctgatggtcagaacactggcaacttccttacggaccgtccttcaaccaaggtccacgctgctcctggcggtggctcttccctgggctacctgttcggtggcaactgatgcccgtgctggtgctcaccaaagttatcctcccccgcctgctgcatgctatgtctgaatcgtgaacaaccgttgttgtcatttcatgtgtgtaccccgtgcaatgctttgtgcgtatggttgatttctctgtggcaaacttcccgtcctgcatggggctgtaagctgtctctaaatttcacggcaagtcgtgtgcctgaaccttcatcttaagttgttgtcgtatcccttcgtcttgtttcgtttgcaccccgtgatggtatggattggttgctgaccacttgatctatctattctgcattttcctttgaaaaaaaaaaaaaaaaaaagggcggccgctcgcgatcta

SEQ ID NO: 176276 - DNA, 275 bp, Zea mays
  Clone ID: MRT4577_92357C.1
tgggctcaacgaccaaaagggcgacggggggggggtcaaaaggggggaccggttttcctacaaattctttcgccggtttctttacatgttcggcaacgttgtgatggacattccccacgcgctggttgaagagaaacttggaagcatgaaaaaaggcaagggggtgaaaaaacgaaacgaccttaccggcaccgggcttaaagaggttgggaggcaagaccagggcctttaccttggggcttaaggagaggcatttcccttagaacccaagaagc

SEQ ID NO: 176277 - DNA, 707 bp, Zea mays
  Clone ID: MRT4577_92358C.1
tcggcctagttctaggagggagccggagcagccgcagtcccaccgacccccgccgatcccgccgccggtcgccctcatctcctcgccgctgcctctcgtttctcttttcaataatcaagatgagccgtggtggtagcgccggcggtggtcaaagttctctgggatacctctttggaagcggtgagccccccaaaccagcagtggcaccaccagctgcatgtgctccacctgctgagaaaccatcggctgcaaagcctgatgccaccaaacaggttgctgctggggtcaccagccaaaccaataactaccacagggctgatggccagaacaccgggaacttccttacggatcgtccttcgacgaaggtccacgctgctcctggcggtggctcttccctgggctacctgtttggtggcaattgatgcccacgtcggagctcaccaagttatcctcccctgccccgctgcatgttatgccatgtctgaatcatgaacaactggtgttgtcgtttcatgtgtgtgtgtgcccccgtgcaatgctttgtgcgcatggttgatttctctgtggcaaacctcccgacccgcatggggccgtaatctgtctctaaatttcagggcaaatcgtgtgcctgaaccctcatcataagtcgtcgttgtaccaagcttgtttcgtttacacctctgtgatggtatggcttggttgctgcc

SEQ ID NO: 176278 - DNA, 650 bp, Zea mays
  Clone ID: MRT4577_92359C.1
actaactcagacgcgcgcatgccctcctcctctcttcttgttgcttgcacacaacttctacctgcaagctatttatttgcgtccacaccatgtaaatgatcagcgtcctcaacttctcctgacatatgctgctgcctcgaatgctccccccctactgctcaatcagataatcatgtactgcattgactgcatctcgcgcgaggcatgccgatgcaccacaataagaagtcaaattatctagatcccctcgaattggattcgctcttgctctccgccatgacaggaggacatcctaataaccttctgaaccaacactacgcatcacaatcagtggagactttgtcacatccacgcaaagaactgttacaagaccacaaagtgcttgcagggctccaccaaagaactctcaatgaagctaagatgaaagattacgagagttacgactcttcggcaacacatgtgtaatgctcacttacatggacatacctaactagtcggccccactacataatatatacattgaggtgaagattggtagtcgagtccactatcctacgagctcataactatcatactatgcctaataaactacatgtatcatcaccatgcatatatgtggatagtatatgtactgccgctagatgtatatg

SEQ ID NO: 176279 - DNA, 392 bp, Zea mays
  Clone ID: MRT4577_9235C.1
atgataatgcttattggtaagtgatttatatttttacaacataagcagttggatacattcaagcgtgcaccgttgcagcccttttgcatggtgctaaaggagctccgtaggcagggatcaccatacgatcaagagagcattaacgtatccatgacaatgtggtcatttgcacagttcagcaagcacggccagtcccaaaggggcagggaaaacccgcagcatcggtagtcgggatctgccaagcgtcggggatttctcatggcgatggtccctcggcatgggcacgagttctatgtaggccagcccatgcatcgcgctcgaattggctgccggtccatcccgacgctatggcatgtaggtctcacagatccgttgctctcaagagcctcgaa

SEQ ID NO: 176280 - DNA, 587 bp, Zea mays
  Clone ID: MRT4577_92360C.1
tcgccccggtcgccctccatctcctcgccgctgcctctcggtaaggccctttcctttgcccgctcaaccctcgccacgttgtcgcgcttccatgtcctgatttgcgccgtaagcgcccgaatctagccgcaaggttgagatccgcgtccatttctggcttccgagcgtccgctgcttgtcggtagacgcggatctgttgaattttgtgactcaccgtcgtcgatccgcaggatctttgtacagtttctcttttcaataatcaagatgagccgtggtggtagtgccggtggtggtcaaagttctctgggttatctctttggaagcggtgagccccccaaaccagcagtggcaccagctgcaagtgctccacctgttgagaaaccatctgctgcaaagactgatgcggccaagcaggttgctcgctggggttaccagccaaaccaataactaccacagggctgatggtcagaacactggcaacttccttacggaccagtgttcatccaagttccacgctgctgtttgcgacatgtacttgctgcgctacctttccggatacaactgatgccctagcttcaccggagtgt

SEQ ID NO: 176281 - DNA, 357 bp, Zea mays
  Clone ID: MRT4577_92361C.1
ggaaggaatattttctttatcaactgatttaattcatagactagaaattatagagataggtttagagaacggtacaacgtccacctccaaggtttagagaacggtacaacgtccaccacccccaaggtgtagcccacaaagattgcatcctgccccaaaccctccatcaagtttcgaacgaacagttatctcagagtcatttgtaattcccatacttgtcaacgactgatgtttgttggacgtgctaattcgaacattgtcgcagtaaaggtcacatttcgaagcagaggcgccactggtgtttaggatggtgtcttggagtctctttatgtcccaagtgtcgtcaatctttacttg

SEQ ID NO: 176282 - DNA, 662 bp, Zea mays
  Clone ID: MRT4577_92362C.1
tcccaccgacaccgccgccggtcgccctccatctcctagccgctgcctctcgtttctcttttcaataatcaaaatcacccgtggtggtagagccggtggtggtcaaagttctctgggttatctctttggaagcggtgagccccccaaaccaataactaccacagggctgatggtcagaacactggcaacttccttacggaccgtccttcaaccaaggtccacgctgctcctggcggtggctcttccctgggctacctgttcggtggcaactgatgcccgtgctggtgcgctcaccaaagttatcctcccctgcctgctgcgtgctatgtctgaatcgtgaacaaccgttgtcatttcatgtgtgtaccccgtgcaatgctttgtgcgcatggttgatttctctgtggcaaacttcccgtcctgcatggggttgtaagctgtctctaaatttcacggcaagtcgtgtgcctgaaccttcatcttaagttgttgtcgtatcccttcgtcttgtttcggttgcaccccgtgatggtatggattggttgctgaccacttgatctatctattctgcattttcctttgaaaaaaaaaaaaaaaagggcggccgccgactagtgagctcgtcgacccgggaattaattccggaccggtacctgcaggcg

SEQ ID NO: 176283 - DNA, 692 bp, Zea mays
  unsure (1)..(692): unsure at all n locations
  Clone ID: MRT4577_92363C.1
ccggccgggatcacccgccacacaccacccctcacctccaccacgctgcagctcccggtagcacttctcctcataaacacagatactaccactgcaagtaaaccaggaagacaccaccatgtccgctgagccagaccacaccaagccgaagcctgatctgtccaaggacccttccggcgctgagcccagaggtgatgacgagatcgcaacagccatcctcaagaagaagaagaagcctaactccctcattgtcaccgacgccgtcaacgatgacaactcgattatcgctctctcgaacaacaccatggagacactccagctcttccgtggtgataccgtcctggttaagggaaagaagcgcaaggacacagtcttgattgtgcttgcggacgacgaccttgatgacggctctgcacggataaaccgntgtcgttcgccacanacctgcgtgtcaagcacgngtgacgttatcaccattcatccttgcccagacatcaaatacgccaagcgcatntgcagtncctccccatcgcagacacangtggagggcatcaccggggtcgttattcggacgtttttcctcgccccatacttccgcgaagcctaccgacctgtacgacagggcgacacatttaccgcccgtggnaggtatgcgacaagtcgagttcaaggtcgtaagagggtcgatcccc

SEQ ID NO: 176284 - DNA, 147 bp, Zea mays
  Clone ID: MRT4577_92364C.1
gcgacagctgttatttgcttgttctagaagtagctgttaatttctaattgcatgttgcgctgccaatgaacgaatcaacatgttgtccgggcagcatgtctggtaataggcgaccctgaatatactccgacagaatctctgcaacag

SEQ ID NO: 176285 - DNA, 750 bp, Zea mays
  Clone ID: MRT4577_92365C.1
gccggccgggtcgggagaagcgagagagatccggagcagccgcagtcccaccgaccccgccgccggtcgccctccatctcctcgccgctgcctctcgtttctctttccaataatcaagatgagccgtggtggtagtgccggtggtggtcaaagttctctgggttatctttttggaagcggtgagccccccaaaccagcagtggcaccagctgcaagtgctccacctgttgagaaaccatctgctgcaaagactgatgcgaccaagcaggttgctgctggggttaccagccaaaccaataactaccacagggctgatggtcagaacactggcaacttccttacggaccgtccttcaaccaaggtccacgctgctcctggcggtggctcttccctgggctacctgttcggtggcaactgatgcccgtgctggtgctcaccaaagttatcctcccccgcctgctgcatgctatgtctgaatcgtgaacaaccgttgttgtcatttcatgtgtgtaccccgtgcaatgctttgtgcgtatggttgatttctctgtggcaaacttcccgtcctgcatggggctgtaagctgtctctaaatttcacggcaagtcgtgtgcctgaaccttcatcttaagttgttgtcgtatcccttcgtcttgtttcgtttgcaccccgtgatggtatggattggttgctgaccacttgatctatctattctgcattttccttcaaaaaaaaaaaaaaaagggccct

SEQ ID NO: 176286 - DNA, 845 bp, Zea mays
  Clone ID: MRT4577_92366C.1
cggccggggccgcccccgccgccgccatcccctccttgccgtctccgggcacggcctcgtcaatcctttgctcctcctccgccgcagccgctgccatggactccacgccggcgcccgaggcggctcccggagcctcctcttccgccaccgccgctgccgaggatctggcggggggcgtggcggcgatgaccctggatgagcggttcgctctgctgcgggggatcggggaggagtgcatccaggaggacgagctcaggcgcctgctcgagaacaagcccgtgcccatctgctacgacggcttcgagccctccggacgcatgcacatcgcccagggcattgtgaagaccatcacaagatgggaggcgacctcaagaaaatctagacagtcgggcgctacatgatcgagatttggaaggcggccgggatgaacctcgacggggtggagttcctgtggtcctccgaggagatcaaccggcgcgcccacgagtactggccaatcgtgatggacattgcccggaaaaacaacgtcaaacggataacgagatgctgccaaattatgggcagaagtgaccaggacgacttgactgctgcccagattttctacccttgcatgcaatgtgctgatatatttttcttgaaggctgacatatgccaattggggatggaccaaaggaaggtcaatgtgctagctagggagtactgtgattacatcaaaaggaagaacaaccaattattctttccatcatatgctccctggttttaaagaaggcaggagaaatgtcaagagtgaccatcctcggtatctttatggagatgacgaggcccagtaatgtgaagataagcag

SEQ ID NO: 176287 - DNA, 856 bp, Zea mays
  Clone ID: MRT4577_92367C.1
ccggccggacccgatccctcttcatacaaaaccagccgcagttctccattttcgagcgcagaagcgagagagatccggagcagccgcagtcccaccgaccccgccgccggtcgccctccatctcctcgccgctgcctctcgatctttgtacagtttctcttttcaataatcaagatgagccgtggtggtagtgccggtggtggtcaaagttctctgggttatctctttggaagcggtgagccccccaaaccagcagtggcaccagctgcaagtgctccacctgttgagaaaccatctgctgcaaagactgatgcggccaagcaggttgctgctggggttaccagccaaaccaataactaccacagggctgatggtcagaacactggcaacttccttacggaccgtccttcaaccaaggtccacgctgctcctggcggtggctcttccctgggctacctgttcggtggcaactgatgcccgtgctggtgcgctcaccaaagttatcctcccctgcctgctgcgtgctatgtctgaatcgtgaacaaccgttgtcatttcatgtgtgtaccccgtgcaatgctttgtgcgcatggttgatttctctgtggcaaacttcccgtcctgcatggggttgtaagctgtctctaaatttcacggcaagtcgtgtgcctgaaccttcatcttaagttgttgtcgtatcccttcgtcttgtttcggttgcaccccgtgatggtatggattggttgctgaccacttgatctatctattctgcattttcctttgaaatgtacccttgtgcatttggatgcttctagtgtactgttcttgcatggttactcatatgaccgagcagttg

SEQ ID NO: 176288 - DNA, 589 bp, Zea mays
  Clone ID: MRT4577_92368C.1
caggcttaggggaatccttgtttggagtatattaaatacattgttttcccttggtttggaagatttgaggtcatccgtaaggaaagcaatggtggtaacaagacatttacatgcatgaatgaactaatttctgattacgagactggtgctttgcatcctgccgatgtcaaacctgcactggcaaaagcaataaatgaaattttgcagcctgttcgtgatcatttcaacaacaacaacgaagccaaagtttttcttaacactgtcaagaagtacagagtaaccaattgaggagtggaagctgtccatctttagggcatgtttacattagggtggatatcgccgtttgaaattcttgtatgctattctgttactagttgcataggtagctccaaagtttcatgtttttagatatataaaaagaatactttacttgttggctacttgatgtgcctcataggggtccacctaaacagtgttgccctgtaagtattcgataaaaaataaacaaagcccatatcccggagaaaaaaaaaaaaaaaaaaaaaaaaaaaaaaaaaaaaaaaaaaactcgaagagggggcccggtacc

SEQ ID NO: 176289 - DNA, 1049 bp, Zea mays
  Clone ID: MRT4577_92369C.1
gcaccaggatcggacggcctgctggaggtgttgggcccatccgtccccgggtactgggaccacccgatccctcttcaatacaaaaccagccgcagttctccattttcgagcgcagaagcgagagagatccggagcagccgcagtcccaccgaccccgccgccggtcgccctccatctcctcgccgctgcctctcgatctttgtacagtttctcttttcaataatcaagatgagccgtggtggtagtgccggtggtggtcaaagttctctgggttatctctttggaagcggtgagccccccaaaccagcagtggcaccagctgcaagtgctccacctgttgagaaaccatctgctgcaaagactgatgcggccaagcaggttgctgctggggttaccagccaaaccaataactaccacagggctgatggtcagaacactggcaacttccttacggaccgtccttcaaccaaggtccacgctgctcctggcggtggctcttccctgggctacctgttcggtggcaactgatgcccgtgctggtgcgctcaccaaagttatcctcccctgcctgctgcgtgctatgtctgaatcgtgaacaaccgttgttgtcatttcatgtgtgtaccccgtgcaatgctttgtgcgcatggttgatttctctgtggcaaacttcccgtcctgcatggggttgtaagctgtctctaaatttcacggcaagtcgtgtgcctgaaccttcatcttaagttgttgtcgtatcccttcgtcttgtttcggttgcaccccgtgatggtatggattggttgctgaccacttgatctatctattctgcattttcctttgaaatgtacccttgtgcatttggatgcttctagtgtactgttcttgcatggttactcatatgaccgagcagttgagtacagcgtgactgggcttctgaagcggccaaatgatcaagaaaccgttctggcgatgcctggagagtggcccttaaaaagtattcaggcaagccttggggatggaggttaaatagacctggttaaaaattatct

SEQ ID NO: 176290 - DNA, 743 bp, Zea mays
  Clone ID: MRT4577_9236C.1
cgttcctgcagcgaagccagccgccgccgagggtggcagtggcagtggcagtggcagcttcctcgtccctgcgccgccgccgccatgacctcggactacacctcctcggtcttcgctccggcgtcttactcttacatgcaaggcggagcgccgaagagaatgaggagcagctacggcggcgcgccgcccagcctcgcacatgacgcggccatgcctggctttggccttgataaagtgagctaccaccactaccaggcgttgcctccttattacgtcgggagcagcaacgcgtcggtgggcaacctcggtcttctgcagcaggctgatgatgctccagctccacaggatggggcgagcgccggggatatctggagcctcgacgagctgctcatgctggcagcagctggtgcttattgagaaccgcaagaaaaaaaaatgtgttggcgctgctagctggagacgagacgagggcgagaggcagttgcatcatccgccatccgctatcgttttgtctctcctatatctagtatatatatgcttctggcagtcgaactctatggcaatgcgtgtgtatagtgtgttgctgccgtctatgattggaagcgagctcgagagtcgagactggttcaataattcacctttgcctaccgtcgtaccgccggcctgctggactgtagtgtgcgtactgcatatatatgccataattatgtatgcactcctcctatataaactatattattatg

SEQ ID NO: 176291 - DNA, 219 bp, Zea mays
  Clone ID: MRT4577_92371C.1
gccgcgccgtggtttgcttgccatcatcgcggccaaaccgcaccctccttcccactcatctcggtttgtatcgattggtttcgtacccgcggaggagactaaggtatctgaatagcctccgtcggaagtgcgggtggagaccttcgcgggaggatcaccctgggatacgcgaccgcgcgcacgagtccgcgcaccgcgcaggcgaaagctgctcctcct

SEQ ID NO: 176292 - DNA, 252 bp, Zea mays
  Clone ID: MRT4577_92372C.1
acaaggatgaggccccgcccccgtcgtcgaagcccgccaagtccggcggtggcaagcagaagaagaagaagtggagcaagggaaagctggaggagaaggtgaacaacgcggtgctgttcgagcaggctacctacgacaagctggtgtgtgaggtgcccaagtacaagcaggtcacgccgtccatcctgtccgagcgcgtcagggtcggtgggtccctggctcggagggctatcagggagctggtggcgcgtg

SEQ ID NO: 176293 - DNA, 883 bp, Zea mays
  Clone ID: MRT4577_92373C.1
cattgggtccctcgaggccggccggggcctgctggaggtgttgggcccatccgtccccgggtactgggaccacccgatccctcttcaatacaaaaccagccgcagttctccattttcgagcgcagaagcgagagagatccggagcagccgcagtcccaccgaccccgccgccggtcgccctccatctcctcgccgctgcctctcgtttctcttttcaataatcaagatgagccgtggtggtagtgccggtggtggtcaaagttctctgggttatctctttggaagcggtgagccccccaaaccagcagtggcaccagctgcaagtgctccacctgttgagaaaccatctgctgcaaagactgatgcggccaagcaggttgctgctggggttaccagccaaaccaataactaccacagggctgatggtcagaacactggcaacttccttacggaccgtccttcaaccaaggtccacgctgctcctggcggtggctcttccctgggctacctgttcggtggcaactgatgcccgtgctggtgcgctcaccaaagttatcctcccctgcctgctgcgtgctatgtctgaatcgtgaacaaccgttgttgtcatttcatgtgtgtaccccgtgcaatgctttgtgcgcatggttgatttctctgtggcaaacttcccgtcctgcatggggttgtaagctgtctctaaatttcacggcaagtcgtgtgcctgaaccttcatcttaagttgttgtcgtatcccttcgtcttgtttcggttgcaccccgtgatggtatggattggttgctgaccacttgatctatctattctgcattttcctttgaaatgtacccttgtgcaaaaaaaaaaaaaaaaaatttgcggccgg

SEQ ID NO: 176294 - DNA, 169 bp, Zea mays
  Clone ID: MRT4577_92374C.1
gtgatgactgctgattgtgcagaattgatgtctcgtgatcacctcttcgtgaatcatgctggcaaaacgggctgggaacatatcactttcgggagacttgatttacattgtatcgctgttgaatcatgcacacgtcaaccagattcagtcaatacagccgattcagtga

SEQ ID NO: 176295 - DNA, 211 bp, Zea mays
  Clone ID: MRT4577_92375C.1
agtggctctccagtagcagcctaccagatctacggaatgcgatatggcagtataggcgctcaaggactccgtccaggatctactgcacggcatcccgctacgacaagtccacagtcgcgtcgtactgacggacctatcttggggtcacgtaactctggaagctgtccaacgtctcgcaggcccccgccgtgctggaactcgtgtccgtcta

SEQ ID NO: 176296 - DNA, 799 bp, Zea mays
  unsure (1)..(799): unsure at all n locations
  Clone ID: MRT4577_92376C.1
gattctctccttcttcctcctctctcctcacctgcaacctatcaaccgccctcccctccccttcgcctcccctccaagcaagcttcccatcgcgaccaaaaccctagccctacgatgtccggctcaggcgggccctcaggccgcggctcagcaggcggcactcggagcttcgacttcggcaccgacgacgtgctctgctcctacgacgacttcgccgccccctccgagcccaagcgacccgatccagtcgacaaggattttcatgagagcagatttgggagaccatctgttaaagtttatgaacaggagagttatgccaaagaggatgtactttctgctgttgagaaatgcatgaagaaatatgctgataatttgctaaggtctcttgaaggaatcaccagcaggctttcacagctagagatttattgctataagcttgagaggtccataggcgagcttcgagctgatgtgcttcgtgatgaaactgatctaagattaaagtctcttgagaaacatctacatgaagtgcacaggtctattcaaatccttcgagacaagcaagagttagcggatactcagaaggagctagccaagtttcaacttacacacgatgaatctaaaaagaaagatgtgctgacaccttctttccctgagccaaagaagcctgaagaaaagcgagatgcagcaagtcagcagctggcacttgctttgcctcatcaggtgaactcatcgacacttgtacctagagcttctggaccagtccagcagtancatggatcatctgtgcagcagacagccc

SEQ ID NO: 176297 - DNA, 287 bp, Zea mays
  unsure (1)..(287): unsure at all n locations
  Clone ID: MRT4577_92377C.1
ctgcactgcccngttttcttatcgnncgtgagcccggccgntagcgggggggaggcatggctgctccgaagctctctactctggccctggctgtgctcctggcggcgaccgtggtggctcccccggccgcggtgcgcgcggcgatgtcntgctccaccgtgtacagcacgctgatgccgtgcctgccgttcgttcagatgggcggggccatgccgccccagcatgtgaaattagncatcctcagcctgctgcagcaggccaacaacacccccgaccgccgtaccatc

SEQ ID NO: 176298 - DNA, 280 bp, Zea mays
  unsure (1)..(280): unsure at all n locations
  Clone ID: MRT4577_92378C.1
ttttcgtccgcgcaanaatatagaagggggggaggcgtgtacacgtactgccctatcctatatatagatagcaagacagatcattaccttgcaccaccacaaccagtcctcacataatcatactcattcacttactctcttacatcactgtactgaagataccatggccaagtacaccgcaatgtttgtagccgccctgtccctgaaggtggttatggaaacatctagcacaagcagtggaatgggcgcaagcaacatgcgatcccaagcccttgttggt

SEQ ID NO: 176299 - DNA, 318 bp, Zea mays
  Clone ID: MRT4577_92379C.1
gctcggaattcggctcgagcgccgatcttgacacccccatttgctacgcccagtcgagcatctatcatgtcggggtactgttgaaagtacacggcggagcacacgagcaacgctacctacatggccactcgctcaaaggaaatctttgatgctattgagagcgccgccaccattaacaaacgcatctcgatcctcacttgcttgggcttaaaggataactagtgtgccccaggtgagctgctatgctaggaagccgaacctccactgcaaatgactctagccatcctctcttaagagaccattgcctgcaggaccaca

SEQ ID NO: 176300 - DNA, 299 bp, Zea mays
  Clone ID: MRT4577_9237C.1
ggggggcaccaaaattttttcatgtgcctgggggtcactttttttgggggtcaagacgggaacatggggttacattttttgggggggggaggaacttccaagggttcccttggttttccgggcttaaaattggtcttttacaaaccacttttgtttttccactcggggccattcaacttaagggccagaggatttttttggagggtgggggggggtttgatccccaagaaaaattggcgggggcccccttaaggtcttaacttaccccaaaaaaaccttttttttaatgggtggcgaaa

SEQ ID NO: 176301 - DNA, 164 bp, Zea mays
  Clone ID: MRT4577_92380C.1
aacaaaagaacttcttttaaagcaagatttatttattgagggggcgaatgccattatcataacaacccttttttttacatttcccaattactaccaaataaatcccatataacacctaagttctcccttaaaaattcccaccaataccatatagaaaaataaac

SEQ ID NO: 176302 - DNA, 377 bp, Zea mays
  Clone ID: MRT4577_92381C.1
ccatttttaggaaagatcttgggcaaggcgaaaagtatatcgtggacaacggccaccttgtggcgtggaacacaagctatgtcatggaacgcgtcgcgtcaggtggcatcatctccggcttgtcttctggagaaggccttgtttgcaagtttacgggccccggtaccgtcttcatgcagacaagaaacccacaagaatttgctgcttttgttggtggcatcaatcctcaagatatttagaaaattagtagagcatggtcccctttgagcatgaagtttaggaagcagacatggctactagttttttgttggtggaagcggtttctcaattctgtactatatactttgaatcatttttgcttttcattggagttttga

SEQ ID NO: 176303 - DNA, 497 bp, Zea mays
  Clone ID: MRT4577_92382C.1
acctcgggctatctgattccataagaccacctggccttactgacccacttcatgacaatgcctcaaggagatacgatcgggatcggctgagcactaatggtgctgaagctacatgtgaccgaactcctaccattcaccaaatgacaatcatgacatatggcaagcctgtctaatacctgccttctctgcctcacaaaagctcgacttcctctgcactgaccaccgaaaccaatggatccctacataagcccacccttgctgaacctataagcccagctcgcaactatctgaaaggggactactgccactgtgccacacacaaaacgaaccgacactgtaaaaggcaaagccaagcgtgcctattgaaaggactgacatacattaaatctgtggtgctcactgtcaggaatacagccggtaaaactggatgcccaaccatataaatgactataaactacgcacaatgagaagcaaacggcgactagtgcgctgctact

SEQ ID NO: 176304 - DNA, 198 bp, Zea mays
  Clone ID: MRT4577_92383C.1
aagctgcatgaagtgtgtaactcagtgactgcagcaggacagcagcggctaatagaagcctatggcgcggtatactacctgcgcatggagatagtgtagtgaacgctgtcaagacgtctttaatgcaagagagattagatagctggtgttggctgccatgcgatcctatgatgatggctggcttattggaaaacctat

SEQ ID NO: 176305 - DNA, 264 bp, Zea mays
  Clone ID: MRT4577_92384C.1
attgagcaggagctcccaggaggggcttctgggaagaatctggtcaagaagcatcgtgtctggcgttgtggggatgaatttttgttttgtttcttccttttttagttcttcaaagatagggagggaagggggaacatgagcctttgttgctatcaatccaagaacttatttgtacatttttttttcaataaaacttttccaatgacaaaaaaaaaaaaaggggggggcggccgattgtgactcctttcacccgggaattttttc

SEQ ID NO: 176306 - DNA, 399 bp, Zea mays
  Clone ID: MRT4577_92385C.1
gaccgtgataacaccatctatttttatgcgggtcaaggaattaaacacgaggggtccataggcaaagatacatttgtttataaggggccaggtgacgaagtcattgcagagcataacacactcacatacgctctatacacaacaaaagggcaatcggagggaggcacatggccaaaaccaccaaatgctcaagtacattgtccaaccgttgcaaaatactccacaagcagcctgagcctgcggctcaagacagcaagcgtatccattctctgggctgcccaccgagaggagagctcggttttcagattgcccccattgatgatacccggtgtcgtttgccccgtgaggcattcctaaaccacatttacgtcaggttttgccattcaggccttgatgctg

SEQ ID NO: 176307 - DNA, 792 bp, Zea mays
  Clone ID: MRT4577_92386C.1
attgggtacctcgaggccggccgggattcctgatgcacaaacggagtataccagactaccagtcacctccgcatggcctcccgggtcacgaggctgctcctgcaccgccgcctcaccaccgcagcggaagcctccgcgcgccgcgcgccgcaggctccctgtgccggcgccgctgtctccaaggatgttgttaaggctgaagcttcatcttgaaaaattcaaggtggtacattactaggtcaaacacttcaggtcctttgactactcgttatgagtgccgcaaagtatttccttgttctgtaaggccatctgcatcttactctacacaagcttcagaccagaagggaaaacaggaagggaaagacttgtcaaatgtagaacacccctttgatgatattacctacaatatacctgagaagccagtgacatttactgaaggtgcttcttatagtcttgtaatactcgccgggctcggaattgcaggactggctggatatgctgtgttcaaagagcttatatttgagccaaaagagtaagtcccttgcatttgttatttggcttctgtttgaactttgcagaatgataaatgatacaactgtgactaattgtattttgacattataaatgtgttaataaatagtaaggattactgcattcttttaagtatacaaaattttcttgtcagaattttgcagtgattcttttatgatatgatacacatctcctgtgtatttgagaaaaaaggatttctaacactaatccccatcttatgtgcactgtacaaattaccac

SEQ ID NO: 176308 - DNA, 1845 bp, Zea mays
  unsure (1)..(1845): unsure at all n locations
  Clone ID: MRT4577_92387C.1
cattgggtacctcgaggccggccgggaggcgtttcaccgcccgcccgctccgtcgccgcgagggcaccagaaagccgataatccacccaaacagttctctgtttcccctgttcgctgcctcctcattcctgaacccctcccccaagtatacgagactaccagtcacatccgcatggcctcccgggtcacgaggctgctcctgcaccgccgcctcaccaccgcagcggaagcctccgcgcgccgcgcgccgcaggctccctgtgccggcgccgctgtctccaaggatgttgttaaggctgaagcttcatctttgaaaaattcaaggtggtacattactaggtcaaacacttcaggtcctttgactactcgttatgagtgccgcaaagtatttccttgttctgtaaggccatctgcatcttactctacacaagcttcagaccagaagggaaaacaggaagggaaagacttgtcaaatgtagaacacccctttgatgatattacctacaatatacctgagaagccagtgacatttactgaaggtgcttcttatagtcttgtaatactcgccgggctcggaattgcaggactggctggatatgctgtgttcaaagagcttatatttgagccaaaagagtacaagatatttgggaaagctctagcaagaattcagagtgatagtcaggtcacgtcaaggattggccaccctattactggatatggccaggaaactagaaaccgtgcagctcggcaaagaattccaaataagatttggacagatgaggatggtgttgaacatgtggaggtgaactttctcatccgtgggccacatggagctggaaaagtgtattcagagatgttcaaagacactgatcggacgtggaagttcacataccttgttgttgatatcgtgtcacccccccatgcaaaaacacaactgatgttagaatcttacttaccagcataaggatgcaggaaacagaggcagttagcagtgccatgacatctccgagatttagctctgatagaagtagctaaactggggatttgtacaagtctagaagttgacaagattgtcataatgtactaccatcaaaccagttttgtggagtaataaacggttaatatggggaaacagggtattttttgttttctcatgagtaccttgtccaatacgtgggctaatccagcaagtcatcttttgtaaaatcatagcaactcttatggtanccgggattgggtttccaattaacnccatttggaaaggcccgactnangggccaaggccagggggtttaaaaaaaaagtcccttgcatttgttatttggcttctgtttgaactttgcagaatgataaatgatacaactgtgactaattgtttttgacattataaatgtgttaataaatagtaaggattactgcattcttttaagttctacaaaattttcttgtcagaattttgcagtgattctttaatgatatgatacacatctcctgtgtatttgagaaaaaagaatctctaacactaatcccatctttatgtgcactgtacaaatttacaacagttaatacgatgtgtaatatggaacttatttttgccctttaactagttatatatacatcttcttaatctggatgcatcattgtttatctgaggcacaggcacatgtgtctatgcttttagtttccttggggtcatagagtggcattttgtgcagtataggaataagaagctttattatcttgttttcgataaaggaagctttattaatcttagacaattacatcaagctgatacaagtgaactaagattactcccggcctctacacactaaggtgtacacagcc

SEQ ID NO: 176309 - DNA, 542 bp, Zea mays
  Clone ID: MRT4577_92388C.1
acccacgcgtccgttagttttgattttatctatttgtgaatatcacatgttcttatttctttataggatttggtagttaaaatttgttgattgtggagaaagctggaactgataaaatctattcggatgcatttacagtggcaaagggttcaactgggaaaaattccaaatgccaactgttaaaagcaagaacgggtggttattagcaggaggccttctggctgctcttcggctcgttcccgcttccgcccggaagccatatgccccggctgtcagccgggccatttgttttcctgacggtttacggaaagacccgaagagaatgtgttccttcatgagcagtgtaaaaactttgaatctcctctaacatactagtgctttattggtcgtagtttcttggtgcagtatgtggaaactgaataaatggcagtcctaataaaaataaaaataaaaataaaatgaccatcataggtaagctgtccagaacagaggcattgtcgatctttggcatcaaccagtaaaattcatgcaatgagcagcta

SEQ ID NO: 176310 - DNA, 542 bp, Zea mays
  unsure (1)..(542): unsure at all n locations
  Clone ID: MRT4577_92389C.1
agggagaatgggaaagctttcccacctggttttttttctttnancacacgggcttctgggnacagagcaaatgtgctgtcgtgggaggccgtgctcctctccgtggggggaaagaaccaattcggggggggggcttggttnatttttgttaaatggttctcttatacggggtaagactgaggagcgtcagcttgcttattgttcagattgtgngttgggctggccggccgatggcggtgtgccngacaagtgaatgatcaccaagtgcggggcgttccccccttacgcgttgtaattcatgctggtcttcttctttgcctgctcttgggtgatcccgttgttgaaattcttgtgggtgacctgtggagcattttggggtngagcgtgcttgccagtctttgcgcncacagcctttagctgagcgccattgaaatatgggttgggcgcgcgaatttttaaagggacatctggattgaatttcattttcttcgagggatctggggattttagcttctgcttcctctgttgggtgagggaactta

SEQ ID NO: 176311 - DNA, 2032 bp, Zea mays
  unsure (1)..(2032): unsure at all n locations
  Clone ID: MRT4577_9238C.1
cattgggtacctcgaggccggccgggacctaccaatctaccacctccccaactcggcaactccgcctcccaagtcacacccgcactccctcgctcaccagaggaactagcggaccaggcaaagccgagccgcaaccgcgaagatcttgcgtggcctccttttcccagctcgtcactgtgccgctcgtgccctccactcccggtccgcccaaccaataatccatccatccatccaccaccaccaccccgctgcggcgatgtgcggcggcgccatcctctcgggtttcatcccgccgtccggggtggcggcggcggcggcggcggcggccaagaagcagcagcagcagcagcagcagcggtgccgtgtgactgcggacctgctgtggccggggcccggcagtaagggagctccccaggaccaggaggaggacttcgaggccgacttccgcgagttcgagcgcggcctcggcgaggatgacgtggacagcgccggcgaaggcggcgaccccgaggtccaggagcttcctccgccggangccgacgaggtttgccttcgccaccgcggccaaggcggcagttgatggcgtgatgacgacgactccaaaggatgtcaaaggagatagagcagtaaaaaagcgcggccggaagaaccagtacaggggaatccggcagcgcccttggggcaaatgggcagctgagatcagggaccctaacaagggcgtccgcgtctggctcggaacctacaacaccgcccgaggaagcagctagggcatacgacgccgaagctcgcaagatccgcggcaagaaagcgaaggtgaatttccccgatgacgacgcgacaggcactcgtcacaggccaacgaacgccgcgaacgcagcgaggctagtagctccacccccacccccgaaggcctgcgccgatgagatgtttaacaacctgaagaacgacgacggcgacaacaacaacaacaacgatgatctgtttgcgatgtttgcgttcggtgacaataagaaggaggccgttcctgcagcgaagccagccgccgccgagggtggcagtggcagtggcagtggcagcttcctcgtccctgcgcctgcgatggcggcggcggtgcccggtaataagaggaggtcgtccgcgaccaacattatggtctccgtctccgacgaccagagcagcaactcctacggctccggctcctccgccgacttggtggggtcgtggtcgtgggacgacgacgacgccgccgccgccgccgccgccgccgccatgacctcggactacacctcctcggtcttcgctcccgataacgccgtgctgccggcggcgtcttactcttacatgcaaggcggagcgccgaagagaatgaggagcagctacggcggcgcgccgcccagcctcgcacatgacgcggccatgcctggctttggccttgataaagtgagctaccaccactaccaggcgttgcctccttattacgtcgggagcagcaacgcgtcggtgggcaacctcggtcttctgcagcaggctgatgatgctccagctccacaggatggggcgagcggccggggatatctggagcctcgacgagctgctcatgctggcagcagctggtgcttattgagaaccgcaagaaaaaaaaaatgtgttggcgctgctagctggagacgagacgagagggcgagaggcagttgcatcatccgccatccgctatcgttttgtctctcctatatctagtatatatatggcttctggctgttgaactctatggcaatgcgtgtgtatagtgtggttgctgccgtctatgattgggagcgagctcgagactggttcaataattcacctttgcctaccgtcgtaccgccggcctgctggactgtagtgtgcgtactgcatatatatgccatagttatgtatgcactcctcctatatatactatatattattatgatgtgcttatactaaaaaaaaaaaaaaaaaaaaaaagaaaaaaaaaagggcggcgctcgcgatctagaaccccacgcgtccg

SEQ ID NO: 176312 - DNA, 1836 bp, Zea mays
  Clone ID: MRT4577_92390C.1
actccacccacatggtagccgcacggcatggtactgcgtgtgtgtgtgtgtggcaataaaaaggacctctgatcaagcctcatttcgcatcggcggacatggtggtggccgtgcagctggccgctcttctcgcgctgctgctcgcgctgtggcgcctggtgtggcggccgcacgccgtggcgcggtcgttcgccaggcagggcatccggggcccgcactacacgttcctggcagggtccttgccggaggcgattgggctcctcgaggccggccggagagggacggcgcccctggacgccggctgccacgacatcatgcccgtcctcttgccgcagtttcacagatgggtcgcggactatgggagaacgttgctgttctggatcgggccgattcccgctgtcttgtctactgatctacagctgattaagcaggttctgacagacaggacgggcctgtatcagaaggacttcatgatccccgtgctcaagttcctcttcggcaacggtgtcatattgataaacggagacgattggaagcggcaccgcaaagtggtcctccctgcgttcaaccatgagacgatcaagagcatgtcggcggtgacggcagaggtaacggagcagatgatgcagcaatggcgcggccagatacacggaagcgaagaggaatccgccgagatagacatgatccacgccttcaacgacctgacctccaaggtcaatggccgcgtcgccttcggcacgagccaccgggaagtcgaggaggtcattgtactgatgcgggagatgcagaagctcgccactgcggccacgctcgatgctccaatactctggtatctgccaactcggcgtaacctgcacgtccggcgtctgaacaaacagctgagaagcaagatcatgtccatcatgcaggcgcggctggccgccgacggagctgataggcgtggtgggcgcggcggcgccgtttccggcggaggcgacctacttgggctgttgctagaggcgtggacgccgcagccgcagcaacgggaacggcggcgagacgctgacaaccgacgaggtgatcgacgagtgcaagaccttcttcgccgcggggcaggaaaccacagctaccctcctggtctgggccatgttcctgctcgccgtgcacccggaatggcaggacaaagtcagggaggaggtcgtcagggaattctgcaccagcgacgacggcgaggttccccatgccgatgtcctcgccaagctcaagctgctatacatggtgttgctggagacgtcgcgcctctacccgccgatcgtgtacatacagcggagggctgcctgggacgccgtccttggaggcatcaaggtgccccagggcaccgtcatctccatccccattgccatgctgcaccgggacaagcaggtctggggccccgacgccgatgagttcaacccgatgaggttcgagcatggcctcacaaaggccgccaaggatcccaaggcgctgctgtctttctccctgggcccaagagtgtgcactggccagagcttcggcatcgtagaagtgcaggtcgtcatggcgatgatcctcaggaggttctccttctccctctccccaaagtatgttcacaagcccaagtatctcctgtccttgacacccaagcttgggatgcctctcatcgtcaggaatgtggatggctgagagggataatattgtaaaagctcgttttgtgtgtgaaaatgaatacatgactagtgtgtgataaatgatactctctttgttttaaatctttaactgtttcaatttttctacgtatattgctttaacgactacaaaaaaaaaaaaaaaaaagcggcc

SEQ ID NO: 176313 - DNA, 478 bp, Zea mays
  Clone ID: MRT4577_92391C.1
gcgcgcataaacctcactacgggactacgctggagctcgagggccgcttttttttttttttttttggttttttttttttttttttttttaccatttgtcacacactagtcatgtattcattttcacacacaaaacgagcttttacaatattatccctctcagccatccacattcctgacgatgagaggcatcccaagcttgggtgtcaaggacaggagatacttgggcttgtgaacatactttggggagagggagaaggagaacctcctgaggatcatcgccatgacgacctgcacttctacgatgccgaagctctggccagtgcacactcttgggcccagggataaagacagcagcgccttgggatccttggcggcctttgtgaggccatgctcgaacctcatcgggttgaactcatcggcgtcggggccccagacctgcttgtcccggggtctcatggcaatggggaaggagatga

SEQ ID NO: 176314 - DNA, 388 bp, Zea mays
  Clone ID: MRT4577_92392C.1
aaccgaggtcaaacatcgtcgggagcatgcattatcgtggtgtgatgcggcgtctagaactcgccgcgtacgacgtcgatgcaactgccgccatggaacgcgcctggtgcggcgccacggccgcccccgtcgcgcctgctaggcaccgggaggctcatcacgcggggggggtggctcgccgcgccgtcctgcgcggcgcgcacggcgaccttgacgctgacccacccctcggcgcggtccctagcgagcgccgcggccacggctcgcgcgccggccgctcggcacgcgttgcacgccggcccacggcacgggctgtgcgtggcccccgtcgttgcgctgtgcgaacccggcagctccaccgctgcgcctaactcctggccggctcaag

SEQ ID NO: 176315 - DNA, 758 bp, Zea mays
  unsure (1)..(758): unsure at all n locations
  Clone ID: MRT4577_92393C.1
ttgggtacctcgaggccggccggagagggacggcgcccctggacgccggctgccacgacatcatgcccgtcctcttgccgcagtttcacagatgggtcgcggactatggtaaacttggtgaccaccggtggtgctgattctccattttttttttcccgtttcttctctactagaagaaattgtcaagaaacatgtagtaggcgcctgtctacagttgttggaaatgcatggttggccgtgagtgactcgtcatgaaccagtgccgacaagacattatcttcaagattttgattaaacggaacctcaaatatacatatatattgttgggcatccgtgcagggagaacgttgctgttctggatcgggccgattcccgctgtcttgtctactgatctacagctgattaagcaggttctgacagacaggacgggcctgtatcagaaggacttcatgatccccgtgctcaagttcctcttcggcaacggtgtcatattgataaacggagacgattggaagcggcaccgcaaagtggtcctccctgcgttcaaccatgagacgatcaagagcatgtcggcggtgacggcagaggtaacggagcagatgatgcagcaatggcgcggccagatacacggaagcgaagaggaatccgccgagatagacatgatccacgccttcaacgacctgacctccaaggtcaatggncgcgtcgccttcggcacgagccaccgngaaagtcgaaggagtcattgtactgatgcg

SEQ ID NO: 176316 - DNA, 768 bp, Zea mays
  Clone ID: MRT4577_92394C.1
ctcgaggccggccgggccgggatcggcggaatggtggtggccgtgcagctggccgctcttctcgcgctgctgctcgcgctgtggcgcctggtgtggcggccgcacgccgtggcgcggtcgttcgccaggcagggcatccggggcccgcactacacgttcctggcagggtccttgccggaggcgaagcggctgctgatggccggcaggagagggacggcgcccctggacgccggctgccacgacatcatgcccgtcctcttgccgcagtttcacagatgggtcgcggactatggtaaacttggtgaccaccggtggtgctgattctccattttttttccccgtttcttctctactagaaaaaattgtcaagaaccatgtagtaggtgcctgtctacagttgttggaaatgcatggttggccgtgagtgactcgtcatgaaccagtgccgacaagacattatctttaagattttgattaaacggaacctcaaatatacatatatattgttgggcattcgtgcaaaaaaaaaaaaaaaaaacgggaccggggcgattcccgctgtcttgtctactgatctacagctgattaagcaggttctgacagacaggacgggcctgtatcagaaggacttcatgatccccgtgctcaagttcctctttggcaacggtgtcatattgataaacggagacgattggaagcggcaccgcaaagtggtccttcctgcgttcaaccatgagacgatcaagagcatgtcggcggtgacggcag

SEQ ID NO: 176317 - DNA, 427 bp, Zea mays
  Clone ID: MRT4577_92395C.1
tatttgactgttcaaaattttttttattctttttacgaactcaggctgcctaatgcacactggaaaaataattggctcttcctatccttacgctatttgtgctctaaataaaacgatctggtgtaatctgtgacgatttcccgagaactgatcaaaagtcaagttccatactaaacactcactcaaacattctaatgcacactgctgaagatcactgggcaaacacatcctctggctatcctacctctaaagaacacaatctgctaatgtttgggacgcataacatgccaactgatataaacatgtggcatcctgataacgcatgtgaaccaatggtcttgcacatcctcaatgtaatttggctttacagaaatccatctgcgggtcgcttagacatgaacttttggagaatatcttggtttagcat

SEQ ID NO: 176318 - DNA, 307 bp, Zea mays
  unsure (1)..(307): unsure at all n locations
  Clone ID: MRT4577_92396C.1
ganntcaacagcacaagagggatccagttacggcaatcgagctacaatggctaccaaggcatcttgccttcttatgctgcgtggtctctctgcccgtgttgctaacgcgacaacatgcccttattgctcacatgcttctatagttcctcttattaccccataccttacatcaatgatagctactggatgtgacatcccagatctctcacgctataggctccaacatgctatcgctatcagcctcgtacctttatcaaccttgtgtcatctaacagcagccccatttttggcgcatggaggggcacaa

SEQ ID NO: 176319 - DNA, 224 bp, Zea mays
  Clone ID: MRT4577_92397C.1
acgatccaccatcaccaacggcgccgcaaccactaacgtcaatctcaccgagaaaaacgtcctcgggcagtgagagctgtagcactgtagctgcagctgaactcgtcatgtgcatcaccgacccactggagccaaaacctccatgatcacgaccccactgcaggccgatcccattacaagatccacgctctgatccgttcgccgacgaccgagaccatgccgac

SEQ ID NO: 176320 - DNA, 425 bp, Zea mays
  Clone ID: MRT4577_92398C.1
ggaattcccgcggggagccacgcgtccgcgggcatgcttcatcacattgttgacttcataacgaaacacatcgtcttcggatcttgcatgattagttccgtcgtgcggggatgctgctgctaccagcagcatccagaagaagacgtcgtggccggaggtggtccgcatgtgcataatggatgcgacggatactattctcaaggacatgcgcaacgcgtacatccatctgctatcctgctggataccccgtgacgctgaaccttcggccttaccgcgttcgtatcttcgtagacacagatgacctgactcctacagttgaacgatacataccatgggcaatctacataccctactttccattgcatgtttccacttaatactaaacaacgccttaacttcttacttgtgcttacttggaaggcgtt

SEQ ID NO: 176321 - DNA, 641 bp, Zea mays
  Clone ID: MRT4577_92399C.1
aattccttgaggacctaccgagcaaataaatcaacaaacaaacaagcaggagccagcggcggcgagtcgtacgtgccggtgcggagggtggtgtaccggtccatgtcgccggcggcgggggcggcgatgaccacggcagaggcggcggcggcggcgccaccgtaccagccgttcgaggtgtgcgaggggtgccggtgctgcgcgtcgtcgtcgtccaataatggcagcagcagcagctgtgtggacacgagctgctgctacgccatcgactgcgacctccccggcaagcccttcggcacctgcgccttcaccccgcagacctgcggctgcggcgccgccagcaacaactgcagccagccggcaccctgaccacgaccggtggtttcgatcaattcagagtcggcggctacctgttgggtttggatgggtttggctttgactcttgctacacagcagcactagtatgctattgtcctgtcagggtggccggcctaacttgtcgccgtgttatatacatgcaaacacacgtacaatagagtacatgcatccggttcccttttttatttagtcctttgttggtttacgtcggattgcacccgaaatcattctagctaattaaagtttatataaattagagaagc

SEQ ID NO: 176322 - DNA, 725 bp, Zea mays
  Clone ID: MRT4577_9239C.1
tccaggttcgtctttgcaagagggcccgcggttgctgtgttgattcttttggagtcgaatggagaaacatatgctgtgcttaccgaacaggttagagttgctgtcggaaaattactgttggagctgcctgctgggatgctagatgacgaaaaaggtgattttgttggcaccgcagtccgtgaggtggaagaagagactggtataaagctgaatataggagacatggttgatcttacggcactgctggaccctgctactggaggtcgaatgctaccatcaccgggtggctgcgacgaagagattggcctgttcctgtacaggggccgcgttgacgaggagaccataagatcgctccaggggaaggaaaccgggctgcgcgaccacggtgagctgatcaagttgcgcgtggttccgtacagcgagctctggcggtcgaccggcgacgcgaaagcactctccgcgatagccctgtacgagatggccaagagggaaggcctgctgccgcagccgacgccgtcggccaacttgtgaagacctgctagcactgcggcgtttggagtcgaccgacgcctaggcgagataggcgtctaggcattggaccaccgtctcgtctacgcggcgcctttaaaacagtggtggccgtatggaaggatcatgcctgtaaaatgggaagaggaacgtcacttgcgaaaccaaatcatatatatctctatctcttcgtttgg

SEQ ID NO: 176323 - DNA, 281 bp, Zea mays
  Clone ID: MRT4577_923C.1
accccaggctttacacttttttttttaggattaacaccagaagctatcactgaaattataggggtagaggatcaattacgtgccggaagcttatatccatagaagagagcatctacttaaatggacaacaccacattctcacccacttgataggatgatgtggtctcattataattgctccatccaacctcagatctgaaaaaatctcctgccctcaaatgcctgataccttgtgtaaaacctgcaccatgatgaatgatccgtgcaagttcatcaagaac

SEQ ID NO: 176324 - DNA, 159 bp, Zea mays
  Clone ID: MRT4577_92400C.1
ctaattcaccgtgcaaggattgcaacggcaagtaagtgatcctagaaatctacaaggtgaaggtcctcctttttgtgaacgtcgcctccaaatttgggttcacggagaccaattacgcgcagcggacgtgagctgtatcagaagtacagtgacaaagac

SEQ ID NO: 176325 - DNA, 235 bp, Zea mays
  Clone ID: MRT4577_92401C.1
ccacgcggccgcggacgcgtggggaaagtgtgatttctttaaaattatttgtgagagatagagaataggggggaggaacctttcctccaacctaagttatctccttttttgtgtttttccaaatcttgcttatgtgcatgtgattgtgtacgggcatgggtttgaaagtggttatcggatatgggtatcctcggggtgtggggtcaaaaaaaaaaaaaaaaaaaaaaaggggggg

SEQ ID NO: 176326 - DNA, 454 bp, Zea mays
  Clone ID: MRT4577_92402C.1
cccaaactgccctgcctgggaattggttggccgaaagaaccgggacccacccacacaaggcacaaaaaggggggggggggggggggttgggggccccggccccttgcaccggggcccacccccttttccccccggggcacacttttttttgcccacgtttttttgagcccgccccgggcaccttcccccgacagttacttgttggttccttccggggttccttcggggccccccccccccccggggggggcccccggtattacccgggggttcttaaaaaaaaaaatcccggttttttttgcattttcgggcgggggggatttccccgccacgggggcccccccattcccttgggccttggccccccccttttgtgggcccgggcctactttgtgggctttttggggttcttagggggaggaaccttcttccccttggggggcgggttttgggg

SEQ ID NO: 176327 - DNA, 1575 bp, Zea mays
  Clone ID: MRT4577_92403C.1
ccggccgggaaaaaaaaaaaaaaaaaaaaaaaaaaaaaaaaaaaaaaaaaaaaaaaaaaaaaaaaacccctaggccccccaaccaaagcagaggaaagagccgaggacgcgagggcgacgacccggaggagcaccggacccgaaggcggagccccccaagccagaacccggcgagggggtcggtgccgaccatgtcctcgcccgcgccctccccgcccgccggggcgccgtcggagccgctcctgctcccgctcccgcccccggagttctactgctaccagtgcgaggccacggtgtcgctgcccgagccggccgcgccctcctcggccaggctcctctgcccgctctgccatagcgacttcatcgaggagaaccctagcaccccgtctccaccaccacctccgccgccgccgcccccaccgcttttcctctccgactcctcctcctcctcgctctcggacgaccccgacgacgacttcgaccttgtcatggaccccgacgtggtgcgcgcctaccttagccgcttcgcccaccgccaccacctccagcagatcggccacggccccggcccgcacggccgaggggagccgcccgccacggccgcctccatcgccgcgctgcccacggtcgaggttgctgagcccaccgccgtctgcgccatctgcaaggacgacctgcccctcgcctccgaggcgcggaagctcccctgcgcccacctctatcactccttctgcatcgtcacctggctcgggatgcacaactcctgccccgtctgccgcttccgcatcccccccgccgacgaccccgaccaggccgcaccgtcgcagcaggacccgccgcccacgcggatcaccatccgcttcagcaccaccacacgccgccgcgtccgcatcggcagcgatgcgccactggcgtctcatatctcggcgtcgcccacgcagctcgcacaggctattaccggggatggagctggtggacctgccaatagcggcgagactgtgtcatctgagtggcctccgcaccccgaatcggatacagtcatgtcggaggcacgcgaggggggtggcttttttgattgagccagaggttccaattatcaggcgataaggtagctgctgttagctgtcagccaacaggagtaaaaggaggctaccacctaccatacgcttcctgtcttcgttcggacgaggtttctcgcaaggtgatggcgtgctgttacagactctgaaactaaagctgtccttgttcggacgaggtttctggcgagcgagaagatggcatgttggttacagctgaactaaagttgtcctgttaggagaacaagagcattcatcgcatgggttcccggtgtcttgtatattggttaaacgtatttattcgtaataaatatataggcatgtacaatgtgcagtactccgtttctggtgtccccgtgccctccatgcaacttggtaggtacatatgggaatgcattgagtgctgtttggttcacatatttgtaacgtgaacggtaatcaataacgtcaaaccatgtttgttgaaatcagataatacactagaaactgatatcgtcct

SEQ ID NO: 176328 - DNA, 524 bp, Zea mays
  unsure (1)..(524): unsure at all n locations
  Clone ID: MRT4577_92404C.1
gtgacattgcatggtgggtacaataagnncgcttcgtttctcgtttgaaaaaaaaaaaaaaaaaaaaaaaaaaaaaaaaaaaaaaaaaaaaaaaaaaaaaaaaaaaaaaaaaaaaaaaaaaaaaaaaaaaaaaaaaaaaaaaaaaaaaaaaaaaaaaaaaaaaatggggcggccctttttaaggacccaagtttccgtccccgggcttccaacttattctcttttttttggggccccctaatttaaattaacgggccgtggttttccaccgtcgggacgggaaaacccctgccttcccccaattaaacggccttgaaacacacccccttttccccagctggcaaaatacccaaaaggccctcaccaatcgcccttcccaccgtttgcccagcctaaagggcaaaggggcccccccttgtagcggcccattaagccgggggggtggggggtttccccccagtgggaccgttccttttggcagggtcttagggcccgttcctttggttttcttcccttcttttttg

SEQ ID NO: 176329 - DNA, 203 bp, Zea mays
  Clone ID: MRT4577_92405C.1
cggacacctattattttagattaaaaaatggggggctccaagaaacctgagcatgagattctcactgacactgaaaaagaacggacgttgattgcttcagggcttacaacaacttgaactactaatgctgtttttgagcaatagattgagttacagagtgtcttatttgctgaggacatgcagttggcggctttctttaatga

SEQ ID NO: 176330 - DNA, 169 bp, Zea mays
  Clone ID: MRT4577_92406C.1
gattaggagaaggctgatagggtgcaccacactatagcgatgctcacagacacgggtgtgcggagggaacaagctcttagagtgctaccgaaaagaatttcacaggccggtatcgaacagaaggccaaccggaaaaaaccttagcgtgctcgactaataatgcctggat

SEQ ID NO: 176331 - DNA, 1053 bp, Zea mays
  Clone ID: MRT4577_92407C.1
gccggccggttcggggtccaacacgcgcctgaaaggccccgcttctatttttgacgcttataccctcgctctgctcatcgaaccaaaccctacaccgcggcgacaggtataaaagacatctcccgacccgtgccctactcgccgccgccaccgccaccgccacctacgcaacaccagacgctccagcagtccagcactcggagctcgcgcgcccgacggcccaccatgatcatccccaagaagaaccgcaatgagatctgcaagtacctcttcaaggagggcgtgctgtatgccaagaaggactacaacctggcgaagcacccacagattgatgtgcccaacctccaggtgatcaagctcatgcagagcttcaagtccaaggagtatgtcagagagaccttctcctggcagtactactactggtacctcaccaacgatggcattgagcacctacgcaactacctgaacctcccgtctgagatcgtgcctgccacgctcaagaagtctgccaggccactgggccgtccatttggctctggccctcctggtgaccgcccaaggggccctggtcgttttgaagacagaccaaggtttggagacagggatgagtaccgtggtggccctcgtggtgctcccggtgactttggtggcgataagagtggagctcctgctgagttccagccatctttcaggagttctggcgcaaggcctggctttggccgtggtggtggcagcggctttggcgctggcccgacctcttcttccatggagtgaacagtgaagctgcccttagtttggacatgatgtttcccctcccgagaggcgtttaattttgaaggacggttattatgtactagtaatgttttccggatcggctagtgctgacatgcaaaaaaaatgttccatatttatacattggttccagtatagtagtctttgcaaaacgtttggattttcaagtaagtacgttttcgctaatttacgagtaatcagtcctccgtatggtggttgactggtctgaagggttggtgatgccaaaaaaaaaaaaaaaaa

SEQ ID NO: 176332 - DNA, 187 bp, Zea mays
  Clone ID: MRT4577_92408C.1
cgaaacaaaagcatggtgcctttgacacacacagcattaactgagaccgggctttagctgcttacatatgctaaaaaagcaggcaaaaaccccactaaggtaacacagaatgtgccatatggcaacaattactttgtgtctggaaataacgcccactccgctgaacctgcccgggcggaacgataaa

SEQ ID NO: 176333 - DNA, 341 bp, Zea mays
  Clone ID: MRT4577_92409C.1
atggtcagcgtcgtcttcctcgtgtacgcttatttctaagggaaggagccacttggctcttatcccactgatccctgctacctcgcaatgttctatcccacttgagaattcatctgctgctgaaagttctgcctctaccacccctacgtcaacccaatggcatctcctgatgagtggaggcagcttggttcccgcctcgtgctggtgaccactgctgaccattgctggttcgtggaaaaggcaaagtcttactcaaagggaatcaataaattcggctgggatggggagctcgaattctacgagaccaagggtgaagctcacgtcttctttttgcctaaaca

SEQ ID NO: 176334 - DNA, 521 bp, Zea mays
  Clone ID: MRT4577_9240C.1
gttccatgttgcaacttataatactggcttgtaattacaaataaataaaagtctgtagcagcactagagagctaatccatttgctaaatctttctaccacactttactagcgacacatgaatcgtgttcatagcctatcgcgctacgtgtgacctacacaatatatgtgtaatactaactctcctctcaaatattggtcgagctaatgaattattgaactaagacacaacacatataaagaacagggagaactagatgagaaacaaacccctccttataccggggccaaataatactactggcattataggctgattaattcatcacaaaactgacatacaaccctgtatcttaatcagaacacctttagctctttgaatcggaaccaccaaaaatatcctgatcactgactaccagacccactgcagccgacaatcatacgagaactggcatcgggagcatgcagcatcctatgtgttataatatgcatctgacgacatacggatagcaattatgaaact

SEQ ID NO: 176335 - DNA, 1029 bp, Zea mays
  Clone ID: MRT4577_92410C.1
gaaaggccccgcttctatttttgacgcttataccctcgctctgctcatcgaaccaaaccctacaccgcggcgacaggtataaaagacatctcccgacccgtgccctactcgccgccgccgccaccgccaccgccaccgccacctacgcaacaccaggcgctccagcagaacagcactcggagctcgcctgcccgacggcccaccatgatcatccccaagaagaaccgcaatgagatctgcaagtacctcttcaaggagggcgtgctgtatgccaagaaggactacaacctggcgaagcacccacagattgatgtgcccaacctccaggtgatcaagctcatgcagagcttcaagtccaaggagtatgtcagagagaccttctcctggcagtactactactggtacctcaccaacgatggcattgagcacctacgcaactacctgaacctcccgtctgagattgtgcctgccacgctcaagaagtctgccaggccactgggccgtccatttggctctggccctcctggtgaccgcccaaggggccctggtcgttttgaagacagaccaaggtttggagacagggatgagtaccgtggtggtcctcgtggtgcttccggtgactttggtggcgataagagtggagctcctgctgagttccagccatctttcaggagttctggcgcgaggcctggctttggccgtggtggtggcagcggctttggcgctggcccgacctcttcttccatggagtgaacagtgaagctgcccttagtttggacatgatgtttcccctcccgtgaggcgtttaattttgaaggacggttattatgtactagtaatgttttccggatcggctagtgctgacatgcaaaaaaaaatgttccatatttatacattggttccgacttccagtatagtagtctttgcaaaacgtttggattttcaagttagtacgttttcgctaatttacgagtaatcggtcctccgtatggtggttgactggcgaaaaaaaaaaaaaaaaaagcggcc

SEQ ID NO: 176336 - DNA, 208 bp, Zea mays
  unsure (1)..(208): unsure at all n locations
  Clone ID: MRT4577_92411C.1
tcccgggncccagctttgttctgtattaaagaaacgtgcatgtattgctggccctgcgcgtggttactatactcatgtgaacatttcagtctttgttgcaggaaaaaaaaaaaataggcgacgggcgcatgtaaaaggtatccaatacttaccatgcgccatgcatcgccactgagtagatgttttgttatgtgacctcaagttaact

SEQ ID NO: 176337 - DNA, 480 bp, Zea mays
  Clone ID: MRT4577_92412C.1
aaaaaccccccttttttttttttttttttttttttttttttttttttttttttttttttttttttttttttttttttttttttttggggggtaatttttataaaaaacaactccgggtttaaacggtatttaccataaatttaaagaaagccacatgcaaaattattatttggtcttgataattcggggcacaaaaatttaacggggggcaaaatttaaatttgacaacaggagcccccccaacccttggggacaggaaaagttgggcgccctttattttccaccgggggttgggaactgagcttgatcttcaatgggggggggaaaaaaaggtgggcccccactggttcccccttcggatccccctttaaaaccaccaagatccccaagggccctttcaagggcaagggcgccgtaataccttttttctttaacaggtttaaagaactctttgatgtttacccactttttggcacgctt

SEQ ID NO: 176338 - DNA, 432 bp, Zea mays
  unsure (1)..(432): unsure at all n locations
  Clone ID: MRT4577_92413C.1
ggaaaccaaacccaggtttcataaacaaaaaaaaaaaaaaggggggaaaaccagcaaacactggattagaccctaacaggggggggtggtaaaccagccttcactggaaaaggggaaaaaactttgactaaaccttaaaaggtttttaaaaaaccacaatacaacgaagcatttttgggggggaaaaaaaacacggattccgatcctaaaaggggggcttttgttttttgggcaccctgtacccacccaaaaaaaaaggaggggcaccctcggaggggtccaaagtaacctgttccggggggttgaactgatcccccttgagcttctccacttccgggggaaacaggggctcaanaggggggggggcgtccgagcacttagaccttaaatgaaaaaaaaaaagggccaccgtcttttcaagaagtgtgaaac

SEQ ID NO: 176339 - DNA, 421 bp, Zea mays
  Clone ID: MRT4577_92414C.1
ccggcggagaaagaagagaagcaccatggcgcacctttgtcccctccctgccgcatagggggggtcatgctcgcctcctggctctcttcttgccctcgcgtcgggcttctggggcgcgtctgctgcccggtgccggggccgggacgccacccggcgccgcgcgtctccggtcggtgcgatggcctggacggccgctctctcggccctatatgcaacaggaacgcaagctgacgaaagctcaaggagcacatcaggacaaggtgggtcggcggtgtccaagcactgccacctggccgggaggagacctgccctctcccgcgcggggaagctcgccgggccccagactcgcgctgcgagatcaccctttaccagcgcctgcgtctgccgccaggaggacccagtccactacccagcatcgacc

SEQ ID NO: 176340 - DNA, 246 bp, Zea mays
  unsure (1)..(246): unsure at all n locations
  Clone ID: MRT4577_92415C.1
ggaccaggataaaatatttttttttagagaaaaaaattaaagttgcccnagggcggataggcggggggcgggcgaaaaccccccaaaaactggcccaaacaaacaaagctaggacaaggcgncggggcccaccgggtttttcctttttccctcgggctcctccgccatctctttttttttgccgcccnaggactnaaacttaaaaaccnccgccgggngcaccttnaactggggggaaatttcccc

SEQ ID NO: 176341 - DNA, 268 bp, Zea mays
  Clone ID: MRT4577_92416C.1
ggaagaggacgagacgcagacgttcatgtcgcgcagtgggtcactagctccgacgtgtcctcgtcgtcgaactacccctacacgtggtcgtcggggtataccacccagaccttccagcttagcagtgaggtgcagaacgcggcggggagggacgtgtccaccgtttgactgagacgggatcgagctcaccatgcagccgccgacaggacgcgtcaacgacgacgacggtggcgcacgtgcgcaagttgagcccgggccagtcggatct

SEQ ID NO: 176342 - DNA, 265 bp, Zea mays
  unsure (1)..(265): unsure at all n locations
  Clone ID: MRT4577_92417C.1
atcttttatagactttatatatttccttttgataaagggatgctgcatagtagagttggtgtaattaaactatctcagccgtttccctgctttcccttctgctcaatatgcctcattgtccttccagggagctcttttaatcttaaagttctacatttcatgctcttagtcaaattctgctccctntttaataactcttcccactgcatatttccatcttgaattggtggatctaaattctgatactgtagttgagatacagcta

SEQ ID NO: 176343 - DNA, 314 bp, Zea mays
  Clone ID: MRT4577_92418C.1
aaaaccaatactatcaggactactctagagacacaaatatagccgaaccatatcagctgtaacacgtggcaagaccgtgaaacaagcacaaccgtaaggcctttcaaataaaacacgccgagcacaacggcttgccacatgtgaggagcgcaagtactaccaggtccatacacgtgctgtaggctgtagaatacaatgacaccaaggatctgaaagtcgaccgcggcccgcaagaaaactacgatgatgtcaccggccaccaagagcttaacagaaactacagttccggtagttctgctatgaagtttagggat

SEQ ID NO: 176344 - DNA, 1659 bp, Zea mays
  Clone ID: MRT4577_92419C.1
atgccgtcctcttcttcttccgctgccactacaccgccgaccgccgcctcgtctgaggagacgttgagtagcttgatggtggaggagttgcgcgccggggactctgttgattttggtgtgtcgcggatgacgtcagcccgcgttgaagatatgcagcggttgggctactttggcggcggagttgctcgtgctccggggacggaggaagtccccgagccggaggtgatggacaaggatcgccaaggggcggcgcaaaaacgccaggcggctgtcaggctgcatgaagctaggccgaagcggcagcggggggctgcgaaggctgcggcctccggtggaggcaagccgccgctggcagcgaagtcgggcgcctctgcacctagcaaggcgccggaggcaacggcgggcgccggaggctccaaatcaacgaaggtggtgccgccgaccagcggagtggcggaggcttcgaaggcggcccgagcgttgccgttgtcgggcaaacgtgttgccgacttcggcaccgatattactgtggacgactatcttggcgggtcggacgagggccagcttgctatagttgcgcctggcgcggcgatcgcgatggctgccatagtgccgaaggcgaggggcgaggctcttggcgccagaggcgaggtgtcggccctcgcggtggtcagggacgaggcaggcgcagcgacccgccggctgaagggagtgacggaggcgctgagtcaggcgacggaggcgctgagtcaggtggctgacttcgccagccgtactgcgtcgggggccctcacggcagctgtgtctgccgaagtcgagagacttcggacgcaacatgctgacgctgtccgtgagaaatcggcctccgacagcaagtgccgtaagctgacggacaaggtggccgccctggagagggagaaggctgacctccggcgccaactggcggcggagaggagggaggccaacgaggccatcgccaaggagcaggctgcgcaggcggaagccaaactggcgcgggcggagggcaatcttgccaaggagctcgccgaacatctgcaggagcggctcaccgccctggagagccgcgcgaagggggccgaggccgcgatgcgtgcggaggctgaacggacgcgcgcgcagcttatggatacatatcgtgagctggggtgccggcacttcgaggtcttcgaccaggcagatgaagattttgagcgggatgtctacaaggtcgaagaccccgtcgtgaaggaatccgccggggccctctatgaccggatgtggggtccgcacggtcgggaggtggtcagggagcgggccgagattgcgagggctcaggcggcgcgtggcgagcgggtggacgacttcggggcgctgaacagcgcgctgcttgacccggagtcgacccctgcggaggccgcgtctggggtcgccctggagccaaccccggagaccgcggcgatcgtgacggctgcccccacatctgctgcggccggcgaagacctgcccccaaaggtggccgaaggcgcccctgatgcccccgcggctgctgtgccgagtgctgaagatcccgcggcggaggcggcggaaacgacggcggaagcggcggcggaggcaacggcggaggctcccgcagcgtcagggccttcgcaggtggcgtag

SEQ ID NO: 176345 - DNA, 1872 bp, Zea mays
  Clone ID: MRT4577_9241C.1
aattcggcacgaggcgcaactcccaaccgaaacgagaacaaggacgccgtgtaaaaactcgcgcgcgccccaggaaggagaggaagagggagtaatgtaccaggccatcccgtacagcgccggccggccgtggccgcggcccgcgccggcgatgggcgtcgaggccgcggcggcggtggcggaggaggagaggctgctcgcggctgcacagcagcagcagccgtcggcgggggcggaggcggcggcgaggggggaggaggtgcgacgggcggtggcggagtgccccgtgctcgtggtggggaagcgcgggtgctgcctcagccacgtggtgaagcggctgctgcagggtctcggggtcaaccccgccgtgcacgaggtcgccgacggcgccgaggcgaagcttattgccggggtcgtcgacggcggcggcgacgttgccctcccggccgtgttcgtcgggggcaggctcctcggcggcctcgaccggctcatggccgtgcacatgggcggcgacctcgtgcccatactcaaggacgccggcgcgctgtggctctgatgagaggaccaaggcgttcgtagtctcgctcccccgtccatccttccttggcctctccatcgtcgtcagctccccttgtccatgttatttttaacttgttatttttactctattaaatagaccagataggcatgcatataggacttttaactctttcggtagaaacagaatattaggtagttagaacaatggagtacgtgtgttaagcgatttacagtatatatttatcttggtttcccgtcatgtgaattgtctttgcaagagggcccgcggttgctgtgttgattcttttggagtcgaatggagaaacatatgctgtgcttaccgaacaggttagagttcctattggaaaattcctgttggagctgcctgctgggatgctagatgacgaaaaaggtgattttgttggcaccgcagtccgtgaggtggaagaagagactggtataaagctgaatatagaagacatggttgatcttacggcactgctggaccctgctactggaggtcgaatgctaccatcaccgggtggctgcgacgaagagattggcctgttcctgtacaggggccgcgttgacgaggagaccataagatcgctccaggggaaggaaaccgggctgcgcgaccacggtgagctgatcaagctgcgcgtggttccgtacagcgagctctggcggtcgaccggcgacgcgaaagcactctccgcgatagccctgtacgagatggccaagagggaaggcctgctgccgcagccgacgccgtcggccaacttgtgaagacctgctagcactttaaaacagtggtggccgtcatgcctgtaaaatggaaggaggaacgtcactcgcgaaaccaaatcatatatatctctatctcttcgtttggtataacgcgcttaagcttgtctgtttgtgttatgtatacatatactaataatttaaaaataaaagtataatcgtgtttaaataaatatttcatttggccaagagggaaggcctgctgccgcagccgacgccgtcggccaacttgtgaagacctgctagcactgcggcgtttggagtcgaccgacgcctaggcgagataggcgtctaggcattggaccaccgtctcgtctacgcggcgcctttaaaacagtggtggccgtaaaatggaaggaggaacgtcatgcctgtaaaatggaaggaggaacgtcactcgcgaaaccaaatcatatatatctctatctcttcgtttggtataacgcgcttaagcttgtctgtttgggttatgtatacatatactaataatttaaaaataaaagtataatcatgtttaaataaaaa

SEQ ID NO: 176346 - DNA, 3387 bp, Zea mays
  Clone ID: MRT4577_92420C.1
atgccgtcctcttcttcttcctccgacaccacgccgccagccgccgcctcgtctgaggagacgttgagtagcgtgatggtggaggagttgcgcgccggcgactctgttgattttggtgtgtcacggatgacgtcagcccgcgttgaagatatgcagcggttgggctactttggcggcggagttgctcgtgctccggggacggaggaagtccccgagccggagggtgagttggtcgttttcgaggcgttcttcgccgccggtctccgcttgcctgcgcaccggtttgttggcgaagtcctgcgtagattcaatgttcaaatacatcagctgacaccgaatgccatggtggcactggcgaagtatgtctgggcgacgacttcgtatggcgggcagccgtcggttgaagtttttgcgaagaattattgtttgcattggcagaagaggatggttggggacggggttgcccagttcgggtcatgcacattcacgctgaagaccggcaagaccacaatgccagtagtggagttggttccgtgcgcccgcaacaagtggggcagttggaatgaattttggttttacgttgctgagggtactgtcgaagaccatgagggactccccgtgtctgagatgtgctctcattattactctgcgtatccgccttttgaagtggcagaagaggatgcagacgaaggggcccttcggtgcgccgccggtcagagcagtgggcgtgatttagttgaagagttcgtggcgtacggggtctggcccttggcgcacggctgggcgctgggcgaagtatgccctcgccagatgccttttcacggaggaagggaggtgcgaagtccggccttcgcactgaatttgcaaaatcgtgacccgaccgcctttgtgcgtgatgcggaggacttggcggtgcggctcgtgggacgttacgtgccgaggacggaaggccagcgcagctttgatatccgcgggtcaaatgaccgtttgaacagggtcttcgaattaaatcaattgccgtacggcggctatcctggtcaagacgaagcggaccgccgtgggaagaaaccggcggtggagactggaggcgaccctgcgctggcggccgccccctcctcaaaaaagagaaaattaggtactgcgatgggaggacttggggtgtctgatagttttgctagagagttaatgaggacgtgtgcggccccgggggaaaggatgtcttcgcccgagctccgggagtcttcggctcggatgctgagggttaccgggggttgctggcctagaaatgttcctatcccctgcgcggctgaggaggactgttttacatctcgtatggttcatcagtggagagtttttccttacgggcgaaatatcggtgctgttgtgtggacagtgatggacaaggatcgccaaggggcggcgcaaaaacgccaggcgacagtcaggattcacgaagctcagccgaaaaggcagcggggaactgcgaaggctgtggcctccggtggaggtaagccgccgctggcggcgaaggcgggcgcttctgcacctagcaaggcgccggaggcaacggcgggcgccggaggctccaagccaacgaaggtggtgccgccggctagcggagtggcggaggcttcgaaggcggcccgagcgctgccattggcgggcaaacgtgttgccgacttcggcaccgatattactgtggacgactatctcggtgggccggacgagggccagcttgctatagttgcgcctggcgcggcgatcgcgacggccgccatggtgccgaaggcgaggggcgaggcgcttggcgccggaggcgaggtgtcggccctcgcgctggtcagggatgaggcgggcgtggcgacccgccggctgaagggagtgacggaggcgctgagtcaggcgacggaggcgctgagtcaggtggctgacttcaccagccgtactgcgtcgggggcccttacggcagctttgtctgccgaagtcgagagacttcggacgcaacatgctgaagctgtccgtgagaaatcggcctccgacagcaagtgccgtaaactggcggacaaggtggccgccctggagaaggagaaggctgacctccggcggcagctggcgggggagaggagggaggccaacgaagccatcgccaaagagcaagctgcgcaggcagaggccaagttggcgcgggcggaaggcaatattgccaaggagctcgccggccagctgcaggagcggctcacttccctggagagccacgcgaggggggccgaagccgcgatacgcgcggaggccgaacggacgcgcacacagctcatggatacataccgtgagctgggtgcgcggaccggaggagctgcaggaactccccgctgtcttgggggggttaatgtcattcacctccctggtcacctgcgaggggcgatgaacgcactctctcacgaagggtgccggcactttgaggccttcgaccaggcagatgatgattttgggcaagatatctataaggtcgaagaccccgtggtgaaggaatccgccggggccctctatgaccggatgtggggtctgtacggtcgtgaggtggtcagggagcgggccgaggctgcgagggctcaggcggagcgcggcgagcgggtggacgacttcggggcgctgaacagcgcgctgcctgacccggagccgagccctgcggaggccgcgactggagtcgccctgggaccaaccccagagaccgcggaagacgcgccaggcgcctccacatctactgcggccggcgaagacctgcccccaaaggtggccgaaggcgcgcctgatgcccccgcagctgctgtgccgagcgctgaagatcccgcggcggtggtggcggaagcagcggcggagccaacggcggaggctcccgcagcggcagggccttcgcaggttcaagattttgggcctgcgcacgcaaccgctactactgaatttttggcggcttcgaccgcggaaggtgggaatgaatatggtgggtctggacctgagttttttgattttactgactctgggagctcggttgagtggactgaggattcgtcggaggaggatttggattattttgcggccttggatgtggctgcggcggaggcttcgccacacgccgcggacgcgccagacgtgccaggccctagcaccgggcgtcgacgacgaagggcggttgcaaagcgtagggttagtgcggaggaaggggctcggcttcgcgtgagtagggctggtcggcaggagctgttgtctctgccggccgctgtgggtacaggggaaggggaactgcgaagtctttttgcgggtgaagaacttaggataatgttatttaattatagggagatgggaattattcctaaggttgagccgatgtag

SEQ ID NO: 176347 - DNA, 2901 bp, Zea mays
  Clone ID: MRT4577_92421C.1
atgccgtcctcttcttcttccgccgacaccacgccgccggccgccgcctcgtctgaggagacgttgagtagcttgatggtggaggagttgcacgccggcgactctgttgattttggtgtgtcacggatgacgtcagcccgcgttgaagatatgcagcggttgggctactttggcggcggagttgctcgtgctccggggacggaggaagtccccgagccggagggtgagttggtcgttttcgaggcgttcttcgccgccggtctccgcttgcctgcgcaccggtttgttggcgaagtcctgcgtagattcaacgttcaaatacatcagctgacaccgaatgccatggtggcactggcgaagtatgtctgggcgacgacttcgtacggcggacagccgtcggttgaagtttttgcgaagaattattgtttgcattggcagaagaggatggttggggacggagttgcccagttcgggtcatgcacattcacgccgaagaccggcaagaccacaatgccagtagtggagttggttccgtgcgcccgcaacaagtggggcaattggaatgaattttggttttacgttgctgagggtactgtcgaagaccatgagggactccccgtgtctgagatgtgctctcattattactctgcgtatccgccctttgaagtggcagaagaggatgcagacgaaggggcccttcggtgcgccgccggtcagagcagtgggcgtgatttagttgaagagttcgtggcgtacggggtctggcccttggcgcacggctgggcgttgggcgaagtgtgccctcgccagatgccttttcacggaggaagggtggtgcgaagtcctgccttcgcactgaatttgcgaaaccgtgacccggccgcctttgtgcgtgatgcggaggacttggcggtgcgactcgtgggacgttacgtgccgaggacggaaggccagcgcagctttgatatccgcgggtcaaatgaccgtttgaacagggtcttcgaattaaatcaattgccgtacgacggctatcccggtcaagacgaagcggaccgccgtgggaagaaaccggcggtggagactagagacgaccctgcgccggcggccgccccttcctcgaaaaagagaaaattaggttctgcgatgggaggacttggggtgtctgatagttttgctagagagttgatgagaacgtgtgcggccccgggggaaaggatgtcttcgcccgagctccgggagtcttcggctcggatgctgagggttaccgggggttgctggcctaggaatgttcctatcccctgcgcggctgacgaggactgttttacatctcgtatggttcgtcagtggagagtttttccttacgggcgaaatatcggtgatgttgtgtgggcagtgatggacaaggatcgccaaggggcggcgcaaaaacgccaggcggctgtcaggctgcatgaagctaggccgaagcggcagcggggggctgcgaaggctgcggcccccggcggaggcaagccgccgctggcggcgaaggcgggcgcctctgcacctagcaaggcgccggaggcaacggcgggcgccggaggctccaagtcaacgaaggtggtgccgccggccagcggagtggcggaggcttcgaaggcggcccgagcgttgccgttgtcgggcaaacgtgttgccgacttcggcaccgatattactgtggacgactatcttggtgggccggacgagggccagcttgctatagttgcgcctggcgcggcgatcgcgacggccgccatagtgccgaaggcgaggggcgaggcgcttggcgccggaggcgagggtggcgccctggagaaggagaaggctgacctccggcgccagctggcgggggagaggagggaggccaacgaagccatcgccaaagagcaggctgcgcaggcggaggccaagctggcgcgggcggaaggcaatattgccaaggagctcgccggacatctgcaggagtggcttactgccctggagagacacgcgaagggggccgaggccgcgatgcgtgcggaggccgaacgaacgcgcacacagcttatggatacatatcgtgagctgggtgcgcggaccgggtgccggcacttcgaggtcttcgaccaggcagatgaagattttgaacgagatgtctataaggtcgaagaccccgttgtgaaggaatccgtcggggccctctatgaccggatgtggggtccgcacggtcgtgaggtggtcagggagcgagccgagcttgcgagggctcaggcggcgcgtggcgagcgggtggatgacttcggggcgttgaacagcgcgttgccagacccggagccgacccctgcggaggctgcgaccggggccgccctggagccaaccccggagaccgcagcgattgcgacggctgcccccgcatctgctgcggccggcgaagacctgcccccaaaggtggccgaaggcgcccctgatgcccccgcagcagctgcgccgagtgttgaagatcccgcggcggaggcggtggaaacgatggcagaagtggcagcggagccaacggcggaggctcccgcagcgtcagggccttcgcaggttcaagattttgggcctacgcacgcaaacgttaatactgagtttttggcggcttcgtccgcagaaggtggtaatgaatatggtgggtctacatctgagttttttgattttaccgactccgggagctcggttgagtggactgaggagtcgtcggaggaggacttggattattttgcggccttggacgtggctgcggcggaggcttcgccacacgccgcggacgcgccagacgtgccaggccctagcaccgggcgccgtcgacgaagggcggttgcaaaacgtagggttagcgcggaggagggggctcggcttcgt

SEQ ID NO: 176348 - DNA, 363 bp, Zea mays
  Clone ID: MRT4577_92422C.1
gcagctgttaaaattcatactgtgcacaatatggtcaaattgtcattttgataatagaccatccttacccagttgttgaccacattggccaaagtgacagccaagaattgagtctttgagaacaattctcttagggatgggaatttacttccttggactttagatccaattctcccatctagaattaattgcaactcagacttgcttatagtatggctgtcaataggatcactttctacgttcatcatccatacagagagccacaaataaccaagcgatgcgaagaaggcaaatgttcccgagaggcctatgtgtgacatgatgatcggtgttgctaggaagcttatgacatttccaagatgg

SEQ ID NO: 176349 - DNA, 2377 bp, Zea mays
  Clone ID: MRT4577_92423C.1
atgccgtcctcttcttcttcctccgacaccacgccgccggccgccgcctcgtctgaggagacgttgagtagcgtgatggtggaggagttgcgcgccggcgactccgttgattttggtgtgtcacggatgacgtcagcccgcgttgaagatatgcagcggttgggctactttggcggcggagttgctcgtgctccggggacggaggaagtccccgagccggagggtgagttggtcgttttcgaggcgttcttcgccgccggtctccgcttgcctgcgcaccggtttgtcggcgaagtcctgcgtagattcaatgttcagatacatcagctgacaccgaatgccatggtggcgctggcgaagtatgtctgggcgacgacttcgtacggcgggcagccgtctgttgaagtttttgcgaagaattattgtttgcattggcagaagaggatggttggggacggagttgcccagttcgggtcatgcacattcacgccgaagaccggcaagaccacaatgccagtagtggagttggttccgtgcgcccgcaacaagtggggcaattggaatgaattttggttttacgttgcggagggtactgtcgaaggccataaaggtctccctgtgtctgagatgtgctctcattattactctgcgtatccgccttttgaagtggcagaggaagatgcagacgaaggggcccttcggtgcgccgccggtcagagcagtgggcgtgatttagttgaagagtttgtggcgtatggggtgtggcccttggcgcacggttgggtgctgggcgaagtgtgccctcgccagatgccttttcacggaggaagggttgtgcgaagccctgccttcgcactgaatctgcggaactgcgacccggctgcctttgtgcggctcgtggggcgttacgtgccgaggacggaaggccagcgcagctttgatatccgcgggtcaaatgaccgtctgaacagggtcttcgaattaaatcaattgccgtacgatggatatcctggtcaagacgaagccgaccgccgcgggaagaaaccggcggtggagacaggagacgaccctgcgccggcggccacccctccctcgaaaaagagaaaattaggtactgcgatgggagggattggggtgtctgatagttttgctagggatttaatgaggacgtgtgcggccccgggggagaggatgtcttcgcccgagctccgggagtcttcggctcggatgctgagggttaccgggggttgctggcctagaaatgttcctatcccctgcgcggctgaggaggactgttttacatctcgtatggttcatcggtggagagtttttccttacgggcgaaatatcggtgctgttgtgtggacagtgatggacaaggatcgccaaggggcggcgcaaaaacgccaggcgactgtcaggattcacgaagctcggccgaaaaggccgcggggaactgcgaaggctgtggcctccggcggaggtaagccgccgctggcggcgaaggctggcgcctctgcacctagcagggcgccggaggcaacggcgggcgccggaggctccaagtcagcgaaggtggtgcccccggccagcggagtggcggaggcttcgaaggcggcccgagcgctgccgctggcgggcaagcgtgttgccgacttcggcaccgacattactgtggatgactatcttggtgggtcggacgagggccagcttgctatagttgcgcctgccgcggcgatcgcgacggctgcgcaagcgccgaaggcgaggggcgagagccttggcgccggaggcgaggtgtcagccctcgcgttggtcagggacgaggcgggcacggcgacccgccggctgaagggagtgacggaggcgctgagtcaggcgacggaggcgctgagtcaggtggctgatttcaccagccgtactgcgtcgggggcccttacggcggccttgtctgccgaagttgagagacttcggacgcaacatgctgacgctgtccgtgagaagtcggcctccgacagcaagtgccgcaatctgacagacaaggtggccgccctggagagggagaaagttgacctccggcgccaactggcggcagagaggagggaagccaacgaggcatgtcatgtcggcagcgatgacggcctgctggaggtggcggcggctacgagttggagaagggaaagttgaccaagctggcgcgggcggagggcaatcttgccaaggagctcgccgaacatctgcaagagcggctcaccgccctggagagccgcgcgaagggggccgagtccgcgatgcatgcggaggccgaacggacgcgcacgcagcttatggatacatatcgtgagctgggtgcgcggaccggtgacttcgaggtgcc

SEQ ID NO: 176350 - DNA, 343 bp, Zea mays
  Clone ID: MRT4577_92424C.1
cgtcgcatgcacccctacctaagctgtgggagcctctagaggcgggcgccgctgttttttttttttttttttttttttttttttttttttttttttttttttttttttttttttttttttttttttttaggggggtaaaaaagcgggcggcccaatttgcgttaacaaggaccttacataccccattcctcctttggtttccaaagggggccatggggtacaaaccccttcccaaaagccatgggggggggggggcccctagcggttaaaccctccaatcactcgaggggggggggccaaaccccctgggtcttaacatccttgggccccctggcccccaggg

SEQ ID NO: 176351 - DNA, 546 bp, Zea mays
  Clone ID: MRT4577_92425C.1
gttttcttcatctcttgctcataagagactgccctcttcccctttacttgtggcatctaacacaatttaccaagaagggttcagatcccctgtccttcaagttcgttgagcatcacaagacacaagcgtttacctttatctcatcacatgacgaaagtgtttggaacttggatggagagatgtttcaggcatgtgaggtatctgtccaagcgtgccgggggcttgtcaacttctttgcttcggggccagagctgtagtaatgatactcgtaagttcctctttgcatgaacgaaggatgccaggagttcatattttttatttagagagtcccttatttcgacatgttgacatgttgacatgttgtgatgttgtacactcttatttgtattttagtggagacctagaacactttgttgatagatatactgttaatatttgttgatagctatgtggcatggaaactacaacccatttgtgctatagaatagaggaacaaaaggttttgattgaattaatgaagtaaaagtttactttctgttttgcgag

SEQ ID NO: 176352 - DNA, 135 bp, Zea mays
  Clone ID: MRT4577_92426C.1
caacaagctacatatcacatgcacattgagtttcaacatctacccagcaccgaaggaccaagatattttcatttcttattctcctcgctttatctgcatagatttactaacacaacaattttcccttaatgctta

SEQ ID NO: 176353 - DNA, 1797 bp, Zea mays
  Clone ID: MRT4577_92427C.1
atgccgtcctcttcttcttccgctgccactacgccgccggccgccgcctcgtctaaggagacgttgagtagctcgatggtggaggagttgcgcgccggcgactctgttgattttggtgtgtcgcggatgacgtcagcccgcgttgaagatatgcagcggttgggctactttggcggcggagttgctcgtgctccggggacggaggaggtccccgagccggaggtgatggacaaggatcgccaaggcgcggcgcaaaaacgccaggcgactgtcaggctgcatgaagctaggccgaagaggcagcggggggctgcgaaggctgcggcctccggcggaggcaagccgccgctggcggcgaaggcgggcgcctctgcacctagcaaggcgccggaggcaacggcgggcgctggaggctccaagtcaacgaaggtggtgccgccggccagcggagtggcggaggcttcgaaggcggcccgagcgttgccgttgtcgggcaagcgcgttgccgacttcggcaccgatattactgtagacgactatcttggtgggtcggacgagggccagcttgctatggttgcgcctggcgcggagatcgcgacggcggccatagtgccgagggcgaggggcgaggcccttggcgccggaggcgaggtgtcggccctcgcggtggtcagggacgaggcgggcgcagcgacccgccgactgaagggagtgacggaggcgctgagtcaggcgacggaggcgctgagtcaggtggctgatttcgccagccgtactgcatcgggggccctcacggcagctgtgtccgccgaagtcgagagactttggacacaacatgctgacgctgtccgtgagaaatcggcctccgacagcaagtgccgtaagctgacggacagggtggccgccctggagagggagaaggccgacctccggcgccaactggcggcggtgaggagggaggcaaacgaggccatcgccaaagagcaggctgcgcaggcggaggccaaactggcgcggtcggagggcaatcttgccaaggagctcgccgaacatctgcaagagcggcttaccgccctggagatccgcgcgaagggggccgaggccgcgatgcgtgcggaggctgaacggacgcgcgctcagcttatggatacatatcgcgagctgggcgcgcggaccggcgacttcgaggtgccggaccgagagcccgggcttcgttgtctgcaatgggtgcaggaggagctgcaggaactccccactgttgtgggggggggggggttgatgtcgtacgcctccctggtcacctgcgagggggcgatgaacgcactctcccgcgaagggtgccggcacttcgaggtcttcgaccaggcagatgaagattttgagcgagatgtctataaggtcgaagaccccgttgtgaaggaatctgccggggccctctacgaccggatgtggggtctgcatggttgtgaggtggtcagggagcgggccgagactgcgagggctcaggcggagcgcggcgagcgggtggacgacttcggggctctgaacagcgcgctgccagacccggagccgacccttgcggaggctgtgactggggtcgccctggagccaaccccggagaccgcagcgatcgcgacggctgcctccacatccgctgcggccggcgaagacctgcccccgaaggtggccgaaggcgcccctgatgcccccgcagctgctgtgccgagtgctgaagatcccgcggcggtggcggcggaaacaacggcggaggcagctgtgacggaacctcccaagtaa

SEQ ID NO: 176354 - DNA, 1800 bp, Zea mays
  Clone ID: MRT4577_92428C.1
atgccgtcctcttcttcttccgccgacaccacgccgccggcggccgcctcgtctgaggagacgttgagtagcttgatggtggaggagttgcgcgccggcgactctgttgattttggtgtgtcacggatgacgtcagcccgcgttgaagatatgcagcggttgggctactttggcggcggagttgctcgtgctccggggacggaggaagtccccgagccggaggtgatggacaaggatcgccaaggtgcggcgcaaaaacgccaggcgactgtccggctgcatgaagctaggccgaagaggccgcggggggctccgaaggctacggcctccggcggaggcaagccgccgctggcggcgaaggcgggcgccgctgcacctagcaaggcgccggaggcgacggcgggcgccggagtctccaagtcaacgagggtggtgccgccggccagcggagtggcggaggcttcgaaggcggcccaagcgttgccgttgtcgggcaaacgcgttgccgacttcggcaccgatattactgtggacgactaccttggtgggccgggcgagggccagcttgctatagctgcgcctggcgcggcgatcgcgacggtcgtcatggtgccgaaggcgaggggcgaggcgcttggcgccgaaggcgaggtgtcggccctcgcgttggtcagggacgaggcgggcgtggcgacccgccggctgaagggagtgacggaggcgctgagtcaggcgacggaggcgctgagccaggtggctgacttcgccagccgtactgcatcgggggccctcacggcagctgtgtctgccgaagtcgagagacttcggacacaacatgctgacgctgtccgtgagaagtcggcctccgacagcaagtgccgtaagctgacggacagggtggccgccctggagagggagaaggccgacctccggcgccagctggcggcagagaggagggaagccaacgaggccgtcgccaaggggcaggctgcgcaggcggaggccaagctggcgcgggcggagggcaatcttgccaaggagctcgccgaacatctgcaagagcggctcaccgccctggagagccgcgcgaaggaggccgaggccgcgatgcatgcggaggccgaacggacgcgcacgcagcttatggatacatatcgtgagctgggtgcgcggaccggtgacttcgaggtgccggaccgagagcccgggcttcgctgtctgcagtgggtgcaggaggagctgctggaacttccagccgttgcgggagggttgatgtcatacgcctccctggtcacctgcgagggggcgatgaacgctctctcccgcgaagggtgccggcactttgaggccttcgaccaggcggatgaagaatttgagcgagatatctataaggtcgaagaccccattgtgaaggaatccgccggggccctctatgaccggatgtggggtctgtacggtcgtgaggtggtcagggagcgggccgagactgcgagggctcaggcggagcgcggcgagcgggtggacgacttcggggctctgaacagcgtgctgccagacccggagccgaccctcgcggaggctgtgactggggtcgccctggagccaaccccggagaccgcagcgatcgcgacggctgcccccacatccgctgtggccggcgaagacctgcccccgaaggtggccgaaggcgcccctgatgcccccgcagctgctgtgccgagtgctgaagatcccgcggcggtggcggcggagccaacggcggaggctcccgcagcgtcagggccttcgcaggtggcgtag

SEQ ID NO: 176355 - DNA, 2826 bp, Zea mays
  Clone ID: MRT4577_92429C.1
atgccgtcccattcttcttccgctgccgctacgccgccggccgccgcctcgtctgaggagacgctgagtagtttgatggtggaggagttgcgcgccggcgactctgttgattttggcgtgtcgcggatgacgtcagcccgcgttcaagatatgcagcggttgggttactttggcggcggagttgctcgtgctccggggacggaggaagtccccgagccggaggtggcagaggaggatgcggacgaaggggcccttcggtgcgccgccggtcagagcagtgggcgtgatttagttgaagagttcgtggcgtacggggtgtggcccttggcgcatggctgggcgttgggcgaagtgtgccctcgccagatgccttttcacggaggaagggtggtgcgaagtcctgccttcgcactgaatctacgaaaccgcgacccggccgcctttgtgcgtgatgcggaggatggggcggtgcggctcatgggacgttacgtgccgaggacggaaggccaacgcaactttgatatccgcgggtcaaatgaccgtttgaacagggttttcgaattaaatcaattgccgtacgatggctatcctggtcaagacgaagcggaccgccgtggaaagaagccggtggtggagactggagacgaccctgcgccgacggccgccccttcctcaaaaaagagaaaattaggtactacgatgggaggacttggggtgtctgatagttttgctagagagttgatgaggacgtgcgcggccccgggggaaaggatgtcttcgcccgagctccgggagtcttcggctcggatgctgagggttaccgggggttgctggcctaggaatgttcctatcccctgcgcggttgacgaggactgttttacatctcgcatggttcgtcaatggagagtttttccttatgggcggaatatcgctgctgttgtgtcggcagtgatggacaaggatcgccaaggggcggcgcaaaaacgccaggcggctgtcaggctgcatgaagctaggccgaagaggcagcggggggctacgaaggctgcggcctccggcggaggcaagccgccgctggcggcgaagtcgggcgcctctgcacctagcaaggcgccgcaggcaacggcgggcgccggaggctccaaatcgacgaaggtggtgccgccggccagcggagtggcggaggcttcgaaggcggcccgagcgttgccgttgtcgggcaaacgtgttgccgacttcggcaccgatattaatgtggacgactatcttggtgggtcggacgagggccagcttgctatagttgcgcctgccgcggcgatcgcgacggctgccataatgccgaaggcgaggggcgaggcccttggcgccggaggcgaggtgtcggccctcgcggttgtcagggacgaggcgggcgcagcgacccgccggctgaaggaggtgacggaggcgctgagtcaggtggccgacttcgccagtcgtactgcatcgggggccctcacggcagctgtgtctgccgaagtccagagactttggacgcaacatgctgacgctttccgtgaaaaatcggcctccgacagcaagtgccgtaaactgacggacaaggtggccgcactggagagggagaaggctgacctccggcgccaactggcaggggagaggagggaggccaacgaggccatcgccaaggagcaggctgcgcaggcggaggccaaactggcgcgggcggaaggcaatcttgccaaggagctcgccgaacatctgcaggagcggctcaccgccctggagagccgcgtgaagggggccgaggtcgcgatgcgtgcggaggccgaacggacgcgcacacagcttatggatacatatcgtgagctgggtgcgcggaccggtgacttcgaggtgccggaccgagagcccgggcttcgctgtctggaatgggtgcaggaggagctgcaggaactccccactgtcatgggggggtttatgtcgtacgcctccctggtcacctgcgagggggagatgaacgcactctcccgcgaagggtgccggcacttcaaggtcttcgaccaggcagatgaagattttgagcgagatgtctataaggtcgaagaccccgtcgtgaaggaatccgtcggggccctctatgaccggatgtggggtccgcacggtcgtgaggtggtcagggagcgggccgagactgcgagggctcaggcggcgcgtggcgagcgggtggacgacttcggggcgttgaacagcgcgctgcctgacccggagccgacccctgcggaggccgtgtctggggtcgccctggagccaaccccggagaccgcggcgatcgcgacggctgcccccacatctgctgtggccggcgaagacctgccctcaaaggtggccaaaggcgcccctgatgcccctgcagctgctgtgccgagtgctgaagatcccgcggcggtggcggcggaaacaacggcggaagcagcggcggagccaacggcggaggctcccgcagcgtcagggccttcgcaggtggcgtaggaatgtggggtctgtacggtcgtgaggtggtcagggaacggtcccagtctgttagggctcaggtaacgttgttgtttgttcggtgtttgctgaatgtgttctgtgtgtgtgcttgctgaatttttgtgtgtgttgtcttagtcggagcgtggcgagcgggtgcacgacttcggggcactgtacagcgcgctgcctggccaggagtctaccccttcggaggccgcgactggagtcgccctggaaacaaccccggagcctaccccccacgtgccgagcgtgcccacctctgccgtggcc

SEQ ID NO: 176356 - DNA, 138 bp, Zea mays
  Clone ID: MRT4577_9242C.1
aatccaagcccaaacatgagccattaaagtaaggggattacccggccctggaaacaattaacttaaaataaaacaacacatctggctttaggagctaccccttttattttcatagtacacgtctgggtagattcacag

SEQ ID NO: 176357 - DNA, 1260 bp, Zea mays
  Clone ID: MRT4577_92430C.1
atggatgtctttgctgaatgcattaagagagctgaaacagaggagatgatctttatcaacagacatcatgatgtgtcatcaacatgtggctcggttatcagcgaagacttcgagcgaggggtggcgcctttgccttcgccccaactggcgggggagaggagggagaccaacgaggccgtcgccaaggagcaggctgcgcaggcggaggccaaactggcgcgggcggagggcaatcttgccagggagcgcgccgaacagctgcaggagcggctcaccgccctggagagccgcgtgaagggggccgaggccgcgatgcgcgcggaggccgaacggacgcgcacacagcttatggatacatatcgtgagctgggtgcgcggaccggtgacttcgaggaggagctgcaggaactccccactgtcgtgggggggtttatgtcgtacgcctccctggtcacctgcgagggggcgatgaacgcactctcccgcgaagggtgccggcactttgaggtcttcgaccaggcagatgaagattttgagcgagatgtctataaggtcgaagaccccgtagtgaaggaatccgccggggccctctatgaccggatgtggggtccgcatggtcgtgaggtggtcagggagcgggccgagactgcgagggctcaggcggcgcgtggcgagcgggtggacgacctcggggcgttgaacagcgcgctgcctgacccggagccgacccctgcggaggccgtgtccggggtcgccctggagccaaccccggagaccgcggaagacgcaccggatgcccccacatccgctgcggccggcgaagacctgcccccgaaggtggccgaaggcgcacctgatgcccccgcagctgctgcgccgagtgctgaagatcccacggcggtggcggcggaaacaacagcggaagcagcggcggagccaacggcggaggctcccgcagcgtcagggccttcacaggttcaagattttgggcctgcgcacgcaaccgctactactgaatttttggcggcttcgaccgcggaaggtggtaatgaatatggtggatctgcatctgagttttttgattttactgactctgggagctcggttgagtggactgaggagtcgtcagaggaggacttggactattttgcggccttggacgtggttgcggcggaggcctcgccacacgccacggacgcgcaagatgtgccaggtcctagcaccgggcgccgacgacgaagggcggttgcaaagcgtagg

SEQ ID NO: 176358 - DNA, 1330 bp, Zea mays
  Clone ID: MRT4577_92431C.1
ccggacgtcttggtcttggtcttttggatgacctcgtccccggtcaagacgggaagcacatatgctgtccgtcaccgcgcgcgcctccttgcccttcttcaccctttcctcccggacccggcgtctccgtgcccgtgcgtgccttctccggcctgcggtctcctccaccggccaccgctgcctcgcaattgggcaaggcaatcagaccgctcccatcaaccgccctgaccgcgcgagggagatcaaacgcggaggccgtccgtccctcccgcgttatcgtgatgccaggcctcgccgcagccgagcaggacgccgtctcgctggtgcggcgcgtcgcccgcgccctcaaccgccgcttcaccgacatcgtcgcgctgctcttcagccacaagggcgctggatcgctcggcgccgtcgcggggttcgccatcgccgtcgtgttcgcgtggaagttcctgcgcccccgcagacgtgctcccaagcggcccccacctacccctgcagcggctcccgctgcgactgtgcctgatgcggccgagcctatcggtgactcaggcaaggtagtaacacgggaaattgtggtgaagcgactgaaaggctgcagaaaggttacatgccaacttctcggtgttgtttttgaggagaaaattcctgaggagcttcagaaacatgccaccgttagaccctccgtggtagagctgctactggaaatatccagatattgtgatctctacctaatggagactgtaattgacgataagagcgaggaaaatgctctcatggccctggagacctctggacttttcagaactggtggcctgatgaaagagaaggtgctcttttgcagctctgaagttggtcgaacttcatttgttcgacagttggaatcagattttcacatagacacgagccttgacatagtttctcaactatctcggttcattcgatgccaactatttatttccacggtggaaggagaacagcttgcaggcaacgtattcaattctccaagtcttgagcagttcttctcttgatggcgggacgcaaagaaaggccttctgcactccaaacaaatgtgctgatttcacaattgtgacttgtgagttgtaggcttctagcgccccccggcctggacgcaacagacaccctacaactgttggagttcagttgtgatcatgcaagatgtatattaaacagacaataataagttggtaaaaaatattcatatttatttattatttctagtaaaagtacatggaaaatataaatatagaagctactcctggtcgtcttcaaaaaaaaaaaaaaaaaaaaaaaaaaaagagggggg

SEQ ID NO: 176359 - DNA, 3480 bp, Zea mays
  Clone ID: MRT4577_92432C.1
atgccgtcctcctcttcttccgctgccgctacgccgccggccgccgcctcgtctgaggagacgttgagtagcttgatggtggaggagttgcgcgccggcgactctgttgattttggtgtgtcacggatgacgtcagcccgcgttgaagatatgcagcggttgggctactttggcggcggagttgctcgtgctccggggacggaggaagtccccgagccggagggcgaattggttgttttcgaggcgttcttcgccgccggtctccgcttgcctgcgcaccgatttgttggcgaagtcctgcggaggttcaacgttcaaatacatcagctgacaccgaatgccatggtggcgctgtcgaagtatgtctgggcgacgacttcgtacggcgggcaaccgtccgttgaagtttttgcgaaggattattgtctgcattggcagaagaggatggttggggacggagttgcccagtttgggtcttgcacatttacgccgaagaccggcaagaccacaatgccagtagtggagttggttccttgcgcccgtaacaagtggggcaattggaatgaattttggttttatgttgctgagggtactgtcgaaggccattagggtgtccccgtttccgagatgtggtcttgatatttatgtgcctttccgccttttgaagttggaggagagggagtagatgaaggggccctttggatcgactccgggaagaagaagtgtgcttgcttagaaaaaaaaatcgtgggctacggggtctggcccttggcgcacggctgggcgctgggcgaagtatgccctcgccagatgccttttcacggaggaagggtggtgcgaagtcctgccttcgcactgtatttgcgaaaccgtgacccggccgcctttgtgcgtgatgcggaggacttggcggtgcggctcgtggggcgttacgtgccgaggacggaaggccagcgcagctttgatatccgcgggtcaaatgaacgtgtgaacaaggtcttcgaattaaatcaactgccgtacgacggctaccccggtcaggacgaagcggaccgccatgggaagaaaccggcggtggagactggaggcgaccctgcgtaggtggccacggctgcttttcacgatagtccatacactcattcgcttacagcatctgcacaggatgatataactggtgcacaattactacaatctcgttggaagaaagcgcgcaaaataatctgcagaacgaattgctttgtatgcaaagaggcttcaacatctggaggaagtccataacatgaagcaaacaacaccagcacagtggccgagaacgagaattttacctctcgtatggctcattgctgggcatttgttcagtaggggcgaaatatcggtcatgttgtgtgggcagtgatggacaaggatcgccaaggggcggcgcgaaaacgccaggcgactgtgagggttcacgaagctcggccgaaaagacagcggggaacggcgaaggctgaggcctctggcggaggcaagccgccgctgccggcgaaggtgggcgcctctgcgcctggcaaggcgccggaggcgacggtgggcgccggaggccccaagctggcgaaggtggtgccgcctgtcagcggagtggcggaggctgcgaaggcggcccgaacgttaccgccgcctggcaaacgcgttgccgacttcggcaccgagattaatgtggaggattatcttggggggtcggacgagggcccgcttgctctagttgtgcctggcgcggcgatcgcgacggctgcgccagcgccgaaggcggggggagatacccttggcgtcggaggcgaggtgtctgccctcgcgctggtcagggacgaggcgggcgtggcgacccgccgactgaagggagcgacggaggcgttgagtcgagcggcggaggcgctgagtcaggtggctgacttcaccggccgcactgcgtcgggggcccttacggcagctttgtctgccgaggtcgagagacttcggacgcaacatgctgacgctgtccgtgagaagtcggcctccgacagcaagtgccgcaagctggcggagaaggtggccgccctggagaaggagaaggctgacctccggcgccagctggcgggggagaggagggaggccaacgaagccatcgccaaagagcaggctgcgcaggcggaggccaggctggcgcgggcggaaggcaatatcgccaaggagctcgccggagagctgcagcggcggcttactgccctggaaagccgcgcggagggggtcgaggccgcgatgcgatcggaggccgaacggacgcgcacgcagctcatgactgcatatcgcgagctgggtgtgcggacgggtgacttcgaggtgccggagcgagaggccgggcttcgctgtctggaatgggtgcaggaggaactgcaggagctccccactgtcttggcggggttgatgtcgttcacctccctggtcacctgcgaggcagcgatgaacgcgctctctcgcgaaggctgccgtcactttgaggccctcgaccaggcagatgaggattttgggcgagatatctttgaggtcgaagaccccgtggtgaaggaatccgccggggccctctatgaccggatgtggggttcatacgatcgtgaggtggtccgggcgcgggccgaggctgcgagggctcatgtaacgttgtcgtttgctcggcgtttgctggatgcggcggagcgcggcgagcgggtggacgacttcggggcgctgaacagcgcgctgcctgacccggagacgacccccgcggaggccgcgactggcgtcgccccgggaccgaccccggagactgcggaagatgcaccaggcgcccctgcatctgctgcggtcggcgaagaccttcccccaaaggtggccgaaggcgcgcccgatgcccccgcagctgctgtgccgagcgctgaagatccgacggaggtgggggcggtggcagcggcggaggcctcggcggaggctcccgcagcggcagggccttcgcaggttcaagattttgggcctgcgcacgcaaccgctactactgagtttttggcggcttcgaccgcggaagatggaaatgaatatggtgggtctgtttctgagttttttgattttactgactctgggagctcggttgagtggactgaggagtcgtcggaagaggacttggattattttgcggccttggacgtggctgcggcggaggctgcaccacacgctgcggacgcgccagacgtgctcggtcctagcaccgggcaccgacgacgaagggcggttgcaaagcgtaggattagcgcggaggaaggggctcggcttcgcgttagtagggctggtcggcaggagctgctgtctttgccggccgccgcgggtgcaggggaaggggagctgcgaagcctttttgcgggtgaggagcttaggataatgttatttaattatagagagatggggattattcctaaggttgagccgatgtag

SEQ ID NO: 176360 - DNA, 435 bp, Zea mays
  Clone ID: MRT4577_92433C.1
acctccaccaatcctctgctgagatcgaaccaacaaaacggactcacctcggccatctgctatagggcgaatggttccccaccgagtctgcccaaccgaaggcactcgcgctatggtccctccattgctagggcccaatgacggctccgcagccgctactagagccacgcgactacctatgggccagtaccaccacgttgtgccgtacagaaagctgctcctccgggctagagggcgaggggccgcacctcgcactgaagatcggtcttccagggaccgacaaggccgccggactatgcgcggacacggagcacgccctggcgcacactgactatgtgcgtacgactctgaccggccattggcccgtgcctgacaggggcagcgccccccgcgggttgacctactccctataacgattcgcgaatctggacgggg

SEQ ID NO: 176361 - DNA, 794 bp, Zea mays
  Clone ID: MRT4577_92434C.1
ccccgcgtccgccccgcgtccgagcgcccccgcgagccagctccggcgaagtcgacagcaccaagcatggcggacacgaaggcgtcacccgcggtgacgctccgcacgcgcaagttcatgaccaaccgcctcctctcccgcaagcagttcgtgctcgaggttctccaccccggccgcgccaacgtctctaaggcggagctcaaggagaggctggctaagatgtacgaggtgaaggatcccaactgcatcttcgtcttcaagttccgcacccacttcggaggcggcaagtctaccggattcggtctcatctacgacaacgtcgactcagccaagaagttcgagcccaagtacaggcttatcaggaacggtcttgctaccaaggtggagaagtcgcgcaagcagatgaaggagaggaagaacagggcgaagaagatccgcggtgtgaagaaggtatgcacacttgcactcatctgactgttgtgtctaatattactgtgcatttggaatgtggggatttcattgtgtttctgtggttctgataaaaatagttattttttgcgtgtaactgctatttttttttgttggattggttttgcagacaaaggctggggacgctaagaagaaatgagcaaggtttcagtgtactttagccgtcttgagtttgagtaacacctgctcgccgtcagaaattttgtaccccatgtcgcaatgctttgatctagaaaaagagtttttttagctgtttacatcgactactggtacatttgaaaaggcatattccccatctttgtggc

SEQ ID NO: 176362 - DNA, 234 bp, Zea mays
  Clone ID: MRT4577_92435C.1
ccaccactgggcactacacaccttatctctacccactccagagcgcaggaagaacccgatcgacaccatgaggatgtccggtcgttgccctccctcccctggcatatcgctgcgagcgccacctccacacatacaaacggcgtcggcgcgccgccaaacaccgccgtcgtctcaactaccgccattcgccgcacctgcctccttatgggggacctgccacctactgcgcatctc

SEQ ID NO: 176363 - DNA, 871 bp, Zea mays
  Clone ID: MRT4577_92436C.1
gcagctcagccagacgggcgattgggtccctcgaggccggccggggtgtttccccgccgccgcctccaagcgcccccgcgagccagctccggcgaagtcgacagcaccaagcatggcggacacgaaggcgtcacccgcggtgacgctccgcacgcgcaagttcatgaccaaccgcctcctctcccgcaagcagttcgtgctcgaggttctccaccccggccgcgccaacgtctctaaggcggagctcaaggagaggctggctaagatgtacgaggtgaaggatcccaactgcatcttcgtcttcaagttccgcacccacttcggaggcggcaagtctaccggattcggtctcatctacgacaacgtcgactcagccaagaagttcgagcccaagtacaggcttatcaggaacggtcttgctaccaaggtggagaagtcgcgcaagcagatgaaggagaggaagaacagggcgaagaagatccgcggtgtgaagaagacaaaggctggggacgccaagaagaaatgagcaaggtttcagtgtactttagccgtcttgagttcgagtaacacctgttcgccgtcagaaattttgtaccccatgtcgcaatgctttgatctagaaaaagagtttttttagctgtttacatcgactactggtacatttgaaaaggcatattccccatctttgtggcaatgtcggggcgataccatgctgggccgagaatttttaacgaagttatacttttgaaagaaaaaaaaaaaaaaaaagccgccagcctagatagtagcgttgatttcgtttcggcagaatctgtttcagaaaagagacattctgtgaaaacgtacgtacgtttcaggagactctggatcg

SEQ ID NO: 176364 - DNA, 421 bp, Zea mays
  Clone ID: MRT4577_92437C.1
gggggcaaaaacaaaccaatttattccccaacgaaatagggggggggggggggggggctcgagccccatcgggcccgtttgttccccaaaacctctaaaaaaaaaaagggcccccgggcttggttcaactgggggggcataaacccttcccccccgaaaaaaaaccggggtttgtccttgtttggagggaaaacttctttccatgccttggaaccccctccctttggaaaatactggagggggccgtcttttctgctaaagggccccaagcagggatccggtcccttggtgtaaaaagccacccccttgtccttgggggctggaaggggtaattcccaaagctcctttagggccccgggcccactcacccttttcatgggggggggcccccccccaaacttccccccttgggggtgttttt

SEQ ID NO: 176365 - DNA, 407 bp, Zea mays
  Clone ID: MRT4577_92438C.1
gggtaatgggagaatttttttttttttttttccccttatccctttttttttttttatttttttaagggaaaaaaaaccaaaaaaaaaaaaatcccgacccctgggggaaccccagggaaaaccccgaaaattccaacccggccccttaggggcaccaactttccctaaaaaaaagctaaaaaaaaaacgggctaataaaaggcaaaaaccttccccggggaaaaaattttttccttcaaaaattcccaaaaaaaaaaacccggaaaaaaaaagggaaaaccccgggggtcccaaaaaagggccacaccccacaaaatatgctgggggctcacatccccccctttacaatgggaaaacaccactgccccaaatcttaaaaaaaaaaaaacgcccacccccccccgaaa

SEQ ID NO: 176366 - DNA, 848 bp, Zea mays
  Clone ID: MRT4577_92439C.1
caggcggcgggcgggttcgataaaagagaccgagaaatctagttgcgcagcgaccgagcgaaccctccccttcctccgcctcccattcccaaaattttcaccgcacgcctctcgctctcctcggctaaccgcgacgacgacccccgaagcttcgcgaagcttcctgggcctccccccgcggccgcccctccctagatcgccgcctctggcagcggcgaggctgcatcgcgagggcggtggaggctggaggagccgggccacggggtcgacgaaggcgagactagggtttgggtttggtgtcgagctgcatcggtcggcgccctgtgagggagaaggatgctatatgatgcggcggctcaagagcatcgcctccggccgctcgtccgtctccgatccgggtggtgactctggctccaaaaggccaaaatttgagcaggatggagcaggggatattgttattgagccacacttaactgaggccaagcctgtccggatagaccaagaatcatcatcatcatctaatagggatgctgaggcaagcacatctactagcatgaagcctgttaaaactgaagaaccagtagcagatcttcttcccaaagaattgaatgatatgacaattagtgacgataaagctgatgaccataatgataaggaaggtgaaggtgttactcttgatgggaatggagccgagacaggacagataattgtgacaacaataggaggtcataatgggaagccaaagcagaaagtctcatacatggcggaacgcggtgttggtactggttcgtttggtatagttttccaggcaaaatgcttggaaactggtgagacggtggcgataaaaa

SEQ ID NO: 176367 - DNA, 246 bp, Zea mays
  Clone ID: MRT4577_9243C.1
acgggtatccattctgtccatctatccgcaccaacccctgaggcgtatctcgcgtgccatcccaccctactactgatttcacgacattagagaaatctcctctatcacatctctctctatctatatatgtaataatgcaggaagacaacacacattatcatgtgtggtatgaccaataatatatgcatggccataataacgcctcagggtttaatgacggaaactgggcagatgaaaaccctcccg

SEQ ID NO: 176368 - DNA, 418 bp, Zea mays
  Clone ID: MRT4577_92440C.1
gaaggggaagcgggtgcaggaccaggtaccgaattcccggtcggcccactccttcctctccatgagagaaacaaaaattggaagagagaaaggaagaaccccaagccttgggccaccatcaacaaaatacaggggagaacaaagaaacaatccaaccagacaagagccaccacccacaaaatacaaaaattggaggggagaaagagggtttaccccgtgcaagaaaaaagcaagcaggggtcaattttttttttttgcgcgcggtcctttttttttctgggcgcggtctttttttttatttgcgcctttatttttttcattattttactttgggcgcgctggggttggtggtactttttttattttgatctctttttttatattactttattctagttaaaacatttttatatctttt

SEQ ID NO: 176369 - DNA, 428 bp, Zea mays
  Clone ID: MRT4577_92441C.1
aatcaatataatgcggaatgcaaatgcatatgactaggaatgaatcaatctacacaagtgaggtatcacactgtaaaattcactacccgaccgattctgaatgggaacttgtgatgcctggagtcgtgggcgcatcgcgtgtagaaggagagggaggtcacgaggaagagggacggacacagcagggaaggcaggacagcgacttggaagcgaagctgctcttgctcttgtccttctccttccccgtcgtcgtcggcttcaccgtggggatgtgggagccgtcctcgccgccgcggtccttgcatttctcgcactcgtccaagaaggccttgaaggcgtcgacgcaatacctggccgccttcgccaccgtcatgccctcgacgagcccttgcgggtacgactccttggtgtggtcgccgttgagcacc

SEQ ID NO: 176370 - DNA, 549 bp, Zea mays
  Clone ID: MRT4577_92442C.1
ccgacgaaccgcagcccaccgtcaagatggtttccgccaatattcactgttcctatcgtcaagaagcgcacgaggcacttctctcggcatcaggccgaccgcttcatgcgccttgacaagggcacatggcgcaagcccaagggtatcgacagtcgcgttcgccgtcgattccgtggtaccattgctatgccctctatcggctatggctccaacaagaagacccgctacatgatgccctccggccacaaggctttcctcgtcagcaacaccggagacgtcgaactgcttttaatgcacaaccgtacacacgcggctgagatcgcccacaacgtctcttcccgcaagcgagttgaaatcatcgcccgtgccaagcaattgggagtcaaggtcaccaaccccaaggctaagggtaccaccgaggtttaaaaaggacatggatcggttattgggctgctttacggttatgcatcggaaagggatttgcgttattgcggttctagcatataagtttgcatgctagagaataaaacgcgccaaagaacgacaaaa

SEQ ID NO: 176371 - DNA, 336 bp, Zea mays
  unsure (1)..(336): unsure at all n locations
  Clone ID: MRT4577_92443C.1
tttagatcccgagcgggggggttggggggttttataaaaatacaanaacaggggggacattnggatcattcccattgggctcagtagttttcttcttgcctcccttcttgagcttctttttgaatctgaactggtccttcatgttcttctcccattctttcttntgcgggggggaatnancatcccancctctccatactaaaaagggcantnttcattctngtntattttaccaccaangacttcancancaagatccttcaatgatcggctctttctctcccttctgagaacctcatattctgatgtatccctgatgtccttctttgggggggg

SEQ ID NO: 176372 - DNA, 674 bp, Zea mays
  Clone ID: MRT4577_92444C.1
agttcggccgggcaccgtagtcggtctccccgggctagcgtgcccacacaagttcatgtctgcccatggcagattggcagcagcagccagcatatacaggtagctagcgttgcaacgctctccactggagcagaccaactgctttggcctttggttgggagtatagtcggtctcggtcggcgtcagcccctcccttgcttgccgatccctaccgctccaaacacccgccagggctgagagctcgactccgactcgagatatggccgactggggccccgtggtggtggcggtggtgctgttcgtgctgctctctccgggcctgctgctgcagctgccggccaagggcgccggccgcttcgtcgagttcggcaacttccagaccagcggcgcctccatcttcgtccacgccatcatcttcttcgccctcgccgccgtcttcctcatcgccatcggcgtgcacatcactacgtactagccttggaatcttacttcatcagtctgcctgcacacccttgtgcagacctagcaagtggtttatatggctgtgggctagctgcctgtactcgtgtgtcgatgcatcaactgtgatccagttattcagtggcgcggcaagaaaccctgattatttaaaactactctttcaggtccaaaaaaaaaaaaaaaaaaggccccta

SEQ ID NO: 176373 - DNA, 504 bp, Zea mays
  Clone ID: MRT4577_92445C.1
atgacgcctccacgcggaggtcggtgcctgcccgtccgcgaggacttgagtggggatctgccggtgcgggctggggcggccgccattcgttggcgtagcgctggcgcgcaggtggccgctgtcgtcggtgctgaggtggtggcagccagagaaggtttcttcgccgacgagaccgtcggcgccacctgcagtcggacccccggctctctggctttgacggcttgtcctcgcccctcatgtggggacgtgggcgagggccttcttacaacagtgtttgccctgatgtcatcgttgctgttgtttagccgcccgaggcggaggtcgttgtcgctgctggtgcagtggtcgtcggcgagccacctggagtttgttgtcccgcaggccctctggtgtggaggttgttcatacccgcgggagtggaaccggagtcccatttgtaatggtaccctgagtatgggtgtttgttcattgtggctgtcgaggcctgaacatctgggtatttga

SEQ ID NO: 176374 - DNA, 474 bp, Zea mays
  Clone ID: MRT4577_92446C.1
aaaacaacgagcacagaaaatatacggggtcataagtcctaattaacgggaagacaatcataacgagcagggtctttattttcacgtataaaggcatcccattttaaggggaggtcttttttttttttccccccactaaattaaaatcaaattgacgctgtatacttgctggactgcacccccaaaatccacaaagggcaactacaggtaaaagccctacgcgtgagaaatcagtccaggcaggttattggtgatggaacacactaaaaaggggtagtggttttcccccacgttttggagggggcgaggtgaatgtaaggccacaaaatgttgcatgaaagggaacgggtaaaaccgttgccggggctgtggttgataaattgggttcgctgaataattttttaaaaatgtggaggcaacgttgtaggggggagccgaggggttgtcacatgttttgggaattggacccgggga

SEQ ID NO: 176375 - DNA, 147 bp, Zea mays
  Clone ID: MRT4577_92447C.1
caacgccgaggcgttgtcgagggcgtacgcgaggtagtcgcggcggccggtggcccggtgcagccagagcgccgcccacagcagctcgtcctggtagccgctggaggacgggtagtagctcttgaccacgtcgacgctttcgtcgta

SEQ ID NO: 176376 - DNA, 304 bp, Zea mays
  Clone ID: MRT4577_92448C.1
ttttttttttttataacgtattattttttttatttgatattataaaagtttttgtgagggtatacaacgctaccagccatggtatgcgcaacgaaggcggtggcacggcaactacaccaagaagaaagaacaacgcaagagacgcacacaaaaagggatcgaccaagacaaccaaccgccaaaaaggggaaccacgggggcacaaaaaggagacagaaaaaagaccgggtttaagaaaaaaaaaaaattccccaaaaaaaaataaaaatcagaaatgccccgccggaaaaaaggaggcagcccc

SEQ ID NO: 176377 - DNA, 1062 bp, Zea mays
  Clone ID: MRT4577_92449C.1
gtggatgacttcgccagccgtactgcgtcgggggccctcacggcagctgtgtctgccgaagtcgagagacttcggacacaacatgctgacgctgtccgtgagaagtcggcctccgacagcaagtgccgtaagctgacggacagtgtggccgccctggagagggagaaggctgacctccggcgccaactggcggcggagaggagggaagccaacgaggccgtcgccaaggggcaggctgcgcaggcggaggccaagctggcacgggcggagggcaatcttgccaaggagctcgccgaacatctgcaagagcggctcaccgccctggagagccgcgcgaaggaggccgaggccgcgatgcatgcggaggccgaacggacgcgcatgcagcttatggatacatatcgtgagctgggtgcacggaccggtgacttcgaggtgccggaccgagagcccggccttcgctgtctgcagttggtgcaggaggagctgctggaacttccagccgtcgtgggggggttgatgtcgtacgcctccctggtcacctgcgagggggcgatgaacgcgctctcccgcgaagggtgccggcactatgaggccttcgaccaggcggatgaagattttgagcgagatatctataaggtcgaagaccccgtagtgaaggaatccgccggggccctgtatgaccggatgtggggtctgtacggtcgtgaggtggtcagggagcgggccgaggctgcgagggctcaggcggagcgcggcgagcgggtggacgacttcggggctctgaacagcgcgctgccagacccggagccgaccctcgcggaggctgtgactggggtcgccctggagccaaccccggagaccgcagtgatcgcgacggctgcctcctcatccactgcggccggcgaagacctgcccccgaaggtggccgaaggcgcccctgatgcccccgcagctgctgtgctgagtgctgaagatcccgcggcggaaacaacggcggaggcagcggcggaggcagcggcggaggctcccgcagcgtcagggccttcgcaggtggcgtag

SEQ ID NO: 176378 - DNA, 435 bp, Zea mays
  Clone ID: MRT4577_9244C.1
ggaacaaaactttctctgcatttattacatcccttaaaaagaaaaagaacaggggggaacatgtccaacctaaatcctacgtttgggttccccgacccctaaaaaccccaaaaaaaccccttcataaaacccaagggatctaatgggtgggacaaaaaattactgacagggggaagggagaacattgaaaaatcagctcgcccttttttaacaggccaatctcatctcattggtgggaaacggaattacggacaggaggccccattatgcgtctcaaagcgggggatagtaaaactatgacccaagggcgatactggaggtccggccccagaaaggaaggaagggtttcttgatatctgggggaacatcgcgagccctggcctagctaggatggaccgaaaattccactccgggatgcaagagccaacttcaggg

SEQ ID NO: 176379 - DNA, 336 bp, Zea mays
  Clone ID: MRT4577_92450C.1
aaacacccggtcgaacacaaaaaataaattggggacaccatatatctcggccttcatcagatggggtggcataccgaggaaacggtcgtggatgctgctgctgcacgggatgcgcagagttatggggaatactgcgccgtattcatcgatgactcctcacaccgctacctgtgggaccagcagtccgaccacaacgacgggtgaaggtcgataaaggaaccgtctgcggccgttaatggactgattgccttaggaccggcgacatacttaccagctaaatatacacagaagccgaacaaagttcttcttactaatccatttgatacaccgagtgat

SEQ ID NO: 176380 - DNA, 3175 bp, Zea mays
  Clone ID: MRT4577_92451C.1
atgccgtcctcttcttcttcctccgacaccacgccgccggccgccgcctcgtctgaggagacgttgagtagcgtgatggtggaggagttgcgcgccggcgactctgttgattttggtgtgtcacggatgacgtcagcccgcgtcgaagatatgcagcggttgggctactttggcggcggagttgctcgtgctccggggacggaggaagtccccgagccggagggtgagttggtcgttttcgaggcgttcttcgccgccggtctccgcttgcctgcgcaccggtttgttggcgaagtcctgcgtagattcaatgttcaaatacatcagctgacaccgaatgccatggtggcgctggcgaagtatgtctgggcgacgacttcgtacggcgggcagccgtctgttgaagtttttgcgaagaattattgtttgcattggcagaagaggatggttggggacggagttgcccagttcgggtcatgcacattcacgccgaagaccggcaagaccacaatgccagtagtggagttggttccgtgcgcccgcaacaagtggggcaattggaatgaattttggttttatgttgcggagggtactgtcgaaggccataaaggtctccctgtgtctgagatgtgctctcattattactctgcgtatccgccttttgaagtggcagaggaagatgcagacgaaggggcccttcggtgcgccgccggtcagagcagtgggcgtgatttagttgaagagtttgtggcgtatggggtgtggcccttggcgcacggttgggtgctgggcgaagtgtgccctcgccagatgccttttcacggaggaagggttgtgcgaagccctgccttcgcactgaatctgcggaaccgcgacccggctgcttttgtgcgcgacgcggaggacggggccgtgcggctcgtggggcgttacgtgccgaggacggaaggccagcgcagctttgatatccgcgggtcaaatgaccgtctgaacagggtcttcgaattaaatcaattgccgtacgatggatatcctggtcaagacgaagccgaccgccgcgggaagaaaccggcggtggagacaggagacgaccctgcgccggcggccgcccctccctcgaaaaagagaaaattaggtactgcgatgggagggattggggtgtctgatagtttcgctagagatttaatgaggacgtgtgcggccccgggggaaaggatgtcttcgcccgagctccgggagtcttcggctcggatgctgagggttaccgggggttgctggcctagaaatgttcctatcccctgcgcggctgaggaggactgttttacatctcgcatggttcatcagtggagagtttttccttacgggcgaaatatcggtgctgttgtgtgggcagtgatggacaaggatcgccaaggggcggcgcagaagcgccaggcgactgtcaggattcacgaagctcggccgaaaaggcagcggggaaatgcgaaggctgcggcctccggcggaggcaagccgccgctggcggcgaaggcgggcgcctctgcacctagcaaggcgccggaggcaacggcgggcgccgaaggctccagaccgacgaaggtggtgccggcggccagcggagtggcggaggcttcgaaggcggcccgaacgtcgctgccgccgggcaaacgcgttgccgacttcggcaccgatattaatgtggacgattatcttggggggtcggacgagggccagcttgctatagttgcgcctgtcgcggcgatcgcgacggctgcgcaagcgccgaaggcgaggggcgagatccttggcgccggaggcgaggtgccagccctcgcgttggtcagggacgaggcgggcgcggtgacccgccggctgaagggagtgacggaggcgctgagtcaggcgacggaggcgctgagtcaggtggctgatttcaccagccgtactgcgtcgggggcccttacggcggctttgtctgccgaagtcgagagacttcggacgcaacacgctgacgctgtccgtgagaaatcggcctccgacagcaagtgtcgcaatctgacagacaaggtggccgccctggagagggagaaagttgacctccggcgccaactggcggcggagaggagggaagccaacgaagccatcgccaaggaacaggctgcgcaggcggatgccaagctggcgcgggcggagggcaatcttgccaaggagctcgccgaacaactgcaagggcggctcaccgccctggagatccgcgcgaaggaggccgaggtcgcgatgcgtgcggaggccgaacggacgggcacgcagcttatggatacatatcgtgagcttgtgggcgcaggaggagctgctggaacttccaaccgttgtggggggttgatgtcgtacgcctccctggtcacctgcgagggggcgatgaacgcgctctcccgcgaagggtgcctgcacttcgaggccttcgaccaggtggatgaagattttgggcgagacatctataaggtcgaagaccccgtagtgaaggagtccgccggggccctctacgaccggatgtggggtctgtacggtcgtgaggtggtcagggagcgcgccgaggctgcgagggctcaggcggagcgcggcgagcgggtggacgacttcggggctctggacagcgcgctgccagacctggggtcgaccctcgcggaggctgtgactggggtcgccctggagccaaccccggagaccgcagcgatcgcgacggctgcccccccgcccgctgcgactggcgaaggcggcgctgacgccccccgcaaccgctgcgccgagtgctgaaggttccgcggcggaggcggcggaaactgcggcggaggccgcggcggagcctacggcggagccaacggctgaggcttccgcagcgccagggccttcgcaggttcaagaatttgggcctgcgcacgcaaccgctactactgagtttttggcggcttcgaccgcggaaggtggaaatgaatatggtgggtctgtatctgagttttttgattttactgactctgggagctcggttgagtggagtgaggagtcgtcggaggaggacttggattatttcgcggccttggacgtggctgcggcggaggcttcgccacacgctgcggacgcgccatacgtgccgggtcctagcaccgggcaccgatga

SEQ ID NO: 176381 - DNA, 3048 bp, Zea mays
  Clone ID: MRT4577_92452C.1
atgccgtcctcttcttcttccgctgccactacgccgccggccgccacctcgtctgaggagacgttgagtagcttgatggtggaggagttgcgcaccggcgactctgttgatttcggtgtgtcgcggatgacgtcagcccgcgttgaagatatgcagcggttgggctattttggcggcggagttgctcgtgctccggggacggaggaagtccccgagccggagggtgagttggtcgttttcgaggcgttcttcgccgccggtctccgcttgcctgcgcaccggtttgttggcgaagtcctgcgtagattcaacgttcaaatacatcagctgacaccgaatgccgtggtggcattgtcgaagtatgtctgggcgacgacttcgtacggcggacagccgtcggttgaagtttttgcgaagtattattgtttgcactggcagaagacgatgattggggacgaagtcgcccagttcgggtcatgcacattcacgccgaagaccggcaagaccacaatgcaagtagtggagttggttccgtgcgcccgcaacaagtggggcaattggaatgaattttggttttacgttgctgaggctactgtcgaaggccatgaaggactccccgtgtctgagatgtgctctcattattactctgcgtatccgccctttgaagtggcagaggaggatgcagacgaaggggcccttcggtgcgccgccggtcagagcagtgggcgtgatttagttgaagagttcgtggcgtacggggtgtggcccttggcgcatggctgggcgttgggtgaagtgtgccctcgccagatgccttttcacggaggaagggaggtgcaaagtcctgccttcgcactgaatctgcgaaaccgcgacccggtcgcctttgtgcgcgatgaggaggacttggcggtgcggctcgtggggcgttatgtgccgaggacggaaggccagcgcagctttgatatccgcgggtcaaatgaccgtttgaacagggtcttcgaattaaatcaattgccgtacgacggctatcctggacaagacgaagcagaccgccgtgggaagaaaccggcggtggagacaggagacgaccctgcgccggcggccgccccttcctcaaaaaagagaaaattagctactgcgatgggaggacttggggtgtctgatagttttgctagagagttaatgagaacgttgatggacaaggatcgccaaggtgcggcgcaaaaatgccaggcggctgtcaggctgcatgaagctaggccgaagaggcagcggggggctgcgaaggctgcggcctccggcggaggcaagctgccgctggcggcgaaggcgggcgcctctgcacctagcaaggcgccggaggcaacggcgggcgccggaggctccaaggcaacgaaggtggtgccgccggccagcggagtggcggaggcttcgaaggcggcccgagcgttgccgttgtcaggcaagcgcgttgccgacttcggcaccgatattactgtagacgactatcttggtgggtcggacgagggccagcttgctatggttgcgcctggcgcggagatcgcgacggcggccatagtgccgaaggcgaggggcgaggcccttgacgccggaggcgaggtgttggccctcgcggtggtcagggacgaggcgggcgcagcgacccgccggctgaagggagtgacggaggcgctgagtcaggcgacggaggcgctgagtcaggtggctgacttcgccagccgtactgcgtcgggggtcctcacggcagctgtgtctgccgaagtcgagagacttcggacacaacatgctgacactgtccgtgaaaaatcggcctccgacagcaagtgccgtaagctgacggtcagggtggccgccctggagagggagaaggctgacctccggcgccaactggcggcggagaggagggaggcaaatgaggccatcgccaaggagcaggctgcgcaggaagaggccaaactggcgcgggcggagggcaatcttgccaaggagctcgccgaacatctgcaagagcggcttgccgccctagagagccgcgcgaagggggccgagaccgcgatgcgtgcggaggctgaacggacgcgcgctcagcttatggatacatatcgcgagctgggcgcgcggaccggcgacttcgaggtgccggaccgagagcccgagcttcgttgtctgcaatgggtgcaggaggagctgcaggaactccccgctgttgtgggggggtttatgtcgtacgcctccctggtcacctgcgagggggcgatgaacgcactatcccgcgaagggtgccggcacttcgaggtcttcgaccaggcagatgaagattttgagcgagatgtctataaggtcgaagaccccgttgtgaaggaatccgacggggccctctacgaccggatgtggggtccgcacggtcgtgaggtggtcagggagcgggccgagattgcgagggctcaggcggagcgcggcgagcgggtggacgacttcggggctctgaacagcgcgctgccagacccggagccgacccttgcggaggctgtgactggggtcgccctggagccaaccccggagaccgcagcgatcgcgacggctgcccccacatccgctgtggccggcgaagacttgcccccgaaggtggccgaaggcgcccctgatgcccccgcagctgctgtgttgagtgttgaagatcccgcggcggtggcggcggaagcaacggcggaggcagcggcggagccaacggcggagccaacggcggagactcccgctgcgtcagggccttcgcaggtgccggagtttgggcctgcgcacgcaaccgctactactgaatttttggcggcttcgaccgcggaaggtgggaatgaatatggtgggtctatatctgagttttttgattttactgactctgggagctcggttgagtggactgaggagtcgtcggaggaggacttggattattttgcggccttggacgtggctgcggcggaggcttcgccacacgccgcggacgcgcccgccagacgtgccaggtcctag

SEQ ID NO: 176382 - DNA, 3219 bp, Zea mays
  Clone ID: MRT4577_92453C.1
atgtcgtcctcttcttcttccgccgacaccacgccgccggcggccgcctcgtctgaggagacgttgagtagcttggtggtggaggagttgcgcgccggcgactctgttgattttggtgtgtcacggatgacgtcagcccgcgttgaagatatgcagcggttgggctactttggcggcggagttgctcgtgctccggggacggaggaagtccccgagccggagggtgagttggtcgttttcgaggcgttcttcgccgccggtctccgcttgcctgcgcaccggtttgttggcgaagtcctgcatagattcaatgttcaaatacatcagctgacaccgaatgccatggtggcgctggcgaagtatgtctgggcgacgacttcgtacggtgggcagccgtctgttgaagtttttgcgaagaattattgtctgcattggcagaagaggatggttggggacggagttgcccagttcgggtcatgcacattcacgccgaagaccggcaagaccacaatgccagtagtggagttggttccgtgcgcccgtaacaagtggggcagttggaatgaattttggttttacgttgctgagggtactgtcgaaggccatcagggactccccgtgtctgagatgtgctctcattattattctgcgtatccgccttttgaagtggcagaagaggatgcagacgaaggggccctccgatgcgccgccggtcagagcagtgggcgtgatttagttgaagagtccgtggcatacggggtctggcccttggcgcacggctgggcgttgggcgaagtgtgccctcgccagatgccctttcacggtggaagggtggtgcgaagtcctgccttcgcactgaacttgcgaaatcgtgacccggccgcctttgtgcgtgatgcggaggacttggcggtgcggctcgtgggacgttacgtgccgaggactgaaggccagcgcagctttgatatccgcgggtcaaatgagcgcttgaacagggtcttcgaattaaatcaattgccgtacgacggctatcctggtcaagacgaagcggaccaccgtgggaagaaaccggcggtggagactggaggcgaccctgcgctggcggccgccccctcctcaaaaaagagaaaattaggtactgcgatggggggacttggggtgtctgatagttttgctagagagttaatgaggacgtgtgcggccccgggggaaaggatgtcttcgcccgagctccgggagtcttcggctcggatgctgagggttaccgggggttgctggccgaaaaatgttcctatcccctgcgcggctgaggaggactgttttacatctcgtatggttcatcggtggagagtttttccttacgggcgaaatatcggtgctgttgtgtggacagtgatggacaaggatcgccaaggggcggcgcaaaaacgccaggcgactgtcaggattcacgaagctcggccgaaaaggccgcggggaactgcgaaggctgtggcctccggcggaggtaagccgccgctggcggcgaaggcgggcgcctctgcacctagcaaggcgccggaggcaacggcgggcgccggaggctccaagtcagcgaaggtggtgcccccggccagcggagtggcggaggcttcgaaggcggcccgagcgctgccgctggcgggcaaacgtgttgccgacttcggtaccgacattactgtggatgactatcttggtgggtcggacgagggccagcttgctatggttgcgtctggcgcggagatcgcgacggcggccatagtgccgaaggcgaggggcgaggcccttgacgccggaggcgaggtgtcggccctcgccgtggtcaggggcgaggcgggcgtggcgacccgccggctgaagggagtgacagaggcgctgagtcaggcgacggaggcgctgagtcaggtggctgacttcgccagccgtactgcgtcgggggccctcacggcggctgtgtctgccgaagtcgagagacttcggacacaacatgctgacgctgttcgtgagaagtcggcctccgacagcaagtgccgtaagctgacggacagggtggccgccctggagagggagaagactgacctccggcgccaactggcggcggagaggagggaagctaacgaggccgttgccaaggggcaggctgcgcaggcggaggccaagctggcgcgggcggagggcaatcttgccaaggagctcgccgaacatctgcaagagcggctcaccgccctggagggccgcggtaaggaggccgaggccgcagtgcgtgcggaggccgaacggacgcgcacgcagcttatggatacatatcgtgagctgggtgcgcggaccggtgacttcgaagtgccggaccgagagcccggccttcgctatctgcagtgggtgcaggaggagctgctggaacttccagccgtcgtgggggggttgatgtcgtacgcctccctggtcacctgcgagggggcgatgaacgcgctctctcgcgaagggtgccggcactttgaggccctcgaccaggtagatgaagattttgggcgagatatctatgaggtcgaagaccccatggtgaaggagtccgccggggccctctatgaccgaatgtggggtctgtacggtcgtgaggtggtcagggaacgggccgaggctgcgagggctcaggcggagcgtggcgagcgggtggacgacttcggggcactgaacagcgcactgcctggcccggagccgacccctgtggaggccgcgactggagtcgccctggaaacaaccccggagcctgcggaagacgcgccgagcgtgcccacctctgctgtggccggcgaagacctgcccccaaaggtggccgaaggcgcgcctgacgcccccgcagctgctgcgccgagcgctgaagattccgcggcggtggtggcggaaacagcggcggaggagacagcggaggctcccgcagcggcagggccttcgcaggttcaagattttgggcctgcgcacgcaaccgctactactgggtttttggcggcttcgaccgcggaagatggaaatgaatatggtgggtctgtatctgagttttttgattttactgattctgggagctcggttgagtggactgaggggtcgtcggaggaggacttggattatttttgcggccttggacgtggctgcggcggaggcttcgccacacaccgcggacgcgccagacgtgctgggtcctag

SEQ ID NO: 176383 - DNA, 398 bp, Zea mays
  unsure (1)..(398): unsure at all n locations
  Clone ID: MRT4577_92454C.1
ctcagttggaggcttccaagagaggttctgaagcaagtgtgggatttgtctgaccaagacaatgatggcatgctttctttgagagagttttgcatcgctctttatttaatggagaggcaccgagctggaattcctcttcccctagcccttcctgactctcttaggcatgatgagacactgttacgagctacaggcttgccttcaacagcatacaatagtccatcatggcaacacaatcaaggaggattaccacaaagaggccctggagcacctgnggtgcctgctggtggtgtgcggccacccttgccatcacatttgcattcacaaactgacggagctagcagaccagggcaaccaagatctcacatgcctgggatggataatcatgtggtaattca

SEQ ID NO: 176384 - DNA, 351 bp, Zea mays
  Clone ID: MRT4577_92455C.1
catggacgcatgccccctcattcctctgccgagtcagtgggggcgtgtctcggggcaggccagggctgtaggtgctatcattccccggcgacgcttgtgcttcgtcaagacggtcgtcttccccatgcatgatgagtgtccggcgagctggaccgcgggatcgccggggtgccgcccgcgctcatcccgccgcggcaccgtgaggctgctgccgtgatgcaagaacggtaagatgtgatcccttttcatcaactatctcgactctggtgccgcttgtgtgggcggcaccacatccgtcccccgttcgctccgctgtggcgcccgcctccctcttgagcgtcggctgttccc

SEQ ID NO: 176385 - DNA, 447 bp, Zea mays
  Clone ID: MRT4577_92456C.1
cttacctactcgccccataccttacatcaatgatagcttcattatgagaaaacccagctcttcagcgcctaggggctacaacaagcaatctcattatgcaacatacctttatcacccttgttgtttcaacaatcgccagccctatatttggtgcagccattgttacttaccatcatggcacataagttgcatcaactatagctacctgtgatcaaccaagtagctttggcaaacctttcttcctactctcagcaacaacaatctatttcattcaaccaactgtctacactgaaccctgctgattattagcagcaacaactattaccattcagacagctagctactgcctactctcagcaacaacaacttctttcatttaaccaattggcctcactgaaccccgctgcttatttgcagcagcacatactactaccatttagccagcta

SEQ ID NO: 176386 - DNA, 2979 bp, Zea mays
  Clone ID: MRT4577_92457C.1
atgccgtcctcttcttcttccgccgacaccacgccgccagccgatgcctcgtctgaggagatgttgagtagcttggtggtggaggagttgcgcgccggcgactctgttgattttggtgtgtcacggatgacgtcagcccgcgttgaagatatgcagcggttgggctactttggcggcggagttgctcgtgctccggggacagaggaagtccccgagccggagggtgagttggtcgttttcgaggcgttcttcgccgtcggtctccgcttgcctgcgcaccggtttgttggcgaagtcctgcgtagattcaacgttcaaatacatcagctgacaccgaatgccatggtggcgctggcgaagtatgtctgggcgacgacttcgtacggcggacagccgtcggttgaagtttttgcgaagaattattgtttgcattggcagaagagggtggttggggacggagttgcccagttcgggtcatgcacattcacgccgaagaccggcaagaccacaatgccagtagtggagttggttccgtgcgcccgcaacaagtggggcaattggaatgaattttggttttacgttgctgaggatactgtcgaagaccatgagggactccccgtgtctgagatgtgctctcattattactctgcgtatccgccttttgaagtggcagaaggggatgcagacgaaggggccctccggtgcgccgccggtcagagcagtgggcgtgatttagttgaagagttcgtggcgtacggggtctggcccttggcgcacggctgggcgctgggcgaagtgtgccctcgccagatgccttttcacggaggaagggtggtgcgaagtcctgccttcgcactgaatttgcgaaaccgtgacccggccgcctttgtgcgtgatgcggaggacttggcggtgcgtctcgtggggcgttacgtgccgaggacggaaggccagcgcagctttgatatccgcgggtcaaatgaccgtttgaacagggtcttcgaattaaatcaattgccgtacgacggctatcctggtcaagacgaagcggaccgccgcgggaagaaaccggcggtggagactggaggcgaccctgcgctggcggccgccccctcctcaaaaaagagaaaattaggtactgcgatgggaggaattggggtgtctgatagttttgctagagagttaatgaggacgtgtgcggccccgggggaaaggatgtcttcgctcgagctccgggagtcttcggctcggatgctgagggttaccgggggttgctggcctagaaatgttcctatcccctgcgcggctgaggaggactgttttacatctcgtatggttcatcaatggagagtttttccttacgggcgaaatatcggtgctgttgtgtgggcagtgatggacaaggatcgccaaggggcggcgcaaaaacgccaggcggctgtcaggctgcatgaagctaggccaaagcggcagcggggggcagcgaaggctgcggcccccggcggaggcaagccgccgctggcggcgaaggcgggcgcctctgcacctatcaaggcgccggaggcaacggcgggcgccggaggcactaagtcaacgaaggtggcgccgccggccagcggagtggcggaggcttcgaaggcggcccgagcgctgccgttgtcgggcaaacgtgttgccgactttggcaccgatattactgtggacgactatcttggagggtcggacgagggccagctcgctatagttgcgcctggcgcggcgatcgcgacggctgccgtagtgccgaaggcgagggccgaggctcttggcgccggaggcgaggtgtcggccctcgcggtggtcagggacgaggcgggcgtcgcgacccgccggctgaagggagtgacggaggcgctgagtcaggcgacggaggcgctgagtcaggtggctgacttcactagccgtattgcgtcgggggcccttacggcagctttgtcggtcgaagtcgagagacttcggacgcaacatgctgacgctgtccgtgagaaatcggcctctgacagcaagtgccgtaaactggcggacaaggtggccgccctggagaaggagaaggctgacctccggcgccagctggcgggggagaggagggaggccaacgaagccatcgccaaagagcaggctgcgcaggcggaggccaagttggcgcgggcggaaggcaacattgccaaggagctcgccggacatctgcaggagcggctcaccgccctggagagccgcgcaaagggggccgaggccgcgatgcatgaagattttgaacgagatgtctataaggtcgaagaccccgtcgtgaaggaatccgccggggccctctatgaccggatgtggggtccgcacggtcgtgaggtggccagggagcgggccgagcttgcgagggctcaggcggcgcgtggcaagcgggtggacgacttcggggcgttgaacagcgcgctgccagacccggagccgacccctgcggaggctgtgaccggggccgccctggagccaaccccggagaccgcagcgattgcgacggctgcccccgcatctgctgcggccggcgaagacctgcccccaaaggtggccgaaggcgcccctgatgcccccgtagcagctgcgccgagtgttgaagatctcatggcggaggcggtggaaacaacggcggaagtggcggcggagccaatggcggaggctcccgcagcgttagggccttcgcaggttcaagattttgggcctgcgcacgcaactgctactactgagtttttggcggcttcgaccgcggaaggtggtaatgaatatggtgggtctatatctgagttttttgattttaccgactccgggagttcggttgagtggactgaggagtcgtcggaggaggacttggattattttgcggccttggacgtggctgcggcagaggcttcgtcacacgcccgcggatgcgccagacgtgccaggccctag

SEQ ID NO: 176387 - DNA, 2478 bp, Zea mays
  Clone ID: MRT4577_92458C.1
atgccgtcctcttcttcttccgctgccgctacgccgccggccgattcctcgccgccggccgccgcctcgtctgaggagacgttgagtagtttgatggcggaggagttgcgcgccagtgattctgttgattttggcgtgtcgcggatgacgtcagcccgcgttcaagatatgcagcggttgggctactttggcggcggaattgctcgtgctccggggacggaggaagtccccgagccggaggtggcagaggaggatgtggacgaaggggcccttcggtgcgccgccggtcagagcagtgggcgcgatttagttgaagagttcgtggcgtacggggtgtggcccttggcgcatggctgggcgttgggcgaagtgtgccctcgccagatgccttttcacggtggaagggtggtgcggagtcctgccttcgcactgaatctgcgaaaccgcgacccggccgcctttgtgcgtgatgcggaggatggggcggtgcggctcgtggggcgttacgtgccgaggacggaagcccagcgcagctttgatatccgcgggtcaaatgaccgtttgaacagggttttcgaattaaatcaattgtcgtacgatggctatcctggtcaagacgacgcggaccgccgtggaaagaagccggtggtggagactggaaacgaccctacgccggcggccgccccctcctccaaaaagagaaaattaggtactgctatgggaggacttggggtgtctgatagttttgctagagagttgatgaggacgtgcgcggccccggggggaaggatgttttcgcccgagctccgggagtcttcggctcggatgctgagggttaccaggggttgctggcctaggaatgttcctatcccccgcgcggctggcgaggactgttttacatctcgcatggctcgtgaatggagagtttttccttacgggcggaatattgctgctgttgtgtcggcagtgatggacaaggatcgccaaggggcagcgcaaaaacgccaggcggctgtcaggctgcatgaagctaggccgaagaggcagcggggggctgcgaaggctgtggcctccggcggaggcaagccgccgctggcggcgaagtcgggcgcctctgcatctagcaaggcgccggaggcaacggcaggcgccggaggctccaaatcgacgaaggtggtgccgccggtcggcggagtggcggaggtcgtgaaggcggcccgagcgttgccgttgtcgggcagacgtgttgctgacttcggcaccgatattaatgtggacgactatcttggtgggtcggacgaaggccaacttgctatagttgcgcctgccgcggcgatcgcgacggctgccatagtgccgaaggcgaggggcgaggctcttggcgccggaggcgaggtgtcggcccccgcggttgtcagggacgaggcgggcgcagtgacccgccggctgaaggaggtgacggaggcgctgagtcaggtggctgacttcgccagccgtactgcgtcgggggccctcacggcagctgtgtctgccgaagtcgagagacttcggacgcaacatgctgacgctgtccgtgaaaaatcggcctccgacagcaagtgccgtaaactaacggacaaggtggccgcactggagagggagaaggctgacctccggcgccaactggcgggggagaaaagggaggccaacgaggccatcgccaaggagcaggctgcgcaggcggaggccaaactagcgcgggcggaagacaatcttgccaaggagctcgccgaacatctgcaggagcggctcaccgccctggagagccgcgtgaagggggcggaggccgcgatgcgtgcggaggccgaacggacgcgcacacagcttatggatacatatcgtgagctgggagaagctgcaggaactccccactgtcgtggggggtttatgtcgtacgcctccctggtcacctgcgagggggcgatgaacgcactctcccgcgaagggtgccggcacttcgaggtcttcgaccaggcagatgaagattttgagcgagatgtctataaggtcgaagaccccgtagtgaaggaatccgccggggccctctatgaccggatgtggggtccgcatggtcgtgaggtggtcagggagcgggccgaggctgcgagggctcaggcggcacgtggcgagcgggtggacgactttggggcgttgaacagcgtgctgcctgacccggagccgacccctgcggaggccgtgtccggggtcgccctggagccaaccccggagaccgcggaggacgcaccggatgcccccacatctgctgcggccggcgaagacctgcccccaaaggtggccgaaggcgcacctgatgcccccgcagctgctgtgtcgagtgctgaagatcccgcggcggtggcggcggaaacaacggcggaagcagcggcggagccaacggcggaggctcccgcggcgttagggccttcgcaggtggcgtag

SEQ ID NO: 176388 - DNA, 363 bp, Zea mays
  unsure (1)..(363): unsure at all n locations
  Clone ID: MRT4577_92459C.1
ctcgagatacaggcgaagctaccggcaaaagcgcaggaggctagctatatagttctagtagttcccagaagcgctgatgcttataagctgccatggcgacgcatccaagctggctgtcggacgaagcgccacaatcacaggactctcatgacctcattccccaatccgtgtcattcccacaattgtcgtcaatatccacgcattgctgacgcaagaaaccaaccatattcactcacgaccgagaaattccacctagctactatccaacccatncccgatacccggtcaatcttccgcctacgccagcgccttggtccgcaagattccagataccttcatgctgctgaatgcctacttggactc

SEQ ID NO: 176389 - DNA, 288 bp, Zea mays
  Clone ID: MRT4577_9245C.1
ccggccatcacgtgcgtggacgtcgtggaggtggagccgaggaggcagatccgcagatgaggtcgaccgtcgacgccgaggacgatgccggggttttggctccgcgacaaaattagcaactagcgctgggacctgggagacgtggagttgtggcacacggatcgatcgaacaatgtagttgtggtggcagaacagggaatcgaaaattcgccggaatggtggaataaacttatcccttggaatacaatgtgtatatgaaacaaaaaaaaaaaaaaaaaaggggcggcc

SEQ ID NO: 176390 - DNA, 2538 bp, Zea mays
  Clone ID: MRT4577_92460C.1
atgtcgtcctcttcttcttccgccgacaccatgccgccggccgccgcctcgtctgaggagacgttgagtagcgtgatggtggaggagttgcgcgccggcgactccgttgattttggtgtgtcacggatgacgtcagcccgcgttgaagatatgcagcggttgggctactttggcggcggagttgctcgtgctccggggacggaggaagtccccgagccggaggtggcagaagaggatgcagacgaaggggcccttcggtgcgccgccggtcagagcagtgggcgtgatttagttgaagagttcgtggcgtacggggtctggcccttggcgcacggctgggcgctgggcgaagtgtgccctcgccagatgccttttcacggaggaagggtggtgcgaagtcctgccttcgcactgaatttgcgaaaccgtgacccggccgcctttgtgcgtgatgcggaggacttggcggtgcggctcgtgggacgttatgtgccgaggacggaaggccagcgcagctttgatatccgcgggtcaaatgaccgtttgaacagggtcttcgaattaaatcaattgccgtacgacggctaccctggtcaagacgaagcggaccgccgtgggaagaaaccggcggtggagactggaggcgaccctgcgctggcggccgccccctcctcaaaaaagagaaaattaggtactgcgatgggaggacttggggtgtctgatagttttgctagagagttaatgaggacgtgtgcggccccgggggaaaggatgtctccgcccgagctccgggagtcttcggcacggatgctgagggttaccgggggttgttggcctagaaatgttcctatcccctgcgcggctgaggaggactgttttacatctcgtatggttcatcagtggagagtttttccttacgggcgaaatatcggtgctgttgtgtgggcagtgatggacaaggatcgccaaggggcggcgcaaaaacgccaggcgactgtcaggattcacgaagctcggccgaaaaggcagcggggaactgcgaaggctgcggcctccggcggaggcaagccgccgctagcggcgaaggcgggcgcctctgcacctagcaaggcgtcggaggcaacggcgggcgccgggggctccaaactgatgaaggtggtgccgccggccagcggagtggcggaggcttcgaaggcggcccgaacgttgtcgccgccgggcaaacgcgttgccgacttcggcaccgagattaatgtggacgattatcttgggcggtcggacgagggccagcttgctataattgcgcctgccgcggcgatcgcaacggctgcgctagcgccgaaggcaaggggcgagacccttggcgccggaggcgaggtgtcggccctctcgttggccagggacgaggcgggcgtggcgacccgccggctgaagggagtgacggaggcgctgagtcaggcgacggaggcgctgagtcaggtggctgacttcaccagccgtactgcgtcgggggcccttacggcagccttgtctgccgaagtcgagagacttcggacgcaacatgctgatgctgtccgtgacaaatcggcctccgacagcaagtgccgtaaattggcggacagggtggccgccctggagaaggagaaggctgacctccggcgccagctggcgggggagaggagggaggccaacgaagccatcgccaaagagcaggctgcgcaggcggaggccaggctggcgcgggcggaaggcaatattgccaaggagctcgccggacagctgcaggagcggcttactgccctggagagccgcgcgaagggggccgaggccgcgatgcgagcggaggccgaacggacgcgcacgcagcttatggctgcatatcgcgagctgggtgcgcggaccggtgacttcgaggtgtcgaagcgagaggccgggcttcgctgtctggaatgggtgcaggaggagctgcaggagctccccactgtcttggaggggttaatgtcgttcacctccctggtcacctgcgagggggcgatgaacgcactctctcgcgaagggtgccggcactttgaggccctcgaccaggcagatgaagattttgggcgagatatctataacgtcgaagaccccgtggtgaaggaatccgccggggccctctatgaccggatgtggggtctgtacggtcgtgaggtggtcagggagcgggccgaggctgcgagggctcaggcggagcgtggcgagcgggtggatgacttcggggcactgaacagcgcgctgcctgacccggagccgacccctgcggaggccgcgactggagtcgccctggaaccaaccccggagactgcggaagacgcgccaggcgcccccacatctgctgcggccggcgaagacctgcccccaaaggtggccgaaggcgcgcctgatgcccccgcagctgctgtgccgagcgctgaaggtcccgcggcggtggtggcggaagcagcggcggagccaacggcggaggctcccgcagcggcagggccttcgcaggtggcgtag

SEQ ID NO: 176391 - DNA, 681 bp, Zea mays
  Clone ID: MRT4577_92461C.1
ggcccgctcgaggggccggccgggcccggggaaaatacaaaaaaactcacactggctgctgacacttcactgtactaccggttcatttccttgcgatctcgcgccaccaagctctgctcctgcgaagatgtgtaccgtaacccgagcccacctcgaccaaaggctcgccgccgccaagcgctgctccagagaggcagccattgcgggagccaaggcggccgccgtcgccaccgttgcaaccgcagtccccaccctggcgagcgtgaggatgctgccgtgggcgagggcgcacctcaacccgaccgggcaggcgctcatcatctccaccgtcgccgggatggcctacttcatcgtcgccgacaagaccatcgtatcaatggccaggaagcactcctacgaggacgcgccggagcacctcaagaacacctccttccactaattagactgtaatagacccattagtagcagtgtgcaataaactgcatgccggcctgcacgtgtctgctgaaggatactagcactagtataatgttcagcaattatctgagatcaggctaggcttgcagacagtgagtggtgtagtgtactggtcttctctgcgtgcaattagcacttatctgatcaagtaatcatcatgtatccagccagtgatcttgaattaataataacttgcatttgtat

SEQ ID NO: 176392 - DNA, 491 bp, Zea mays
  Clone ID: MRT4577_92462C.1
ggaaaatttgctatgctagatttgtcaaatgcacgcgctaatctcctatagtcgtttttgcatatcccctatgatattttgcatttgttcacgctgttcatctacataattcttaagagattgcagctcgtttgtattacttacattggggatgtctggcgtgggtcgcagtgaagccggatctgtcgcccgatgtcggacgactttgttgttcctgtccactttgaagttggccaagaacctcgctttcgcctcctggatcatctgctccttgtgctcctcaaactggagctgttcgtcagccggcaatgtatcccacgtcggctctatgatgttgcttggggaaatatcagagctatcccttgaaccggccattgagggccgatttgataggtctaaatatgttggccccagcggagtcgccaaaaagtatgttgacgctttttttggagccgccaaatactcaagaagaaccggcggcggtgctctct

SEQ ID NO: 176393 - DNA, 505 bp, Zea mays
  Clone ID: MRT4577_92463C.1
tgcagcaggagaacagctagcgacgacgaccatatggtgcgaaagcagccagccgtcggtgatgctgactccggccaccccaagatgggggaggagaagctgtcatccggacggagaaggtgcggctcatagacgtgctgtcgatgctgctcctgaggcgccccatcaccaggtacgcattcgtggaggccggcgaccggaccgacgtcgacctgggcagcacgcccgacgactggctcggcgcgctcacgcaactcatccagaaggcgctcgccggcacctactacccggctctagtggtcggagccgttgtggagatcatcctcaacttggtggtgctcaacagtggcatactacggatctttctcaacctattgagaggtaagctgctgatgccactgaagcgtgaggcgcccaagttccggttcatgatccgtatgatcgcaggtgaggacggagctgaagccgatgccagccaacggaggaccagaggaccggcggctgc

SEQ ID NO: 176394 - DNA, 2377 bp, Zea mays
  Clone ID: MRT4577_92464C.1
atgccatcctcttcttcttccgccaacgccacgccgccggccgccgcctcgtctgaggagacgttgagtaacgtgatggtggaggagttgcgcgccggcgactctgttgaatttggtgtgtcacggatgacgtcagcccgtattgaagatatgcagcggttgggctactttggcggcggagtcgctcgtgctccggggatggaggaagtccccgagccggagggcgagttggttgttttcgaggcgttcttcgtcgccggactccgcttgcctgcgcaccagtttgtcggcgaagtcctgcgcagattcagcgttcaaatacatcagctgacaccgaacgccatagtggcgctggcgaaggtcttcgaattaaatcaactgccgtacgatggctaccctggtcaagacgaagcagaccgccgtgggaagaaactggcggtggagactggaggcgaccctgcgctggtggccgccgcctcctcgaaaaagagaaaattagtgatggacaaggatcgccaaggggcggcgcgaaaaccccaggcgaccgtgagggttcacgaagctcggccgaaaaggcagcggggaacggcgaaggctgaggcctccggcggaggcaagccgccgctgccggcgaaggtgggcgcctccgcgcctggcaaggcgccggaggcgacggtgggcaccggaggccccaagctgtcgaaggtggtgccgtccgtcagcggagtggcggaggctgcgaaggcggcccgatcgttaccgccgtctggcaaacgcgttgccgacttcggcaccgagattaatgtggaggattatcttggggggtcggacgagggcccgcttgctctagttgtgcctggcgcggcgatcgcggcggctgcgccagcgccgaaggcgggggtagagacccttggcgctggaggcgaggtgtctgccctcgcgctggtcagagacgaggcgggcgtggcgacccgccggctgaagggagcgacggaggcgctgagtcgcgcgacggaggcgctgagtcaggtggctgacttcaccagccgcactgcgtcgggggcccttacggcagcgttgtctgccgaggtcgagagacttcggacgcaacatgcggacgctgtccgtgagaagtcggcctccgacagcaagtgccgcaaactggcggagaaggtggccgcccttgagaaggagaaggctgacctccggcgccagctggcgggggagaggagggaggccaacgaagccatcgccaaagagcaggctgcgcaggcggaggccaggctggcgcgggcggaaggcaatatcgccaaggagctcgccggagagctgcagcggcggcttactgccctggagagccgcgcggagggggccgaggccgcgatgcgagcggaggccgagcggacgcgcacgcagctcatgacttcatatcgcgagctgggtgtgcggacgggtgacttcgaggtgccggagcgagaggccggacttcgctgtctggaatgggtgcaggaggaactgcaggagctccccactgtcttggcggggttgatgtcgttcacctccctggtcacctgcgaggcagcgatgaacgcgctctctcgcgaaggctgccggcactttgaggccctcgaccaggtggatgaggattttgggcgagatatctttgaggtcgaagaccccgtggtgaaggagtccgccggggccctctatgaccggatgtggggttcatacggtcgtgaggtggtccgggcgcgggccgaggctgcgagggctcaggcggagcgcggcgagcgggtggacgacttcggggcgctgaacagtgcgctgcctgagccggagacgacccctgcggaggccgcgactggagtcgccccgggaccgaccccggagactgcggaagatgcgccaggcgcccctgcacctgctgcggccggcgaagaccttcccccaaaggtggccgaaggcgcgcccgatgcccccgcagctgccgtgccgagcgctgaagatccagcggaggtgggggcggaggcagcggcggaggcctcggtggaggctcccgcagcggcagggccttcgcaggtggcatagcgttgaagaggaaaaaggctgacctccggcgccaactggcggcggagaggagggaagccaacgaggccgtcgccaaggagcaggctgcgcaggcggaggccaagctggcgcgggcggagggcaatcttgccaaggagctcgccgaacatctgcaagagcggctcaccgccctggagagccgcgcgaagggggccgaggccgcgatgcatgcggaggccgaacggacgcgcacccagcttatggatacccctcctcagctgggtgcgcggaccggtgacttcgaggtgcc

SEQ ID NO: 176395 - DNA, 376 bp, Zea mays
  Clone ID: MRT4577_92465C.1
attcggcatgcccgcgttatttcatcggatatatatttatttcaaggtctggggcaaggaaaggaaatagcggctagcttatttattatgaggcggtggggggcgtttgggccaccatttccaccaaaatgcggacaccggtagggcgataatccgcgggcaccacggagcccacgggcagcaccaccatgtcggcgtccggcttgtccttgaggatcacctttttggggtccttcacgcttaacccgaccaccttaagccacaacgttttggggccgccgccgccggcggcgaaattcgtggagctcatggggtcgcaaactgccggaccaattgaccatatgatcgatgggcaggtaaatttttcttgttgccc

SEQ ID NO: 176396 - DNA, 3171 bp, Zea mays
  Clone ID: MRT4577_92466C.1
atgccgtcttcctcttcttccgctgctactacgccgccggccgccgcctcgtctgaggagacgttgagtagcttgatggtggaggagttgcgcgccggcgactctgttgattttggtgtgtcacggatgacgtcagcccgcgttgaagatatgcagcgattgggctactttggcggcggagttgctcgtgctccggggacggaggaagtccccgagccggagggtgaattggtcgttttcgaggcgttcttcgccgccggtctccgcttgcctgcgcaccggtttgttggcgaagtcctgcgtagattcaacgttcaaatacatcagttgacaccgaatgccgtggtggcactggcgaagtatgtctgggcgacgacttcgtacggcggacagccgtcggttgaagtttttgcgaagtattattgtttgcattggcagaagaggatgattggggacgaagtcgcccagttcgggtcatgcacattcacgccgaagaccggcaagaccacaatgcaagtagtggagttggttccgtgcgcccgcaacaagtggggcaattggaatgaattttggttttacgttgctgaggctactgtcgaaggccatgaaggactccctgtgtctgagatgtgctctcattattactctgcgtatccgccctttgaagtggcagaggaagatgcagacgaaggggcccttcggtgcgccgccggtcagagcagtgggcgtgatttagttgaagagtacggggtgtggcccttggcgcacggctgggcgaagtgtgccctcgccagatgccttttcacggaggaagggtgggtcttcgaattaaatcaattgccgtacgacgactatcctggtcaagacgaagcggaccgccgtggaaagaaaccggcggtggagactggaggcgaccctgcgctggcggcggccccttcctcaaaaaagagaaaattaggtactgcgatgggaggacttggggtgtctgatagttttgctagagagttaatgaggacgtgtgcggccccgggggaaaggatgtcttcgcccgagctccgggagtcttcggctcggatgctgagggttaccgggggttgctggcctaggaatgttcctatcccctgcgcggctggcgaggactgttttacatctcgtatggttcgtcggtggagagtttttccttacgggcggaatatcggtgctgttgtgtgggcagtgatggacaaggatcgccaaggtgcggcgcaaaaacgccaggcggctgtcaggctgcatgaagctaggccgaagaggcagcggggggctgcgaaggctgcggcctccggcggaggcaagccgccgaaggcgggcgcctctgcacctagcaaggcgccggaggcaacggcgggcgccggaggctccaagacaacgaaggtggtgccgccggccagcggagtggcggaggcttcgaaggcggcccgagcgttgccgttgtcgggcaagcgcgttgccgacttcggcaccgatattactgtagacgactatcttggtgggtcggacgagggccagcttgctatggttgcgcctggcgcggagatcgcgacggcggccatagtgccgaaggcgaggggcgaggcccttgacgccggaggcgaggtgtcggccctcgcggtggtcagggacgaggcgggcgcagcgacccgtcggctgaagggagtgacggaggcgctgagtcaggcgacggaggcgctgagtcaggtggctgacttcgccagccgtactgcgtcgggggccctcacggcagctgtgtctgccgaagtcgagagacttcggacacaacatgctgacgctgtcgtgagaagtcggcctccgacagcaagtgccagggagaaggctgacctccggcgccaactggcggcggagaggagggaagccaacgaggccgtcgccaaggggcaggctgcgcaggcggaggccaagctggcgcgggcggagggcaatcttgccaaggagctcgccgaacatctgcaagagcggctcaccgccctggagagccgcgcgaaggaggccgaggccgcgatgcatgcggaggccgaacggacgcgcacgcagcttatggatacatatctgggtgcaggaggagctgctggaacttccagccgtcgcgggggggggttgatgtcgtacgcctccctggtcacctgcgagggggcgatgaacgcgctctcccgcgaagggtgccgacacttcgaggccttcgaccaggcggatgaagattttgagcgagatatctataaggtcgaagaccccgtagtgaaggaatccgccggggccctttatgaccggatgtggggtctgtacggtcgtgaggtggtcagggagcgggccgagactgcgagggctcaggcggagcgcggcgagcgggtggacgacttcggggctctgaacagcgcgctgccggacccggagccgaccctcgcggaggctgtgactggggtcgccctggagccaaccccggagaccgcagcgaccgcgacggctgcccccacatccgctgtggccggcgaagacctgcccccgaaggtggccgaaggcgcccctgatgcccccgcagctgctgtgccgagtgctgaagatcccgcggcggtggcggcggaaacaacggcggaggcagcggcggagccaacggcggaggcacccgcagcgtcagggccttcgcaggttcaagattttgggcctgcgcacgcaaccgctactactgagtttttggcggcttcgaccgcggaaggtgggaatgaatatggtgggtctgtatctgagttttttgattttactgactctgggagctcggttgagtggactgaggagtcgtcggaggaggacttggattattttgcggccttggacgtagctgcggcggcggcttcgccacacgccgcgggcgcgccagacgtgccaggtccttgcaccgggcgccgacgacgaagggcggttgcaaagcgtagggttagtgcggaggaaagggcccggcttcgcgtgagtggggctggtcggcaggagctgttgtctttgccgtctgccgcgggtacaggggaaggggaactgcaaagtctttttgcgggtgaggagcttaggataatgttatttaattatagggagatgggaattattcctaaggttgagccgatgtag

SEQ ID NO: 176397 - DNA, 658 bp, Zea mays
  unsure (1)..(658): unsure at all n locations
  Clone ID: MRT4577_92467C.1
cttgtttcctattctttggtcgtgataacgtttgcaaccatgaatagtacatattgcttttccaggtgtgtggagagacatgtgtattcctcctatgacgaattcctcaggctccatgaaggtaagcctgtcttaatgggcttgattgttgaacctgacttagtacttttatccatgtcacgacattgaaccagacagtcactcatgtccttaggatattaacggtatacatcaacaattcattctattttaattgcttgcaaaacttttttggcccttcaaatgagttccacgcatcaagaagtcaagattccaggaggcctaaaataggtaaacttgctgttatatcttttgtgctctcagtagtcgcctattacttgttttaattcgctgatccatgtgcagtgtatcaatttgtcttagtatttttattcgtggggatgcctgactcaaatgaactcatgttcaacactgagcaacctacttataattntggagcctataaaatttctaagctaaaaaaggtaataaaaaggaatgatattatagtcacatcatctgaacaacagtgaagggaagggagggatagatggtctgaatgcctataaatgtcgttcccttggtctgcttcttaaatttgaaaccaagatactatagt

SEQ ID NO: 176398 - DNA, 1667 bp, Zea mays
  Clone ID: MRT4577_92468C.1
atgaaccatgaagttgacaccttaaccagatctaataatggagaggggagggagaactctgaaggtgcttttgaagaagaaaacacaagagaaaatatggtattcaagaaaaagcatgcatcgtttaaaggagatagacagtcgcatcgagtcaggccacgaaagaagctgaaatccatgaaccatgaaccagcaaatggagctgataatgaagaggggagggacacttgcagggcacatattcagaacaataatatggacaccttaaccagagctgataatgaagaggagagggacacttgcagggcacatattcagaataattatatggatacctacacaagtgctgataatgaagagcggagggactcttgcagggcacatattcagaacaataatatggatgctgcaaaaactgctgatataactgaagagaaaaggggtcgtggtaaaaacaaatgtaagaatcttgctaaacttaaaccaggacaaaagattaaagtgatgttctacaacaaccgtgctcttggcacatcatttgcacgacacattggtagaatcgtccgtgatcctactattaccccagtgagagtgaagaaatggacagacattagtgagacatctatgaagcatatttttgctgcagtaaaggacaagtttgaaaacaaagacgaaaacattaaaattgatgtctatgaaaatgatatcatggagcatgctagggatctatggaacaattggcgtggtgacttgtgtcggcattatgttaagccagcaaagaatatgcaacaagctattaagaactgccctgaagattttccacaagctgactgggagtggttggttaaagaacatttctatagtaaggatttcattgcaaggagcaagagaaattcaaaaaatagatctaacttgacaatcctccatcacagtggcagcaaaccatttagaaaagtaatttatgacaatggcggaaaggataacaaccctccaagtttggatgccttatttttcatgactcacacaaagggtggtagttttctagattctgaatcctccagcaagcatgcacaacttgaggaacaaatatcattagatccttctctttctaatgctgaacttatggataagtgcttcccttcaaagagacaggatcacattgttggatatggtggtggcgtgaaagcaagacatcttagaagtccatgcattagtaaggctgaattgatagaaaagttgaaacagtccgaggatgagaaaagagcaatgcaagaagaaaatagagagctacgagaagaaaataaagctacaaacagtcgtatgagccgtatggaacaggagtgggaagaactaaagaacagattaagtagtagttagacacacagttctagtataccatcatcgacttcagggcagcattcttgaaggccaccacggtgcatgccagaggcacgctggagtcctatgtgcatggcagggagaagaaattaaagtcctagctagtgtgacgcgatcattgttgcaaagatctttcagattctatactatatggaaatacatctcatatgcaataatcgccatttgtcttggttaaaaaacaaaaacaattctcccaagcccccaccaattagctaccgtcttccagctccaccctagctcccctgcct

SEQ ID NO: 176399 - DNA, 459 bp, Zea mays
  Clone ID: MRT4577_92469C.1
aacggccgccagtgagctggcaacacgccctatgccgcccgggcaggaacaagcttttttttttttttttttttttttttttgaactattttcttttattttactttttaatagctatatgcatgttgggatgagcttggaactagcccatggctgaataataagcacagcagaagagaatgcatgtctcgggacggggaggcgggacaataaataaataaataaaggggatccggctttgctcttgggatatcaaaaaaaaaaaaaaaaaaaaaagagcacgaaaaaaggccaaaaaaaacaaaaaaacacaaaacggcaggcccgcggacaatggggttacaggggcccgggggggggggaaggccggggcccccaacgccccggcggggagggggaaaaaaattaaaaaacacaacaccggggggggcggaaaaagaggaaacacaaccccccccc

SEQ ID NO: 176400 - DNA, 414 bp, Zea mays
  Clone ID: MRT4577_9246C.1
atctattaccgcacccaagccacgggggggggtcctgccaccgaggccagggcgaccgagccattcacggaccacggccacctcaaccatctgttgcacctgtccctgttcatcgcatcaggggggctatctgtccacttctcctcgccggagccgtaccttcaggaggcccgcacgcgcctgcacggatggggacccaacccacaaaactgagactacgcgcgctggacagacctgtgcaacactgctagtccagagaacaatactgaatgttgacggcgcacatgctgaccttgatcaagggcttatgcaccagctcgcggtcattgctagacgtgctactggcagatctggatgtgtaggaccgtcaaatcatcatgctgtactaccgcatggcaaccttcgaggtagtcg

SEQ ID NO: 176401 - DNA, 488 bp, Zea mays
  Clone ID: MRT4577_92470C.1
gtgaaaaaaaaagacttagggccatttattcctttgccgggccaaaaagggaaacccgagggatgggggccgcttttacccgggggcctgaacaaaaaaggaccccgggggactgtttatgggcaccggacacggccggaggggaaagacaaccctgcccctttttaaagggcccagccccgccccgggcggtaatggactaaagcccccttcaatctttaacccggtgggcccctcccccttggggcaagaagggatacccaattttaaagaggggcaccccccccttcttggacgagccgttacacccgaagatgtttgttggcccccggaccttcggggaccaagcatggtcccaacaaaaggcttttttggcgcaagaccgttggtgaaaacgaggggccccaaaacctcccatgggggggggcacacctgctcctgacctgggctgggagaccccccccgggtatgggggcccaccagccccc

SEQ ID NO: 176402 - DNA, 346 bp, Zea mays
  Clone ID: MRT4577_92471C.1
ctctcgctttcacactactctgcgttcatttaccctcttatctaccataatgctgaggcggctttcttagaaacctcaccttactcttacctactttcttttataacacttctaactgattcaaacattcttttactatgcaacacatcactatgaacttattaatactactctcctcttcatacggaacttgactgcttcacttatttctcctttctaatctgtacatctacgtcgtacataatacctcatattttttttccacgatgactatatactaaattaactatctcttagatatccttcaatcattacatcacctgacactaacaatctacctatctac

SEQ ID NO: 176403 - DNA, 412 bp, Zea mays
  Clone ID: MRT4577_92472C.1
tttttctgtttttttttttttttttttttttttttttttttgtttttttggaatagtaaatgttacttccaaagaaaaggacaatgcccgagggcctgctcggtgaccaagggcgaacagcaagccactggctcttgggacaaaccataacccttatgtccaccaaatccagaaatcctgcttttgacccagatctggataacagctcgttgaaggtcaaggaccatgacacaacaatggtccctttggaaacaacatcacttggttcaaaaaggattgttggaccggttttgactgcagctgctgaaagtctgagaccaccaccgctagagggaggactccacggcaggccacctttgatgagtaacacaaaccctgggttagggacgccaccgtgcttgtccttggcaac

SEQ ID NO: 176404 - DNA, 251 bp, Zea mays
  Clone ID: MRT4577_92473C.1
cggacgcgtgggtcctctcttgatcggccatctctggcgcatgatctaaccgcgcgaccgaggcagtaagtgagtcgcacacaccaccatgcaggcgatgcgtccggccgtggatggtgaggcacaggagcatgcgcttgagggcggaggcggacgaggtgaagaggtaggtaggctaaggctcacgaggaggtggaggctgtgcctgaggagaaagacgtgtcggttgtagggtaggaggcggtggcggt

SEQ ID NO: 176405 - DNA, 1579 bp, Zea mays
  Clone ID: MRT4577_92474C.1
cctatagggcgattgggttcatcgaggccggccgggtcctagaaacagagcagcattacgaggccaaaagtaagctgctgctgttcttcgacccgtcccgttcgttcgattcgttctttccgccatggaggctcggaggaagcccgcggtgtgctgtgcccttcttgtgctgctcatcgtcgcctccagcgcaacggtgtcgactgctcatgacgagagctgctggaaggacgacgaccaccaccctatctgctttcccgaagactgcgtggcgacctgccaggatcacggccacgcggacggccgctgcaactgggcatggtcgtggaggccgtattgccagtgcctgttggcggactgccaataggcgcgaacagctgcgtcgcatggcgtcctggctgcctcgccggccgatgaaggatgaacggttgcggccgatgatcgatgtgtccgtcggcatgtcgatcactcattgaaaccccctctaatcctgtgcggtattattttcatggcacctgtggccattaaagatccatggacacgtacagtaccaatacatgattcttcacagttcaactaaaaaaaaaaaaaaaaaaaatttttttttttttttttttttttttagatgcaaactttcctgtgtttgacttcataggaacccgagccaacttaacattctcaatgaaaaacccacgctatccagatttggaagctccaggcaccacaggtaagtaccggtattacagacgccttgctcgttcgaagtgtctaggtaaatttgatactaccggtattacagacaattctggttgcagttcctagtgctaacagagaatcatgccttactgttgcaaccagagcccttttgacatcacagcaattacatccggtgcgggcaccgtctacatgattgcaacgctcaagtaatcaccgatctggaatccgagctctgcaagagttttggcatcgtcgcctcttccatgaccgtaagcgaaggtcgaacccaccttttgacggcccaccaagacatgctgtctgacaacaaaacgaccattcttgtctgggtatacaaatgcaaaagaaagccttgcattcctttttcttgctggaagagcaacctctttcacaagatcagtgagctcgcggagggtcgcatccttccatgtgtaaatctgaacttcatcctttggttccttccctctcactgcaaactcttcattttggtggtgaccagcaacccttgtgaaaaccctgagcagcagaggacaggtcttctcgcggtcgattggttcggggcggaggcgcgccatcgggggcggaccacggtgctgcatcggcgggcccggccgcgccggcctcatcggcatatcgcccatacccgccatctcccctcctcagcaacgaggctctagcctgccgcgctcgccgccgccgatacttcgcgaggaggagaggtgaggtgggacttgggaggggaggagccgacgggagagatgcaaagaaaccctaaattttgcagtttcctcccttaagataatgttaattacgctttgccgggtgcctgcagcactccggccgg

SEQ ID NO: 176406 - DNA, 325 bp, Zea mays
  Clone ID: MRT4577_92475C.1
tttcttttttttttggttatgggttcttgggtttttgcgtagaacggaaatttcttcttgtttgatgccaatttttttgaatgtacacgccactggggaaacttggcacaaaacatcttccggtatttaacacaaaaattttacaatcttgctggccagggggtcataggatgccaatttcaacgatgtgtggatctaacgttcaattaacagtggtgtgcgcaccaccaaatgcgtgcatctcaagccttttgaagccctaacgggttatagtattacggtatgctgtttaagggaacagcttacttgagcttcttatgcatat

SEQ ID NO: 176407 - DNA, 488 bp, Zea mays
  Clone ID: MRT4577_92476C.1
agcttttgagcttcccgtgtcctgtgtgatccatacagttgggcccatatatgatatggacaggaagcctgaggtgtcactaaagaatgcatacgaaaatagcttaaaggttgctaaagagaatggcattcagtacgttgcattccctgctatatcttgtggtattttccgttaccctccaaaggaagcatcaaacatagctatttcagctgctcaacaattttcaggggatattaaagaggtgcattttgttctgttctcggatgagctctacaacgtttggcgtgggactgcccaggagatgctgacgcaatttgagaaatgaataactatgatatcagtgtagtatgcgcatgttagccagcgtctaatatgaccactagagtctgttgaccatgatcgtatgtatggcgcagtttgaatgtgtttatctgaaagatagttggatggatatgccggatgagtgccctaatattttaccgttcttc

SEQ ID NO: 176408 - DNA, 442 bp, Zea mays
  Clone ID: MRT4577_92477C.1
ggggcccaatcccaaagggggggggcaaaaattttttttccaaaatataaggcaaatggtttggggaaggggccattcccccacccctcccccttaaaaaaacagaggggccccattttaaccaacatatttgggtgaaaacaaggggaggcaaacaaaaccttgttttccgttcaccccatgcttttttaaaaaaaaaactttaattttttttacaaaacattagcccccataaaaaccaaaacctagctaactccttaaatttaaacaaaaaataccggttttaagttaaagctttcccctaaaaatggcctggacaaagggggtaaacaaaaggggggggataaacccccacagtttggcaaaaagccaatatcaggggcgaggaaaagtattttccatgctctcccacaaatcaaggaccaccccatattttttttta

SEQ ID NO: 176409 - DNA, 403 bp, Zea mays
  Clone ID: MRT4577_92478C.1
gcgaattgtctcaggaggcgcgcagtgggtcgcaaaacgataaccatagccgttgctatagcgtagcgccgtgcgaggctgcagcttctaccgacctcagcacgcctgcactctgtatctctctccgggggtttctttggatgggccgcacacgactgtcatttgtatccatgaactgtgctcggccgccaccggattagtggagtcagggctgtatctgtgcctgctgcggggcgagaggaatgtctctttgagaccgctgactcgcggaccgagcgaggagaagccaaagagagagtttcggctgtagccgacgccttcatttctttctgtgaaagctgcagtattctgagggaagctagagggtattactctacccaagcaagctctagcttgtttggac

SEQ ID NO: 176410 - DNA, 2670 bp, Zea mays
  Clone ID: MRT4577_92479C.1
atgccatcctcttcttcttccgccaccgccacgccgccggccgccgcctcgtctgaggagacgttgagtaacgcgatggtggaagagttgcgcgccggcgactctgttgaattcggtgtgtcacggatgacgtcaggccgtattgaagatatgcagcggttgggctactttggcggcggagtcgctcgtgctccggggacggaggaagtccccgagccggagggcgagttggttgttttcgaggcgttcttcgccgccggactccgcctgcctgcgcaccggtttgtcagcgaagtcctgcgcagattcagtgttcaaatacatcagcttacgccgaacgccatagtggcgctggcgaagtatgtctgggcgacgacttcgtacggcgggcagccgtcggtggaagttttcgcgaagaattattgcttgcattggcagaaaagggtggttgagggcggagttgcgcagttcgggtcgtgcactttcacgccgaagaccggcaagaccacgatgccagtagtggagttggtcccgtgcgcccgcaacaagtggggcagttggaatgagttttggttttatgtttctgaggcgactgtcgaaggccatcaagggctccccgtgtccttaatgtgctctcactattactctgcgtatccgcctttcgaagtggcagaagaggatacagacgaagaggccctacggtacgccgccggacagagcagcgggcgtgatttggttgaagagtttgcggcgtacggggtctggcccttggcgcacggctgggcgctgggcgaagtatgccctcgccagatgccctttcacggaggaagggaggtgcgaagtcctgccttcgcactgagtttgcggaaccgtgacccggccgccttcgtgcgcgatgcagaagacttggcggtgcgactcgtggggcgctacgtgccgaagacggaaggccagcgcagtttcgatatccgtgggtcaaacgatcgcttgaacagggtctttgaattaaatcaactgccgtacgacggctaccctggtcaggacgaagcagaccgccgcgggaagaaaccggcggtggaggccggaggcgaccctgcgctggcggccgccacctcttcgaaaaagagaaaattagtgatggacaaggatcgccaagcggcggcgcggaaacgtcaggcgactgtgagggttcatgaagcccggccgaaaaggcagcggggagcatcgacggctgaggcctccggcggaggcaagccgccattgccggcgaaggcgggtgcctccgcgcctggcaaggcgccggaggcgacggtgggcgccggaggccccaagctgtcgaaggtggtgccgtccgccagcggagtggcggaggctgcgaaggcggcccgatcgctaccgccgcccggcaaacgcgttgccgacttcggcactgagattgatgtggaggattatcttggggggttggacgagggcccgctcgctctagttgtgcctggcgcggcggtcgcgacggctgtgccagcgccgaaggccggggtagagatccttggcgctggaggcgaggtgactgccctcgcgttggtcagagacgaggcggacgcggcgacccgccggctgaaagaagcaatggaggcgctgagtcaggtggctgacttcaccagccgtactgcgtcgggggcccttacggcgacgttgtctgccgaggtcgagagacttcggacgcaacacgcggacgctgtccgtgagaagtcggcctccgacagcaagtgccgcaagctggcggagaaggtggccgcccttgagaaggagaaggccgacctccggcgccagctgatggaggagagaagggaggccaacgaagccatcgccaaggagcagtctgcgcaggcggaggccaggctggcgcgggcggagggcaatgtcgccaaggagctcgccggggagctgcagcggcggcttgctgccttcgagagccgcgcggagggggccgaggccgcggcgcgagcggaggccgaacggacgcgcacgcagctcatgacttcatatcgcgagctgggtgtgcggacgagcgacttcgaggtgccggagcgagaggccggacttcgctgtctggagtgggtgcaggaggaactgcaggagctccccactgtcttggcggggttgatgtcgttcacctccctggtcacctgcgaggcagcgatgaacgcgctctctcgcgaaggctgccggcactttgaggccctcgaccaggtggatgaagattttgggcgagatatctttgaggtcgaagaccccgtggtgagggagtccgccggggccctctatgaccggatgtggggttcatacggtcgagaggtggtccgggcgcgggccgaggctgcaagggctcaggcggagcgcggcgagcgggtggacgattttggggcgctgaacagcgcgccgcctgagccggagaccacccctgcggaggccgccactggagtcgccccggtgaccgcggaagatgcaccaggcgcccttgtacctgctgcggccggcgaaggcctactcccaagggtggccgaaggcgcgtctgatgcccccgcagctgctgtgccgggcgctgaagatccagcggagacaacggcggaggcggcggcggaggctcccgcagcggcagggccttcgtag

SEQ ID NO: 176411 - DNA, 408 bp, Zea mays
  Clone ID: MRT4577_9247C.1
ggagtaaacaggggtccaactggggatttgggcccccgccaaacaaacaaacaaacaacaaacccccccgggggccttttttttaggccaaaacgaccctttccccccggggacaggaaaacccactttccgggggcgggggccaaaacttttggtaaacatgccggggggccccaggagcaacattaacagggggggggggcattggaacccgcccggccggggccccccactcctttaagttatgggggggctccatggccaccggcccccccagggggccttttttaaaatgggccccccccccccaggggaaattgttcccccccccccctaacccgggggggaattttaccccgtccttcccagggtgaacctttcggatgagccccctgagcccccccgggg

SEQ ID NO: 176412 - DNA, 2763 bp, Zea mays
  Clone ID: MRT4577_92480C.1
cattgggtacctcgaggccggccgggaacagcttccggcaacgggaaaggaagggataccgacgcgagcacgcgccgagcaacgtctcgaaaaggccatgcaggacggcggcgaggtgctgttcctggacggcgtcggggaggtcgccgtcaccatcggccgcaacggcctctctgcacggcccctccacccggaactgatctcttcatgttggtcgtccattacactgcagcctaaattagacagcaaaatcaacttttcagatgtttatgccatagagatgcttgataagggtcctatctgtgggccttggaatacaaagactgctattcaaggcaagaaaaatattgagatgcaccggtttgtcgtacatgggattaccagaagaaggaaacacccttctccgtgggtaccttgtgaatatatttttggtcacaaagacttgaagatctgcaaagattggtttcagcgtctcattttgcgcataaacaatgaaagtggtagaccaaagaacttaatggtatttgttcatccattgtgtggaaaaggtagaagggtcagtaactgggaaacagtgtatccgttatttgctagagcaaaaataaaaacaaaggtgatagtgacagagagagcagggcatgcatatgacacactatcatcactatcatggcagaggaagatgcagacgaaggggcccttcggtgcgccgccggtcagagcagtgggcgtgatttagttgaagagttcgtggcgtacggggtgtggcccttggcgcacggctgggcgctgggcgaagtgtgccctcgccagatgccttttcacggaggaagggtggtgcgaagccctgccttcgcactgaatctgcgaaaccgcgacccggccgcgtttgtgcgcgatgcggaggacggggcggtgcggctcgtggggcgttacgtgccgaggacggaaggccagcgcagctttgatatccgcgggtcaaatgaccgtttgaacagggtcttcgaattaaatcaattgtcgtacgacggctatcctggtcaagacgaagcgaaccgccgtggaaagaaaccggcggtggagactggaggcggccgccccttcctcaaaaagagaaaattaggtactgcgatgggaggacttggggtgtctgatagttttgctagagagttaatgaggacgtgtgcggccccgggggaaaggatgtcttcgcccgagctccgggagtcttcggctcggatgctgagggttaccgggggttgctggcctaggaatgttcctatcccctgcgcggctggcgaggactgttttacatctcgtatggttcgtcggtggagagtttttccttacgggcggaatatcggtgctgttgtgtgggcaatgatggacaaggatcgccaaggtgcggcgcaaaaacgccaggcggctgtcaggctgcatgaagctaggccgaagaggcagcggggggctgcgaaggctgcggcctccggcggaggcaagccgccgaaggcgggcgcctctgcacctagcaaggcgccggaggcaacggcgggcgccggaggctccaagacaacgaaggtggtgccgccggccagcggagtggcggaggcttcgaaggcggcccgagcgttgccgttgtcgggcaagcgctttgccgacttcggcaccgatattactgtagacgactatcttggtgggtcggacgagggccagcttgctatggttgcgcctggcgcggagatcgcgacggcggccatagtgccgaaggcgaggggcgaggcccttgacgccggaggcgaggtgtcggccctcgcggtggtcagggacgaggcgggcgcagcgacccgtcggctgaagggagtgacggaggcgctgagtcaggcgacggaggcgctgagtcagaggagggaagccaacgaggccgtcgccaaggggcaggctgcgcaggcggaggccaagctggcgcgggcggagggcaatcttgccaaggagctcgccgaacatctgcaagagcggctcaccgccctggagagccgcgcgaaggaggccgaggccgcgatgcatgcggaggccgaaaggacgcgcacgcagcttatggatacatatcgtgagctgggcgcgcggaccggtgacttcgaggtgccggaccgagagcccggccttcgctgtctgcaggaggagctgctggaacttccagccgtcgcgggggggttgatgtcgtacgcctccctggtcacctgcgagggggcgatgaacgcgctctcccgcgaagggtgccgacacttcgaggccttcgaccaggcggatgaagattttgagcgagatatctataaggtcgaagaccccgtagtgaaggaatccgccggggccctttatgaccggatgtggggtctgtacggtcgtgaggtggttagggagcgggccgagactgcgagggctcaggcggagcgcggcgagcgggtggacgacttcggggctctgaacagcgcgctgccggacccggagccgaccctcgcggaggctgtgactggggtcgccctggagccaaccccggagaccgcagcgaccgcgacggctgcccccacatccgctgtggccggcgaagacctgcccccgaaggtggccgaaggcgcccctgatgcccccgcagctgctgtgccgagtgctgaagatcccgcggcggtggcggcggaaacaacggcggaggcagcggcggagccaacggcggaggcacccgcagcgtcagggccttcgcaggtggcgtag

SEQ ID NO: 176413 - DNA, 2657 bp, Zea mays
  Clone ID: MRT4577_92481C.1
atgcaggacggcggcgaggtgctgttcctggacggcgtcggggaggtcgccgtcaccatcggccgcaacggcctctctgcacggcccctccacccgggctggatatttgttgctctgggtgctcgatcgaagagattggaagatgataggaaggcgtctaggtatctgtacaacctaccagaagaggctgctttaggtgcttgcgatatgagtgctttgttggctgaaagacatccttttgcaagagaagaaaacatgcaaatcctagttaagtactccaaactagaaacagaatcctcatctgtgtctgaagatgtttatgccatagagatgcttgataagggtcgtatctgtgggccttggaatacaaagactgctattcaaggcaagaaaaatattgagatgcaccggtttgtcgtacatgggattaccagaagaaggaaacacccttctccgtgggtaccttgtgaatatatttttggtcacaaagacttgaagatctgcaaagattggtttcagcatctcatttcgtgcataaacaatgaaagtggtagaccaaagaacttaatggtatttgttcatccattgtgtggaaaaggtagaggggtcagtaactgggaaacagtgtatccgttatttgctagagcaaagataaaaacaaaggtgatagtgacagagagagcagggcatgcatatgacacactatcatcattatcagatatagaactgaaggcatttgatggtgttgttgcagtgggtggcgacggtctatttaatgaaattctgaatgggatacttagttctaggcacaaggtttcatatcccccaactcctgaggggtttggatatgttggaagcagtgataactgtgaagaacagacaagaaattgggttaactttagtaaacccacaccagattctgggaatgccgtgtttctagggaatccaagtaaatgtgatgaccaagaacctcttctttcaacttcacatcctagcgagctagagataccatcaaattctactaaagaaccatgtattggagatcaggataacccagtttccttcccaaatgactggtttaggcttggcataattccttctggctcaactgatgctattgttctcagcacaactggggagagagatcctgtcacctctgctctgcttattattcttggcagaaaggtgtcacttgatatagctcaagtcgttagatggaaaactagcccagcagctgaggttttgcctactgtacgctatgctgcttcatttgcaggttatggcttttatggagaagttatcagggagagcgaaaagtaccggtggatgggtcctgcacgttatgacttttctggaacaatggtctttctgaagcacaggtcatatggggcaaaggttgcttttctcgatactccatacactcattcgcttacagcatcagcacaggatgatataactggagcacaaccactacaatctcgttggaagaaacctcgcaaaataatctgcagaacaaattgctttgtatgcaaagaggcttcaacatctggacaaaatccagatgatgttgcagacaactccagaacaatatgcgagaaccagaagtgggtctggtccgaaggacatttcctcagcgtcggtgcagctgtcatttcatgtcgtaacgaaagagcccctgatggcctggtagctgacgcacacctttcggatggttttcttcatctcttgctcataagagactgccctcttcccctttacttgtggtgagcgaaatgttgctctcttgctgagctcatgatccaatctcttctgactccaggttacttttgattggaaatctcaaatctgtttctcagcgaaagatgaaaacaatcacaaactaatatcgtttcccgagaaactgtttaaatgaattcaacgtggaaacctttttaaaaacatagtaaaatatagtttcgtttctgaacttgctttaaatattcagaaactagtgcaaattggatttattcctgcggttctctgtttgcaaattcgttacctaataatgatctaattggccccgtgctcagaacgaaaccctaaaccctaaactgtaagtccagtagctttcctaggaaaaacaagcagttcactattcttattatatttgatggaattgttctgtaggttttgttacatagaatatatttttaatctgcaggcatctaacacaatttaccaagaagggttcagatcccctgtccttcaagttcgttgagcatcacaagacacaagcgtttacctttatctcatcacatgacgaaagtgtttggaacttggatggagagatgtttcaggcatgtgaggtatctgtccaagcgtgccgggggcttgtcaacttctttgcttcggggccagagctgtagtaatgatactcgtaagttcctctttgcatgaacgaaggatgccaggagttcatattttttatttagagagtcccttatttcgacatgttgtacactcttatttgtattttagtggagacctagaacactttgttgatagatatactgttaatatttgttgatagctatgtggcatggaaactacaacccatttgtgctatagaatagaggaacaaaaggttttgattgaattaatgaagtaaaagtttattt

SEQ ID NO: 176414 - DNA, 412 bp, Zea mays
  unsure (1)..(412): unsure at all n locations
  Clone ID: MRT4577_92482C.1
gggtacctcgaggccggccggggaatcanattcctaaaatgcgtttcgttcaggcacctttccttcagacagccgatgaaaccagaaaatgtgtcatacgaaaccgaccgcccgcaagtaactatgatgtaaggaacctcaacttaaaataagcaccaatgcctgattgaaaacggcgccgactatcgtctacgacataaagctgcagatgcacacgctctactacggtggtttctaccaagttgcccaagtacgggaccatcaactacatgatcatccctaagattcccttcaagcaaggtgtccagaagagccttcggaactccaccaaggattggctctcttacatcaatggcaggctggccatctagtatgaattctacgcctagctcctctgcgtgttcgaggacac

SEQ ID NO: 176415 - DNA, 383 bp, Zea mays
  Clone ID: MRT4577_92483C.1
cctaaggggatagcccggtttttttttttcccggggtaaaaaggctttgcttttaaaaaaatttaaggctttgggaactcgaaaactgttccagggaaccgggtaaattttcaccgaaaattaaaaaattcaagagaaccgttcttaaaaacagttacatgcttacgtttgggtttttttggggaggggcaataataacttactttttttttggccggaaaaaaaataaatcgtttgcacttttgcaacagggtcatttttcaattggcgggaagcccaaaaattcccccaaaaggtttcaggagggcccaaactccttttgctgggagggggccttctttggttttgttaagcccccttttttttggggtcttggggaaaaa

SEQ ID NO: 176416 - DNA, 221 bp, Zea mays
  Clone ID: MRT4577_92484C.1
accgtgcctgaatcccacctttcaggtcctatagtccgtgcttgggggaaccaccgccagaagtgggtgagaaccttgaaagtaaaaggctgagggtcgagccgcctgccagtgcagtccttgtggacttctagctgcggggggggggtcttcctcttgctgttgtaccctcgctgtggctgcgctcccctggtggctgtggttgttgtggtggccgctgt

SEQ ID NO: 176417 - DNA, 559 bp, Zea mays
  Clone ID: MRT4577_92485C.1
gactctttttttttttttttttttttttaatacttttttttgttgtttttatgtcttttttttgttgttttattgattaccagaaaagatttattacttgttgaggattacatcaaagagagggcgggggctccaaaagacgaagcgggcaaaaagaacggaaaaatgcccccgggcaatacacacccgcaacggcctcttcaagacaacctacttattgaaaaaacacttagcagcacgaaagaaaaaacacccccgacagctagcagttaaccttgcactgcatgggggaacaaggaccatgggtattatactacacaagaatgagggaaccccagggaacgaataatgcagccccgcaaaaggagggtgcccacagatgagcagggccgttggcgtaaaagcatcacttttagatccggaacaaaagatagggaggcgattccccggtgccaaacgcctacaacaggggattaagagaggggaacttgcggaggcgtccatacatacacacaaggcatgcctcccacgggaaatttggaacactatgtataaaaac

SEQ ID NO: 176418 - DNA, 375 bp, Zea mays
  Clone ID: MRT4577_92486C.1
aaaaaacaggtttgcttttgtttggattgttattttttttatttttctccacaaaaaaacattatccatgcaagatatgtgaggtccgactaaggggaaggagttctcctcatcgaggaaaattaatgtttgttttgacaaacccttaaatacggaaccccccccaacaaggattctcttcattatggcctcccataaagaagcctcaatgggcgcccaaaaaagacgcatacactatattttccattgtaacgacctttatcagaatgcttgccgaggggaccggaggaacccttcaaaggcgccccatttttatccccgaacaaggaaaccccctgagggtaaaatgggtaccaggcccaagggttttggttt

SEQ ID NO: 176419 - DNA, 360 bp, Zea mays
  Clone ID: MRT4577_92487C.1
tttcctatcacacgcgggcccccgccgaaggggggagacagataagcacagggaggccccacacccaaccccccgcagcaacgacgcaggcgcaaagaacagcacccggcaaagagcaacgggagggggcagccgctaccaagaccccgccgcgacaactgcggacacagagcccgcggcagcaaaaccagccgccgggaaacaaccagacaccccaacagagcacaaaggggaccacacacgagcgggcagactgccaaacacgcacaaagcaaaaaaggagcagcaacagcgcacagcacacgggacaagcgccccaaaccaacacgtcaagcagagagcacaaagaggacggcccaa

SEQ ID NO: 176420 - DNA, 400 bp, Zea mays
  Clone ID: MRT4577_92488C.1
caatcacgacctcctagatctctggtatattcaccccagtactgtgtgacccttagctcaaaatttgcggtccgaaagctatatccaagaagacattatgaccggtcgcggaaacccaggaggccgaaagacactccttgcgcccatccactttattttcaagctgttgcaacaacgctccacggtgtcgatttggctatatgagcagctctctttccgcatagagggaaagattcgaggattcgacgagtttatgaatcttgttgtggatgatgctgtcgaggtccgtttggctaccaagagtgaagaggagaagagacggaatttaggtcaaatccttctcaaaggcgataatgtctctctgatccaagctgtgcaatgataacctcatacaatacta

SEQ ID NO: 176421 - DNA, 1011 bp, Zea mays
  Clone ID: MRT4577_92489C.1
tccacgcgtccggggtcgctcgagccggtctgcagtatcgggcaagcctacgggcccaaacggaaaaagaggacctgagccgactccgccgaggtcggtggcggcggcggcggtgagcatggccgcgcagagggagaagtccgcggccgtcgcggtcggcccagcacacggcgctgcggtatcggggtctccttctccttcgtcctcatccggaggcccggcggcggcgtcctcgtcgggagagcggtggagcgccgcgatcgggaacctgggggagctcggcgccaacgtggacgcgctgcagaagatgctcgggcggaaggctgtcttcgtcgacgatgacatcttctccaaggcctccctcgccgccgaccaggcccgcaccattaaggttcttgaccagagggtgcagtctctggaacgcgaactcgatgccgccatttctgcagcagctcgagctcgtacagataaacgacaggccgaagctgcgcaacgagctgcagagttacgcacacaggaggtcaccaaggaactggagaacactgcgagagtgtttcagctgcacatggaggagttgcggctgaagcaagaggagattgcgaagaaagatagcgatatcaaggtgttggaagcgataatacgaaccctcggtagcaaagatgatgatggatccagcgaataattgtcatgaacagggagcgaggcttttatgttcaaatatctcacggcgtgtttatgattatgtatttccttttggggtttaatccctttgttactcagatggatgtaacttgtttcgacaagattgagcgtgtccgcactcatactactataaatttgtattctaaaacaaatattttatcatcgttagcaagattatctactatataccataatcaaaaaaaaacaaaactataaattgtttcgattgaaaaaaaaatagattaaaaagcccataaaaaaaaaaaaaacaaaaaaaaaaaaaaaaaaaaaaaaaaaaataattaaaaa

SEQ ID NO: 176422 - DNA, 868 bp, Zea mays
  unsure (1)..(868): unsure at all n locations
  Clone ID: MRT4577_9248C.1
aaattcatcctatatttcttaaatgatagatgtaaaattcggtatggattcagaancaaattcggntaatgtttcactttttggtgtagagagcaaataatgcataaaacaatttatgcaatattttattcttatttctaataatgtgcttcataacataataaaacatcaacatcaaattttatacagatctattttaaaataataaatttgttctaatagttcggattgccactttcatccctgatgttgggtgagccgggtccacagagccgaccaattgagtgtaatacaccgtctctgtcggagtgccatgaagacattcttgacgtcgagctgatgcactggccaagcctgtgagagagccggagtcagaacactcttgatggtaccaggcttcaccacggggatgaaggtcttgtcatagtccaccctgggacgctaggtgaagcccacaggacccaacgagccttgtgccgatccaaggagccatccaccttcagcttctgttgaagatccatttcccggtgacccctttggcttgtctgtgaaggatcttgctaccaggatccttcacacgcggtgtgatagctccgaggcgctgtacactcttcgcctgcttgcctccaattccccgacctccaccttgcatgccttgaccgctgctacctcatctatcacttggtgtcaccgccttggccaccccaggcctgatgtgatgtctaagttgtctagcagttctgtcatctcatgtagtcggggttcttttgagcatttgtgtcgcgcctttcagttaggtcgacatgttaggctcccttttccctcctcttctagagcaacaagcaattttgatctggttcactgtgat

SEQ ID NO: 176423 - DNA, 632 bp, Zea mays
  unsure (1)..(632): unsure at all n locations
  Clone ID: MRT4577_92490C.1
aattcggcacgagggtcaaattggttcggagctgtggtctttgagttaagattagtgctgcagatagatgctgacagggaccagctgaggcctgctctgattggcacatcacggagtttgcgagttgggcaaagctgctttgccattgggaacccttatggatatgaacacactctaactactggggtaacttctgaaattctcaagagtccaacagtccgatgtgaatacattgtctaattatggataatgttattggtacacatccttgtatatcaaatctagagtattctgatgtgcgatcactaaagtttcttgtaggttattagtggattggggaggggaaataccatctcccaatgggagagcgatccgtggggctatacagacagatactgctataaatgctgngtaatgtcttccttcattntgtattatgtatgggctcaataccatctccagtatccaatcatcttttctaaaaaaggttcaagttacaaactggatttttgggtgaatgatggtaattactgaatttgatgaagccagcatttcattccggttgtttcacttgagctcccttgagntggattggattctttatcatgactggtttttttcttgaaagcgca

SEQ ID NO: 176424 - DNA, 879 bp, Zea mays
  Clone ID: MRT4577_92491C.1
gccggccgggctcgaaatcgcagtgtctgggtcaccgaggctgtgttccctgtctgcaatttcgggcaagcctaggggcccaagcggaaaaggtaagctgactccgtcggcggcggcggcggatcatggccgcgcagagggagaagtccgcggacgtggcggtcgccccagcacacggcgctgcggtttcggggtctccttctccttcttcctcatccggaggcccggcagtgtcggcgtcctcgtcgggagaccggtggtgcgccgcgatcggtaaccttggggagctcggcgccaacgtggacgcgctgcagaagctgctcgggcggaaagccgtcttcgtagacgatgacatcttctccaaggcctccctcgccgccgaccaggcccgcaccattaaggttcttgaccagagggtgcagtctctggaacgtgaactcgatgctgccatttcagcagctgctcgagctcgtgtagagaaacgtcaggcggaagctgcgcaacgagctgcagagttacgcacacgggaggtcacagaagaactggagaacactgctagtatgcactgtcctgtttctacactagcatttgcaggcatagcatttgattatctagcatttttcaagaaaatgctgtctttgatcagtggtcacaattacatctggcaggggtgtttgagctgcacatggaggagttgcggctgaagcaagaggatattgcgaagaaagatagcgatatcaaggtgatagaagcgatcatacgaacccttagtagtaaagatgatgatggatccagcgaataattgccatgcacagggagcgaataaattgtttcgattgaaattcagatagtttcagaggaacataagcactcttgtct

SEQ ID NO: 176425 - DNA, 175 bp, Zea mays
  unsure (1)..(175): unsure at all n locations
  Clone ID: MRT4577_92492C.1
gcgtgcagtcaccgccttcggaggaccctctgcagagcaagtggcagggggacttctggaagctgacggactgcatggactacgcgacggggcacgcggcnttaccctcgtccacctgctgcggtgactccggcgacacggagaaggcgcgctattatatttttatttttattta

SEQ ID NO: 176426 - DNA, 477 bp, Zea mays
  unsure (1)..(477): unsure at all n locations
  Clone ID: MRT4577_92493C.1
aaaccggggcgggngggcttcctagacacgtactctttgtcctctttaactactattttatcacngcctaatccaaaactcgggttcgttgataatctaacttgcctgggcacctcaatcctcaacaaatatggcacatagccattcttagtaaacttcacatcattgtttgtcttgttatttgttccctcttttgtgggggctgctatagctccagttcgccttgaaaaaccacaggtttataacccatttccataaaactatctcaaataaaatttacaccatttccatttcccaatattgtctttcaccacattgtagataagatattcatgtctctttattgacaaaaaatttcattaatttatcacaataaacacgtatccataaatttttctatatacattcttgtacacttcaaagtttcattatatgcataactgaaatatctgctcaaaaaatttatgtattctcttt

SEQ ID NO: 176427 - DNA, 335 bp, Zea mays
  Clone ID: MRT4577_92494C.1
tcttaacgtaaagacaggcagggcgggcacgaagcgaagggaccagtgggggagcggaacaacagcgacgaccctataccagagcaaccccgaccacggaagcacggaaaagaagtacgacggaaacccaggacttcgactaagaaaaaagaccatagccaaggcagttacaagggacgcagcggacaagagcgaggacacccgcaccccaatctagcgcgacatctaccactccagtgacagtgttcggcgagaaaacaaggcaacggtcgctcggaataacaaaaaattggggacggacgcaatcaaaacaagcaacaaaggcgaggctgtag

SEQ ID NO: 176428 - DNA, 311 bp, Zea mays
  Clone ID: MRT4577_92495C.1
ccgagccctagatggccgcgcgagggaggaggacgaggcggacggcgctgcttctgctgcccggcggcgcagaggaccagaagtggggaggcgggggcgcgcgaggccgtggtggggtacctggccctgcccatggggggtgaacctgtccagacgccgccagggtcgccaacatgaggggggcacctcccgcgtgctccgtctctgcgcgcatcgcacctcctgcaacgttcgttcagcctctgatcgatggaaggcctggaacgcttgcggccgcctacggcgaacatccataagctggcctgacacct

SEQ ID NO: 176429 - DNA, 319 bp, Zea mays
  Clone ID: MRT4577_92496C.1
cccactcccgacgtgagctccacggcgatgcccacggagggccccgctccgacgccctgcgaggaggctcccccaggccccagcgccggcgtcgccggagccttctcctgcggcaagtggctcgccgacgccgaagccgtggccgtcgtcatctcctggcttctactgagagagcggtagaactgctccgtgccctgctggaatttatcgctatacgagctgagccgatgattccttttcttgtgctgttcttgcctttaatccatattccattcggcattcgagtcatgttgacacttgaatggttactaagagtaca

SEQ ID NO: 176430 - DNA, 255 bp, Zea mays
  unsure (1)..(255): unsure at all n locations
  Clone ID: MRT4577_92497C.1
tcgaggctgccgggcatccacgaagaaatcgtccttccccgctcatgcgtatatcactgttgcatgcctttgcctgctacagtatttcggcccagcgttttggtctgagctttgtgcaaagtttgttaacgccgtgaaagagttcgagatgtgcaaaaaaaaaaaaaaaaaaaaaaaaaaaaaaaaaaaaaaaaaaaaaaaaaaaaaaaaaaaaaaaaaaaaaaaaaaaaaaaaaaaaaaaaaaanctttttttt

SEQ ID NO: 176431 - DNA, 429 bp, Zea mays
  unsure (1)..(429): unsure at all n locations
  Clone ID: MRT4577_92498C.1
gaaaaacactcggctatatattatagtgatcataacatacacaagtaaaacaatccaagagggtcaggaacaagtacactgcctgcaagcaggcacacaagcataacagcattgtaggtaatatgaggggagagcactagctagctagagccatgggccatggccacagccttttacctcctcccttcaccgttactcgacacgtncgcagccttcgtgactctcacaagcacagctgacggctcctagctagtcaaagcaaggcgtgtttccagcacgattcacgcatccttcacctgcatgtgtagggagttgaatagctgatcgagttgaacacgatcacactagtggcacacgtacccacgagttacattttattacatccatgagtgctcatgccacagagagggtactaataactcaaaaact

SEQ ID NO: 176432 - DNA, 367 bp, Zea mays
  Clone ID: MRT4577_92499C.1
gcaggtccattctacctatgatgatgaacttgtaatactttaggggactcggtgtaggatctaggacaccggctagagggggggtgaatagacggttttgactaaaataagagatactagagaattttaaataaaacaataagagatataaatttcctagctttgataggtcaacaaaatatgatgaacaatttatgctaacactacaaaagatagacaatacacaaattactaactacttgcaagtaatgagtaaaaggtgagaggatggcatcgaaatttatcccatggtatcggtgatttgtcgatcacccctaatccacgttgaggtggaattcgtattctatagtgtcacctaaatccaatt

SEQ ID NO: 176433 - DNA, 286 bp, Zea mays
  Clone ID: MRT4577_9249C.1
cgcgagttgaagaatctgaccggcttccgatatcctaagcctttcgccgatgctaagtcgtccgctatctcgacgcaatctcaggttgcttattttggaacaaatttgagtccggttcaaatatggaagctttccgttcaaggaaaattttatattcccaattttattcgcgctaccacgagcacgaatgatctgtggaagatccctggtaacgtactcgtcgagattcacggttggaacaactttgctaccctgttgtcttccgagctgtgcctcttttcctgct

SEQ ID NO: 176434 - DNA, 138 bp, Zea mays
  Clone ID: MRT4577_924C.1
cgggctcccttttggatccaaattttggaaccaaacggctcactaggggcgcctgggggcgtgcacatgtgggccgggcccattgtggcgcggtgtggcgccttttctgttgtttggtatttgtgttccctctgtttt

SEQ ID NO: 176435 - DNA, 244 bp, Zea mays
  Clone ID: MRT4577_92500C.1
agtcgctgcctgtgacagtgcataccgtcgtagatccagtgctctgtacatgtaactgctggttaagggctcgaacttgaaggccatcaaccatttgccaacttcatggactatgtggcgagacatgccccttgtacgggtttcgcaatatcatgtctcctatatctggctaataatgacgaaagatataaacgcatacaacaaaataaaaaaacaaaaaaaacaaaaaaaaaaaaataataac

SEQ ID NO: 176436 - DNA, 566 bp, Zea mays
  Clone ID: MRT4577_92501C.1
aaaggtagtgaatgtggcctagacgcctaaggccatctttccccgtctgcgccttgactcactattagctcctcttattcgtcctgatagaaccgtctccagcactcgcgcagaagaaaaagaagttagatcactctaactatacaacaaggatcatggggcgcgggcgcgggcacctcttggtgccagaaggaacctgctgaactgtggacgctgtcgagcgcgcctggtgctgcgcgcgtgcccttaccgctctgacgctggaagcagctggatagatgaggttctcgctgagaatgcgcgagtgcgggacataaccagcggcgtcgctggcaggacactggggcgccaggaaatgctagacctatcgtccaacagcctcacgggagccataccagcagtatctgggaatgcttgacgagctagtacgtatggggtaacctgtatcacaacaacgtctcagaaggtgagcgtcatgagctcagccggatctccaacactcgtgatgctcgtactcagatgcaacaacctcgatcggcgagattcctgcaccacagatacatggc

SEQ ID NO: 176437 - DNA, 2166 bp, Zea mays
  Clone ID: MRT4577_92502C.1
atgaccgtgaagaaggaagtgttcctagcactaaagcagggaaccatgttcgttagtgagtacaaggacatgttgttgcaactgccccgttatgcgcctgaagacatcaacactgatgttaaaagagcgatcatgattgaaagaaagcacaaggagatggaggactggaagcgcaagatgagtggaccccagtctgggagcagcaaccgtccctgttcctcaagcaatctgtcccagcactgcaagcatgatcacccacacagatacaatgatagagtcaatgtcaaccccaacagcagtttcagagacagtaactacagcaacaacatcagcagtaccgtcaaaacaacccgcatggaggtgtttagaaagcaaattgaagcaatcaagaccataagattaagaaaattaagaaaagcacttttgggcttgaaattgggcatattgcaaacctctatgaataaaaatataaagggaaggttgattgtttccctaatgaagaaccaacgactccttggggctataaaaggaccccctgggcgccatggagtgatccattctctttatcaagcgactaaccacccgaagagatggatcctaaagtcaaggggaagggatgaatataacaaggtcagtggcttggacaacaccaaagagatatgggacaccctcaagattgctcatgagggaaatgacattataatgatcactaagatggagttggtggaaggtgagctggggaggtcatttactgttattgatccacatcttgtaaatcttattcgtgagaaccctaggtacaccaaaatgtcacatgaagacattcttggtaaatttgtgagcaggcgcatgatggtaaaggaagcaaggtacattgacgacatcgccaaaggatctcttcctcactacaagccacaacctattactctcaaagcaacgaccaacaaggaggcgctcctcgacaaggtggtgcaagttgaggtgaccgaacttaatgagaatgagatggcgctccttatcaagtgcttgaagaccactttgaagggacacaaggactaccccaacaagaacaaatcaagaggaaagtgtccatgcttcaagtgcgactatattgatctttttaagggcttggatagatataaagtagataaagaaaaagttagatttgctagggatgcctataccattggtagacattcctccattatggatggacttggttttcaaaagggaaccaaggacacaaagacccaaaaggtttatgcatccaggggctcaaggtggatcattgatagcatatacacaaaccacatgactggggagaagaagatgtttgcctcctacctcaagaataaggattcctatgacacgatcatatttggagatgggaaccaaggcaaggataaatatgaaacccaagaaaccctcaaacacttcttaaggcgagctcaaaatgagtttgagctcaaggtgaagaagataagaagcgataacagatcagaattcaagaatcttcaagcaggggaatatcttgaggaggaaggcatcaagcatgagttcttcgctccttacactccacaacaaaatggtgtagtggataggaagaaccagacgctcatcgatatggcaagaacgatgctgggagaatacaagacgccagagcggttttggtcggaagccgtgaatatggcctgcaatggcataaagcgcctctatattcatcgcctcctcaagaagacgctatatgagcttttaactggttccaacggccgcaatgaggactatggcgataggagatgtgcgactgcaggaacaccaagtataagatcaaccttcttcctcaacgatggtgcaatccccaactcaatacaaggagcatgtacctcaaaacgacggccacccgagggcatctcgggaaaacgacggccgcctgaaggcatctcgggaagacaacagtcgcccaagggcatctcgggaagacaacgaccacccgagggcttacctcaagacgacgcccgctcgagggagtctcgggtgcccgagggcatggatcaagggggagcacgagaacaagaagaaatggaggaagaagaagtaccacatgcacctccaacccaggtccaccaatattcaaaggaatcctccagtggatcaaatccttggtga

SEQ ID NO: 176438 - DNA, 281 bp, Zea mays
  unsure (1)..(281): unsure at all n locations
  Clone ID: MRT4577_92503C.1
agcaacagatactgcacaccctagatccaacaatggctgattgaatacaatgcctcgggatgctggttggtctgaaatgactggctctgccgataccattaaaanacagtgctaacgggctcatatcacgtggaatggttccttgtatgtttaaccaaccatggctaaggactggcataacaacattcttaaacacatcatgatacagcacagcgtgaacaatcctgtcacaaacagatgagactctgaacagatacacttataacacggactacagaagc

SEQ ID NO: 176439 - DNA, 734 bp, Zea mays
  Clone ID: MRT4577_92504C.1
actgttccgaccaaggcaccgacatgcagctgctgcagtagcttcaaaaattatgtatttggcggactcagtaatgaaggcatatattcttgtatgaatgtattagacacaaaaaaatgcaatggagtgtacttgctgcttcaggcgaatggccatgtgctcgacattcacattctatggtctcatatggtacaaatctattcatgttcggaggtcatgatggccaacgggcactgaaggacttctacagttttgatacaacaaaacttaggtggaacaaggaaaacacaaatgggggaactccgtcacctagattttcacactgcatgttcatctacaaaaattatcttgggatacttggtggctgccctattacagaaaacaatcaagaagttacattgctgaacataaatcatcgagtctggttttgtgtttcggttccattgctgagccagtccctctgtgtccgtagttcatcggttgtcattaaagatgatcttgttattttaggtggtggtgcatcttgttatgcattcggaaccaaattcagtcaaccaatagttctttattcctgcctttccagttggagtctatgtttaaatatgataggaacaaagatggcacagttcaaaggcgtgatgcaatatctgttgttgaattgtcaagagatgaacaaaatggcatccttgatcatgacacaaaattacagatgcttgttcgggtagtttgcggct

SEQ ID NO: 176440 - DNA, 704 bp, Zea mays
  unsure (1)..(704): unsure at all n locations
  Clone ID: MRT4577_92505C.1
cattgggtacctcgaggccggccgggaacacctccngcgtcccgcgctagctgcggcaccgcatggctagccgagaccgaccccggctccatatgctttcctctcactggcccctttgcttttacgactttgtcctcgcgggcggggctgacaacccgccgccgaggccggagaaacaaccgcctaggacttccagagcactgacctcatggcggccatatagatcattcccttacagtagctgcgcggagccgcccagtggaggccttcttcgacggcgccggtcgtctccggagtcgccatgatcaacgcgagggctcgccgtgattcatgatcactggggataagaggcgccacgacgggtgaagtcccacccactgtcgcataaagaaaactgaacttccttaattgatacaaacgcccattcccaagcatttacagggcagtgttacaagaagttttggcgctgcaacacctggtgacatacaaaaaaacctatcagtatgatgctgagtttgatcttggcttcaacactggctatgatcagctcatggaatggctccccagcaatgaggacaggaattccatcttcaaggtatatatgacagaattagatgaagatgctgaccaatacagagttgatgcactaatgatggaagagtgggcacgttcccaccaacggcaagtcctttaggtgatttttc

SEQ ID NO: 176441 - DNA, 394 bp, Zea mays
  unsure (1)..(394): unsure at all n locations
  Clone ID: MRT4577_92506C.1
gaaccgaatgccaagtatggatctcattacttaatactggttcacgtttgggcccttgtacgtaacatgttaccagatgcactatgtttcgtataaatgtactcagggccactgcaagcgttacacactggaaaaggggtaactccacagctgaccgggtaatctgtacacctatacgaaagacttggcacttcggaccggagtcacacaggatatgtcacagggcacaactatacagtgacgctttctcctacagctatatactcctctggagtgactttgttatatcataagactttggggtatgtttctggcataaaaccttctaccttggnatggtgctccttgttttaaggtgtacacgtggctcaaactcacactgaatggatcaact

SEQ ID NO: 176442 - DNA, 309 bp, Zea mays
  Clone ID: MRT4577_92507C.1
ggggcggccactttacactaattttgtagtaatcatttgcacgagcagtcactttacagcagcgaaggctaaaggctaagcaaattaacttgtgccggtagctaggccgtagctgaatggctgaattaagcatatgagcgaacaacaacaacaacaacaacaacatatactctgcaaatgaaaccactgcatgaatagcatgcacacagcggggtctatttacacttagctagcttagtttacacacaccccagccaacgccgatcgatgatgagctattagcaccgcgacgggcggctgtaggtgggc

SEQ ID NO: 176443 - DNA, 403 bp, Zea mays
  unsure (1)..(403): unsure at all n locations
  Clone ID: MRT4577_92508C.1
gggggggggggggngggcaagaccagcaaggagggcgggnccancaaaancagnnnaggcaaacgacannacgacgagggcagaccaccacncggcagaagcnagagaganggaaaaaaaggggncnnnncngcnnnnggggcccccacgacaagagcgccggaggagcncncgggcaaacacgaccacacannnagggcgaccgggcaaacangggnacaaaaggcagcagcgagcnagnanngcnccacaagaaaacanccncaaccncgnccccccnnaggagggcgccaccggggcccggaaccnngcgccggcggagaccgcggcancaccgagccccnccncgancccgagcagccggggggagngggccaggcgcccagaccggcaaggggcnccc

SEQ ID NO: 176444 - DNA, 242 bp, Zea mays
  Clone ID: MRT4577_92509C.1
cggacgcgtggcgcaaccatcgtccgccgagtcgccgactccacgacaggcctccacgccgagcctccgcgcatgccccgtgagtccgacgagaacgcctcctcgccttccccggacgtggtgtggcgtacctaccgccggtgccgcagagcgcacggtcctcctgcagcgggagccctcgctaccgccgtcgcaggacgtggacgacgacgacgacctggacgccaatggaacgccatcat

SEQ ID NO: 176445 - DNA, 749 bp, Zea mays
  Clone ID: MRT4577_9250C.1
atcgcctgctcgtcgctctgccttctgtgccttcttttctgcctctgacccttgcagccggtctccctacacatggaagctaaaccccacatcaccattgggtccattgccccctctgactctgcccagtccaccaccacaggactcctgagctactagcttgcaggcattgacaagctgcgtgatcgagaggtctgagaaggaggctgctcgaaatgatcaagcggtccttctagtacgcatgcgtgctcgactagctcgaggctgagcgtgatagaggcatcaccattgatatcgctctgtggaagtgtgataccacgcaagtactactgcacggtcattgatgcccctggacaccgtgacttcatcaataacatgatcttctggtagcctcccaggctgactgtgctgcccttatgattgactccaccactggggagtttgaggatggtatctcccttgatggacaaacccgtgaacatgctctccttgcgtgtcaccctttgctagctgaatcatatgatttgctgctgcaacgatatggatgcaaccactccagaatactccaaggaacgatatgatgagattgagaaggaagtctcatcctacctcaagaaagttgcgctacaaccctgataagattgtcttctctcccatttctggatttgagggcgactacctgattgagaggaccaccatgcttgactgctacaaaggtccaaccctgcttgaggctcttgaccagatca

SEQ ID NO: 176446 - DNA, 533 bp, Zea mays
  unsure (1)..(533): unsure at all n locations
  Clone ID: MRT4577_92510C.1
cggncgcgtgggtttagnaatcgtatgatttctatttacaagtgtttacgagtgttttggtctctatttacaactatttataagtgtctgcatagtagcattttcagaaaagaactccttttgagaacaaatatggtacaagtcagatggtctctatttgctgcttttagaagtcaaatggtctctatttacaagtgttttggtctctatttacaactatttacaagtttatgtatttacaagtgtttagatagttgaacaaaaacagtgatgtgtttacaagtatttacaagtgtttagatagttgaacaaaaacggtgttgtgtgtacaaatatttacaagtatatgtatttacaagtgagcattcgaagtgttttgatccatgacatggtatctgatgtgtgtatagtagcagttttcagtgctgcaagtgagcatttgatcctgtacattcgatcgtagacattactgctactttccaatgagctgtctgtacaatcctgggtaatttttcaattgcatgtgttacaag

SEQ ID NO: 176447 - DNA, 962 bp, Zea mays
  Clone ID: MRT4577_92511C.1
gccgggccgggcttttcttggatgaagcagatgaactactcgcaggaggttccaaggatcagatctataagatcatcgtgcatctcccagacaagattcaggttgggctcttctccgctacctactccaccgaagctatagagagcagccgcagactcatggataagcccgtggcggtcattgtcccgagagacgaagagctaaagaacgtcaagcagtactatctggcagtcgagaacgaaggactgaagctacgaaaactgttggctcttttcaagaccacagggacggagcagctcgtcatcttcgcgaacacgcgggacaacggacgcgtgggcgcagaagacgtcggcaagcgttacgccgtctcggcaagccatgacggcatggaccagcgcgccagggacgcggccgtccagaagttcaggtctgggtcgtccagcatcctcatcgccactgaccacggaggcaccaccaacgcgatgccgcaggttcccatcatcatcaactatgatcttccgacagagtccatgcggtacgtccgtcgtctccagcagcagaacaggcagttcaggaggtcggtcagtgtggccatcagtttcgtgactcctgctgaccgacgcaccctctccgccatcacgagcttttgcaagtgctacatgggggagctgcccaccgacttgaaatgaccgtacctctttggtgagctatggaatgcagaagtagaactggtcagcatgcatgcatgcacaggttcttctggctgcaaggaagcggcatgcatgttcgtttcctcttgagatactttgcgcttgttgaaatttgaatactcatggaaggtttaacttcctatcactcagaaccttgagttccccagtatcttatctttgatgtaatattgttatttactggatgtggtcgtttgacagttgaatgttatatgatgacttatcttgtttttc

SEQ ID NO: 176448 - DNA, 193 bp, Zea mays
  Clone ID: MRT4577_92512C.1
ttcacactaccgatcaaaaagattcttttcgcggcaaaggtactatctactattcgggttcttttaaataaggaacaacggtatgtacctcccttatgctacttctaatttatataatcttcattatgttacaaaatataaaacttcatgaacaaccttgtgtcaattctatgatcatcaatccattatgtat

SEQ ID NO: 176449 - DNA, 177 bp, Zea mays
  Clone ID: MRT4577_92513C.1
cccacgccttccgtgcacctttttttttacgccttactgctagccttaggggcggtctttttggcagcagttttgccagcagcttacgcaggtccagccccagcacctcttctagtcgatcttccactcgatcctgcagtacatcctgcaaaagcagccgcaaagcgggcaggtcgc

SEQ ID NO: 176450 - DNA, 1492 bp, Zea mays
  unsure (1)..(1492): unsure at all n locations
  Clone ID: MRT4577_92514C.1
ccaagtattgcagnaccaatattacaaatattggnacacgnttcatgngctnnctttctgaanatactcatggnnataaattatcttgtaccctganaatcccccttatttatgcacaattgatggttgtgtccagtagtgtctttgatgattcatcacccctaaacgattttagaaagctataccaactaatgtgtggaggacctgggcaaggggtggtagtcgcgctggttcgctatccacggcggcaagccgcctactcaaagatcccgcctctgtggacgccgctgcggggaggacatgggcacgaatcttgaactaaaactaggggatgtctatgtcccaagctcagaattctgctagccagctaggaatagttttggagtgccgtccaaataactcaagcatcatttcctactattgggaggtgcaagactcgaacgccgtgctctatagccgacagaagtctgcggaggcgaaattgtacgagacttggatgatgccgaccatgtgttcgttgaaatcccctcaaggtagttcaaggtgccagattggttcctcgacaggaatgactacaaggacaacaggttctcacagatcatctccaacgccctcggtatgaagctcagggacaacctcaacaagctcaaaaagatcagtcccttgttggatttcatttctagcctacccgatggtgagagcaagtgaacgcatgcgcacttggaggagacaacgtcacatgataaggttgttcaaggcgttgatcaagtggacgtagcggcttatcgacaagcatgttttggtcctggagagctacaacaagaaagtttctttcgctcagatacatctccattttgttctgaagctcatatttgggaatacaaaagaatcgaaaggggaaaaggcagagaggattgttggtctcaactctcaagtcagtaccagcagcaaagttgaatgtttggtaatttgggcttgttgcacaccttgactggcctatcctgagtcatgacccagatatgatcaagatgctatgtggcagttcctatccagccattttgtagtgggagaagcctggagagtacgtgttgtatgagcaacaacagcagaaacgacttttgcttcaacaacaccaacaagatctctatacatcaactgcattcaccgccacaggatcaatcacttccatccatggaacctattcaatagcttccctaggcagaaagacaaacacaaatgaatatgaaacaacagattctggcaaacaattgtagcttggctggaggcgggcatcagcggcgacttcccactcgattcgctgtataataaatactatgagaggatactggtgtttcataagataatcatgcaactcatgaaaatccatgtaaaatatgtagctgactatggatggcctgatgctataattttagccatgtttgtcttatgcgtgtgattcaagtaatatctgatgtgaattattttaatgttt

SEQ ID NO: 176451 - DNA, 763 bp, Zea mays
  Clone ID: MRT4577_92515C.1
cacagattactctccaacgccctcggtatgaagctcagggacaacctcaacaagctcaaaaagatcagtcccttgttggatttcatttctagcctacccgatggtgagagcaagtgaacgcatgcgcacttggaggagacaacgtcacatgataaggttgttcaaggcgttgatcaagtggacgtagcggcttatcgacaagcatgttttggtcctggagagctacaacaagaaagtttctttcgctcagatacatctccattttgttctgaagctcatatttgggaatgcaaaagcacgcgaaggggaaaaggcagagaggattgttggtctcaactctcaagtcagtaccagcagcaaagttgaatgtttggtaatttggtgggagaagcctggagagtacgtgttgtatgagcaacaacagcagaaacgacttttgcttcaacaacaccaacaagatctctatacatcaactgcattcaccgccacaggatcaatcacttccatccatggaacctattcaatagcttccctaggcagaaagacaaacacaaatgaatatgaaacaacagattctggcaaacaattgtagcttggctggaggcgggcatcagcggcgacttcccactcgattcgctgtataataaatactatgagaggatactggtgtttcataagataatcatgcaactcatgaaaatccatgtaaaatatgtagctgactatggatggcctgatgctataattttagccatgtttgtct

SEQ ID NO: 176452 - DNA, 1885 bp, Zea mays
  Clone ID: MRT4577_92516C.1
atttgattaataacatgatgactaggcaagtgtttctttgtaagaaacatgtgcattaagtggtgagaataatccacattgtcttctagaacaattgacaccctatttgtaccaagtagatttttttcatgaacagacaaatttttcaaacaatgttgaatccgcatgttattatttgtgagatattgaggtcgaatctatatatatatagttcgtttttatgtaatcgttgtagaccaacatttttgtcaaatattttcgtatcgaacaatatactcaccattgaagattactcactcccaactctttcaagtacattcttctgaaactcaggccatgattggaatgagtttaattttagaatagcaaagtagcagcaaacatgcacaattgaaaaacattttttctatattaaggaataaacattccggtgggcctggacttttcattggtgcatgaataattagtgtcatttacagtgtcattcagagtttttcatggattgtattgcgctttaagttttcaaccctttatggtgggattagctgcatgaggggttctcacataaactttgagattaattaccaagtcagcttttgagagctcaaaagatggtcttcacattgagtagatttttgtgaaacatttacagatttaataaagtcattgtttattggttttaaattaaaaaacttgagctggcaagggaaaataacatcggacatcatatatagaggagaaattctcagtttctcacacgggtaaaaaatcctttaacctctgcttactcaaacatactggtaccgtagaccatatgatgaattatttactgaatttactataaaattattgaatgttaaactttatatgtatttactgaaagtcggcagtaacccattccttcctccttgtttagaaagaaagataaaaatgagtattttttcctaatgtctaacgcactctatctatacatgcattgccattcccagtttctttcgctcagatacatctccattttgttctgaagctcatatttgggaatacaaaagaatcgaaaggggaaaaggcagagaggattgttggtctcaactctcaagtcagtaccagcagcaaagttgaatgtttggtaatttgggtaccattgctcaaccttctcttttttattttgcctattgtttttcttcagtaaattcaagctgatacatcatactataatacagtccaaagctagctcttgcttcctgggatctgatcagagtttatatcagataatgagtcgttaaactaccaagaaaatgtcagtataataatagaactacagtagtatccctgtggtctctctctagagttgaataaaagtacttgcaggcttgttgcacaccttgactggcctatcctgagtcatgacccagatatgatcaagatgctatgtggcagttcctatccagccattttgtagtgggagaagcctggagagtacgtgttgtatgagcaacaacagcagaaacgacttttgcttcaacaacaccaacaagatctctatacatcaactgcattcaccgccacaggatcaatcattccatccatggaacctattcaatagcttccctaggcagaaagacaaacacaaatgaatatgaaacaacagattctggcaaacaattgtagcttggctggaggcgggcatcagcggcgacttcccactcgattcgctgtataataaatactatgagaggatactggtgtttcataagataatcatgcaactcatgaaaatccatgtaaaatatgtagctgactatggatggcctgatgctataattttagccatgtttgtcttatgcgtgtgattcaagtaatatctgatgtgaattattttaatgtt

SEQ ID NO: 176453 - DNA, 236 bp, Zea mays
  Clone ID: MRT4577_92517C.1
atttcaacgtagatattaactaaatgaaaggacacttgagtagctgctgtctaaaattcatgcagctcaataagcagcagcaaggtgttgtgatcatgcagttctgttgcgttcaactattgtatatttaacttaatcatggagcattggtggtagctattctatagtttattttggaatggatttctaagtagtctactaatgttttgggttttaattttgtcaggagggaggtc

SEQ ID NO: 176454 - DNA, 176 bp, Zea mays
  Clone ID: MRT4577_92518C.1
ccactgagtagattacaacacgttatcagcactgctcgcgagatcagaggaagcgagatcagaggaaggatctatcgctcgctagaaggagaagaacactcgctgttcttgatttttttttgttcatgttcactgcatccatctccatggacaaagatgagaagaacatgtcaaca

SEQ ID NO: 176455 - DNA, 111 bp, Zea mays
  Clone ID: MRT4577_92519C.1
cagacgcgccctctaactgggcattaagacccgcccttttggtggttactcacagcgtgaccggtacacttgacagccacctagaccctgatactttcgatctctttactt

SEQ ID NO: 176456 - DNA, 576 bp, Zea mays
  Clone ID: MRT4577_9251C.1
ctggccggggcgtcatccgacctagccgaccgctctttcgtcgatgaggcgcttgggacgctatgggcagaccgagaaccgggactgtctgtccgtcctaggcctcaccggatgcttcagcactacggtgaaagctgttcccgctgttacacggcgtcggcggggcgtgatacttccatatgccgccggaccgcaggactggggataccctgagggacgacggtcgggaggaacactcgcgagcatgatgcgcaggatgccctcgcctgattagatgcgatgaggtctgatgggcgctctctctatggctgcagcgacgtgcaacatactgacctgatgctggaaagagttaaccggtgatgatctcagactagatcacatacgtcacgtgtagccttataggtggctgctacacgacagagggatcaagaggacgattggaagagctactattacatgcgcactcagagcagatgcctgagcgatatgaacaggccgtgctcagaggtggtgaacattgttaacataggactcacagccgtagtgctgactatgacagggaacgtaacagacaca

SEQ ID NO: 176457 - DNA, 336 bp, Zea mays
  unsure (1)..(336): unsure at all n locations
  Clone ID: MRT4577_92520C.1
agaagctgcccggcgaccgcaccgggctcgcgggggggcgagccgcggcggccaggagctcgtccgcgacggcccccaaaaggaaagcagcncaggctgccgccgaccgccccggggaagatccccatcagcggccccggacacctcatcggctcgcaccgtcacggcgccctccgcgaccaccacgccacagtcggaccacaaaggggcagacgactggtgcagggtnggcgcccgcgccccacagccggggggcggccacgaccgcagagcccgtcggaggcncggggtncccgcacgccacgaacctccctgctgggcggtcccggccccgcg

SEQ ID NO: 176458 - DNA, 325 bp, Zea mays
  unsure (1)..(325): unsure at all n locations
  Clone ID: MRT4577_92521C.1
aaggaaccagccgcacaaaagcccnccaaacacccaaaaaacaaggacaaacaanggggccgaaacacaaagcaggaaaacacacggaaacccaacaaaggggaacagaaacaaancggaccaanaaacaaaaccccagggcacaaggaaaaccccacaaaaggcaaaaggcggccaacccaacacggcagaaaaacaacagggctctcacccattacaaacaggacagcacaggccaccctaaacctaagcagctgggaacccccccaaaaacccaagaagcaaatgacccccaaacaaaccccctgggaaaccgctgcaactt

SEQ ID NO: 176459 - DNA, 369 bp, Zea mays
  Clone ID: MRT4577_92523C.1
tagctggttccattggttgaggaataaggctcgcgaggggcaggtgcagggctgtcctgccggtaattgatagaaggtgggggtggacgtttcggagatcctggagctggtggaggaccgggaggcgttcggtatgctcgtggacaccaagtttcggcagctcgactccgacggcgactgcttgctctccttgggggacctgctccctcacttggcagacatctttttcgctctcggactgcttgcttagggtgctgtcttcaactccgaccatgtcttctcatatgtggtgagcgagttgactcatgggacattccatggcgaggtgagcaatgtcgatttccaatatgccctttttgacatactttt

SEQ ID NO: 176460 - DNA, 718 bp, Zea mays
  Clone ID: MRT4577_92524C.1
aattcggcacgagggagaagaagggaggcgaagagagggggcaccgtcggacggcggctcatcacgccatcggtagggtttcggcgatcccatggccaggcgccacctgcccctttcctgctcccgcgccgcgaccatccgcctcctccacttcaccacctcctcccgccacaccacctcctcggcgactacgacgactaccgctacccttcccgcctgccacccggccacccccgacatcttccaggagtcgccgccaccgcatctccgccattttgtgggccacggccacaacggcaccgatgtccccatgccacattgccaccccagccgcatgtggtggcatcgctggaggagcggcttggcgcggagatggacgaggcgcatgtgctgcttgcgcaggaccagcggttgacgcacatggcgctcgtgcaggaggtcgctgccgcgcggcgcgatctcggctgcaccgcgcacgagctcacctccgctcatgaggagagcgaccaatgccttcacgaatcacgaggcgtggtcactccccctcacgagcttacgggctgaatgcatcttcttttctatgcgttgcaattctgggtacttatctggaagtggcttgctcctagagcaccagaaattgatgatgtccatatgcctagaggaacatgtttgtttggtgtctatacagtcctaattttctcccaaaaaaaaaaaaaaa

SEQ ID NO: 176461 - DNA, 540 bp, Zea mays
  Clone ID: MRT4577_92525C.1
ggccctaggggccttttttttttttttttttctttttttttttttttttttttttttttttttttttgtttctctttttctaaaactgtttcccttttgtttacttgtccttttcttgtttcttggggcgggggacccgcttaaaaacaactcgggcccctccgggagacaagcccgcaacccgcaacaagcgggttcacagggctaaaacccacccagggccccccgcaacccaacccggcagggcgccaccacccgtgccccgaaactgggcccaacaaaaaaacccttgcccccccccccttcaaaaagccccccaaggggcccgaaattggccacccgcccagaacagaaaagggccccccccttcttcaaacccaaaaacctgcctgctgccggaacaacccccaaagcgcccgggggccccccacttatatgaccccggggcacaccccagcccccaagctataaaaaaagcgcccccccaccccccccccccagagatacgattcccccccccccccccccaatgggaccccc

SEQ ID NO: 176462 - DNA, 249 bp, Zea mays
  Clone ID: MRT4577_92526C.1
gaggccaccgtataccgaggcccacacccgcatgagtcctcagcagcacggcgcgtgactgtgaccacactccgtgggaagcaccgccgcggtgagcccatcaccgtcgtcaccgtctactactaccccttggcagtccacgtccactccgtcggcatcgacttctgcctcgtctgagactccgtcgtcatgttcgtccactgtcacgacaccactcttcccatcacgcttgacatcatgctccagcac

SEQ ID NO: 176463 - DNA, 426 bp, Zea mays
  Clone ID: MRT4577_92527C.1
aaaaaaaaacaagagggccccaaaaggaaaagggggggggaaacccaacccataaaaggcctctaaaaagaagaaagagttttgcgaggaaaaaaaccaagacaaaacacccctttgtttttttctcaagaaagggggcgggcctttagaagggaaaagcctatgccagaaaaaaatttgggggttgtaaaaaaaaaaaatacgggcaaaatggacacaaaagaattgggggggaggggacaatgggtgctttaaaaccaaaaagggggcccccattggaaagggggaaaattaacaggggccaaaaggtaaccctccggacctggcaaggggcacatataaaaaatgggcacccaaaaaccacaaaagcggaaaacccccctgagcttgttagggacatatgagaccatgggggacaccttggcc

SEQ ID NO: 176464 - DNA, 1430 bp, Zea mays
  Clone ID: MRT4577_92528C.1
ggtctcttgacaaggtaattatttatttttgttgttaaccggtacacaaaaacatagtcacatgcaagttaacgggtccccacggggaacggggatggggaatgcttccccgtccccatccccatttacccgtcgggggataaactttccccgtttatatccccgcgggggaagtttcttccccatccccatcccctaatggatgaattccccgcggggaatcggggatcgggtccccattgccatctctagcgccttatcatgtcttctaggaatacaaagtatgattctggttttgacttgcttaagaagaaacggagactagaagcagctgatcaatctcaaacgggttctatggacagatttgttgtgaaagactctcaacttaattccaaaaatcaaactccagaagctaatcgtgttggtgaaattgagagtcatggtgaccagggacagggagatgctaacattgcagtacaacatgaggctcaggttgaagaaattggccagggagatgctgataatacttagctataaataagtccatccaacgttcattagcctctctgcataaatcggcatgaagctgcttcatcctccccccaatacatttgttccatcacaaaccaccccatcatatgcttaaagcacgaaaacacagtgccatattcctaggtttcacttgtagttgaccctttcagcatttgcatctcattctgcattagtatggcttcagctatcgctttatttgttacctctatcaactctcatggctgctttcaattacttaatcccgttaccctgctcttaaatacctaactcgaggtcgaataaatattatttcatctagctgctggaattggttagagattcaacagctttgccatgatcattaagtgcgaccattaacaactcaaggcaatggtcaccactgacaaccccatccttgattaacaaaacagcatagctcgcttgccaatggaaaaaatcacattgagacccatccattttcttggctctgcaccggtagaacttcctcgatgtgctttctggttgtttggagacccgctcaatcaccaccccattgcagagcttgcaagggattagatgaagctcaacactcacagtattggagccagagagtaaggatgatgatgacgatgacgacatctcctcaaatagcctgaaggaccatagcaatgataaattaccagttaacggtgttttattagttcaaagtaaagcactgatttaacatgtacagtatgttcagataagttcagagctgatctcatgaacattgctatgactacccttagttcaaaaattctttcccaggataaagagtactttgctgaacttgcagttgacgctgtattaaggcttaagggcagcaccaacctggaagccattcaaattctgaagaaacc

SEQ ID NO: 176465 - DNA, 365 bp, Zea mays
  Clone ID: MRT4577_92529C.1
cttctcccctcttccttggtcccatggcgtcgtctctcggctccgacgacggtgccggctccgccgccgccgccgtctgctgcatgtgcggcgaccatggcctgccgcgcgagctgtaccggtgcgacctctgccgcatccgtacacagcacaggtactgcagcgacctgtacccggcggcggcggcggggccgtaccggagctgcaactggtgtctcaggcagggcggcgccgtcggagggggtgatcattcgtcgtcaccggttaataataaggtgtccgcggcggcaggaacaggatcctgacggaggatcagcattaacgggtctcggggagaccacaaccgatattgattgctcaacagg

SEQ ID NO: 176466 - DNA, 335 bp, Zea mays
  unsure (1)..(335): unsure at all n locations
  Clone ID: MRT4577_9252C.1
gttgttgggggggggggttttaaaaaaaaaggaaccggtgatacatttttttatccacgttttaatttttactttcctttacattgaaaagggaatgccatacaaatacataagtaattggacaactaataggggttatatttccccatattgggaggggggggggccccccttttttttttttggaaaaaaaaacgggcncggcccagggggaaaaaaataaacacaaaaaaaaacccccgngaaaaaaaaaaaaaaaaaaanaaagggcgccaggcagggaacaaaggggcaaaagcccagggaaggaaacgngggggagggaaaggaggaac

SEQ ID NO: 176467 - DNA, 622 bp, Zea mays
  Clone ID: MRT4577_92530C.1
cggccgggccgggcctttcgctgcaggtttagggacaggaatagtcattggagagcaccggctggtgaagctcgatcgaggggagaaaataaagctgctccgtgctcgccgtggctggagaaagccagtccttgtggccgtttgccggcgttgaggaggtggaagcctgataccgaggtgtgcacggtgctcagcagtgatacccttccacagaccccgcatagtgcgggaagcctacggcactgggtacgccctacaggtgctcagcagtgtggtaaatgtgctttggtatatacaccagaacttgcagtgaataagattatgattggaaatctcatacactgccatgataaggtaaaacatgaagctggcatcaatggcaatattaagatttttacagaagatgagattaaaagaattaccaacaactttaacactcttatcggaaaaggtggctttggagaagtttataggggaacccttgatgatgacaatgagcctgtagctgtgaagaaatatatcaatgaagatttgagagaagtgtttatggaagaagtacgcatccatagtaaaattagccacaagaatgtggtgaagctaatacgctattgcattgggaaaa

SEQ ID NO: 176468 - DNA, 603 bp, Zea mays
  Clone ID: MRT4577_92531C.1
tttttttttttttttttttaattaaacaccgtcgttttctctattgccaattttcaatacaagaaaattcagatccaaggagaaaatttacaacaaaaaaccaatcagctagtacttcagtaacatcagacggcagttaggccacggcgtcacgctgccttcaggcatcgcgtcatctagcggatttccccattcgctattgtctgtaccttgcagactccagccgaagtcatgaaggggacatcttggtagcaggccacaaggtcgccattgctacgcaggtcagccgctagcttctcccacaccttgctcttgccactgagagaagcctcggtctcaccggagtgcccggcaaaggtcaccctctcccccacggcagcatccgctggtggctcgaccagctcaaccctagtatggtcctcattagaagcagccaaaaccatggcatccgattttataccacgcatcaccaccggtttcagattgcagagaacacagactttccggttctgtatttcttcaagaggaatgtatttgacaaggccactaaccaccgttcttggagcctactctcgaacatcgatttcctctacatacagcgaa

SEQ ID NO: 176469 - DNA, 416 bp, Zea mays
  Clone ID: MRT4577_92532C.1
atgttaaatcgttccataaccattttgatagtaatgcttcttctttttgcgaaagaatatagtttgggatatgacgggtctataatgatattatattactctattgatcttttcaaagcaagcatgttcttccattctgaatgttaatcgtgctcatccatttgtattgttggaccatcgtaagtatgtttttccacaaggaaccttttacggtgtttagagtctgattattgtccttataatgcctttcttaataagctgtaccaatggcgcgtctcacattttgtagaactcgtggaaattctcatggagcaaagctctatttgggatctgatgtcgatgactaccaaccccctttatccttggctttacatactttagtccatactattttctaaaacattttactatttgcg

SEQ ID NO: 176470 - DNA, 312 bp, Zea mays
  unsure (1)..(312): unsure at all n locations
  Clone ID: MRT4577_92533C.1
agggaggngttaanttgcgccgcttgggggaaatacatggtaaaagggtggngncagnaagatggggtnaggaatagcagaagtgttgagattggtnttaagtgccaattattccacaggtagctccgatccagttacgttgaatggggcttnngaacacccaagggggggggggggganaggctacaataagagcttgcggngagcgtgttacaacaaccaattggcaaattacaacaacaatgcttggcaaatgtaacgatacaaaccatgggaacggaacagcaagaacaatttataccaggagtgagt

SEQ ID NO: 176471 - DNA, 552 bp, Zea mays
  Clone ID: MRT4577_92534C.1
gggctggggggggtggtgggttttatttttttttttttttttttttttttttttttttttaccggggaggagaaagcttttattctcaaagcgtggataaaaagccgggcgagaaccacgtgcccccctatatagaccccccccatatatactatgggggggggggggagaaaaaaaccccgagtaggaaaatgtccctgccgagaccccccccccccacatcggtcaccaaacccgcgtgcgagggaccctgcccccccctcatcagtaactacccctgagatacatagacgggcaatcaaacccccgggacttcggtcgccctccatgcatgctccttctgggcctggggggcagcctacctacccaagtagatcgatcgagcagcagcccgatcagccgaagaaggggggctttttcttcccctcgccggggggggcggactcctcctcctccccgggggcctccgccgggtgtttggcctccttcttgtcggggggctcgtggaacgcgaagccccccctgcccaggggcggcaccggcggcacgccc

SEQ ID NO: 176472 - DNA, 496 bp, Zea mays
  Clone ID: MRT4577_92535C.1
caactccagccggagcgagcccatcctctcaccaccagatgcgggccctcgcgcgcgccgcgacgctgctacgccgcgccgcgaggcccggggctactacggcggcgctgcaccatccgcagaggaacgtaagcccttgcctcgagaagaatcagcgaggcttcttcttcaatggggattctactctttaggatccaccaaatgaagcgtggattccaccagaactcctatatagcaggactgcgaggacaccagaacgggagaaagagttttttttatttcccccccacacccccccaaagttttataatgaggagaagggattcatggctttgaaagaaaaagaaaaaaatgttcaaattaggaaggaaattggtcaccgaggagaaaagagacacgcttgctaaaagacagaaggggaaacactcaaataaaaatatcaaagaaactagaggaactggaaaaaaggcttacccgcaaaaaaggaaaaaggaaa

SEQ ID NO: 176473 - DNA, 355 bp, Zea mays
  Clone ID: MRT4577_92536C.1
aaaacatttaacataaaaacaaatagaaaaaattcaaaatgttcaaatacagtttgcttttgttaattagcagtttagcgttggcctctgcaggttacagtcaatggatgtcggcaaatgtaactaatttaagttctaaacctgttatgctttctgctgaaacgaaatggggtaaactacatccttatggaaatccggaaaaagagttggaatttgtgcggcatgtgctagaaccacatcaatcaaccacagttaatgccattggtcgaaaaaatacaccaacaggaacttcgggagaaattcgtttgtcaagatttactaacaaccaagtgtatcaatttgctatcgtctattt

SEQ ID NO: 176474 - DNA, 570 bp, Zea mays
  unsure (1)..(570): unsure at all n locations
  Clone ID: MRT4577_92537C.1
gccgcgccccaaccgcgcccgcgcgccaggcgcgcgcgcgagcgagggagaggcgcggggcacaggacnggagggcaaagaggcggacgggcgcccgggcgccaacaggngccggggcgccagcccaccgggacggcggcgcagggcgccgccgccgacggggacgacagggagcccccgccggcgcggctgnncgagcccggggagcccaggnccgggcccttctaccgcgcgggcatcgccgagcgcggcgccaccttcctcttcctctccgtcgccatcctgcccgccgtgggcgtctgcatgcccacctccaagtgcgccaccggcggcctccagggcatcgcctgcgccttcggcggattgatcttcgcgctcgcctacctgctccgccggcgtctccggagggcccgtcaccccagctgcgactttcgggctgcccctagccggggggctgcccctggctagggccctcttctccgttctctcgccgtgcctgggcgcctttcgtggagctggggtggcgatgggcttcccggtggggctctncgtgtccttcggtggtggcgc

SEQ ID NO: 176475 - DNA, 540 bp, Zea mays
  unsure (1)..(540): unsure at all n locations
  Clone ID: MRT4577_92538C.1
gcgncggccatggcgagctgggtggcggcggcgcgcgccgagagcggcgtgctgtccgcagccgcggggcaccaccacgcgctggccctgtccatgagctccgggtcgctgtcgagctgcgtgaccgcgcaccccgcggcgcccgagtacggcgcggcggcggcggcgctggacggcgggcgcaagcgcggcggcgcggcggggcagaagcagcccgtgcaccaccgcaagtccatcgacacgttcgggcagaggacgtcgcagtaccgcggcgtgaccaggcataggtggacggggaggtacgaggcgcacctgtgggacaacagctgcaagaaggaaggccagactaggaagggcaggcaagtctatctcggcgggtacgacgtggaggagaaggcggcgagagcctacgacctggcggcgctcaagtactggggcccttccacgcacatcaacttcccgctggaggactaccaggaggagctggaggagatgaagaacatgacgcggcaggagtacgtggcgcacctcaggaggaag

SEQ ID NO: 176476 - DNA, 1414 bp, Zea mays
  Clone ID: MRT4577_92539C.1
ggatttctttgtcacactgcatggcatattagctgagaaggaagaagttgctgagttgcaacctgtacctgatgctcatgtacctgtattgaaatttaagttccgtgggatatcaattgaccttctctatgctagcatctctctttcagtgataccagcggatttcgatatttctcaaggatctgtactttgtgatgttgacgaagcaactgtgcgaagtcttaatggttgcagagtggcggatcagattcttcggcttgttccaaatgttgagaatttccggacaacacttagatgcttgaagtactgggcaaagagaaggggtgtttattctaacattactggtttccttgggggtgtgaactgggctctgctggttgctcgtgtatgccaactctatcctaatgctgtgccaagtatgctggtttctaggttcttcagagtttttacccagtggcaatggccaaatccagtgatgctatgtgcgattgagaataatgatcttggtttttctatatgggatccacgcaaaaatccacgtgacagaaaccatctcatgcccatcatcactccagcctacccatgcatgaactctagttacaatgtttcaaccagcacactgagggttataatggagcaatttcaatttggcaacaaagtttgtcaggaaattgaacttaataaggccaattggaatgccttatttgagcctttccatttttttgaggcatacagaaagtttctagtggttgacatagttgcagaggatgacgatgatcttcgtctttggaagggatggatcgagtctcgtttgagacaacttactttaaagattgagcgggatactaaaggaattttgcagtgccatccgtacccatgcgagtattcagatcccacaatagagtgtgcacattgtgccttctacatgggcttatcaaggaaagaggggttgaaaaaacgtggtcaacagtttgatatccgtgggacagtagatgaatttatgcgtgaaattggcatgtattcattgtggaagcctgggatggatctggctgtcacccatgttcatagggagcaggtcccatcttatgtatttgagcaaggatacaagaaaccctgccctacaatgcatgcaaaccaacaagagcagtctgatggagatggaacatttagcccatatctggagagtcagcttaagagaaagtacatttccgatggagatggtcatgtggatctttgcaaatctgtaaaaagggcttcagtaagcccacctggtgtgggaaccccacctcatcttggaaatagtgtcagtaacgttgtttgtgacagtccagtcaaattcgtttcaagtgtaaaaaacagcggagagcggcttcctcatcacatgatgatataaatatagaacaagcacaattaa

SEQ ID NO: 176477 - DNA, 389 bp, Zea mays
  Clone ID: MRT4577_9253C.1
atgacccaatggagtatcgcttacatctcaataatcggtataattgtttgcattccacctgcatagatcttcaaaggtcccaagataacgcatcctgggtttagcgatgccattgcataagtaggcttgacatagtttgtcagatacctattcttggttggactgccctaccatctgtgtacaccagattgctacaaacaccttggagctagtggctcatgtgtcacatgctgacggcaatgttgtgaaacgcgttattcacatcgggtgactaatcatctgttgtcgcagcaaatgttgcacacaacctgtacttgtgcacgtccattggcatagctggtgttgatatgcactcttacattaacgctaagattgaacatgagaaaagg

SEQ ID NO: 176478 - DNA, 641 bp, Zea mays
  Clone ID: MRT4577_92540C.1
ccggccgggtttatgtaagacaataaaacgtccttccctaggtttttatgtcattttacttgattttgtgaggtgctgagacagtatgctatccttttgcattaaatacttttaatcgataaattttatcttataaccttgttaggttcatggacctggagctgatattgataccctttgtgttggaccttcatatgtgaaccgagaggaggatttctttgtcacactgcatggcatattagctgagaaggaagaagttgctgagttgcaacctgtacctgatgctatgtacctgtattgaaatttaagttccgtgggatatcaattgaccttctctatgctagcatctctctttcagtgataccagcggatttcgatatttctcaaggatctgtactttgtgatgttgacgaagcaactgtgcgaggtcttaatggttgcagagtggcggatcagattcttcggcttgttccaaagtttgaggttatatgaaacattcccctcaactttatcctgtatggtatggtcctactgtgttaatataccagaatctgtgctttgcagaatttccggacaacactcagatgcttgaagtactgggcaaaagaagggggtgtttattctaacattactggtttctt

SEQ ID NO: 176479 - DNA, 1206 bp, Zea mays
  Clone ID: MRT4577_92541C.1
aggggtactccgtaccccacccacagggggccaggtatggagccccctggtttccccaagaaaagggaaccattgttctcgaacaatcaggctgtcgtagtagatgatcatgtggattgaggctttggttaggtcggtgtcggtgtcggcaggccccttaaattttggtctgattttgaaggtcctccgggacgccagtggtctacatgtgctgttgtatgttgtaactcaaaaagaatgctgtattgtacaagcacgttacggcctttttcaatatgatgctgcaaatggtgaaataacacagaaaaaaaaaaaaaaaaaaaaaaaaataaaaacgccagatagcaatgctgttgtatggagtggaccagcgctgcttttcctcctgttcttgatcggcatttggcaagtatacgtgaaaaagaaggattctctgggatggacaccagaggagacatttaacacctctgtaacagcaccaacggggagccttttgaatcatccaactagtgatcgagcctttgcagacagcacagcaagaagcagtgaccggggctatgttgatggaacatcaagagccagtgatagaagctatgtggatgccactacaagaactaccgaccgaggctattctgatgctactagggctgtggatctgcggggcggggcgttgaggagtgctccaagaaggtacgtgtcccctactagatatgcagggacatctggaatccaataccgacctgcttcggctgagcctggtcttaggggtactcctgagatcaagtacagggggccaggtatggagccccctggtttccccaagaaaagggaaccattgttctcgaacaatcaggctgtcgtagtagatgatcatgtggattgaggctttggttaggtcggtgtcggtgtcggcaggccccttaaattttggtctgattttgaaggtcctccgggacgccagtggtctacatgtgctgttgtatgttgtaactcaaaaagaatgctgtattgtacaagcacgttacggcctttttcaatatgatgctgcaaatggtgaaataacacagatattacggtttgcgccatcgtattgtacaagcacgttacggctttttcaatatgatgctgcaaatggtgaaataacacagatattacggtttgcccccacaacaaaaaaaaaaaaaaaacccacgcgcccaagaacgc

SEQ ID NO: 176480 - DNA, 1369 bp, Zea mays
  Clone ID: MRT4577_92542C.1
aagctcgaattcggctttcttcctcgcaggcacagccgcttctcccaaaggttgcgatggccagcacaacctctcctctcctcctgcttgccgccatggcggtggtggcggcgacgcttgccgtggcgccagtctcgtcagcggacctgccatccggtgtcgcatccatcacgtccaagatcccaaacccatggtcggccttccagaacctcacgggctgccacttgggcgagcagcagcagggcctcgccaaggtcaaggactacctctcccgcttcggctacctgccccccgagtcgtccgggtcgttcaacgacgtcttcgacgccgacctggaggaggccatcaaggtgtaccagcgcaacttcggcctgggcatcacgggcgtgatggacgcgtccacggtggcgcagatgatggctccgcggtgcggcgtcgccgacatcatcaacggcacgtccaccatgggcggcggcagcgcctcggcctcggcggcgcacgcgcgcggccggaacctcttcacctacttcccggggtccccgtcgtggccgcgctccaggaagagcctgacgtacgcggtcacgcagacctcgctgacctccatcgaccgcgcgacgctgagccaggtgttggcgcgggccttcgcgcggtggtcggcggccacgacgctcagcttcacggagacggcgtcggagcgagacgcggacatcaccatcggcttctacgcgggggaccacggcgacggcgaggcgttcgacgggccgctgggcacgctggcgcacgccttctcgccgacggacgggcgcttccacctggacgcggccgaggcgtgggacgccagcggcgacgtggcgcgcgcggcctccgacgtggccgtcgacctcgagtccgtcgccgtgcacgagatcggccacctcctcggcctgggccactcggccgagccctccgccatcatgttccccaccatcacctcgcgcaccagcaaggtggacctggcccaggacgacgtcgccggcatccagaacctgtacggcggcaaccccaacttcaagggcgtcgcgccgcccgccaccagcagccgggacatggacagcggcgcgaccacgagctcccgggggccgtggaccgcgttggccgccgccgttgccgtggccgctgggctcttggtagcgttgtagtcatcggcagattttttttttaaaaaaaaacttttgctttagctgattttaattcttgtgcgtacatcgatcagtagatacatttgtaatttataaactccttgttgttatacatacatagacacatggcttgtatagaatcaaatcctattgggtaaaaagaaatggtgcgtgtgtcactatttttgatg

SEQ ID NO: 176481 - DNA, 209 bp, Zea mays
  Clone ID: MRT4577_92543C.1
agcaaaaactcaaacaggccccaaccgcactggactgaaaactttaatttctatacactcattcatctaatctttttgccaccaaaaccaaatagctgctggatgtacaaaactacaatgaatgcccccacagctttttacagacagatcacaccctacaacccaccaaaaaatttgaccccttcccttgggtcgggggggctttttac

SEQ ID NO: 176482 - DNA, 376 bp, Zea mays
  Clone ID: MRT4577_92544C.1
gggaaaaaatatagccccccccggccagaccctggcatttgattggccaaaaatatatcggggggttcagggcatcaccccccccggaatatctttggcgggcaagccccaaaaaaccaaacgggggcatttggctcccccaccccggacatgcatgctttgaacaaacggggatgaaacccccccccccaggggggggggcgggggcccataaggaacaccccccgccccccccccccctgggggcgccgggggggatgtcaatgtccaccccctcctgggggagcagcacgtcccccacccccgagcccttgatgaagcaattccccaccgaaagcatggggggatacctgccctggccaaccacccgggggtt

SEQ ID NO: 176483 - DNA, 323 bp, Zea mays
  Clone ID: MRT4577_92545C.1
taaaaaaaaaaaaaaaaacaaacacaaacattaaaaatttaaaaacaaaaaaaaacaaaaaataaaaagtaaaaatttcaaaacttaataaaaccacaccccaaccccattaacacatcaaaacatctcttcccaaatactatcctcaaacatccattaaaacccctactctaccaatcaatcatcttcacttttaaactcttaactatacctctaacaacataccaaattacattatatatataattcaaacacatcatttctcactctttatatcatcacattatcaccaactacactcatttacctataacacaattacc

SEQ ID NO: 176484 - DNA, 353 bp, Zea mays
  Clone ID: MRT4577_92546C.1
attcggctcgagcctagttcgggagccggactttcttcgctttcatgtatgtagccgcgaggctgtcttagttggtgttttaactttcaagccccgggcaggccaacagacactctacagctcctgccacgcctggcccttgctctgttgcgaggagcccggatgtctgacacggtccagacggagtcttggaacttactcgctccaacatacagtgggcttcaggaggcctcatgatgtgcaagcgagcggggtctcggtgacgatggacctcagggggtagcaacttgaagaccacagatcagtactcgaaccatcctataagaaccagagcggctagcgataatagcacg

SEQ ID NO: 176485 - DNA, 195 bp, Zea mays
  Clone ID: MRT4577_92547C.1
ccgggctatattgttagcgatttcgcgataatcttgtagaggctagcggtttagcatgtactccatcttttttttatttatcatattttagtaaaaaatgaactagcggagaacaaatgtttgaggcagtatatttatgtaaattaaatataaagaagattctcttctttatagcgtataaaaataatcttttct

SEQ ID NO: 176486 - DNA, 772 bp, Zea mays
  unsure (1)..(772): unsure at all n locations
  Clone ID: MRT4577_92548C.1
ccggccggngatcattcccgtccacccaccaaatccagcacccaaaccagccgcactgcgctgcggtggcggacggagtcactactgccgccacgtcgctacgcgcgacccaaacccctccaccgacacacacacacaaagaaaattacccggaaaacacgagataaatccgggcaactcaaagcagtgaaaaagagatggagggagagacctctcatggaatcggcgcgacggggagtgggggtggctgcagatccagcggggagggcggcgcccatgcacagacaggcagcgcgcgtccgttacagctagcacggagaagctgcgggacgcgcttccgcttattttcgatggggaggagctcccgggaccgaactcccaaggccttagtaactccggtaatttccgcgcgcccctaagggcttgttcggttattcctatcccatggtggattggatgggattggaaaaaattgtaaaagattttgacttgtttgggattgaaacccatccaatcccacctaatccacatggattgagagcaaaacgaacaagccctaaaaaggggatcggcgtttatatatgtacagctctctcctcttcccaccaactgccgccgacagtggcagtgagccgagccagcccagccatggatcggcatnttcacaatggagttcttcagatactactttattttgtattgcctaacaaagcttcngtccgtagagaaggcgatactggatatcgtggaanaaaagaaggttgttttctac

SEQ ID NO: 176487 - DNA, 573 bp, Zea mays
  Clone ID: MRT4577_92549C.1
gaaaacttatgtacattgggattaatataaacaataaaaagacttcaagagatctttggaagaaggaaaaaaatacatccataaaaagaaccgataccagcctccgactacaactccacaccatcatattctacttataaaagagcttttcatattctactatataatacctgaaacctttttatgttttactttataatatctattaattattattagatagataataagggtgatggaagatgctaattatctaagtggccaacaaaatacttcaaaaattgcatttttaatatcttatcttaaacccatcatcccattttgctctccagtctccaccaatcgacccccatcctgctcggcttgcagcaaaagggttgttggttattttgtttgtttaagagttcccagcgctggacaatgaaggatttgatgcagacttggcgtcctttgcatctgatccttccccaacaactgctttttcctcgctcctacagcttaaaggccccgggttcatcttcctcacttcctctttcgggtatatgaagattttgcgaaccatgcaacaaaact

SEQ ID NO: 176488 - DNA, 660 bp, Zea mays
  Clone ID: MRT4577_9254C.1
ctcgaggccggccgggccgggacttccacccatagcttcgagctcaatccctcgctctctccgcaagcctactctcatatctcagacacctgggccgccgctcctctggtgtggaggtcacaacagaggaaacggcggcgaccgaggcagtagtcctgtgaacgtggaaccccctactcacacatctcgctcgtcgccgatgagaccttcctgacatcggatgagatcatgatgaacaaagctattctcactgagaagaagcacttgactatggatgacccggtcgctactaatagtaatgtgaaatatagttggcggaggagcctgcactaattctattacggttgtccaaagaatgcttcatgctcgtgtggcaacaagttacatgtgacggatttgaaagtacgacttgggtgaagaaatggaagtagacgttgaaggtgctgaatctactgctcctcaatacaaggatgagactgctcctactgaaacatgtgctgtatgtgctgtcgcatgggaaaggtcattgaatagcattctggccatatataagtgatacaaatctgatcttctacagagatcatagaactgggcactagtctgaacatgcaacattcatctacgttgctggatttttccttacagtgtcgcctgattcta

SEQ ID NO: 176489 - DNA, 930 bp, Zea mays
  unsure (1)..(930): unsure at all n locations
  Clone ID: MRT4577_92550C.1
cccacgcgtccgcggacgcgtggggacggggacctcgatcgcgttccctgtaatgccaccaccaccgtcatcaccatcgctcgcccggatcgtcaacatggcagccgccctccgtgtcgtcatcgccgtcctcgccgtcgtctcggtctctctccggcgcgccacggcggccacggtccccaccgtcgacgaggcgtgcaagcagtacaccaagtacccggagctgtgcgttaagtccctgtcgtccgcggcgccggaggcgaaggcgaaggcggagcggggcgggctggcggggctggccgggctggcgctggcgcaggcggcgcagtgcggtgccgagacggtggcgttcgtcaagggcctggagaaaatgccggggggaggctcgacggcgactcgtgcctgagcgactgccagaaggtggagggcggcggcgagatgcgcatcgtcgacaagatcggtgacctcggcaagatgtgctccgtcgccatgtccctcgccgatgcttctcatcgtaaccacaccgcgtccgccgccgccgcctgagaggataattaagacgtgcaagatgtgctggatcggatcgcccggccggcgcatgcttaataatctgttatatgctcccgttgttgcatttcttgaacggattggagtgtctatgcctctgcgtactccctcagtctagagtcacaatatacttatacatgttgttaaggaataaggatggagggggatctttctaaaaaaaaaaaaaaaaaaaaaaaaaaaaaaaaaaaaaaaaaaagggcggcgctcgcgatctaaatttgccacgaattattattcatccnanaaaaataaaaaaaaaaaaattaaaaaaaatataaataaaatagaaaaaaataaataaaatctttttctggtaataatctggtgtttccttattttttt

SEQ ID NO: 176490 - DNA, 940 bp, Zea mays
  Clone ID: MRT4577_92551C.1
aaaatgccggggggcatgccgccccgtgtgcctgaacgagtgcgtgactccttagggcgattgggtagggcgatgccggccgtggccgccggccggcccagccctctacgagacgacgacctcgatcgcgttccctgtaatgccaccaccaccgtcaccgccatcgctcgcccggatcgtcaacatggcagccgccctccgtgtcctcatcgccgtcctcgccgtcgtctcggtctctctccggcgcgccacggcggccacggtccccaccgtcgtcgacgaggcgtgcaagcagtacaccaagtacccggagctgtgcgtcaagtccctgtcgtccgcggcgccggaggcgaaggcgaaggcggagcggggcgggctggcggggctggccgggctggcgctggcgcaggcggcgcagtgcggcgccgagacggtggcgttcgtcaagggcctggagaaaatgccggggggcatgccgcccgtgtgcctgaacgagtgcgtggccaagttccagggcgcgctggtcgacctgcagcggtccaaggtggcggtgcagaaggccaaggacgaggccgccgtcgacacgtggctcacggcggcgaggctcgacggcgactcgtgcctgagcgactgccagaaggtggagggcggcggcgagatgcgcatcgtcgacaagattggtgacctcggcaagatgtgctccgtcgccatgtccctcgccgatgcttctcatggtaaccacaccgcgtccgccgccgccgcctgagaggataattaagacgtgcaagatgtgctggatcggatcggccggccgccgcctccttaataatctgttatatgctcccgctgtggcatttcttgaacggattggagtgtctttgcgctaaaaaaaaaaaaaacagggcggccggagcaaaaaaaaaaaaaacagggcggccgg

SEQ ID NO: 176491 - DNA, 157 bp, Zea mays
  Clone ID: MRT4577_92552C.1
ggagccatcggcctacacacccataacatgttaaagccaaggcgcccccccattcaaggacgaaagcggggtccgtctgcggaacgagggttctggcaacactgtgccggctaggggtctgatatgcacacatcctaagggccacatggggagaaaa

SEQ ID NO: 176492 - DNA, 438 bp, Zea mays
  Clone ID: MRT4577_92553C.1
gggccccggtaaagacaaatcccatttattcagggccattcccagggtccccaaagaaaaagccggtggcccgggcatatcgacccatctgaaccaggggggtcagaggggggtaaaaattcttgctggaaggggcctaggggtttatacccgaacacgacacacacaagtccacacaggccatgcccgctcggaagcccaagcgcgtaaatgcttggggggggggttgttggcggtttcggggccctcgggggcgggggggggggccttaaaaaggggcgggggcgtcggggtttgcatgagcgcgagcgcccccttaaactgggcccagggctgttccaaggggccgttgtagcccacggacatgcggacaaggcccggggagatgcccccccgcgcgcgggccttgggggggatttccctgctggggctgctgcc

SEQ ID NO: 176493 - DNA, 288 bp, Zea mays
  Clone ID: MRT4577_92554C.1
ttttccctccttttttgtgctgtttttgttttttttgggttttttttttgtacggaggttgcttaacccacacaagggaaaaaaaacacaggcactgtccttacgggaaggctgcaagaaccggttgtgtgcagccaacttgcagcccgaaggaaatcgccggagcgggagaaagccaaggaatttttggggcccgaactatcatgggcaagggtggacgggaccacggcctttatgaacacattatcagacctggtttgtggggccaagagccgggaccagctggca

SEQ ID NO: 176494 - DNA, 313 bp, Zea mays
  Clone ID: MRT4577_92555C.1
gcgtacctcgacacacgtcaatgcatattgaacatcgctgtctgaaatctggtaatggatgacgaacctgacactgcatgatacgaagcacaaagctcaatatggatagctaaccttggatgtgcccttcattaaagatactactgcaggtgtttagattaagggtctgacttgctatgtgatatgatttgcctgccaaccaatcaacccagtagcttgcaatatttaaaggtctgtttgttgtaaaatttgggactgtgtttaccaatggagtttgatattcactcaaaggtatggtatgtgtgaggttttt

SEQ ID NO: 176495 - DNA, 193 bp, Zea mays
  Clone ID: MRT4577_92556C.1
cttattaattgttgctttacatttcacttcgcacacatcaccgtttaatacattttttgacctttcttctccataattaattctcagcaccgagatgccttgggtatttatacttaaacccaccatttttttgaaggggggtgaataataaaaacaggggatgcccttttgggcaccccacagccaggaaaac

SEQ ID NO: 176496 - DNA, 503 bp, Zea mays
  unsure (1)..(503): unsure at all n locations
  Clone ID: MRT4577_92557C.1
gggnattcacactttctctagaatagcttgttatgcataagtgattactactccctctgttctaaaatattagtcattccaagtttcttggagagtcaaaagtttttaaagtttgaccaaaattatagtaagaatcataaagatttatgacatggaatagatatagtatgaaaatatatttaatggagaatctaatggtatatatttgatatcgtaaatgttattacttcattatatgaatttggttaaatttgaaaaaactttgactcttcaaaaatcccagaatgacttatattttgggacagaggaagtatcgcagtgttctagattgaactagagatacaaagttaatctcagttcctatgtttttttatcctaattttgtatctccgatgttcggatgaatttgtttgtgatgttcaaatactgtaacttaaatggcttggcacggctttgatcagtacatctgtagaaaaaactgtaataaagtaataacagtgtgg

SEQ ID NO: 176497 - DNA, 301 bp, Zea mays
  unsure (1)..(301): unsure at all n locations
  Clone ID: MRT4577_92558C.1
gaaacatatntagaggcaagcatcaaacgtattcatgatttggcatacattctgggatagtacgcacacacaacacaaccggttcattattaaaccaacactgacacgactcatgacacgaacagcagatactttgacaacctccatatggagagggggcaccagacgacgcaagcgcatatgcagcttaaacgacccatgacttacttgccaccacggagacggagccccatgggggagggggctttccttttgaattttgaaagcggctagggtgcggccatcctccagctgtttgccg

SEQ ID NO: 176498 - DNA, 149 bp, Zea mays
  Clone ID: MRT4577_92559C.1
taaaagatccggacgcgcgcggacgtaagctcggaattcggctcgaggtctttgacatggaatctgggagctccacgccgcgcagggctcctgctgtgagcctgttacctgggcatccacatagcacaatccggtggctcctcttgggc

SEQ ID NO: 176499 - DNA, 461 bp, Zea mays
  unsure (1)..(461): unsure at all n locations
  Clone ID: MRT4577_9255C.1
ctgaggaccgcaagcngagacactcctaangcagnnccggggggggccgcttttgtaaacaacttgtaagcttgaagagtctgattgtccacgcctatcctcttgccgtatcttatttagatgtctgtgagtgacgagaaatatatgatgttgcaagaaaatttattagtgataagcttgtaagagaattttaagctaatgaccttataaccataatgacaatctaaatgttctgtgttttgagagggatatatgaattgtctgaaggaaagtgctctattaacaaatagtggtcagatgcagggtggatgcatagacaagttggatttggaagtggtctgaaaagacaagtccaatatacttgataagaaattgcaatttgggtctggggcaaaggggctctcagctctttggttactagggaggtatctggaaatggtttcttttggtaaccggaattg

SEQ ID NO: 176500 - DNA, 227 bp, Zea mays
  unsure (1)..(227): unsure at all n locations
  Clone ID: MRT4577_92560C.1
ctttatttaccccctcctctgccattccctccctctcccctcaacccagcgccggggtggccggcggcactagggtttctcctccccggggagccccaaaccatccccgaagcttaagagaatagcgccgaaaccataagcgacggtaaggactcgctcgacctatacgtcatgggcaccgncaacatgaaaagagacgagctcaacgaggggggggggggggaact

SEQ ID NO: 176501 - DNA, 157 bp, Zea mays
  Clone ID: MRT4577_92561C.1
ctccatcgcccgtcactcggccctgagacgggccacgcacgtgtcctgcgaggccagacttctcggtctctacgccggcacttcgcaacgcccgtacccagtgtccgttcatccagaccagttgctgggcctggcagcctctgcgtatgtcgcacac

SEQ ID NO: 176502 - DNA, 1039 bp, Zea mays
  Clone ID: MRT4577_92562C.1
catattttccataaccagccacaatatgatgagcaccatgattcgtccccagttttggtgtcaaagtatcatcgatgggattgctcaagatgtcttgatagtgtggaagtttcaggccataggccaacactcggaaaatgtttctatgcagcagaatggaatgaatgatggctgctctatttcaattgttcggattttgcctaatagtgttgattccagaagactgttttcttgcacacagcaatcatctcaagggaatgatcgattgaccctttcaaagactgcccaagaatgcaattcaaaatgcagttctcctggcaacaaagcaattactgcgatgaatgttccagtagctgaagaaaatgttccagaggcactcgttgatacgagggttccatctatagaagttttacaggcctctcccaatagtattgatttgtcagcaaacatcttgaatgctgtctcgaagaatgtccgcgatttacctgatgatgttgaagaaaatggcacacagaatccacacagtctaaaaccttgtgtggcgccaaatgaagatgagaataacatagctaatgatgacctcaatgagcctaatgtttgtaaaccagtatctgggcacaaaagcaaacaagtctgcaacatgggtccacgccgagcatcgtcaaaaagaaatgttgaatctgatggtaagaggaaaaggaataaatctactaaactgcctggtatttcagatctcaaattttgtcagagaaagccaaaaaaagacaaggctgttatcagaactcataggttctgaacaggtaggggtttctgcagatgccgttcaagtggaccatactaacagtgttgatctctgtgagggtggtaaaagaaaaatgcaccttgaggttggaaaaggtaatgacactactaatcagcaagtggacgaaatccagtcaagagctgtcaagaacaaggcaaaatacacaggagtagacaagttagaagatggatcctctctaatgaactggctgaaaagcactaataagaaagttagaac

SEQ ID NO: 176503 - DNA, 103 bp, Zea mays
  Clone ID: MRT4577_92563C.1
cccacacggccgggcggacgttaggttaaggattgactttgcggcattcccatctatttctattctatttaggcgaactaccagtgtggtcttatcaacacaa

SEQ ID NO: 176504 - DNA, 715 bp, Zea mays
  Clone ID: MRT4577_92564C.1
tttaaaaaatctattaatagacactaattatatggtataaaaaaaaaaaaaaaaaaaaaaaaaaaaaaaaaaaaaaaaaaaaaaaaaaaaaaaaaaaaaaaaaaaaaaaaaaaaaaaaaaaaaaaaaaaaaaaaaaaaaaaaaaaatttttgggccaaagttttggggggaaaatttccccccccgggggcccgccgggcccccccccccggatttaaattttggggaaactttttttttaaccccttttttgggggcccccgcccccccagtttgggcggggggtttgacggaaatttttttttcccctttcaaaaaagggttttgttttggaagggttcccttcccgggggccccccccgggacctttcggggttaaacccttttgggccaaaggggggggggtttagggggttcccttttcccaaaagccttttttttggggggggcctggcccttcccttgaatcgggattttgggtcccccgggggccttcaaaaaaacggccccctttggaagggcggttcccgggaaaaggcccccgggggttttttccttgttgccaaacgggcccctttcccaggggttttggggggaattgggattttttttggggtttaccttttagagcaaatgccccaaatttttaattttttttccaaggtggggggaaatcttattttttatgtttcccccattttttttttttgggggg

SEQ ID NO: 176505 - DNA, 233 bp, Zea mays
  Clone ID: MRT4577_92565C.1
tggctatacggtgcacgggaggcaacacagggggggcttttccaccgagggtgagagagcaaaagaagcacccatctcgactgtctgtcaccaccaccacagccagtccgctcccccggcgtatggccgcaaccacttgtgcaagatcttctgtcgcgccaacaagaactactctctgggctttcgctacgacaccttcgtgctggcccctgtcgaccccaaggactaccacc

SEQ ID NO: 176506 - DNA, 458 bp, Zea mays
  Clone ID: MRT4577_92566C.1
attcctctctggcctcaatgtcgacattgtttactaatagaggcaccggatggtttactgacttgtgaatgacactggccaagagagcgacctgccaatcacactggggtatagtgcgaggctgtcatgcgtagagggtggggacgtgacttccagccggctggcctggtgacagagggaggattgtaagctgcacttgcatagtggcaacagcgatcccaggtacagagcgaataccgtgctcacaacatactttgaaacggatatctcatcaatcctgctcttggagatggaggaccagatcctttacctctctgagcttatcaagttcaggcagcttgctggatttccaagacagctgctgtgacctcttgcatatgtcaaagatcctgcatatgttagctgaagatgagcatatactgaagtctcaatgctggatggcaacaacaaccgttaga

SEQ ID NO: 176507 - DNA, 202 bp, Zea mays
  unsure (1)..(202): unsure at all n locations
  Clone ID: MRT4577_92567C.1
ccgaaccccaggaccgacccacacccacgccagcggaaccagctcacgactangcaccagcccgaacgcacaaagcggcttgcgggagggggaaccacgcagaaacccgaggcagaacacccatcggcccgataaccgccatcaacaaggctatggaaccaaggatgctagcgcaaactccgcaaaaaggaaaacaggacct

SEQ ID NO: 176508 - DNA, 258 bp, Zea mays
  Clone ID: MRT4577_92568C.1
gggggggggtttacggattttaaccggaaacctttttgggaaaacaaaacaaacaaatttttttcgaaaagattcgaactggttaaaaaacccaaaatgcatttttttggattggggttttttattaactaatggaaaaaacagttaattcgccataatttttttttagggaaaaaaaaaaaaaagggcccctgggccccgaatgattatttggcttatgaactttttaagaacaataccaaaggggttaaaaagagg

SEQ ID NO: 176509 - DNA, 400 bp, Zea mays
  Clone ID: MRT4577_92569C.1
tgagctcactgctctgtggccggccgtcgtcctttttttttttttgagaaaacatgactgggttcagaatcattgccagagtagaaactataaactatcgtccactctagcatgcgagctacgggtcctcatatacgtccatgtccatggggacagcaaaacttatcgtgtgacaagctgaaagaagctcagctgcaacaactagctaaagctaactaacgcgggacacaagcatacagcatgggctaaacttacttatgcctgcatcaccgcatgcatggaagggatggaccagaagcactgggtcttaagggtatatattccagctacccgcccgcgggcggacggtcaccataggcatacctaccacaccatgttgagctgtgacgcgaccaggact

SEQ ID NO: 176510 - DNA, 154 bp, Zea mays
  Clone ID: MRT4577_9256C.1
ctcaaaggaacaaaagtttactactttcaattaatattagaaaaatcggaatggaaagcaaattctaacgccaactaaacttaaaaacatgaaaatagatggcctcttccaagggccgtatcccacaacgggggcatcccagcacctccaagca

SEQ ID NO: 176511 - DNA, 598 bp, Zea mays
  unsure (1)..(598): unsure at all n locations
  Clone ID: MRT4577_92570C.1
aaaaaaaaaaaaaaaaaaaaaaaaaaaaaaaaaaaaaaaaaaaggtctcaccctttctctctcctcgaccctcccgacgcggcaaagcaaaaacacaaggaggagaggagggagagaaggaagaaggcgaggccaaaaatcccctccccctccccaaatcctagcccaataatctctcaatcaggggattcttaggtctgatcaagtcggaggattcggcagggcgcagccatgaacgagaaggcgtccgtctccaaggagctcaacgccaagcacaagaagatattggaaggtcttctacggcatcctgagaatagagaatgcgcagactgcaagtcaaagggtcctcgatgggcaagtgtgaatctaggtaagatctgccaccctggatacatggctgccagagcaagttgcatttattcaatcaatgggaaacgaaaaagcaaatagctattgggaagcagagctgcctcctaactacgatagggttggaatagagaatttcatccgtgcaaaatattaggacaagagatgggtaccaaggaatggaacatnaaaatcttcgtccagggtncgagaagagaagagccaagagtct

SEQ ID NO: 176512 - DNA, 1928 bp, Zea mays
  Clone ID: MRT4577_92571C.1
gggagacagtgcaagcgagcgaggaagctagcgagattgcgagaaggtcaatccgccaagagaagagacccacggcacagacctctctcccctgtctctttcttcctctgtgctcgaccctcccgacgcggaaaaaaaagggaggagaggagggagaaagggaagaggaggccgaaatctcctccccctttccaaatcctggctcaataatctctccatcaggggatcctaaggctgatcactgatcaggtcggaggactcggcgggcgcagccatgaacgagaaggcgtccgtctccaaggagctcaacgccaagcacaagaagatattggaaggtcttcttcggcttcctgagaatagagaatgtgcagactgcaagtcaaagggtcctcgatgggcaagtgttaatcttgggatctttatatgtatgacatgttctggaattcatagaagcctgggggtgcacatatctaaggtaagatctgctaccctggatacatggctgccagagcaagttgcatttatccaatcaatgggaaacgaaaaagcaaatagccattgggaagcagagctgcctcctaactatgatagggttgggatagagaattttatccgtgcaaaatatgaggacaagagatgggtaccgaggaatggaacattgcgaccttcctccggtgttcgagatgataagagccaagagtctccagctagtgctaataggagtggacatcatagatcttcatttgagcaaaaccgagcttcaccagctcttccgagcaaagttgcacctgtagcttcaaggataccctctcaggcatcacctcagcccccaaaggtagaaccaccagttcctaaggtggtttcacctcctcagccacaaaaatctcctgccaaagttgaggcaacaccccctaaagttgagaagccatcagttgcgccgcctcctaaagttgattatgctactgatctctttaacatgttatcaatggatggaacaacagagaaagagtcagagtcatctccaaacgatgataatgcctgggatggcttccagtctgcacaaccagtacctagctcggaggaaaaagattctgccaaaccagcagaaagcatgacccagtctacacctggaatagaagacttatttaaagattcgccagttgtgtcattatcctcagctccagctgtttcccaagtaaatgcaaagaatgatatcatgagtttgtttgagaagtccaatatggcatcaccattcgctgtccaacagcagcagctggcgtttatgtctcagcagcaagctcttctaatggctgctcttaaagctggaaattcaccacaaatagttccagggaatgccaatcaactaaacactaacgtttctaatccccctcttggaaccttgcctttccaaaactggacaaatcttggctatcaaaatcctgggttgactctagcagcagcacagaatggtgccaccaaggtttcgaacaacaatcaagacctctcttctggtacctttggttttggcacacctgggatgcacaacattactccagctgtcccagcaaatggtgccacggcagcaggtgctagcaacaacggcactgcatcaactgcctcttccactctcccctcacaatctggcaaagattacgatttttcctcgttaactcaaggatttttcaccaagcgatgagtgcctagtgggcttgaaagccaaacggatcaccgggggagcttgcacatgctttatttcgaggcagattttattctggtggatatatatatagttgtcacatgaccttgtagctgtcagacaataagagtggaaatatgcggctaaatagctcatgttgtttgtacaagtgaagaattccttgccgttttatgtcaacggttttgactcgaggactacgccttgttcagct

SEQ ID NO: 176513 - DNA, 2221 bp, Zea mays
  unsure (1)..(2221): unsure at all n locations
  Clone ID: MRT4577_92572C.1
attgggtacctcgaggccggccgggaggtcaatccgccaagagaagagacccacggcacagatccctctcccctgtctctctctttctctctcctcgaccctcccgacgcgaaaaacaaaataccagggaggagaggagggagagaaggaagaagacgaggccgaaatctcctccccctccccaaatcctagcccaataatctctccatcaggggatccttaggctgtgatcaggtcggaggactcggcagggcgcagccatgaacgagaaggcgtccgtctccaaggagctcaacgccaagcacaagaagatattggaaggtcttctacggcatcctgagaatagagaatgcgcagactgcaagtcaaagggtcctcgatgggcaagtgtgaatctaggtatctttatatgcatgacatgttctggcattcatagaagcctgggggtgcacatatctaaggtaagatctgctaccctggatacatggctgccagagcaagttgcatttatccaatcaatgggaaacgaaaaagcaaatagccattgggaagcagagctgcctcctaactatgatagggttgggatagagaatttcatccgtgcaaaatatgaggacaagagatgggtaccgaggaatggaacattgcgaccttcctccggtgttcgagatgagaagagccaagagtctccagctagtgctaataggagtggacatcatagatcttcgtttgagcaaaaccgtgcttcaccagctcttccgagcaaagttgcacatgtagcttcaaggataccctctcaggcatcacctcaggccccaaaggtagaaccaccagttcctaaggtggtttcacctcctcagccacaaaaatctcttgccaaagttgaggcaacaccccctaaagttgagaagccatcagttgcgccgcctcctaaagttgattatgctactgatctctttaacatgttatcaatggatggaacaacagagaaagagtcagagtcatctccaaacgatgataatgcctgggatggcttccagtctgcacaaccagtacctagctcggaggaaaaagattctgccaaaccagcagaaagcatgacccagtctacatctggaatagaagacttatttaaagattcgccagttgtgtcattatcctcagctccagctgtttcccaagtaaatgcaaagaatgatatcatgagtttgtttgagaagtccaatatggcatcaccattcgctgtccaacagcagcagctggcgtttatgtctcagcagcaagctcttctaatggctgctcttaaagctggaaattcaccacaaatagttccagggaatgccaatcaactaaacactaacgtttctaatccccctcttggaaccttgcctttccaaaactggacaaatcttggctatcaaaatcctgggttgactctagcagcagcacagaatggtgccaccaaggtttcgaacaacaatcaagacctctcttctggtacctttggtttgggcacacctgggatgcacaacattactccagctgtcccagcaaatggtgccacggcagcaggtgctagcaacaacgacactgcatcaactgcctcttccactctcccctcacaatctggcaaagattacgatttttcctcgttaactcaaggatttttcaccaagcgatgagtgcctagtgggcttggaagccaaacagattacctggacatcatgttggacgaggcatattgatttagggagcacaaggagcttgcacatgctttatttcgaggcagattttattctggtggatatatatatagttgtcacatgactttgtagctgtcagacaataagagtggaaatatgcggctaaatagctcatgttgtttgtacaagtgaagaattccttgccgttttatgtcaacggttttgactcgaggactacgccttgttcagctatacagatactggcagacccagtactggggggggggggggggggctgaggatactgattccagattattttaaactgtactgtacaccgacaattggatttttatttgtttttaacatttgtgtactgaggcgacctcttcatggcattgaacaaagcctactcttctaagatttcatatacttgtcaccattgaaacattttttttatcaggcatcacatggagaaatcacagttcaaaaaaaaanaaaaaaaaaaaaaacaaaaa

SEQ ID NO: 176514 - DNA, 2299 bp, Zea mays
  Clone ID: MRT4577_92573C.1
ttgggtacctcggggtagcccgcgggcggaaattactctgctcataaacaatggaaaattgagagagcgagagagaggaagctagcgagaaggtcaagccgcgaagagaagagacgcacgtcacagatccctctccactgtctcaccctttctctctcctcgaccctcccgacgcggcaaagcaaaaacacaaggaggagaggagggagagaaggaagaaggcgaggccaaaaatcccctccccctccccaaatcctagcccaataatctctcaatcaggggattcttaggtctgatcaagtcggaggattcggcagggcgcagccatgaacgagaaggcgtccgtctccaaggagctcaacgccaagcacaagaagatattggaaggtcttctacggcatcctgagaatagagaatgcgcagactgcaagtcaaagggtcctcgatgggcaagtgtgaatctaggtatctttatatgcatgacatgttctggcattcatagaagcctgggggtgcacatatctaaggtaagatctgccaccctggatacatggctgccagagcaagttgcatttattcaatcaatgggaaacgaaaaagcaaatagctattgggaagcagagctgcctcctaactacgatagggttggaatagagaatttcatccgtgcaaaatatgaggacaagagatgggtaccaaggaatggaacatcaaaatcttcgtccagtgttcgagatgagaagagccaagagtctccggctagtgctaataggagtggacatggtcatagatcttcatttgagcaaaaccgtgcttcaccagctcttccgagcaaagttgcacatgcagcttcaaggatatcctctcaggcatcacctcagcccccgaaggtagaaacaccagttccaaaggtggttttacctcctcagtcacagaaatcccccgccaaagttgatgcaacaccgcctaaagttgagaagccatcggttacaccacctcctaaagttgattatgccactgatctctttaacatgttgtcaatggatggaacaacagagaaagagtcagcgtcatcttcaaacgacgataatggctgggatggcttccagtctgcacaaccagtacctagttcagagaaaaaagattctgccaaaccagcagaaagcaagacccagtctacatctggaatggaagacttatttaaagactcaccagctgtgccattatcctcagctccagctgtttcccaagtaaacgctaagaatgatatcatgagtttgtttgagaagtccaatatggtatcacctttcgctgcccatcaacagcagctggcgctcatgtctcagcagcaagctcttctaatggctgctctcaaagctggaaatgcaccacaaatgatgattccagggactgccaatcagctaaatgctaacggaaccttgcctttccaaaactggacaaatctttatcaaaatcctgggtcgactccagcagcagcacagaatggtgccaccaaggttgctaacaacaatcaggacttctcttctggtaccttcggttttggcacacctggggtgtacaacattagcccaactgtcccagcaaatggggccacgacagcaggtgctatcaacaacggcactgcatcaactgcctcttctactctcccctcacaatctggcaaagactatgatttttcgtccttaactcaaggatttttcaccaaacgatgagcgcctagtgagcttgaaaaccaaacagaccacaggatcatgttggacgaggcatattgatttagggagcacaaggggcttacacatgcttatttcgaggcagattttcttctggtggatatattgttgtttcatgaccttgtagctgtcggacaataagagtggaaatatgccgcaaaatagctttgttgtttctaaaagcgaagaatacattgccggttatgtcaacggcttttactcgaggaccaccttgtcagttatacaagtctaatgcagtcttttcactatgttggtcttgatttatctacgacgtcgatactgattacagattgttttgtattgtattttacgacaattggattttatttgtttctacatttgtatattgtttgtgagatgggagaaacctcttcaaggcgttgaaccaaacgtacttttccaacatttcatatatatcttaataattacatttaccttgttctctcgtgcaaaaactaatgcagtcttttccctaaaaaaaaaaaaaaaaaaaaaaaaaaaaaaaaaaaaaaaaaaaaaaaaaaaaa

SEQ ID NO: 176515 - DNA, 627 bp, Zea mays
  Clone ID: MRT4577_92574C.1
ggggcttttaaaaagtgctgggaggggagtataatcggtgggagggaggcggtagaggcctcaatgtcggggctacaagggcttatggcccaagtcaaaggtcatacctagatgatgttatgagactgcttcgtccgtcctgactgatcaaagcgacttgtgctgtggcacccttgttatactcgtttgcggcagtggtgttacaccctgcaacgctacttttaatctcatcactggtggccattttgttgtcctgtttgcgtctattactttacctgcccgagttggccccaatggccctattggcgatgtacccgatactgtcctcattggccttctcaacgtctgttacgcccacagccatgccctctacagcgcttgtttccatctgcttccctgtgtcaatattaccagagctcttagcctcctcgtcgctatagctattctttttagttacagcgtttgcgatgttgttcgctaattggcgactacctcgaccactatcagtagctgctacggcagccgccctccaagtaggccctttagcctacctattcccggccatcatatttattcgtgcttttcgggtgtcgttccaaattgttatcttctggtgtgctatcgtgg

SEQ ID NO: 176516 - DNA, 409 bp, Zea mays
  Clone ID: MRT4577_92575C.1
cctggccacccaattcatcagctcaacacgatccagaggggggccagctcatccagacaacgcctgccgcgtgtgcgtatagcaagaaagagggagaaccgtcgccgtacgtcctcgccagtacaagaaatggccctgcggaaagccgcgcgcgtcgccgatgtgcccaccctggtcgtggtggtggcccccggggggggggcagttgccaaggcgaggagcgccgcggctgtgggcggccggatctcggggaacgggcaccgtcgcaaggggacgaacgcgcttgcgtgggaagacccgggtctgcggggtgtgggcgagaacacggtcccgtccttaaacgacgccgggcgcttgcccggcgactacggctaaggttgacctgcatatcaccacggaccggggccct

SEQ ID NO: 176517 - DNA, 779 bp, Zea mays
  unsure (1)..(779): unsure at all n locations
  Clone ID: MRT4577_92576C.1
aattcggcacgaggccgacgcgaaaaataccagggaggagaggagggagtaagggaagaggaggccgaaatctcctcccctttccaaatcctggcccaataatctctccatcaggggatcctaaggctgatcaggtcggaggactcggcgggcgcagccatgaacgagaaggcgtccgtctccaaggagctcaacgccaagcacaagaagtgagttgacgcgaagtggcagatccgagctctgttccgttcctttccgttttgctaagggccatgtgggaaccaaggagccgacgctttactgttggtgatgtttacggctttgctgaattcatcagacctattcgaattacgagtaggcagattgatccccgaaatttctaactaatattggaaggtcttcttcggcttcctgagaatagagaatgtgcagactgcaagtcaaagggtcctcgatgggcaagtgttaatcttgggatctttatatgtatgacatgttctggaattcatagaagcctgggggtgcacatatctaaggtaagatctgctaccctggatacatggctgccagagcaagttgcatttatccaatcaatgggaaacgaaaaagcaaatagccattgggaagcagagctgcctcctaactatgatagggttgggatagagaatttcatccgtgcaaaatatgaggacaagagatgggtaccgaggaatggnacattgcgaccttcctncggtgttcgagatgagaagagccaagagtctccagctagtgctaat

SEQ ID NO: 176518 - DNA, 2443 bp, Zea mays
  Clone ID: MRT4577_92577C.1
gggtaccctccgggtctcggccgggtacaaagcttttacagattttattatttttctctagtcgtgtatgatgattgataatgaaaaacagtacgtggctcctttttgtttagttcacaagtaaactcactagctgtctctattatcaagcttaaaactggccattttcttgacacgcatagcagtatttatgttgtgttaatcagacttctatgcatgttagccttgtttgaagcttctattctttttttaactatgactatattttcttgttccagatattggaaggtcttctacggcatcctgagaatagagaatgcgcagactgcaagtcaaagggtcctcgatgggcaagtgtgaatctaggtatctttatatgcatgacatgttctggcattcatagaagcctgggggtgcacatatctaaagtaagatctgccaccctggatacatggctgccagagcaagttgcatttattcaatgtatggattactagctgcaatgggaaacgaaaaagcaaatagctattgggaagcagagctgcctcctaactacgatagggttggaatagagaatttcatccgtgcaaaatatgaggacaagagatgggtaccaaggaatggaacatcaaaatcttcgtccagtgttcgagatgagaagagccaagagtctccggctagtgctaataggagtggacatggtcatagatcttcatttgagcaaaaccgtgcttcaccagctcttccgagcaaagttgcacatgcagcttcaaggatatcctctcaggtaaccccctcactaccaaaactttcctaagcaatagtcagttcatcattgtgaaactagcggatgtgtcttcatacatagctcttttgaagttttagcccttgttctttaactcaggctgagtaatccatattgcagaattcttaattatgaatcactttaagacatcagtaataaccacttctaatctggcatgattgcgtttgaagtaggcatcacctcagcccccgaaggtagaaacaccagttccaaaggtggttttacctcctcagtcacagaaatcccccgccaaagttgatgcaacaccgcctaaagttgaggtcccatcggttacaccacctcctaaagttgattatgccactgatctctttaacatgttgtcaatggatggaacaacagagaaagagtcagcttcatcttcaaacgacgataatggctgggatggcttccagtgtaagttattggaactattcaactgatgaattattctatttatttacgtgggcactttattgtgccttttctcacgttcttggagcaactatgttagtaagatgttgatgggtttcgatgtcacttttttttattgttgatcatggaatattaaaaaatttcagctgcacaaccagtacctagttcagagaaaaaagattctgccaaaccagcagaaagcaagacccagtctacatctggaatggaagacttatttaaagactcaccagctgtgccattatcctcagctccagctgtttcccaagtaaacgctaagaatgatatcatgagtttgtttgagaagtccaatatggtatcacctttcgctgcccatcaacagcagctggcgctcatgtctcagcagcaagctcttctaatggctgctctcaaagctggaaatgcaccacaaatgatgattccagggactgccaatcagctaaatgctaacggaaccttgcctttccaaaactggacaaatctttatcaaaattctgggtcgactccagcagcagcacagaatggtgccaccaaggttgctaacaacaatcaggacttctcttctggtaccttcggttttggcacacctggggtgtacaacattagcccaactgtcccagcaaatggggccacgacagcaggtgctatcaacaacggcactgcatcaactgcctcttctactctcccctcacaatctggcaaagactatgatttttcgtccttaactcaaggatttttcaccaaacgatgagcgcctagtgagcttgaaaaccaaacagaccacaggatcatgttggacgaggcatattgatttagggagcacaaggggcttacacatgcttatttcgaggcagattttcttctggtggatatattgttgtttcatgaccttgtagctgtcggacaataagagtggaaatatgccgcaaaatagctttgttgtttctaaaagcgaagaatacattgccggttatgtcaacggcttttactcgaggaccaccttgtcagttatacaagtctaatgcagtcttttcactatgttggtcttgatttatctacgacgtcgatactgattacagattgttttgtattgtattttacgacaattggattttatttgtttctaaaaaaaaaaaaaaaaaaaaaaaaaaagaaaaactcgagggg

SEQ ID NO: 176519 - DNA, 228 bp, Zea mays
  unsure (1)..(228): unsure at all n locations
  Clone ID: MRT4577_92578C.1
ttacaagcagctcaacctgacggcgacgactgctgatccaatgtaaagcagggggggcnagcggagccggcgcaccggcggcccgacgaccccgaccgtcctgatcgcggcgggggtggctcacgcgttccctctgttcgtggccgagactgagggcgccaacatctccggcgggcacgtcaaccctgccgagaccttatgcgccttcaggagcgggacctcaccctg

SEQ ID NO: 176520 - DNA, 651 bp, Zea mays
  Clone ID: MRT4577_92579C.1
ccctcctcgagttttttttttttctttttttttttttttttttttttttttttttttttttttttttttttttttttttttttaacaaagacctaggcccttttatattacccaaaaagtggcccccttgtttaaaaaacccaaaagggatccttgctccaaaggctccctaacccctacggggggggaaattttacaaacaaaagggaaacagaaactgtttccccccggccggagttttccccatggaaacccaacttttatttccaagtaggatgatccaaaggcgtataaattataacatttttcctttttttttttaaaggcccggaggctgcttcgttgtcaaccttaaaaacgaaaaaccctttttaccgttgtccccaatcctaaaaaataaacaaacctggactcccattaatgggcagttttttaggggggaaaaactttcaacaaaaccctcaacaaaagtttccataaagcttctttgttttttgggggacgtgcttcccaaacccacttttttttttttcgatggggggggcaagttttccaaaaccacgtatttttgggccagtcgtatcggcaatcacccttcctgatttctcaacaaaatataactttccaggttttcgagggacccctttccct

SEQ ID NO: 176521 - DNA, 357 bp, Zea mays
  Clone ID: MRT4577_9257C.1
ctctgccccgttccactagggttttgtctcaggagcctgtcgctagcttacgggtgcgggaggcaaccgttccaccggacggaatggtggatgtggaggagaccgttaacaagttacaatggaatatgcgcctccacgctgagccggaggacgacgccgccgaccttcccctcccggccctattcgatagggcgtcgcggcttcacgccctggcctccatcttacatctcgaccaggatgggatccgtacgggggttgacctgctgaggcgctacgacgacatgatgagcaagctcgaacttttctaccaaatccagaccaaggaggacttttctacagcaaatataaaggacctac

SEQ ID NO: 176522 - DNA, 619 bp, Zea mays
  Clone ID: MRT4577_92580C.1
aaaaaaaaaaaaaaaaaaccaaaaaaagagtggagaaaaaaaaaaaaaaaaaaaaaataataaaaaaaaaaaaaaaaaaaaaaaaaaaaaaaaaaaaaaaaaaaaaaaaaaaaaaaaaaaaaaaggggggccctttttaggggttctttttttttttttccgtccttgcaacgccttttttttttttttgtgccccttaatttaattcatttgcccttttttttacaccgtggtttttggaaaacccttgggtttccccattttattccttttggaaaatttccctttttccccgtttggctttttaccaaaggggcccccccctttcccctttccaaaattttgcccaccttgtttggcaattggacccccctttttaccggccctttagccccgggggttttgttttttcccccctgggtgccctttccttttcccggccccttagcccccgtttttttcgtttttttccttttttttttcccccttttcgcggtttttcccctttattttttaaatggggggttctttttgggtttcctttttttttttttccggccctcttcccccaaaaaatttgtttggggttattgtttcacttttggggcccttccccctt

SEQ ID NO: 176523 - DNA, 731 bp, Zea mays
  Clone ID: MRT4577_92581C.1
tcgttggaactctcccaggttgcccacaagagggatgcgccacgaagctcagtgtggagggttcgagggtatttctttcgccgcggccggtagagatcatggtgcagcgcatgagggaaggacagatccctccgagccaaaaggtctactgtccgtatcccaggtgctcggccttgatgtccttgggggaagtgattcatccgatgcaggagtcctcatcaaggcacacggctgctgatgctgccacgttgaggaagtgcgtgaaatgcagaggctccttctgcctgagctgtaaagtcccatggcatgatggcatgggttgctttgagtacaagatgtggtaccccctcgctcacccaggagatgccaagctgcagaacctggcaaggcagaggctgtggcgccaatgcgtgaaatgcaagcacatgatcgagcttgcggagggctgctaccacatgatctgcgtgtgcggctatgagttttgctacacctgtgggaaagaatggaagaataagaaagcaagctgctcctgcccgctgtgggatgaacgcaacatcatcagagatgaagacgacgatgacgacgaagatgatctttactagagaaggctgtttttgctgctttttttaatgatgatattcagcggctgcatggatacattgaaatgaccacctgatgttgaaattgaaactgctcatcctgtacatgttgggtactgcttaaaaaaaagg

SEQ ID NO: 176524 - DNA, 217 bp, Zea mays
  Clone ID: MRT4577_92582C.1
aacttgttacaattatatagggggccttttaaaatttttggggtggcaattctactttatttacctatcttttttttttcatacactagagcccccccccaatattcaaccacctccccaaaaaaatttctttctttcccctaagaatcaatccaccttaaaaagaaactggattgaccaaaccccctacacccctgggttttgtaaccaacccccc

SEQ ID NO: 176525 - DNA, 758 bp, Zea mays
  unsure (1)..(758): unsure at all n locations
  Clone ID: MRT4577_92583C.1
ggtacgcctgcagtttccggtccggaattcccgggtcgacccacgcgtccgagggaacctgagcgcctccgcggtcaccctggtcccctccgagcctaccctgaccccctctgcgcctgggctcatcgctgcgcgagtgggaccgcggcgcttcgtgggtggagccgcagtgctccgtgggtggagcgggcggcgctgaaggggccgggaacgcgcgcgccgagcctccggggaaggcgggagggcgcgtggggcgcgaggggcgcgggacagcatgagtcagcaacggacggcgcggagactgcccagcctgctggtggacccggcgcaggaaacggtgcgccggcgttgccgggaccccatcaacgtggaaaacctactgccatcaaaaataaggattaatctagaagaaaatgtacagtatgtgtccatgagaaaagctctgaaagtgaagaggccccggtttgatgtgtcactggtatacttaactcggaagtttatggatctcgtcagatctgcccctgggggcattcttgacttaaacaaagttgccacaaaactgggtgttcggaagaggcgagtgtatgacatcaccaatgtcttggatggcatcgaactggtggaaaagaaatctaagaaccacattcggtggataggatctgacctgaacnactttggggccgcaccccagcagaagaagctgcaggcagagctctccgacctgtcggccatggaagacgccttggacgagttgatta

SEQ ID NO: 176526 - DNA, 450 bp, Zea mays
  Clone ID: MRT4577_92584C.1
atgtctgcttttctatcggaattctattagagttgggagcatacggattgattctggtgaatattgaattgttaccgaatgctcactatctattcttcccttggtaggtaatagtaaggagcgatgcaaataatctatgctggtacaacttcttttgtacaacgaaattttaaaaaataatagcctactacttagtagatcacatgagtttcataattataggaattgattccataatcaacattgcactacatggagctattttacaaatataatctgatggatttattaagggctaaactttttttcttggatgaaactggtagagatagaaagcatgcttgattattctccaagaactggcgaagaataatctattccaacgccataaaatttttaccatggtaaaggagcttgttcatggcattatctatggcttgccggcaatga

SEQ ID NO: 176527 - DNA, 500 bp, Zea mays
  Clone ID: MRT4577_92585C.1
aactgtcgtgacaacgtatggacatatacctagttgtttaagatgaccctagaactcattcagtttgatgccatgtttgatccttatgttaaatgtcggtctccaccaaagatacttgtcatcttgaatcctcgatctggacatggtagatctagcaaagtttttcatggaaaagtggaacccatatttaaggtatgtctagctgagtagaagcatgcatcttatctcaagattggatctgtgttgtcgcttctactaggaactttggtatgatctagtcatgcttcccaagatcatatttagtcgggtgtttcatacaacctaagatgtttataaatgagttgtagacaaatttataagctttctagaaattcttggatcacctcttttggatgcctaaaattctagttatggagttttgaagtgtgtagtcgagatatgtccaaatttgacagcattatcatttaatactgattgaccttttaagtgtctaatctcat

SEQ ID NO: 176528 - DNA, 389 bp, Zea mays
  Clone ID: MRT4577_92586C.1
ggagcagcagcagagtacgcacgtacagcgccacccacaccacacccatggcaaagcaggacaaggcggcgtccggcgggaacggcggcggcgatggggcggcggcgccggctggggagcagctggtgataagggcgccggtgcactgcgatggctgcggcaggaagctgcgccgctcactccagcgcctcgagggtaagaaagagcaagcaagcaaacgaccggccgcgtgcgcgcagctatactttgtgcctagctatctccttgtctctgagctatgttactgcactgaacgagtgagtaatggcaaggtttggagaggttgaccgtggacagccgggccgacacggtggtcgtgaggggccgcggggcggtggagaacgcggcgg

SEQ ID NO: 176529 - DNA, 1627 bp, Zea mays
  Clone ID: MRT4577_92587C.1
aattctttacaaccagtccatggagagattcatgccgatgtacgatgaccgctcggagctggcgccgagagacgtggttgcgaggagcatagacgaccagctgaagaaacgaggcgaaaagtatgtcctcctggacatcagccacagaccaagaaccttgtctcttgcccccttccctctcttccgcctccgattgagtggctcaccttctttcccagccagcacgagcttgcaagcaagcgagctcctgagatttcagctcgcttctcctccagaggtcgagcagaccagactcctccgaccgaagctctaccacttcccagttagcctgtccaggaactgcttggccggagatccaaacaaacctctgtgttggggttctccggggttccttgcgctggagggaggtttcgttctcgctggccatggtttggctgagaagcagcagcggcagcatcttgatgccaaatctctgagctttatgaagatcgccactcacctgcgccgctcctgcttcctccactccttctcggttgtcttcctctactggttttatgtgatctcataacttgccctcccccggatccgccattcccccgtgccctctctccgtcccctcaaccttctccctcctttcttgcttccctcaacaatcgccaaataacagcactagcggcagcggtagaggatcttttcgaggtaagctaggccggccggttccctgcgggaaaaagaaaagaaaaggaccctgtcttgatgtcgtcgtcgtcgctgtctccgacggcggggaggacgtccgggtcggacggcgactcggcggcggacacgcacaggcgcgagaaacgccggctgtcgaaccgcgagtcggcgcggcggtcccggctccggaagcagcagcacctggacgagctggtgcaggaggtggcgcgcctgcaggccgacaacgcgcgcgtggcggcccgcgccgccgacatcgcgtcccagtacacccgcgtcgagcaggagaacaccgtgctccgggcccgcgccgccgagctcggcgagccgcctccgctccgtcaacgaggtgctccgcctcgtcgaggagttcagcggcgtcgccatggacatccaggaggagatgccggcggacgacccgctgctgcgtccctggcagctgccctacccggctgccgccatgcccatcggcgccccgcacatgctccactactgatgattgcctccaccaaccacaccaccatacatctgaggctgtcagctggggctggttggcaacaagacaagaagaattggctgcctctcaacaacattcacatctactacctacctggctgctttgagaattacagggcctctactatctgctgctgtgttaaatctacctcctggtttctccaataattgtcgctgttctgtactcttctcttctcttatgttctgtctgtcagtgtgtatgagatgatgctcatcttatgttatgtaaggcttaatcatgtgtctagttgtactttctgtcttgtaatgttatcagttatatgaataataagtgttatgtaagctcctacgaaaaaaaaaaaaaaaaaaaaaaaaaaaaaaaaaaaagaaaaaaaaaaaaaaaaaagcggcc

SEQ ID NO: 176530 - DNA, 346 bp, Zea mays
  Clone ID: MRT4577_92588C.1
aactcgaaaaaatcaaattttattcataaacaaaatgggtggcacaacctaccggacacaattatgcttattgtgacaggcaaattggctgcatacggctgcatactcgattaaacacgctgaccgggcgggcgttaacaaactaagatcaaatgcatactgaccaaccgggctcataaccggtgtaaatcacggggggtcggcaaaaaaaccaaacaaacggttggacagtgtgacgacggtgcttggggaccccaggaggtcaccgccccgggaccagggtttgattaatccggcactcttgccgttttctacatggaatctggtgtctcctttgccctccgaa

SEQ ID NO: 176531 - DNA, 340 bp, Zea mays
  Clone ID: MRT4577_92589C.1
gtgcggcgctcgagccggccgggctgggctcccgtttcttccctagcctccccctacccgtcgcgctgttcacgttcaacccttgcagctccctctcccttggtcgcgcagtcgccattcacgaccccgaccccgacccccgacccccgtccccctctctgaaatcccacctctccccgtctacgcctcattcgctccagctcgcatcccacagccaagacagctagcccggcagatctcccagaaaccatctatgcaatacgacaacgcccaatattcttggtagcccaaggattctaattccgacgaacggcttctacgccccaaaaaagcccgataa

SEQ ID NO: 176532 - DNA, 821 bp, Zea mays
  Clone ID: MRT4577_9258C.1
tttttttttttttcctttttttgaagtatactgtaaacgacatgaaatattcctttaaaagatgaaattatgtaacgttgctcgagacagcctaatagctacgctacaaaagtcagtactggatatgttcataaggtccgtttgaaggtagtcaaccaaatctttttggggcgtatctacgtgcagccgtcagtcgtacggtctctgcagtggtacaattttttaggcttccagtatcacgcaaagaagttctagactacattgttatatataaaaaatacagcactggtcgaaactataggaatgacatatatgacatgggagtacttacatcatttaaaggtgtttaaggaaggagcctgtaatgctaatctttttaatctaaaacaagtactatagagactaaatgcagttgtttttatgttaccctaatgttgtgatctctcttttttaagtgaatgacaaatggtctattttttaaggatgtctggttgtcgccttgtcaaagctttcaaatgcagctgttctggttggaagggaggcttgaacatggaatttgatatatacttgtatgattgtactggcgaagttaatgctctggataacagcccactgcacagaagctcttcccatctgaacaaaccacatagactatgaagtggtcgagcaacataatcttgtccctggtatatatgttctcttgtcagtcatcaccagccttgtctgtcacgggaaagccaaagtaaatgctttctactaaagatccactaggactggtcgaagaagttgaactgttgagccaaaaatgccctagaccgatt

SEQ ID NO: 176533 - DNA, 206 bp, Zea mays
  unsure (1)..(206): unsure at all n locations
  Clone ID: MRT4577_92590C.1
agagcgcttatagcttgtcagccatggcctctcttcttcacgtctagcctcctcaagtcctgcttgtcttactcccaaatccgggcgtccacncaaaccacaccttcttccctctttttgtccaccttccctctcgtcgccttctctattcctatctgttcttccatctttttttttttctttaaccctttctacaacctgacatt

SEQ ID NO: 176534 - DNA, 231 bp, Zea mays
  Clone ID: MRT4577_92591C.1
agaaaaaaaaaaaaaaaaaaaaaaaaaaaaaaaaaaaaaaaaaaaaaagggaggacgctcaaaagagataaaaacttacatactcttgcatgcaacgtcaaaagctcttctggggggtcacccaaaaggatttcactgaccttcgctttaaagcatcttcactggtaataccttggggtacccaaatttaatcccctggcagtacatttccctttcgctaactggcaataa

SEQ ID NO: 176535 - DNA, 285 bp, Zea mays
  Clone ID: MRT4577_92592C.1
cccacgcgtccgctcacgcgtcctaaacaaaaaaaaaaaaaaaaaaaaaaaaaagggctgcctatatgcctgatcctgagtaacaagggcgctcctacgacatagatcttggtctatcaagggagctaacacaaattcactaactctttgatcaacaacttgtgaagagaataaaacgacaccatctcacaactaagttgctttgaaagtattcgctattctttcatgtgacatcacagagaaagcactcattcaagatgaactgaagaacatttatgaacaact

SEQ ID NO: 176536 - DNA, 1220 bp, Zea mays
  Clone ID: MRT4577_92593C.1
cggacgcgtgggatcgcggtcgatcgagcgcacaagctgtcaaaaaaaatctgaacacaagcagggccgggttcgcaggcgcgcgtcgccgttgacagcaactagcatatatagctagagctagctcgatcgatctgctgtgcttacaccaccagtccaccgcttctcttgctttgccggtgtcgtcggccagcgcgcgcgctagcgctatccgatccgatccggccggccggcgacctaccgatggggttcatggacgccgaggagctggtggtgacgctggcgccggtggccgtgtactgggcgtacgcgggcatgtacgaggcgctgctggcgcgcaccacggcgctggacaagtacaggctgcactcgaggcgggacgaggagaccaagaacatcgcctcccggaaggacgtcgtcagaggggtgctcctgcagcagtgtatccaggtcgccatctccgtcgccgtcctcaagctggaaggacacggacacggacacggacacggacacggtgccgcagccgacggtctcgccgcggcgccggcggaggcggagccgttcctggtgtcggcggcgcggttcggcgtggcgatgctggtgctggacgcgtggcagtacttcatgcacaggctcatgcactccgtcccgtacatgtaccggcggttccactcgtggcaccaccgcgtggcggcgccctacgcgtacgcggcgcagtacggccaccccgtggacgccgtgctcacggagacgatgtcgggcgccgcggcctacctggcctccggcatgtccccgcgcgtcgccgcggccttcttcgtcttcgccactgtcaagggcgtcgacgaccactgtggcgtcgccgcgccgtggaacccgttccacgccgcgttccgcaacaacaccgcctaccacgacgtgcaccaccagcgcggcggcggccgccgcaacttctcccagcccttcttcgtggtctgggaccgcctgctcggcacgcacgcgccgtacgcgctcagacagagggacggcggcggtctcgaggtcaaggccttcaaggggcgtcagatgcaatagtatcttgtttcaggttggcgtctcactacgtcagcctcgttcaccgtttagctttggcttgtaccagaaatgtctgtagtgccaccgatgaccatcacatcgcatcttgtgtgataactttatgcatattattgggcacctaaacaata

SEQ ID NO: 176537 - DNA, 432 bp, Zea mays
  Clone ID: MRT4577_92594C.1
ggtacgcctgcagtaccgtccgtatcccggtcgaccccgcgtccgcgagctgctcgcgcggggagagcgggcccccgagggggccgttcccggtccgtcccccggccggtacacgggggcccgctattgctgatctatgtgacggtgtaagcaagtagtataactgtggttgataattttggatcctgttaatatgctagtacttgacatttaaaaccagggttggggggtggagtaaaatagtttttgttacatagtattgcaagttaattgagtctaaacatattatggaaatatctgaaatatatgtcgtaatatagaatttctggatgagaatggaattacaagttgttgataaaattgaaaattctcaccccatataaacaggaagtgatgtaaatggagtataatacttattatatccacattttt

SEQ ID NO: 176538 - DNA, 155 bp, Zea mays
  Clone ID: MRT4577_92595C.1
aacaaatcacattctcaccttctaaactatgcaatcttttctacacacgaataccacgtggtaggtcttctatattgtcatgtatgttcaattcactgcccattgctcaacaacatttcgactgtgataacgctagccattcccaacttaattta

SEQ ID NO: 176539 - DNA, 514 bp, Zea mays
  Clone ID: MRT4577_92596C.1
gacccaattattgctgtttactcacgacgatgtatattctcggattaaacaggcttacaactggcgattcggtcaccgtgcacacaagcataccaacaccaaacccctccggggcactcatattacgcccaaaaccacacttgacaccccggaaacagtcaagctgactttgccgggagccggacctataacgcttgatgaacatgcagggcaccagtatgagcaacatcaacaggtggggaggccattggagccggccggccgaaagcccatctctccttaagctgatggatggtacccatgtgcactgcctggccgagggtgcctttctaaacatggccccaccagcccatgaggaagctctccaccactagcctgaaccagtggaagatctttaccccgctctcgccagcgttaggcttgggccatgagctccttgtacttgtcgcgactaacgtacttcacgttagcacacttcatctgggcttcggctgcaccttcacgtgccggccga

SEQ ID NO: 176540 - DNA, 397 bp, Zea mays
  Clone ID: MRT4577_92597C.1
ctgttccgccgcctttttttttttatcatggaccattaaacccctgttaagcggacctgggtatcctggtcattggtggggtatactttataggggcccacaaaaaaaaataggtcaggcagaatcattttctacacgtatatggacatttataaaaatgcgggggtacaaaacaaatccaaagcaaaagaatggcaccttcaacaatgaagggggtatcttaagagggtattaaaaaaatggatgctcaagaaggccccaaaaaacaccttgcttgcttctgttaacccggaggagaagcgcctcaacgatttgggaatgatcattacttggggataggggcaccctaaaaatgctcaggctataaaactgagtccaagctcccaagttgttataa

SEQ ID NO: 176541 - DNA, 445 bp, Zea mays
  Clone ID: MRT4577_92598C.1
aaaaaaaaaaaaaaaaaaaaaaaaaaaaaaaaaaaaaaaaaaaaaaaaaaaaaaaaaaaaaagggaagggacaaaaacttgggggggtccaactcttttttttttccccccaattttacttcattggccttcttttaacaaacttctttttgttaaaaacccatttacttacctaacatatttttttacaccttaaaaacccctttattctccaagtccatccccatttaaacgccccttccctttaccccttttcatcatatcaccatctttaactaacatttgcaccttctccccattccgaactatttctaaatcgttagctgtctttctaaaagatccattcttaccctttcttgcatgctaccccacacctcttctatattttacccaaatttatattcactgcccgtcgttttactacttcatgtctataaaaacccct

SEQ ID NO: 176542 - DNA, 2379 bp, Zea mays
  Clone ID: MRT4577_92599C.1
aattcggcacgaggggcgtcaccacgcctccgccctcgccctccccgtcccccgccaatctcacagcggactctcttcaccaccgcgtcgaagccattccccacttccccaccgcggtccccccttccccacccactagagaccgtgcccttcccccttactcggcaatctcgcagcggtgcccgccccatccccgcggatctccctgtcaccttcaaccaccttccatccctcgtgacctgttcatgccgtcgccgcctcgatcctgtggatctccctgccgcctcccacgtccgtgctcacgacctgttccgcgtccgccgtcacccccagatcgcgcgaggcccatgtccacgcagtcgtcgtcgccgccccctggccacgcgagatgccagcgccccctccacctttcgtgagcgaccccttcatctaccttcaccaccatcttcaatccgcctctgcatcaccgccaaaaccctagccacttccctgctgcccaacaatgaatccgcctccgcaccaccgccaaaactctagcaactatggcagtgaacaacattcggtttcaagtctttggcagctatgctcatggaaaatacgtctatgttgatggtgaccgatctgttctcgcagaatcagcaaaggcttgatatcattgttgttttgctttatcatttgggcatttgaagcaaagctctatggagaaaaggcagggaaatgttgtctttctcatttttgcaggctgacgaatttaatgcagtggcaagagttggggttgctgctgaccatcgtggaatcatctgcagtcgtcgtgtgtccacactccctaacatgttgagcctcttgctgatcagatcaggcttgagaaggaaaatttggttttaataagtgttcttgtctggttcgattaaagaaagattcagtaattgtcttttttaggaacatagattcttcatctgtgtataatgtatttttattatctagattgtgatagttatttcaaggcctggtgatcgtatagcttgaccattgattgatgattatctgttgtcttaaggattggtacactgtatgtgttctttggtgttggtggtagtttgctgacttctctatttatggtatcaaatatatctattgagtgttggtacttcaggtgcactatttagactattgggatcaatgctgtcagagctcataataaattggacgatatacgagaacaaggtcaattctaaaatatatgcagtattgcaatagtggatggaaacagaacaaaatagttgttccttgcaggtattgcaatatctcaaaccagataaaagtaaatttttactcaggtattttcacctatcttattacaattcatcaaggtattttcacctagcttattacaattcatcaatcttgcttcactacccatggtaacttgattattttcatgcactaactttttgacgtcctatttcttttcttttcccctttcacctcaaaacacacattttcatctcaaagcactaattaccagatacgccaatgtcatttaaattaattttcagcagtgctattattttttctgctatttgttttggaccgattaatatcttgtgtactctttttatttattcgtgggactgtaactgcaaagcttgtaactcaagtcatatgtgtcttgtgcctgttgttgtagctatggagcagaaaattcatgtgaacccactgaagatactaagcgaaacgaagtgtacacatattcagaattctagctcaagttgccctaatcaactgaggaggataaggatgtcgtggattttgagagggaggagcctgccaaatgccagaagtctgtgcaagctgatgcaaatgcgaaagaacatcagtgaagacattcttactgatttactaaggctgttggcttcttcgggaggacattatacaccacattaattctgcttgttgcgagccttccagatgtgtatgagccatgtgatgatttctttgcccttgttgatgcactactctcagacaaagcacaacttttgacactacaaccaaggttatgtatgtagctttttcgtcagacgatgacactatcatgcaaggcccactatcctctttgttgtcctctcatggatcctggtccagtggtggaggctgaggaatcagaaaggccccagatcatggccagtcatcgacgcaacggtggagcttatggctggaagtaatatgaagagtctatatttgacaaaaaatcatctaaaattaaatagtgagataagctttgaatagctgatgtaaaattatggagtaacattgtattagttgttgacaaaaaatgtgagaaatttaggtcaataataatatatgtattgtttgttttta

SEQ ID NO: 176543 - DNA, 373 bp, Zea mays
  Clone ID: MRT4577_9259C.1
aacttactatgcggggcactgaagtacatgcagatgacgaaattcatgctatttgaccttattggggtgattggatacttgaatcaggaggccattaatgctctgttggcacatgcgctgatacggaccaaatttgtttattctagaccatactgatacaatatggtaacctactcatgacggaattttggggtatggctatcgttatctaggataaacgactaggtggtattattatatgatgttcatatgaagggtggttagatcaatcttattttctggtggaacgtgtaatactgcagtgattctgggtgcataacaatatgctgcttggtcataacattaaagatgatggaactatacagggtttgat

SEQ ID NO: 176544 - DNA, 268 bp, Zea mays
  Clone ID: MRT4577_925C.1
tgcgggacggccgggagacacacgtgagcatggggacaatcgtcgccgcgcagctcgcgtacctaacatggagcccgaggtgccgaaacaaatggacacacctaagctgggatgaatactatgggcactgggacttactaaagctctccgccgcgtacgccgtcatgctgggccgccggaccagaggctacaaggtcccggacccgagcatccgactgcatcccaaccctatactggcacctaactcgctgtcagtgggcatgactgt

SEQ ID NO: 176545 - DNA, 327 bp, Zea mays
  Clone ID: MRT4577_92600C.1
agcaagcatacaggcagcaaaacggcgtgtcccccaagcagatcggaaccagcgccggcggtcctcacctccgccactcgcggaggaggattccctcctcccgccccatctcggtgggcggcggcagggtcgggccgtcgctgccgttgggctcgaggtcgggggagaatggcgagggcgagtatcccccggagacgtggcggatcgggacgccgtaggactcgtacgcgctgtagtcttcccgtcgttcgcacgctcctcgacgccaccgttcggcgtacggaggcgtaccccgccggcgtctagcgtcgtcggctgcggcggcgc

SEQ ID NO: 176546 - DNA, 346 bp, Zea mays
  Clone ID: MRT4577_92601C.1
ctatcacgggttcatctattaccacaacgctgggtacggcgcgtaaaccgcgaactcagacaatgttatttacttgggccgcagtttcacgaacggcgcactcgtgggacggcggaacgaccgggacattctgtccgatgcagccatagatgacgttgacaaggtagtctggtaccactgcgcgttctacaggctccagctacatcctgatgtacagcgttctggcggcactactacgagagctggtacattcagcgcaacatccactgaatttttcgcagtggccattgcatcttccagcgaccactgatcttcgctaggcctgacctggtggacggagatccac

SEQ ID NO: 176547 - DNA, 1829 bp, Zea mays
  Clone ID: MRT4577_92602C.1
gttttgctttatcatttgggcatttgaagcaaagctctatggagaaaaggcagggaaatgttgtctttctcatttttgcaggctgacgaatttaatgcagtggcaagagttggggttgctgctgaccatcgtggaatcatctgcagtcgtcgtgtgtccacactccctaacatgttgagcctcttgctgatcagatcaggcttgagaaggaaaatttggttttaataagtgttcttgtctggttcgattaaagaaagattcagtaattgtcttttttaggaacatagattcttcatctgtgtataatgtatttttattatctagattgtgatagttatttcaaggcctggtgatcgtatagcttgaccattgattgatgattatctgttgtcttaaggattggtacactgtatgtgttctttggtgttggtggtactttgctgacttctctatttatggtatcaaatatatctattgagtgttggtacttcaggtgcactatttagactattgggatcaatgctgtcagagctcataataaattggacgatatacgagaacaaggtcaattctaaaatatatgcagtattgcaatagtggatggaaacagaacaaaatagttgttccttgcaggtattgcaatatctcaaaccagataaaagtaaatttttactcaggtattttcacctatcttattacaattcatcaaggtattttcacctagcttattacaattcatcaatcttgcttcactacccatggtaacttgattattttcatgcactaactttttgacgtcctatttcttttcttttcccctttcacctcaaaacactcattttcatctcaaagcactaattaccagatacgccaatgtcatttaaattaattttcagcagtgctattattttttctgctatttgttttggaccgattaatattttgtgtactcttcctatttattcgtgggactgtaactgcaaagcttgtaactcaagtcatatgtgtcttgtgcctgctgttgtagctatggagcagaaaattcatgtgaacccactgaagatactaagccaaacgaagtgtacacatattcagaattctagctcaagctgccctaatcaactgaggaggataaggatgccgtggattttgagagggaggagcccgccaattgccagaagtctgtgcaagctgatgcaaatgcgacagctgccccgtctaaggctgttggcttcttcgggaggacattatacaccacattaattctgcttgttgcgagccatccagatgtgtatgagccatgtgatgatttctttgcccttgttgatgcactactctcagacaaagcacaacttttgacactacaaccaaggttatgtatgtaggtagtgtcagatagtggttacgtcgtcacctctattgcaaccatgttttgtacacaatatatgttttatatatggtgcacttggttccgtctctatttcactttttctcttaccctcttcttttcatgctttttcgtcagacgatgacactatcatgcaaggcccactatcctctttgttgtcctctcatggatcctggtccagtggtggaggctgaggaatcagaaaggccctagatcatggccagtcatcgacgcaacggtggagcttatggctggaagtaatatgaagagtctatatctgacaaaaaatcatctaaaattaaatagtgagataagctttgaatagctgatgtaaaattatggagtaacattgtattagttgttgacaaaaaatgtgagaaatttaggtcaataataatatatgtattgtttgtttatatgt

SEQ ID NO: 176548 - DNA, 302 bp, Zea mays
  Clone ID: MRT4577_92603C.1
ctaatgcgtgaccctccattaaccgtagccttaacactgctcgattgatcctggcttcaggggcacgtccgtgtcatggatcgaagattacttattaaatgtagacgaacacgcctcgaatggccactattaatgaaatacatgtactgcatgaaggacctgcgatgatacattcttctcacgtgctctaaactcaccttattcatacctaacattgcagcaccactgtcattttccttacagtcttagaagccttcacgtatgacatgtacctactcagctaagtgtacaaggcgcgcccg

SEQ ID NO: 176549 - DNA, 250 bp, Zea mays
  Clone ID: MRT4577_92604C.1
cctcgaagccggccgggccgggatcacaactcgatgaactctttgccgattctgttcacctacgacagtttctctctcgtagcgcaacatcatagcacaagcgaggaacccagtccagtcccgggaatgtagtgcttattgttcgcggttggccgcaacttcgagctggtggagggcgacacctccgccgtgcagagcattctcggcgacaagacctgacaatgactaggtgatgatgctcgactcgcaa

SEQ ID NO: 176550 - DNA, 163 bp, Zea mays
  Clone ID: MRT4577_92605C.1
gtgttgctttctaaaatactgatgtatttgggtgtggtaacatgatttcgagcgagtactgacagagggcatttgatctagctggtcttgcaaatgatgataatgttatgctttttgactggctaaaaggactgttgaaggagaagaaggcgctgattgggga

SEQ ID NO: 176551 - DNA, 250 bp, Zea mays
  Clone ID: MRT4577_92606C.1
cacgcgtctaactctcttccctctatcgggtttcgtcacgtgtgttctctcgttgtctaatgccgccatctacacttctctacttaatcatcgacatggctgtctcgcggcacgagaccggtgtacagcatggggagctcgatgaccatcgtggcgtcctccctgctccgccgctccctcctcctcctggctttcgcggcgaccgccgatgcttgcgttttcctttagctgtttggcgaggaccaattct

SEQ ID NO: 176552 - DNA, 303 bp, Zea mays
  Clone ID: MRT4577_92607C.1
gggcagcaactcaacacattaaggtgctaaagaaatgttaatagcccggcatgctaaggattcactgttctccagggacaccaaattcataatgcatgaaagatcgtaagatcctaactgggagagtgtgaaggggaacgctccccaactattggggatccacaatggaattcagggcctttttttgcaagcgttcaccctcaactgtccagaaaaacagtgaaattatcaaggcatggcctccacggggggatgcgctcacaaggcgtctagcaataaccaggagaaacacaataaaaatcc

SEQ ID NO: 176553 - DNA, 840 bp, Zea mays
  unsure (1)..(840): unsure at all n locations
  Clone ID: MRT4577_92608C.1
aggtctctcctggccggcgctcggactgtgttatttcttccggctgccgcgccctgccctctgttctgctcgccggtccgagctcacccagctcagccactcttctctactcgcctagtctgcgcgccgtcccatcccctctctgtccggccatggctgctgtgccgaggcctccttccccgcgcgcagtttttcccccgctcggagtccctcccatggcagccgctcgtccgtttccctgatgctcgccgcgcgcttctctgttgaccggcgtgatccctttctctaatgttttcctgctcgtccgtccgctgctccgtcgtcgttctcgggccgaccgtcggcagctccccggcttccgtcatgctcggcagcaagtaattcatgtcgaagcagcagctacgatcccttgcgtcagctcgccagacctacagctccatatatgtcactctcccgtatcgtcgtcgagcccgacgaacctcgttcttctctgctcgatctcgtcgaccacgaatcccggactttagacaaaaataagcgaggtctctgtgcatcgcttatcaagtactcgatcgaagacttcaatcgaagattgtcgtcattccgtgcgtcatcgaggaatcccaaggatcggatgaagacgaagctagcagcgaggtacgtgaattaaccacgcgatgcggagaaccataactgagtcgaccataagatggtgctgatgaatggaactggagatggacagacgaagcaagtatcgggacaaaggatggtcgtcaagtgatcgacgcctacanacactaacgtagtgtttatcccagngcagccccggtgcatgcaacc

SEQ ID NO: 176554 - DNA, 1089 bp, Zea mays
  Clone ID: MRT4577_92609C.1
ggccgcttttttttttttttttttctgtggaaatcttattactaaattttacatgttacatcaagttttataatgtacatgatcagagtgattacaaaaagtgattcaaaggaataactttgaactgttataaattgtttataagtttgaaatatatgctagcttaagtgaccatcctcaataagaagataaagacggggtatacttatataagaaggccgagcccaccggcacttaacaccatcaacagcagcacaaaactataacctggaataaacactacgttagtgtttgttaggtgacgtccacttgacgaccatcttttgttctgatacttgtttcatctgtccaccttcagtttcgttcatcagcaccatcttgtggtcgactcagttatggttctccacatcacgtggttaattcacgtaccgtttccacagctgacatgaatccacgagatcggtagcgattttccgattcaggcaatttgtcgagcgcttggggaatatcgcgctgctagcttcgtcttcatccgatccttgggattcctcgatgacgcacggaatgacgacgatcttcgattgaagtcttcgaccgagtacttgataagcgatgcataaggacctcgcttatttttgtctaaagtccgggattcgtggttcgacgagatcgagcagagaagaacgaggttcgccgggctcgacgacgatacgggagagtgacatgtatggagctgtaggtctggcgagctgacgcaagtgacggagacagccgtgtatggcagcagtgcgtcgacagtctatggatttgggtgttttattgaataggtgggatgcgaggagccgaacaatcacttaaacatggtcgacggcgagacctgccggaagagaatatcagcacacgacgcggcacgacgaactagcaagctgagctacggcgagcgatatcgacaacaaggccggggcgacatagactcggggctgttgcatgcacagcacgacgacgaacgacgatacttggccagatcgacgacgcgatggaaattcgggccaaacgagccgagaggacaagctgatgagcagaaaatag

SEQ ID NO: 176555 - DNA, 374 bp, Zea mays
  Clone ID: MRT4577_9260C.1
gggtggtgttttttttttggacaaaacaaaaaacccatttttcaacaaataccaaacccccgggtaaaaaaaaaaaaaaggggggaaaaaaccccgaaaggggccctggggcccctttttattaaaggtttacaaaataaacatcccaacaggggcgggggggtccccttaaaacccattgaggggtccaaaaatggccctttaaaaaagccaattgaaaatgggcccgaggaccatgggttataaatccccccagtgtttcccgagggaagggaaaagagggccccccccccccaaaaaaatacttttaatccggaaaaggcaggccgcgccccaaaaaaaaaaaagggggcgggggggcaaaaaaggggggg

SEQ ID NO: 176556 - DNA, 767 bp, Zea mays
  unsure (1)..(767): unsure at all n locations
  Clone ID: MRT4577_92610C.1
tttttttttttttttttttttttttttttttttttgcagcggaaatcttattatcaaattttataggttacaaaaattttacattattttantcggagggattacaaaagtataagtttgaaatatatgctagctcaagggaccatcctcaataagaagtatagaagaagtacttagacttataagaaggccgagcccaccggcacttaacaccatcatcagcagcacaaaactatgacctgggataaacactacgttagtgtttgttaggcgtcgatcacttgacgaccatcctttgtcccgatacttgtttcgtctgtccatctccagttccgttcatcagcaccatcttatggtcgactcagttatggttctccgcatcgtgtggttaattcacgtaccgtttccacagctgacatgaatccatgagatcagtagcgatttttccgattcaggcaatttgtcgagcgcttggggaataccgcgctgctagcttcgtcttcatccgatccttgggattcctcgatgacgcacggaatgacgacgatcttcgattgaagtcttcgaccgagtacttgataagagatgcacagggacctcacttatttttgtctaaagtccgagattcgtggtcgacgagatcgagcagagaagaacgaggttcgccgggctcgacaacgatacgggagagtgacatatatggagctgtaggtctggcgagctgacgtaagggatcgtagctgctgcttcgacatgaattacttgct

SEQ ID NO: 176557 - DNA, 145 bp, Zea mays
  Clone ID: MRT4577_92611C.1
cccacgcgtccggcacaatggtctaccttctacttcttccactaataatcaccatagtggggataaacattgatggattcacctttagcttaaaaccacccaattcctataaaaatgccccggggtcctagcccttttccaatca

SEQ ID NO: 176558 - DNA, 578 bp, Zea mays
  Clone ID: MRT4577_92612C.1
ggccgctttttttttttttttttttcttttttttttttttttttttttttttttttttttttttttttttttttttttttttaaacagcagcagggatcaggatttatacttgcacatactcagggaaaaacaaagtcacaaggatcgtttaacaccctttttccagttttaaaattaaccaaaaggggccatgccagcaacgtgggacaacagggccagctaaaaagccccaaaacaaaagggctcaaagcaaagcaaagcatagctataccagatgccaaaagattctggacatctaaacttcacaaaaaatactgaacttaagctgcaaaaaactagacttcacaaaaaataatggaaaaaattgccgggggtaggcagcacctagctggctgaaaggaaaaagttgttgttgctgcaaataagcagcagagttcaatgcacctaggtggttgaagggcaaaaactgttgttgctgaaagtaggcaacaaggtttgctagcacgagttgttgaagttgttggcccctgatgttttgggccaacaaatgccccaaaggtaaccgctgttgctgaaa

SEQ ID NO: 176559 - DNA, 346 bp, Zea mays
  Clone ID: MRT4577_92613C.1
gcaggggggaggagtacacatacaaaacataatattcaccttacattattatttaaataatttactcctccttttgccttattattatttcatacatttatatatgcactaggggttaattccagcactggaagacatattacttgcttttctaggtggaaaggattcttgcttttcacaaagcataatcagatgatttatctaatctattcacttgagtccataatttgacactcatttagggtatttagatactctggttaggaactcttgcacctttcctactttataatactatttttagggggggagatgaatgatattggctggtacaaattcatatata

SEQ ID NO: 176560 - DNA, 104 bp, Zea mays
  Clone ID: MRT4577_92614C.1
atgacaggtgcatatgatcgttgccacaaatcgaactgatgctctggacacggcgatcctgcgtccttgacgtctatatactgacgattgaaattccgctaccc

SEQ ID NO: 176561 - DNA, 753 bp, Zea mays
  Clone ID: MRT4577_92615C.1
ggccgcttttttttttttcggcggtcggaatttttataacttatgcattacatgtaaaaattatagaaacttgtacaagtcaaattcaaaggaaattatttataatatatttccacatatttatatatatacgacaaattagaaagcacactacacagagcaagagaaatctacggtaccgggctggggaagaataagcgtggtaagcagtcgtgctcctcctcccgtcctatcccctttccttccctttctttctccctcgcacaaatccttgcgcccgtctcctcccagcaacgtggaagaagaagaaaatggatgtagcagcggatcttgtgagagtatcaccaggagcaggcagcgacggtggattgtgcgatggcggcgcctccgatcgtcgctctgcagtcgcgtggagaagagctgggtggagtcgcgtggtggagagtcaagacacgaccgtcgcgtcgagggatctgacgagcggcggcgaagacgggaggcgggatggagcttcgagcggctgagccccagtcagcgccgaagaggacagatatgtggcggcggcggatggctcccacttccggcgcccgatgaactggtgaagtggaggcaggaggaggtgccgccggtgtccggtccggacgcggacgcggacgcggacgcggcgtggggaagatgaattggggatgcccggctgaaatttccttttgccggtttttttttttttttttcccggccggcctcgagggtccc

SEQ ID NO: 176562 - DNA, 401 bp, Zea mays
  Clone ID: MRT4577_92616C.1
gtgtcgaccaccatgagtggaaccccatggtggacgtgcacctgccgtcggacggctagaccaactacttgctcgagacactcgaggctggaaagcggcagagcacggaggccctgctatagcagctgttcctggaagtgcacgacgacgtgcgattgctccacttcatgaaacgtctggatggacagaatgtcgtgtacatcatgcgggacgcgatggcagtggatcgtggatgcaggacgtgcagatgatgatgctaggcacctgacgcgcagacatggaacgaatgctgcagcactcagagcgtgagcatactaacacgtgccgctgatagatcgggttctctgagcctatggtgcatcgtatcacagcagccgcagacgtgctgatgataccaactg

SEQ ID NO: 176563 - DNA, 433 bp, Zea mays
  Clone ID: MRT4577_92617C.1
ctatgtactcctggccgagcagccctaggcacccacgcgcgtgctctgcgatgccgacccagcgaagcctcgcgatgatcgtccccagaagtcctctggcgcccattcctgatgtccacgttatcgccaagattgcggtatgttcctgagcttcgaggaatcgacgatcaagatttggtgaaccactggtcccgagatcagctcctcgagttctacgagattgaataccctgggcatctgtttggtgaagccaagtgtcctctgacccattatgtctcatttactttataatttattatcccgcatactatgaacaacataaggattgactagctttctatttaccttgtccttgattaccttttgtgttactgtggttagcttcatgctagcgctttactttaatcagtaaacatgatgagatacaatgacg

SEQ ID NO: 176564 - DNA, 190 bp, Zea mays
  Clone ID: MRT4577_92618C.1
atatgaagatcaccagggaagaaatgggttaacaatgtaccaaaggcattttttaagggttaagccaggcgataaaattccgaagagggaatttttgtcggtaaaaatagtggcttaaaattccacgactttaaacccaagggcccattggtatgcttctgggcattagcagggcgccaaaacttataac

SEQ ID NO: 176565 - DNA, 469 bp, Zea mays
  Clone ID: MRT4577_92619C.1
ggcgaatgtaaatccaatttgtctagatctctatgtaaactccaatacacccggaaaaaaaaagcagatattaggtacaaaaatagggcgtgatgcaaatgaacgcgagcttcgccgtcgcgtcgcctgaggggaagagcaagtcgagcggcttcttctcgtcgttatatcggtccttgaactccttcctcgcaaggaatcgtgcaagcggcatcacggtgtccttcatgtccatgacgcccctcttcttctggtcaatgtgcgaggcatcgacgaccaggcgctgcagcttacccagcgacaatgaaccattgtcgataagctccatgagacgcgcaggtgtgccgacaccgacgccaatctttttgttcttgagcagagtcacttgttcctcgactttcatgtgctttgcgaacagcttcgctaccagactgtccttgcctgagaattttcgtagagccctggtaag

SEQ ID NO: 176566 - DNA, 170 bp, Zea mays
  Clone ID: MRT4577_9261C.1
ataaaactcatgtcagaattcagaccgtattccaacagggcagacattgacgcatatcagattgggggtcgacaatgaatggcttggtgatgatgctgatacaacataatttggtggctagctgctagtactaatgccacttgatatggaatgggaaggctttaaattga

SEQ ID NO: 176567 - DNA, 191 bp, Zea mays
  Clone ID: MRT4577_92620C.1
aaatctctctctctctccccattccccacccaacaccactactccatttccaatcccagctcccatacgtcaatctattattccaaaaatcctacctttcccatcccatttctggccgctacctcacaccttctcctcctcctaccaaaaaaacgcctccttcatcttcctcctaataccttatctacatt

SEQ ID NO: 176568 - DNA, 285 bp, Zea mays
  Clone ID: MRT4577_92621C.1
gagttatagagcccgttaaccttttctttattcacatagacctgactaaatatgactcactcaatgctcaaccaaccactacgataccattacaccatgtataggttgtagacaataatagaagaaaaatttattctgggaagcacttccgggaaaaaaacacaactgtctttacatgctttaatcactctttgaatgctttcatcagttggttcatttacttggtgctgttcatgaggcgcatcaagacgaccactccgatgctgtattcccactccatgtcga

SEQ ID NO: 176569 - DNA, 390 bp, Zea mays
  Clone ID: MRT4577_92622C.1
ctcggaattcggctcgagcaaaagaaatgtctacctatgtattgggaaaccttcccttttttctgtggggtttttttaaaatcggggcaggggtttaataccctccaaaaatcaatgccgaccacggcaatgattccaatgattcactgggggaagggtaaatgccctggggggagagccaaggcctctcaccccccccagttagctcagcacaagtgcacaacaagtacacccaattgatgctatactaataaaattacactgaccacggcggatgtgagattgctcagttgattgaccccagcgcgaagcaagggatctgcgataacttggattctaggctcgattcaaattcatacggatggttctgacggaactggatcattaagg

SEQ ID NO: 176570 - DNA, 402 bp, Zea mays
  Clone ID: MRT4577_92623C.1
ggcgtgccccccggcgccgcctacctctccctaacatcacgctgctcttcactgccgagaaccccaacaaggtgggcatccggtacggcgccacggcgttcgacgtcatgtaccacggggtgccgctcggggtggcggcggtgcccgggttcgagcagcccgcgcacagcacccgcctgctccagacccgcgtcattgtcgaccgccgcagaagctgtagtccggtggagatgattagagtgggcggatctgtgcgtcgattctaatttccctaatctgtggggtttggtttcgtcatgtgcattaggtggtaaattttgcgctcttactttaggaggaggccgctggctttgtgaattattgctgcttgcaatcagtagttatcagtgtgaccatggttgt

SEQ ID NO: 176571 - DNA, 614 bp, Zea mays
  unsure (1)..(614): unsure at all n locations
  Clone ID: MRT4577_92624C.1
tgccccccgcgaccccgggcgccgcctacatctccctcaacatcacgctgctcttcaccggctgctccagacccgcgtcattgtcgaccgcttcaacgtgctccaggccgacgcgcaggacctcatccgcgacgccgcgatcaacgaccgcgtcgagctccgcatcaccggcgacgtcggcgcgaagatcctcgtgctcggcttctcctccccaaaagtgcaggtgtcggtggattgcgcaatcgccatcagcccgaggagccagtcgctgaaatacaagcagtgtggcgtggacgggataagcgtgtagtgtaggaaccccaagccgccgccgccgccgcagaagctgtattgcagtggagaagtgggtggatctgtgcgtcgattctaatttccctaatttgtggggtttgatttccttcttgtgcttaggtggtaaattttgagcacttacttttggaggaggccactgattctgtgaattattgctgcttgcaatcagcaatcagtaggtatcagtatgaccacggttntccananaaaaaaaaaaaanaaaaaaaaaaaaaaaaaaanaaaaaaaaaatgggaaaaaaaaaaaaaaagagcgggccctg

SEQ ID NO: 176572 - DNA, 581 bp, Zea mays
  unsure (1)..(581): unsure at all n locations
  Clone ID: MRT4577_92625C.1
ccggccggcgtgccccccggcgccgcctacctctccctcaacatcacgctgctcttcaccgccgagaaccccaacaaggtgggcatccggtacggcgccacggcgttcgacgtcatgtaccacggggtgccgctcggggtggcggcggtgcccgggttcgagcagcccgcgcacagcacccgcctgctccagacccgcgtcattgtcgaccgcttcaacgtgctccagaccgacgcgcaggacctcatccgcgacgccgcgatcaacgaccgcgtcgagctccgcatcaccggcgacgtcagcgccaagatcctcgtgctcgggttctcctccccgagagtgcaggtgtcggtggattgcacgatcgccatcagcccgaggagccagtcgctgaaatacaagcagtgcggcgtggacgggctaagcgtgtaggaagccgtcaagccgccgccgccgccgccgccgccgccgccgccgccgcagaagctgtagtccggtggagatggttagagtgggtggatctgtgcgtcgattctaatntncctaatctgtggggtttggtttcgtcatgtgcattaagt

SEQ ID NO: 176573 - DNA, 429 bp, Zea mays
  Clone ID: MRT4577_92626C.1
aaaaaagtttgttccaaaaaaaaaaaaaaaaaaaaaaaaaaaaaaaaaaaaaaaaaaaaaaaaaaaaaaaaaaaaaaaaaaaaaaaaaaaaaaattatgtttttggtcttgaccacgattaaggttaaggttgtgatttatttaaatttcattggggttggggtgttttttttatatgattggtcgagggttccattttttggttgatggggggttacatttaaaatggcctggggttttgaaattttcaaggattggaaagggaaaacctttgggtaatttaatttatttgggttgatgaacattttctttttttggggtgttgtattaaagaaaaggcccggtcggctttccttttgtaaaagttgcttaaattgaatgtggaatggacctgcattgtagagttaaattaagcggggggggtgtttt

SEQ ID NO: 176574 - DNA, 915 bp, Zea mays
  unsure (1)..(915): unsure at all n locations
  Clone ID: MRT4577_92627C.1
cgacgtcatgtacccgggggtgccgctcggggtgccggcggtgcccgggttcgagcagccggcgcactcgacccgggccgggcagacccgcctcattgtcgaccgcttcaacgtgctccagaccgacgcgcaggacctcatccgcgacgccgcgatcaacgaccgcgtcgagctccgcatcaccggcgacgtcggcgccaagatcctcgtgctcgggttctcctccccaagagtgcaggtgtcggtggattgcacgatcgccatcagcccgaggagccagtcgctgaaatacaagcagtgcggcgtggacgggctaagcgtgtaggaaggcaagccgccgccgccgccgccgccgccgagaagctgtagtccggtggagatgattagagtgggcggatctgtgcgtcgattctaatttccctaatctgtggggtttggtttcgtcatgtgcattaggtggtaaattttgcgctcttactttaggaggaggccgctggctttgcgaattattgctgcttgcaatcagtagttatcagtgtgaccatggttatacgttcatcgatcgccattggtaattgcttacgagctaagggaagtggtgggcaaagatgtgatcatgtgaggggggcgaagaggcgatcggaattccgtcgcttttgctgctctcctcatcctccggttcttgtttcgtttcgtttcggagttggtgggtctgtgctgtctgccgtgcctttttctgcctaatctggtttaacttcagccattcgcggtagtggagcggccgagcgggcaaccgggcatgcgagattgggagggaccgagggagaagtttggccgggaagactgaagagtgtgagtcagtgagtggcctggtgcggtcaaacgtcaaagtttacgactccatgatgngtcaaa

SEQ ID NO: 176575 - DNA, 1665 bp, Zea mays
  Clone ID: MRT4577_92628C.1
gtgcggcgctcgtcgaggcggccgggattcccccgccccacacttcgcctcgccaaactttaccctcggcctccgcccgcacttccaccaccgcaccgcacctcgcagatgccccagtaggctccaaaaatccaaagccatccctccccaggcctcccatccatctccgggagatggcggccggcaccgtgacggcccgatccaacggcgagggccacggccacggcggcgcggggtcctggtacccgcagcgccgcccgcactacgggtacggcggggggtccgcctccttccgcggctgctgctgctgcctcttcctgctgctcaccttcctggcgctcctcgccctggccatcgcgctcgtcgtcgtgctcgtggtgaagccccgcaagccgcagttcgacctcgaccaggtgtccgtgcagtacctcctggtggcctcgccgacgacgtccccggccggcctgccccccgcgaccccgggcgccgcctacatctccctcaacatcacgctgctcttcaccgcccagaaccccaacaaggtgggcatccggtacggcgccaccaagttcgacgtcatgtaccacggggtgccgctcggggtggcggcggtgcccgggttcgagcagcccgcgcacagcacccgcctgctccagacccgcgtcattgtcgaccgcttcaacgtgctccaggccgacgcgcaggacctcatccgcgacgccgcgatcaacgaccgcgtcgagctccgcatcaccggcgacgtcggcgcgaagatcctcgtgctcggcttctcctccccaaaagtgcaggtgtcggtggattgcgcaatcgccatcagcccgaggagccagtcgctgaaatacaagcagtgtggcgtggacgggataagcgtgtagtgtaggaaccccaagccgccgccgccgccgcagaagctgtattgcagtggagaagtgggtggatctgtgcgtcgattctaatttccctaatttgtggggtttgatttccttcttgtgcttaggtggtaaattttgagcacttacttttggaggaggccactgattctgtgaattattgctgcttgcaatcagcaatcagtaggtatcagtatgaccatggttatacatccatcgatcgccatgaacaattgcttaggagctaagggaagtggtgggcgtcggttcgtctgtggttgtcttgtttcgtttcgtttcggagttgtgggtctgcgctgtctgcaatgtccttgtctggcggctaatcttgttcacttcatcagttcatcagcccgtagttagtggtagaccggtagtggactagtggtgccggggagattgtgagggaaaagttagggcgggagagtgtgggtggttgatttctcacttacaagatagtggcggggtcaaaccgtcaaaattttactgcaatttacgacacgtgacggcgcaaaacggagtttgtaatgcggactttgtgtaggccgtcgcgtgacccgtgtggtctacactacacatctcctatgtcaggtcgggaagttgtatatatatagtcttcaaatcttagttcgcgcaaaaaaaaaaaaaaaaaagcggccctggcgtgttttttgcatttttttttctgctgaatgtacaggagacttgctgccaccggtgccttggtttattg

SEQ ID NO: 176576 - DNA, 495 bp, Zea mays
  Clone ID: MRT4577_92629C.1
ggcggcatggagggagcgcgagacacgtgcgcaaatggtcgaacgacgccgtacgtcgagttcacgtagtgcgcgcgttgagagcgcgcccggcagaagtccacatcgacaccaacttccccctcccctctatacgccccaccgacacctacattgtccccgaccacttttctggccccccccccggcattaagtactctctagtaggaactaaaggtcacctaaccttataatagaacacatgaagatgataattatcctaatgaagtccttagacgttatgaagacttgctattcgatccactagatgcaggttaaaacctcctcgtaacatgatcattgtaattgcttcagctcgaaaattataagttgttacccaaactatctgatgctactatagttgaacgtaatccataaaaccgcctatacgaatacacatcatcagtgttatttttctatagattagagtatagataatgatattcactagataaa

SEQ ID NO: 176577 - DNA, 874 bp, Zea mays
  Clone ID: MRT4577_9262C.1
ctcgaccggcccgggcgagcgacgaacgcgcacaaagagaagaacctcggagctgagatggcacaagccatggcgtcgatgacaggcctctcgcagggcgtcctgcccagcaggcgcgccgacagcagaaccaggacggccgtcgtcgtcgtcagggcgtccgcggagggcgacgccgttgcgcaggcgggccgccgcgccgtgatcgggcttgtggccactggcatcgtcggcggcgccttgtcgcaggcggcgcgcgccgagaccgtcaagaccatcaagattggagccccgccgccgccctccggtggactccccgggactctcaactctgaccaggcgcggcgagggtaaagacgtcggcgcaggacatcatcaacctcaagccgctcatcgacaagaaggcgtggccgtacgtccagaacgacctccgcctccgggcctcctacctgcgctacgacctcaagaccgtcatcgcttccaagcccaaggaggagaagaagagcctcaaggagctcaccggcaagctcttcagcaccatcgacgatcttgaccatgccgcgaagatcaagagcaccccagaggccgagaaatacttcgcagcaaccaaagatgctcttggcgatgttctcgccaagctaggctagacgcaagggctaataatggccatgtaatttcggacttgtgtttgttcatatggacccggcaaggcaatgtaccattttctgttgatattgtatcaggaagcacttaactaaaaaaaaaaaaaaaaaaggccccctagtgagctcagtacctttgtggggggatggaacatcagaaacattttccagcagccttaattagtgatccccgtaatacatcggaaggcgtc

SEQ ID NO: 176578 - DNA, 341 bp, Zea mays
  Clone ID: MRT4577_92630C.1
cagatcctggaggaaccacccttggtttattcggggccccccccgccaggacgtttcttggcacccggcttgcggaccccgccccacaaaaccggccccttggtgccccggtccgggtccgggttggccggcagggcaaaccctgctccaaaaaaggtggcaaaaacatagacctcctttaaccggccgttggggttccccgcgccctggcgccccaattccttgaccggttccttggtggggaattccggtttgaacccgttcgttctgggaaggcccgggaagtccctcaattccgagttgaactccctgaacaaaaccttgccaagaatgaaggccgc

SEQ ID NO: 176579 - DNA, 318 bp, Zea mays
  Clone ID: MRT4577_92631C.1
ttcgtggacgctgtgactgcttctgagaagttcattagcaatggactggaagctgaacgacgtgacatgacgcatttacatggaaagctcctcgttgaagtaaacagaagtttccttgaagaacacagtgctgccttgatgcacccagcagctgatgctgaaatgatgtatcttttacagccaaatgagcagattgaggcactcaattcaatcgaatattcaacaactattacatagtcacggcatagttcgcttaatgctgtaaaaacatggcatatctaagaatgaattgatgttcattacttactggagacagtc

SEQ ID NO: 176580 - DNA, 662 bp, Zea mays
  unsure (1)..(662): unsure at all n locations
  Clone ID: MRT4577_92632C.1
aattcggcacgaggcgagacgagacgaggcgacgcgagtcgcgaggagtcgaggaggatcggggctcaggtacacacgtccgtctccttcccttgtttgtatcatcgtggttgggtctgttggatttgatgcttttgacggcatcacgcgatcggttgtttttgctggatttttttttgttattcttgcccgcgagggttggatcgatctgtagggatttggatgcaaaacgttgccaatactcgttggtttggctgccgtctctctcgtgctctcctctcccgttgttatcctcgtttgcgcgcgggaggtttttgggaccgcggttgaggggcgtgtccttgagattcgtgcggccgatgattagtcgacagctatggcatggcatctgatacgagggaatctgggggcttttgccgccgtgagccgtggaggaaatctgaaggtttcagtagtgctctttgtctttcgggaaatgggtctgtcagtctgtctccatggaaaatatgagcagtggaaaatacgttccatataactgtagatgacactgtttgatactattagttcgaaatagaggatggaataggagatgctcagntacaaggttgtgatggactatcttgttctgcattatctgaattatgctatatgactgtatttga

SEQ ID NO: 176581 - DNA, 537 bp, Zea mays
  Clone ID: MRT4577_92633C.1
gtgcggcgctcgagccggccgggttgcgattcaaaacatctttttgattgagtgtctttgtatcatttatctattttactttaggacactctttcaatcagataaacaaatcaatcctttaacgacctcttctttaacgacacacacacacattcatttatatcatgtcttcaaacgactatttatcagttcaacaagattttgaatatgaaaatgattattttaatgactatgaccaagtcatggtcgatgcagtaaacgaagctgattatcaagataatgaagagcagcaagatgaatacattatgaatgatagactcttgaagcttattgttgacgttcaatcctatctttcagaagcacccacctctgattctcctcttttagcattacaatacaaaatgtacacttatctcaaacaacgtgctttggaaatggaaatgaatgacattgctgcataatgatcccttttaatgaaattatgaaaaaaaaaaatattaaaaaacatggcaaaaaaaaaaaaaaaaaaggccccta

SEQ ID NO: 176582 - DNA, 1222 bp, Zea mays
  Clone ID: MRT4577_92634C.1
cctcggccaaaaatctgcggcgagctccgctccgatccgatccgatccgactgctccccacgccgttgaggccgagcgggggtccaggagaggagaggagaggcgcggcgccgcggctgccaccgtaccgccgccggaggagagaggggagaaggaagaggagccgtacccgtccgcttgctccgcttccgccggacctatcgacccgatggactcggagcactggatctcgcgcctggcggctgcgaagcgcttctacgcggcgcagctcggccacagcgatcgggcggggatggaggagctggacatggacgaggaggtcaggcccgagttcgcctgcccctactgctacgaggaccacgacgtcggatccctctgcgcgcacctggaggaggagcacccgttcgagccccaagccgcggcttgccctgtctgctctgagatggttacgaaggatatggttaaccatattactatgcaacatggatatttattcaagaatcgtcgccggttgcgcagattcatcattccaggcagccaggccctttctttactgagccgagatctacgggaagcccatttgcaggtgcttcttggaggcggacatagatcaagcaacaataacagcaccacaaatatttcagctgatcctcttctgtcatcattcggccttagcttccctacatcagatgcagagcaaacatccaaatcgactctttccattcctgatgatgctacgatgataaaagaaacgcctgctcaggcacggaagttaagtatcgattcgtccctcacaagtgaagaaagggagcagaaacggaagcaagccagcgtcagagccacattcgtgcaagacctgctgctctctactctattcggggactaataaatcaggatgagccaagttatcactggaagggtgcttcccggtgcaggtctgcagagactagcgtgctccacccaacttgctgaattcctcgacggaacatatgcgcgcatccggggtgctagcctttcgtcccttccagtgtggtgcagaatcgatgtgggcatgatgtgtcttctaagttattgtaagccggtctctctatcctcagttccttcataactgacgatcagcatgtgatatgcatgcaagtcgcggttgtgcgtgtacctcatctgtgtctgaactctgaagcattggtttgttgtaccaacataataataataatgttacaac

SEQ ID NO: 176583 - DNA, 516 bp, Zea mays
  Clone ID: MRT4577_92635C.1
caatttgtggttctatggtaattgagaattggaattaaactttcttttgcaggtatttgaaattgaacttaaatagaaatggttagaataacccggagctaaatagacaatttattccaacagtgaactcagtagctaattaatattggcatgttgtgttgtggtttaaattgcgagacaaaaggcctatttgcagcactttagtcggtgtattggttgtgtatttgttcaatggtaactctcagttttgaggtctggcaagtgaaaagtaaggattccatgtccttttaaatgtgatttttttgaaataaattatgggaataaaaagtaaaaacagaagattttaagcacttgattgcaatgagaggatgattttgatgtatgtatgttagggaatgtgccaaatgtacagtaggggtcaagtaaatgagtatgcaccaaaaggttgcagctattaagtgttgatgtcagttactattgttgaaatgtgtagttagaacatctcagttgtcaacc

SEQ ID NO: 176584 - DNA, 681 bp, Zea mays
  Clone ID: MRT4577_92636C.1
gggacctcctccttatcctcctccatgacgaactcctcgttcaggtccggcagcgacggggtgtccgccgccgcggcggcctggccgaactcggagacccggatgctgccgaggagcgcgagccagcggcgggagacgcaggcagcggcgccgcgacggccgggcacgcggcgcaggatctcgaagaggcactcgtccgggagcgcgtcgagcgacggaagctgcctctgcttcttggccgccctcacgcactccgcggccgcggcggccacagcggacgcggccactagcgtgcgcttccgctgctgcacggcgccgcggcagaagagtccggccagctcagccggcgccgagacgaggcacccgtcatctccgtaagcgtagagcgcaggcatgtctccgagtcacccaacaccgaagcgaccccttcccctcccactcgaatcaagaccagaagaacgagcaccaccggatctgaggcaccgaagagggccggaagcatttacagcccgccggagcaaggaaaacggaaccctgtcgccgccggcgacagggaaaaaaggaagcgaaggaaggagggggaacctcggtggggagacgggaggacctcgccgaattgcagtaaaagtatctctctctctctctctctctctctctcgggctctgagagcgtgccgaatt

SEQ ID NO: 176585 - DNA, 342 bp, Zea mays
  Clone ID: MRT4577_92637C.1
ctacagcttgaccccgcgacgacgcacttttacgccagtcgtcctaccggcatcggacagggtgcgcactcaacaatggtccgatctgccactccgagcccccactgctgatctcactgctgcccatccaggaactagccgcgcgcttcgcgcttgtggaaatactaaataggccgacatgcgctttaaatgcacgcagaacctgtccagctgtccattgtagggggagcatctctaacagaactgatggtttcatatgctccaatacaagaaagtttgattgtgcactactcacaacctatttttgtcccccgttccttcttgctgttaggatgataccgc

SEQ ID NO: 176586 - DNA, 278 bp, Zea mays
  Clone ID: MRT4577_92638C.1
atgcttgggcgccactctccgaggctacaaaaggttgtttacttgctcagcaacagcatgcgaggtggtggacaacgctggagaagaaacacaaatgcgaaatgtagggtagttggataaattgatccgactctgacagactccagcttttgctgacttgcgttagcagcgtctagaccctggaaagcacacctggcttctgaaaactctttatggcatcctgaggctgtggcctaagcaaagggcggccttaaaaaccttgaggactcgacggaaac

SEQ ID NO: 176587 - DNA, 170 bp, Zea mays
  Clone ID: MRT4577_92639C.1
taggagagagccccggagcaggagaggcacggagatgttaagaagggaaccaaaacacccccaagggacgatggaacaaactttcaaaacaagcaccaggaatagaaagaaaaatgaacggataagggatcaggaagacaaacaaaacgacaatagggaatgagaaaacg

SEQ ID NO: 176588 - DNA, 728 bp, Zea mays
  Clone ID: MRT4577_9263C.1
gatttgtaagggtttagtttagattaaaaacatcggcaaaggataggtacagatatacgagctcagatcgaaaaccccatatgtttgcagctttgcacacacacagaaaaaaacatctgacatttgctatggcacagccgggactctcaactctgaccaggcgagggacttcgacctccccttgaaggagcggttctacctgcagccgctgccgccggcggaggcggcggcgagggtaaagacgtcggcgcaggacatcatcaacctcaagccgctcatcgacaagaaggcgtggccgtacgtccagaacgacctccgcctccgggcctcctacctgcgctacgacctcaagaccgtcatcgcttccaagcccaaggaggagaagaagagcctcaaggagctcaccggcaagctcttcagccccatcgacgatcttgaccatgccgcaaagatcaagagcaccccggaggccaagaaatacttcgcagcaaccaaaaatgcgctcggcgacgtcctcgccaagctagcctaaatggaagctaataaatgggttaacgatggccccgtaatttcggacttgtgtttgttcatatggagccggcaaatgtaccgtttcctgttcatattaaatcccgagttcttgccaagtccctttgtgggcggatggaacatcaaaaacttttccagcacccttaattagtgatccccgtaatacatcggaaggcgtc

SEQ ID NO: 176589 - DNA, 490 bp, Zea mays
  unsure (1)..(490): unsure at all n locations
  Clone ID: MRT4577_92640C.1
cgacgacggggcnaccgccgccacaggcgcccgacgccaggngnccaggncgcccnncnccggcaccgagcacccaccagcggaananaccanggaggncaggcccanggnagcncngcgngccgcccnagnnggnggggnagcggcannggcgagggagggggggggcgangaaagccgcaggcggngncaagaaaggngcagccgcngcagccgngacggcggcagcancagcngccanancgggaaaagacgcaaaagaagacacnncaaagccggaaacgaaanganangacccanggangggncgacaaggangaaanngccncnccagaggnnnagaagagagagggngccanagncaanaagnnacaggagnaaaannncaggccccacgggnnnnnnaaacncgggaagaagaaggacaagacagggggccccagaagaanganaangngnggggcaacaganccggcggaggaaggccccc

SEQ ID NO: 176590 - DNA, 340 bp, Zea mays
  Clone ID: MRT4577_92641C.1
gcagaaaaggggccccaggccccccccttttttttttaggggggccgccccccccccagaaaaaaaggggggcccccccccgggggggaaaaaccccccccccgccaggtttccctttaaaccgaggaaacgaaaactaagaggagcccataaacttacaaaggggcccccccggtccaggtggggaccaagccctggcgggggggggaaaatttactcggggagcaaaagagctacatcagccgccccccaccctaaaaaaaaggctccttttcttttttcccccccggaaaggaaaacaaaaaaaaaaaaaaagggcaggggaaaaaccccccccccc

SEQ ID NO: 176591 - DNA, 293 bp, Zea mays
  unsure (1)..(293): unsure at all n locations
  Clone ID: MRT4577_92642C.1
aaacacctgtttcaacaaatatattacacccgcggatgattnttaaacaatttacccgggacataatattttttaccatggaaagattaaaggaacactcaaaattaactactcccgcttcaacgaggggccatccatttggaccacattagcaaaaaaccaacgtccctacttgacaactttttctctaaactagctccaacctccaacggcaatcaaaaccaccagggatcatcggaccaggaaacaaccgtggaggaggaacccgcggtcatgggggtcatttccatggg

SEQ ID NO: 176592 - DNA, 490 bp, Zea mays
  Clone ID: MRT4577_92643C.1
cattgggtacctcgaggccggccgggagccatcatttgcaatcatctaactatctgaatcccaacagtttataccttcttttaccaaacgcttgaacaagacaagaagaacccccctctcccttcatttccatccttaaagctcacccgaaaacatgttcatcaaacccgctttcattctccttgttttggctttggctcacactggcctcgctactccccttccccacagtggtgatggctacagctccgggggtggggccgttgcacctacccctgcacgccggctccggccccagccccagccccagccccagccccagccccagccccagccccagccccagccccagccccagacacagcaggagccggagcgacagccaccgcggcagcaggagcggcggcgagcccgaccgcgaaagcggccgcgaccccggacaccccaaccgccaccaccaccaccaccgcaacaggcacggccaccgcca

SEQ ID NO: 176593 - DNA, 534 bp, Zea mays
  Clone ID: MRT4577_92644C.1
cccagattcgacaaaatatatcttagacatgttgagtttgacgataatggattcaagatatgttaccctatgcattttcttagtacttgccttacatggagatactactttggcagaaacttgcaggcagtatgttgaagggcagccattctgctttaaagcaatgtgcaaggcaaattgttttatggagggaaaattctctgatggttcttatgtaaagggttacagatgtgaatcaggtggattccactcggtgtgtgtttgccttttgtgcaaaaattagttgtctaaagacaaggggagatatcttcttatgtttctatccattatttaagaatattgtctaaataattatacgatagcttagttaaatagtttgtttatttatagacaaatgtagcgctagttaactagttgtgatttttaaaatttctcagctatatgttaggaaatattttttaacacttcaataatatatctttgttctccctttattataaagttcaatactttttgggcgaaaaaaaaattaat

SEQ ID NO: 176594 - DNA, 764 bp, Zea mays
  Clone ID: MRT4577_92645C.1
ccggccgggattacgccgaactacggagttgccatcttcaccctcctcggttcccaactcttcggatacggtctcgccggtctcactcgctcgttcaccgtcttcccgacgtacatcgtgtaccccaacctcgtcccgacggtcaacctctttgatgcgctccaccgggacaaggatgagggcatgcagaagaagcgactcaagttcttctggatcgtcttcatcgccatcttctgttgggagtggatccccgagtttgtcgcgccgacgctcaccggtatctcaatcttctgcctcgcccgtcgcgactcggcctggttcacccgcatctttggaggatcgaacggtaacgaaggactcggcatgttctcgatctgcctcgattgggcctacgttggatccggaggaggttcgctcggtgcccttttcacgccttttactacccaagtctctcaatacattggcgtcggtctctgctgcatcatcttctgcggaatgtacgccacgaacgcctggaacgctgctcagttccccttcctttcgcaagacctcttctacgccaacggttcgcagtacgaccagaacacgattctcaacgccgactggtcgctcaacgagaccgcgctcgaggagcaagggcttccttcgtacgccgggagtaacgccgtctactacctcggatgcaaccttgccattggcgccacgttgactcacgtcgggatctggtactggcggccgatcgttcaagccttcaagtcgtaccg

SEQ ID NO: 176595 - DNA, 348 bp, Zea mays
  Clone ID: MRT4577_92646C.1
ggcatatctatacccataagggtactgaacataaaacttccatgtacccacattttgatacactggacatgttccaattttctgaactgttgattatgcggggtttttactgactggggacttcctatggggcatactggtaacttccatcagtaaaaaaaaagttcaagaccttccaaaaacaagggttttcatttttcaacaagatatgagctaatggaagtaaaaggattgttaaaaatttgcctttttagatgctactgaagcattttgccttttggcagccaatgagtatgatttttccataaagggccaaaaaaaaagggcaccctatttttttctaatttt

SEQ ID NO: 176596 - DNA, 1395 bp, Zea mays
  Clone ID: MRT4577_92647C.1
ccggccgggagttcggagtctgccatcagcccatctctgtgcgcgactccccgtccgttcccctcttcactacgtgctcgcgagtcgcgtccgctcctcctctttcgaagggcgagttcgcatcgcagcgtcgcccgcagcagcagcggaccgcagaccacgccacctcagccagcgacagggagcgagggagcgattcgatcagaatcgacatggacggcggcgagcacgaagcggaggagtcctcctacaagcgccgggagcgcctgctcgccctccgctccgccgcaaacgcgtctccggcaggggctcctccgccgacggccgcggggagcatcctcccggaccctgacctcccgggagacgaggccgcatccgtgtgcccgaccccgccccagcggttcgactactacaccaaccccgccgccgccttcacttcctcctcaggaggtgccacaaatcccacctggtcccacaagcgcaagagccctcccgcctgctacgccccgcctccgcctccgccggcttacgggaactatggcagcgactatcaccgtccacaccagcagcctacatcatggcaagttcactcaacatccccgatgccacaagatgcggcaaggagcagtccatggcaaagccctatgcagttccaggatccaatgtcaggataccaaggaggtcctcccagcgctccacgtccttggggctcacattctggtcctggaggccgaggttcttattcaaatccaccaaactttgggttcagacacccgaatcccagccggggtggcagcccaatgaactatggaccaagaggtggcccatattcatcttatggacgtggcagggggcccaactactttggcagcccaggttcaagggggagaggggggaggggtggctggcaaggccagagttacatgaacaagtcaatgcttgatgacccttgggtggacctgcaacctggtgttggcaacatactaatacctagaggtgagtatgactccaacaagtcctggctcccagaatcgctgcgaaaaaagaaggaaacgccgcctgctcatggacaaattaaaccggcgccaggattgagcctatcagaataccttgacctgtctttcaatgaggtttctgataaagagaagtaggcctttatgtatgcatatctacgacgacagattgatgtagtctttgcgatcatttgcaatagatctgttccctctgaaatcatgtgcaccttttatcttcgctcctcccattgccctgtactgtgctgccatggcaattttactagtatttatgcgttatagcgatcttgttgtaattccttgaatttaaggaactgaataacttatgatctcttaatagatagaggaagcaaagttgtgctgc

SEQ ID NO: 176597 - DNA, 620 bp, Zea mays
  unsure (1)..(620): unsure at all n locations
  Clone ID: MRT4577_92648C.1
aaagaactactcctggcagcagcagctagccagctacccctgcttgctttgctttgcttccccgtcgaggaagaagaagatggggggcgtgggcgtctcccttgcgctgctcgccgccgtcgtcctctccgccgctgctgctgccccgcagctagcgggagcagccaaggcagagcattccctaggaatcatccagaaggacatcattcagacggtcaacaagcatcccaatgccgggtggacggctggacacaacccctacttcgcaaactacactattgagcaattcaagcatatcctgggtgtgaagccaacgcctccgggtttgctcgctggtgttccaatccaaacccatccagaatcagtggatctccccaaggagtttgacgctagaactcaatggtccagttgcagcacaattgggaacatacttgatcaaggtcactgtggtgcctgttgggcctttgctgccgtggaagctctccaggatcgtttctgtattcatctcaacatgagcgtcacactttcggtcaatgacctactggcttgctgtggttttctgtgtggtagcggntgtaatggaggatatcctatcagcgcatggcgctacttccgtcgca

SEQ ID NO: 176598 - DNA, 1280 bp, Zea mays
  Clone ID: MRT4577_92649C.1
tcgaggccggccggggtctccggcaggggctcctccgccgacggccgcggggagcatcctcccggaccctgacctcccgggagacgaggccgcatccgtgtgcccgaccccgccccagcggttcgactactacaccaaccccgccgccgccttcacttcctcctcaggaggtgccacaaatcccacctggtcccacaagcgcaagagccctcccgcctgctacgccccgcctccgcctccgccggcttacgcttttgacttcagtagctggaacctggaatttggttaaccaacgagagaaacaaggatgccagtgagaattatatgtcacagttaagaaaacagccttacagtggtggcatacaagctagtttctaactggttaatgatgaatatgattgatcgaagaagctcggagtatacattttggggaactatggcagcgactatcaccgtccacaccagcagcctacatcatggcaagttcactcaacatccccgatgccacaagatgcggcaaggagcagtccatggcaaagccctatgcagttccaggatccaatgtcaggataccaaggaggtcctcccagcgctccacgtcctttgggctcacattctggtcctggaggccgaggttcttattcaaataatacaaacctcggcctcagacacccgaatctgagccggggtggcagcccaatgaactatggaccaagaggtggcccatattcatcttatggacgtggcagggggcccaactactttggcagcccaggatcaagggggagaggtgggagggttggctgccatggccggagttacttcaacaagtcaatgcttgatgacccttggctggacctgcaacctggtgtcggcaacatactgatacctaggggtgagtatgactccaacaagtcctggctcccagaatcgctgcgaaaaaagaaggaaacgccgcctgctcaagggcaaattaaaccgacgccaggattgagcctagcagaataccttgacatgtctttcaatgaggtttctgataaagagaagtaggctttttttatgtatgcatagctacgacgacaggttgatgtttgtttttgccatcgtttgcaatagatctttggaagcacctcttcattacaactttgtaggctttgtttttttttaaaaaaaagagaagcagaactttggagaagggaaagttgcaaaggttgcgtagcatgtcagcgttttctgctggtgcattaacgaccaaaaaaaaaaaaaaaaaagcggccaaa

SEQ ID NO: 176599 - DNA, 1245 bp, Zea mays
  Clone ID: MRT4577_9264C.1
ctcgaggccggccgggatctttgtcgcttggggaatgacgtctcttatgaggtataccgaggcgcgtcaattgctggttgaaaactatttccgaaccccctctttggctcactgggccactgacaatatctttgccacgctgccactcgggcaagagactgctcgaccggaccgacgagcgacgaagcgcgcacaaagagaagaacctccggagctgagatggcacaagccatggcgtcgatgacaggcctctcgcagggcgtcctgcccagcaggcgcgccgacagcagaaccaggacggccgtcgtcgtcgtcaggtcgtccgcggagggcgacgccgttgcgcaggcgggccgccgcgccgtgatcgggcttgtggccactggcatcgtcggcggcgccttgtcgcaggcggcgcgcgccgagaccgtcaagaccatcaagattggagccccgccgccgccctccggtggactccgcctgcccgcccgcgcgcgcctcatatacagtagccctgtttcttgtatatatacgtctcttttgtttggagtttcaacgagcagcagctttgcacacacatgcatttgctatggcacccgggactctcaactctgaccaggcgagggacttcgacctccccttgaaggagcggttctacctgcagccgctgccgccggcggaggcggcggcgagggtgaagacgtcggcgcaggacatcatcaacctcaagccgctcatcgacaagaaggcgtggccgtacgtccagaacgacctccgcctccgggcctcctacctgcgctacgacctcaagaccgtcatcgcttccaagcccaaggaggagaagaagagcctcaaggagctcaccggcaagctcttcagcaccatcgacgatcttgaccatgccgcgaagatcaagagcaccccagaggccgagaaatacttcgcagcaaccaaagatgctcttggcgatgttctcgccaagctaggctagacgcaagggctaataatggccatgtaatttcggacttgtgtttgttcatatggacccggcaaggcaatgtaccattttctgttgatattgtatcaggaagcacttaactacaatgctatcttgagtccttgacaaaaaccattgcaaaaccctttccgggcggatggaacatcagtcttgacaaagtagagcttgtctccaccgacggcaactggatcacattcatgaaaattaaagataaaaaggcggcccta

SEQ ID NO: 176600 - DNA, 559 bp, Zea mays
  unsure (1)..(559): unsure at all n locations
  Clone ID: MRT4577_92650C.1
nnaattcnnggcacgagggcatcgacccacagcatcaaggcgcccatgctgcttggtcccctgcctacgcgacgcgaggcaatcccacgcttgatgctttccatggagagcagagtgtccgacttcctaaatctccgcccaggaccccgtcttctgctcgcccacgcccgatccacgcgaggcccacagtccctgctccttccaaatcgtcgcgctgctagccgcatctcgatcgtgcatgcccaacccacgcctcccaaatcgccgccaactccctaagcttcacgagatctggtgtcatctggatattgcctcccacaccgctgactactcctactagccagtagtctctccgtcgccccacccgtggatcccacccactttgtagctaatcttgtcgggatcgtagatctacaaggtagcatcggatggctccatagagaatggaagcatggatgcaggctctgacggggtggctaggatgaacgcgattatgatgaggaggacatgagaccactgctcagcttcgatgagatgttatacctacacgcggagtgcg

SEQ ID NO: 176601 - DNA, 1326 bp, Zea mays
  Clone ID: MRT4577_92651C.1
gaaaatccaaatgaatgacgatcaggtggctgagcatgttttagttgaaggaaatggccgttgacatgcaacccaagcaaaagtactcacaaggaaggctctaaaagtcattcttctaatatccttcataagaacaattcatctgtttgcacaattaacacaggcgaacacaacactcttgaggatttcttcaacttggaaatagcggacaaggatgggtttgaaacatgtgaacaagtagcttgttgcacacacatgtttcaggattcaagtggtttagttcaaagagaggtagccttgctgcgaagttctcaaaacaaattgtatctgctactacttgatatggtttttgatggacaagaaaccatgccaagaattttgggcagctatagtctgcaaagtctagaaaaagtttcaattgggctgggactacaggcgctgagagtacacatgtcagatgatacaactcatctattcatcacaaggacttccaaggaagcgcaagatgtactttggctcttgagcgtaactaacttccccaaattaaaccacaagatacattttcaaagttgggagaacatccaagtcaaattgttcgagaaatgtattatacgcagaactgcaaatacgggaatatttctctactctatgttgatgttctggaggaatgacgttgaagaagactccctttttattagatccatctattgtcattgaaggctccatattggtgtgcattgaggacctagatcagtttggtggtatcccttatgattcaaatcctccatacttttctcttgatgcatcttgttctattagcaatatccgagaagtggtcatggatcagcgcaacaacaaatgtttgacattgattttggataatggtaggccaggagagtttcacaatagcatccaaaatcctcaaaacaagcagtctgaggaaatcggcacagtacatacatggaaacttaagtggttctctgaagaagcgtctctgaagttcatttctgtaattaaggctctctactcgacagcagcaacttcgtctttacatgtaaagtgtatatcctgatgatgtcggttattgtagttctacggtgatttcattcattcttttgtggtttgtccatgtagctgttaatctgtacagttcgatagttgggttctaggtttgtgtttgctgtattctttgtagttattagatgattttcccaccctgaagttgtacagaacagagctagaagtgagtgtaagtgaatggggttgcagttttggcaaaaaaaaaaaaaaaaaaaaaaaaaaaaaaaataaaaaataataaaaata

SEQ ID NO: 176602 - DNA, 405 bp, Zea mays
  Clone ID: MRT4577_92652C.1
agcaacagtagccccatcctcctcgttggtcgtcgtcgccgcctcacagcctcgcccgtgaccccgcccggcgccagatgcatacgaccaggaggtcagcgcccccgcctagcactagccgcatgcagcctggtggttagcacctcacctcactctagcctccagcctgcacctacaagggccccacaggcagcgcccctgcctggtagccagccacagtcggctaggcggtcaacgcccttgcccgccgcccatgccacacaccggcatccggccagccactgcttcactgtgctccagtagatggtgtgacgcccccatccctcgctctcgctcttcctggctctgatctgatccaccttctgcgttaggctcgattgcttaccggccatggtgcagtccatc

SEQ ID NO: 176603 - DNA, 454 bp, Zea mays
  Clone ID: MRT4577_92653C.1
ctagttctagatcgcgagcggcgccctttttttttttttttttggtatgtacacggtttccatctttatacgtgcagtattgtttgcaggaccgtacgttacatggcgcgcggtagcctagtcgctagctcgactgctacaagaacacgagcgctgaccgtccgaccgacctagttgtctttgatatgctatgctatatgctatgctatgctacgtggtggtgttcacaattagtacagcggacacgaacacgactcatcagacagataatctgtacacaaggttcttcctcctccctctttgatttcctgcccctccacaccatggagctcgaccgctagctcacgcgcgggcggcggacagaacgcggccgcccgcgccgccgccgccgctgtgggagctccggcacgcggcgacgtccaacccctggatcctcacggcgggcgcgaacgac

SEQ ID NO: 176604 - DNA, 390 bp, Zea mays
  Clone ID: MRT4577_92654C.1
ggatacgcactttgctattgctggcaatccttttacattacactatagactttttttttgaggggcaaggcaaaaaaaatttcaaaaatgacaccgcctgtcccggcgctaatggtgccgcgaacctcaggtggataaaccctgccggctgaagggtggcaaaatgagaacccttattaccgcccgacccaaaaaaattaagggttccttcaagggggataattgcccccccccccggcgcgggataaaatcaggccttctttttgtgaggaggggaaaccttggttcccgcccctaacagtttgagaggggaaagccccccctttggcgcatagtatttcatgctggagggggcccactaaaaaaagaaattcttttggggtgcccccc

SEQ ID NO: 176605 - DNA, 112 bp, Zea mays
  Clone ID: MRT4577_92655C.1
attattatcaggaggatactcctacaggctgaactaactatcaagtttccacttacattctatatcatcttcaattaagctaaatgtgcttgatcaaataataatatcattt

SEQ ID NO: 176606 - DNA, 277 bp, Zea mays
  Clone ID: MRT4577_92656C.1
gatggttctctgggttcctgataaaagtgtctagatagatggtagagggcaattccaagagggcaactccaagatagaaaatttggaaaaagaacaaatttaggggaaacagaagataagcgagttcaggttccagtcatgcggtgttggagatgccttgtcatctgatgaagactagtacgcagctggatagcagagtccgaaactcaggtggaggtgaagttatgagggaattatcacaatctagtttggattcatatttcttaaatatgtatga

SEQ ID NO: 176607 - DNA, 290 bp, Zea mays
  Clone ID: MRT4577_92657C.1
aaactgtcagaacaagtaggtggtatcaaaccagctcggactgaaagccacacatacatagtataaaggactacagtacagcatagatatagatcgatgctgcatgctgatcctcgggagtgagagccgatttattttatttgttgaatggcctacatgactcgcgcagcgcgcgggacgtacacagtacgtatcggtaggcttaatatcttggatcgtagaaacattagctgatcttgcaggaatcggtggacatgctgatggggaatccgacggaaacaacccaccaa

SEQ ID NO: 176608 - DNA, 384 bp, Zea mays
  Clone ID: MRT4577_92658C.1
gagttactgaggaacaaaccacacgggctcttcatggccgctgatcttctaaaaagcctatgggaatgcaacgaaggccgtttcaccgcccaagaggtgagggatctcatcaaacggctgagcactctgatgcatgacctgaaaaagaaggtagagcttgataagaggaatgggcgcaccggatccatgaaggcagaccaacctgcggccgcttagtgaggccgtcacactctatcatatccttaccgagggcacttaacgcgtcggcggcatgactcggaaggctaatctcacgttttgctgtacagaaattaaggataagactgttttcatgtacctgggggagactacggtgcaattgttgaaaaccttgctaggtaacca

SEQ ID NO: 176609 - DNA, 850 bp, Zea mays
  unsure (1)..(850): unsure at all n locations
  Clone ID: MRT4577_92659C.1
gagcagtccttcctgccccttgccattccaagaacgttctccgcggcgcctcctcctcctcccaccaccccatcccgttgctgtaactccgataagcgcgcgccgccgccgacggccccagaagccacctccgagctgccatccgcgggaagagcgggtggcttgaccgattctgcgaggacgaaggggaggacgaacgtacgagggcctggcccgtgaccaccgcggcgaaaccaaagaatggcgtaccgggcggacgacgactacgactacctcttcaaggtggtgctcatcggcgactcgggcgtcgggaaatccaacctcctcacccggttcacgcgcaacgagttcagcctggagtcaaagtccacaatcggggtcgagttcgccaccaggagcattagggtcgacgataaggtcgtcaaggcgcagatctgggataccgctggccaagagagatatcgtgcaattacaagcgcatattacagaggagccgtcggtgcgcttgttgtgtatgatgtgacacgccatgtgaccttcgagaatgtggagaggtggctgaaggagctcaaggaccataccgatgctaacattgtgatcatgctagtcggcaacaaggccgacctccgccacttgcgggctgtctctgtggaggatgcaaaggcatttgcggagagggaatacacctttttcatggaaacctctgccctggagtccatgaatgtagaggacgctttcactgaggtgttaacccagatctaccgagtggtcagcaagaaagctcttgacatcggngacgaccctgccgctccacacgagggcagacccatcacgtagggtccaaagacga

SEQ ID NO: 176610 - DNA, 248 bp, Zea mays
  Clone ID: MRT4577_9265C.1
ggctgcttgctgaactcggtgctcctggaatggacggcacacgttgtcaaccgtgtcaaggtgtcaaaatccaaaacacatccagcattcacactttttatggtggtaaacagctgcccgacctccaaagcaacggtgctggggggcccggcggctcaagccccaacctcttcaacctgagtttttttgctaacaattgcaacagctcggggttcagtcaccaacatgcaaaccacgggctcatgaac

SEQ ID NO: 176611 - DNA, 249 bp, Zea mays
  Clone ID: MRT4577_92660C.1
cccacgcgttcggcggggactccattttgttgggcaatatttatgcaaatgctgatcgatgggaagaccccctgaacattaagcgatgggcgggtgatacttcaatgaggaaaatcccccctttgggcgttggtgattaaaattgctcgaacaatatttagggcccacccgattggctttcttgtgaagtctaaattttttaacaccaccgtctattatggtgataaccttcgcttaatttggtgaagg

SEQ ID NO: 176612 - DNA, 391 bp, Zea mays
  Clone ID: MRT4577_92661C.1
tcgcgatctagaactagtcctcgctggcctcgtctacggggacggcggccccggcgaccccggttccggtgaaggcgcccgcggccacgggggcggcggtggagggggcgggggccagggtgattgcgccggcggtggacgccatggggatgggggcggcggtgccgaacccgaccgccttgggggccgcggcggcggcgcaccccttgttgatgaccgcctcggtggcgaccaccttcaacacgatggcccccgggatggtgatccccgacaccgactccgtccggttgggcttgcccgggaccgcgaaccccaggatggggctcgccacggtggccccccccaagtagacgccccccaagaaggcggccgggacgatggggatctggcc

SEQ ID NO: 176613 - DNA, 2844 bp, Zea mays
  Clone ID: MRT4577_92662C.1
cgcgcgtccgcccgggcggcgctccccgccggccgccgccgcgtcccgtccgacctgtggaagaggagagaagactgaagagaagggaagacatggccgtgacggcggaagcggcggcagagatggtgttggagcggcgggcgtacgcgcgggtggggctcctcggcaaccccagcgacgtgtacggcggcagggccctgtccttcgccatcgccgacttttccgccaccgtccacctccgcccttcgcccgagctgctcatccagccgcatccgcaccacgacctcgtcgccttcccctctctccctcaactcgtgagccgttcgcaaagtgaaggatattatggaggcgtccggctactggttgttatctaaaccacttccatgcactattggggttcaaaatagcaacaagctggaaacatcataacctcaacctacactcatgtgggaatattcttctaaagttggtctatgtcatttgactgctgtcattggttctggaccacggagtctcatccactttttgtataaacagacatctaataatagttgaaatgagacctaatctgattctcaatgctgagaaagagcttgggattgttgctggacttcaggaccgagtggcacaggtttatggtggactagtttatatggattttagccagggtcatatggacaagctgggtcatggcatatacatgccattggatgtcaatctgcttcctcctctatacctcatctatgccgataaccccagtgactctggcaaggtccacagcactgttagacaaagatggctgtcaggtgatgattttataacatcacgtatgaaggaagtagcgcagctagcgctcgatggccacaaggctttgctgcagaaggattatactgagctagcgatgtacatggtaatggacaatcaagtgcaaatactgttacagcccacaggggctctttcataactgagcatattctgcatcatggagtttcttcggatgctataggaagttcttcaaggaatgcagaatgttttgttggtgcagcaggccaagacagtcatcatgcagcctttaagagaaagtatcttgatggatgtcatgcagagtcttctgctaacggaagctcacgcaatcgtcaccagaataatagtactctgctacctcctccgaccacctgtgaaagttttactatacccaccacgacaaattttagtgttccgtaccatcctgtggagcagctaaaccagagtactaatattgctgcaaattctactttgtctgatcactattcttcatacagtgatccacatggaaacgaattcgtgcgaaatacacggatgcgaataaaccctagtgattatgatcaatcgctgcccagcctattacctgaggggagtttcaggtgctcagcttaccaatctacacagcagcagtcatcatttattccagcgcaacctagacaagttagctcttcttctggttctcatagtcgatctcatgtgcctgctgttactcagttttcacaaaatcttcaccgtcaggacttgggcagattggactgaggaattgggagttcttccacttctggttctacaatactgatacctgcttcacaagatcctggtacaagcttgttgggaagcgattatcctgagccacttttgttaggttctttgtttacagctgattcaacaaatttcttatctgcatctggaagcataagtaaccagcaaaattctggatccagctctagttccatgctcaggcctgctgttaatgttggaacacaagtccctgagttcaacgtatctcagccaagtacaactttaagaggttcatctgatgtgttcaggaggtccttaatttctgctggcatttctcattctagaagttcaagcatcccattgcagcaccgtggaaattcatccacatcacatgagattaggaatcatcagccaggatcaagctctcgtgcacatcagcagcaccccttaagacccggtcattcctctgtagacaggcagagctctggttacttggaccttcagtcttttatgcagaccatagcttcaagggaaggaggcagaccaatgtcagagatccgcaatgtcttcgatcagattcgtcaggggagaaatgcacgattggaggatttgcttctcattgaccggtcacttattatgagacgagctaatttgattgatagacatcgggatatgaggcttgatgtggataatatgtcctatgaggaattgctggcactaggtgaacgcattgggtacgtaaacacaggacttactgaagaaaagattttgagtaacttgaaacaatggaaatgtgtcttaaaatcattggatgatcctccaacaagtgttgaaccatgctgtatttgccaggaagactatgtggaaggcgaggacctgggcaggctggattgtggtcatgacttccacaccgcatgtatcaaacaatggctggttataaaaaacctgtgcccaatctgcaagaaaacagcactggacacctaaaaacatggctgcctttttccttaggaaaaagccggtagcggcagggcaagtggttgccatctaaccacaccctcccatgactagcaaagtatgttacacctttcccatcatcaacatacatgtgggaatctatactataggtggtacatggcacttgcctgaagccaatggctgtagaccatggagttttatcctttgtttttttcaatcttagatttgggatttaaaatttattcaatgacatttgatttacttgggcaatcagcaatatttgctatcatcattaatcgctaatcatctgtgttttttttaacc

SEQ ID NO: 176614 - DNA, 1852 bp, Zea mays
  Clone ID: MRT4577_92663C.1
ctcgaggccggccgggccgggttcctcgtctacacctccttctctcctcctcgatacattcgagcacgcccggacgcggtcagaagggagaaagcagcaagcggcgccgggttccccctcccttcgtcgcccccgatcgacgccgatcggggccgactgctcgtgggggacgccgaccgaagcccgggcggcgctgcttcaatatacggaagcagtttctagttttcttcagttcgccgctgcagtttctagtttccagcggttcccaccagttgtctaataacttattgttgttgtacgtgaggttgcttttgtcgtatttgccaggttgcttttgttgtatttgccaggttgacacacttggtgttgtaaatcattgctatttttgggtcatgacttgtttttattgaaatcaattggctgccaagggtacactaaatctttgatgcaacataataggatcaccatgctgtcttcttcagagacttgccagcttggttctagttctagcaaccctgtcatggatcagcagaatttacttcccaacaactctaacgtggatgaacagattttactcccaaatgcattagagcatgaggactacccacactatttgctcaatagtcatgaggtgggaatgccaagtggaagcctgattggtcagcaaaatacaagcttgagcttgtgggaaccagctggatctagctcaatggagtgcttagttgatcatgacaactttttccaggcaaaaagagaacatcttgcctcttctcggtctattggtgccccgttaagtatagagaggaggagacatgaaggcactagttcattgccttcacacaacctaaacatagacctcaacattaatcaggctgatcaatttggctctgatgatgttgatcttgcacatggtaatggacaaccaagagcaaatactgtcacagcccacaggggctctttcataactgagcatattctgcatcatggagtttcttcggatgctataggaaattcttccaggaatgcagagtgttttgttggtgcagcaggccaagacagtcatcatgcagcctttaagagaaagtatcttgatggatgtcatgcagagtcttctgctaacggaagctcacgcaatcgtcaccagaataatagtactctgctacctcctccgaccacctgtgaaagttttactatacccaccgcaacaaattttagtgttccgtaccatcctgtggagcagctaaaccagagtactaatattgctgcaagctctactttgtctgatcactattcttcatacagtgatccacgtggaaacgaattcgtgcgaaatcacggatgcgaataaaccctagtgattatgatcaatcactgcccagccttttacctgaagggagtttcaggtgcccagcttatcagcatacacagcagcagtcatcatttaggccagggcggcctagacaagtgagctcttctggttctcatagtcgacctcacttgcctgttgttactcaattttcgcaaaatcttcaccgtccttcagcaaatattagttttggatcaaggattgggagttcttccagttctggttctacagtactgatacctgcttcacaagatcccagtacaagcttgataggaagtgattttcctgagccccttttgttaggttctttgtttacagctgattcaacaaatttcttatctgcatctggaaacagaagtaaccagcaaaattctggatccagctctagttccatgcttagacctgctgtaaatgttgcagctcaacaagtccctgggttcaacgtatctcagccaagtacaactctaagaggttcagctgatgtgt

SEQ ID NO: 176615 - DNA, 451 bp, Zea mays
  Clone ID: MRT4577_92664C.1
ccggggaaaaagcgggcccagccacgtcccaacgggaaaagggggggggaaccgcggctaggaccacccccaaacggaatcaaaacatgcccaaaaacaaacccgcccagacccaggaccccaaaaaatccataaaaaacaaaggaagggggggccaccacataaaaccccccgggaaaactggggcggggggcccaaacaggggccccccaaattttcccccccccggcaaatatttaaacacgggacccaagcgggggccaacgggggggcccacggaccccttggccccccccccggaatggcctaacccccggagaaggcccccgggggcggggggggcccccccccaatctccctttgaaggtcaacgaaaaaggggatggtttcctcgcccttgcccagtcccatgggggggacccgcaaccccggttgggggggaaacccaccc

SEQ ID NO: 176616 - DNA, 538 bp, Zea mays
  Clone ID: MRT4577_92665C.1
agcagtggtaacaacgcagagtccgcgggactccacatgaatatcaaaatggcccacctctaccatagtagctaatgttgctgttgacgcataaatacgacccataggccataggctctgtcaggggaacacgatgtaaacctgactcaaacctcagtttaatatagacttatttccccttgaattccaccatagatttcatgtaaccacccatttggccatttttgcctgaaagagtcagcttgtgagtattttttttcttaatcaatagtcacattaaagttgcaagtacatacgtatgagcaagaaattgacttaaacttccatttgttgtgctcacaatatctctgatacatgcgacctacagatagtcatgggcatatttagttctagagtatgtgagtaaatttgcggatatgacgcactaataattgcagaagtataaccgttgtaacaacagtaaaatgaactaagaagagcctatactcccaaaaaaaaaaaaaaaaaaaaaaaagtactctgcgttgttaccactgct

SEQ ID NO: 176617 - DNA, 382 bp, Zea mays
  Clone ID: MRT4577_92666C.1
aacgagcacaagcttttttttttttttttttctttttttttttttatattaaaatctggaaatgtaacttcttatttttggctggccacatacatcatccaaaaaactttattattgaattacaacttatattccatttaaaaaagggcaccaccaatgatgtgttgttggttggaggccgctgggtttgccaaagcaagttgtacaaagggcaacaatttttgtaactgtaagagggttgttgggactagccggaaactgctggaacaaagggattaactggtgctgtgacaacaacgaagcacggattcatgtagctagatggataaatggttgctttttttaactgctacaataactagctttgttcaaggcggtcaat

SEQ ID NO: 176618 - DNA, 346 bp, Zea mays
  Clone ID: MRT4577_92667C.1
ggctccctaaaaaaagggttggggcctataaatccctaccaattgccgggggggttatcaggaaaacacaggacccccacccccgggccgggccgggggttccaaaacccatccgctggaaatcaagccaaaggccattgggctttaccaaaccggggggccaaaaaaccgggccaacccttggtaccctcggataccccaaggtcttggtcgggtatttcaaatttatggggggtaaaccaaaattggaaagggttgggaaggattttgacctgctttgaaattaaaacaactcaatacccccccaatcacatattttaaccggggaaaaacaaggcccaagggg

SEQ ID NO: 176619 - DNA, 302 bp, Zea mays
  Clone ID: MRT4577_92668C.1
gggcgcctccaactcaatttataaaattggttttgccgatacatgggggggggggcgggttttttggtagaaaaaaaaaggggggggttgatttttcattgggggggcccactttcccgaaatttaaccgcgaagggcccttttgacatccaaattttaagataaccctcatcccacataggaaggctgttttttgggtggcccaaaaaagctttaacgaggaaaccaaacttcgcaacctaatttggaggggggagttccaaaacgggcccccaaaaaaaaacaactcaacacttggagtc

SEQ ID NO: 176620 - DNA, 440 bp, Zea mays
  unsure (1)..(440): unsure at all n locations
  Clone ID: MRT4577_92669C.1
tccgggtgatctactaccagcgtgggcgtcttatggtgggccagggagcccatactgcgnaggcaggaccnnagcgctggggtggctggcaaggccggacccaccgggcggtgcttgcgcgggcggcgcggacttnnnctacataacgtgggctgtgagcggtgccttnannacgcgagccaccggacgctnggcagtgaccggggatggcgagcaaccaaaggttcnncttacgaaccctnannacctggattaccccggcanntccaagggcgcgtggaatcagtacctgggagcgaacnnnatcagggtggcgcccagcgaaccaanccgggcagnnagcgagctggggaagaaccgcgctggaaggaaggggcnnggcgcctgcgtccggcgctcagcnngagaaaggacnntacttcgagaacgntgcgcctctc

SEQ ID NO: 176621 - DNA, 1127 bp, Zea mays
  unsure (1)..(1127): unsure at all n locations
  Clone ID: MRT4577_9266C.1
gggaaaaaaaaaattacaaaaaaaaaaaaaaaaaaaaaaaaaaaaaaaaaaaaaaaaaaaaaaaaaaaaaaaaaaaaaaaccgagcccggggcaattcattgggtacctcgaggccggccgggacggaactgctcgaccggaccgacgagcgacgaagcgcgcacaaagagaagaacctcggagctgagatggcacaagccatggcgtcgatgaccggcctctcgcagggcgttctgcccagcaggcgcgccgccagcagggccaggacggccgccgtcgtcgtcagggcgtccgcggaggcgcgccgttgcgcaggcgggccgccgcgccgtgctcgggctggtggccactggcatcgtcggcggcgccttgtcgcaggcggtgcacgccgagaccgtcaagaccatcaagatcggagccccgccgccgccctccggtggactccccgggactctgaactctgaccaggcgagggacttcgacctccccttgaaggagcggttctacctgcagccgctgccgccggcggaggcggtggcgagggtgaagacgtcggcgcaggacatcatcaacctcaagccgctcatcgacaagaaggcgtggccgtacgtccagaacgacctccgcctccgggcctcctacctgcgctacgacctcaagaccgtcatcgcttccaagcccaaggaggagaagcagagcctcaaggagctcaccggcaagctcttcagcaccatcgacgatcttgaccatgccgcaaagatcaagagcaccccggaggccgagaaatacttcgcagcaaccaaagatgcgctcggcgacgtcctcgccaagctagcctagatggaagctaatagatgggttaacgatggccacataatttcggacttgtgtttgttcatatggagccggcaaatgtaccgtttcctgttcatattatatcccaagttcttgacaagtacctttgcgggcggatggaacatcagaaacattttccagcagccttaacaagtgatccacgtaatatatcggaaggcgtcaaattggaagttccgcgcctgagatattttaaaaaaaaaaantaaaagatgaccccaagcataatagaaatcgtgtcacagttctccgc

SEQ ID NO: 176622 - DNA, 600 bp, Zea mays
  unsure (1)..(600): unsure at all n locations
  Clone ID: MRT4577_92670C.1
gnacaatatggcggatggcgaggnagccggnanaagaaaataaggagaatagaggagctgctggctgagaaatggctgttgatggtgggtgtggggacactggagactgggaaggtcgctggaaccatgtaaagaagttcctcgagcgatctggacccttcacacaccctgatttcgaaccgagcactgaatctctccaatttttgttagatacatgtaaagttctagtcattggagctggcggcttaggatgtgagctcctgaaaaatctggccttgtctggttttagacagattcatgttatagacatggacactatagatgtttccaatctaaataggcagtttttatttaggcctaaagatgttggaagacctaaggctgaagttgctgcagaatttctaaatgacagagttcctaattgcaatgtagttccacatttcaacaagattcaggattttaatgatactttctatcgacaatttcatataattgtgtgtggactggactctatcatagccagaagatggataaatggcatgctgatatctcttctaaattatgaagatggtgtattagatccaagctccattgtccctt

SEQ ID NO: 176623 - DNA, 381 bp, Zea mays
  unsure (1)..(381): unsure at all n locations
  Clone ID: MRT4577_92671C.1
ntcggacccnnncgcgtccgtatcaagagcatgcgtatcactcagctgcagaactcctaggaggcctactttctaggcactgcgtagaccatgagctagtgcactaattgccatgactctagtgcaagcgccgcgatgacggaccgcagatcccgccggggctacgaatcggatcctgtcccactgaagtcgaatgcggtcaccgttggtggatgctactcggctgacttggagatgataaaggaggctatcaccgcgctcaaggagaggaccggttgcagttcgcaagcaatcggcaagtatgtgggggacaagcactgtgcgtgtatgaccgtcaacttaaagagagatgctctgcatgcagcttcgtgggttcccaga

SEQ ID NO: 176624 - DNA, 740 bp, Zea mays
  unsure (1)..(740): unsure at all n locations
  Clone ID: MRT4577_92672C.1
ccggccggggaagttctatctcgtctgctacaactccctccaatcgctcggatggttcgtctccctcctccgcctcctgccctgcctcgtccctcccttccctgtccactccgcacatgtgcgatccttgaaacggtccacgctgccatcggattggtgccgaccgcgccacttcttgctttcttgcaatggggagggaggatccacttcatcctggctgttgtccggcaaattcccgaggttcagagcagtccatctgtgttcataacatttatagcttggagcatatctgaggtcatccgttactctcactatgctctgactaccttaaaagtttgtccagcatggctgacttatctcaggtacactgcttttatcccgctgtatccaatcggggttggcccaggagaaatgtggacaatgtaccaagccctcccgtttgtgaagaagagggacctttactcaggtttcttcgagaagttctccatgagctaccgttcctttctagtgagtgtgctggtgctctacccgttcctgtggctgaagctgtaccagcacgtgttcaagcagcgcaagtccaagctggggaaggggagcaggaagaaacgggcctgagaaaatctggctctgctcagctcagctgccacttgntgctgtcatgtgaaacgctgancggtcatttgtggatttttgttttggaagaaatnncttgtgagttgtgtctgatgccacgggggcag

SEQ ID NO: 176625 - DNA, 971 bp, Zea mays
  Clone ID: MRT4577_92673C.1
agccgtcccggccgggccgtcgccggtgtcgaaaccgcagccacacaggcagccggtgctgggcctcggcactcggcagccatggttcgccttgcgaagttctatctcgtctgctacaactccctccaatcgctcggatggttcgtctccctcctccgcctcctgccctgcctcgtccctcccttccctgtccactccgcgtacgtggtcgccggcgacctcatctgtttcctgcagacatgtgcgatccttgaaacggtccacgctgccatcggattggtgccgaccgcgccacttcttgctttcttgcaatggggagggaggatccacttcatcctggctgttgtccggcaaattcccgaggttcagagcagtccatctgtgttcataacatttatagcttggagcatatctgaggtcatccgttactctcactatgctctgactaccttaaaagtttgtccagcatggctgacttatctcaggtacactgcttttatcccgctgtatccaatcggggttggcccaggagaaatgtggacaatgtaccaagccctcccgtttgtgaagaagagggacctttactcaggtttcttcgagaagttctccatgagctaccgttcctttctagtgggtgtgctggtgctctacccgttcctgtggctgaagctgtaccagcacgtgttcaagcagcgcaagtccaagctggggaaggggagcaggaagaaacgggcctgagaaaatctggctctgctcagctcagctgccacttgttgctgtcatgtgaaacgctaacgggtcattgtggatttttgttttggaagaaaatctttgtgagttgttgtctgatgcgacgggggcagttattggattacgctttgggttctctgtttgtttcaattgctctgcgttttatgtctgtattaacatacatcaagcatatataatagtcatgttgctgctgcgagtct

SEQ ID NO: 176626 - DNA, 388 bp, Zea mays
  Clone ID: MRT4577_92674C.1
tttctttttttttttttttttttttttttttgggtttttttttttttttatgggtttgccccaacacgcccaagcggccggacaacccccgggcaacgcacaggcccccgcaccaaaaaaaaaaagacaaggggaaggaaccacgactaaaaccagccaaaacaaagaaagcggggggcaaactcccccgccgtcggacacaaaaccaaagaggaccgaggcccaaatttgaaccaaaaaccaacacccgaaagaggaacgagtacccaacaaacccaagaactttaccggaaccaggaaacaatccccaaccacaccccgggggatccctcttccgggcaataagcccgccccaccaaaacaccagaccacccctaaaaaggggcca

SEQ ID NO: 176627 - DNA, 124 bp, Zea mays
  Clone ID: MRT4577_92675C.1
ggatgactttgcctgtaagtacggggacaagtgccagttcgcacacagcatccacgttgtccgcagcctgagccgccaccccaagtattagacggagctgtgccgcaccttccagtcaacatag

SEQ ID NO: 176628 - DNA, 1109 bp, Zea mays
  Clone ID: MRT4577_92676C.1
ctcgaggccggccgggccgggacttgcagcagcagtctaccactgcaccatcccaccaatctcccaaattaagccatccgtcaccagccagccaaccagcactcactcactagctacgtccaactcgtacacaacccctctttctctctatcttctctccatccatccatcctctcgcccgcccttcgacagctagctaagcagtacgacgtagtatactagcatttagcagttcatcaacgcgctcaacctagcacgacgtacggcgatgaggcgccgcggcagcaactcctcgccgcttgcggctgctgccctgcccctcctactcctcctcgtcgccggctgcttccactgcgcggcaacggcagctcgccacctgccttctcctggcgccccagtccaagcgctggatcaccaaggtacgcacacgacgacggcacacgatacgacttcgcttgcctcgaccgtaccgtccgtccgtacccgagaccggtggcaaggctgcatcagctggtgcagacggcgccggcggccttgtgctccaggaaggtggcacgggcaacaacggcgacgagctctcctccaacaccaccctcctcgagacgacgacgacgacgatgggagcggaggcgtgcgaggaggggaacgacaaggacgagtgcttgctgactaggcggctgctcgtcgacgcgcacctcgactacatctacacgcagcacaagggcaataagccgtgaccgtcagccgacgaggacggtgcctgccgcggctgcagctgcagaaagtgaggagcggaagaggagtgaaaaaatgatggaccatcctcaaaccaaatatcctataaattcacgcacaaggggaaggggatagtaatctcatctgctgctgctagctactagtacatgcatcgatcgaccttctgcgtgtgctgtatatttctgccacgctgcctatatattagcatgcatcatcatctaggactaggactaggactatgatggtttcctgtatttgtaaacactgatgaacagtacctctctctctctctgcttcctgtaaccaccaagcttacttggtccaagagaacgtaacaacgcacatttgtttat

SEQ ID NO: 176629 - DNA, 208 bp, Zea mays
  unsure (1)..(208): unsure at all n locations
  Clone ID: MRT4577_92677C.1
ggccaangcggcgaggtccttaggttttaatgcaaccccacagcgacggcctagtggttgccttaatggcaggcggtgcggcaacaatgtttgcaacaagttaaggaagttgaggccgaacaaccgtaccaagcgaactttgggttggttcttcaagtcattcttgaagaacaagccgaaaaggggccagttcccggggttgttggcg

SEQ ID NO: 176630 - DNA, 240 bp, Zea mays
  Clone ID: MRT4577_92678C.1
ctgctgtgcagaacgtgccccatgaattttttagtgcacaatatacccactgctatcaaaggggacggaactggcccctacctcgatgacttcaaccctgggctccccatcattcggtatgccaaaggatgtcaccagctttggccgcggctacaacaccattgccaacgatatcgtcgacctgtgcgtcgctcgcatgaggaactttgacgaccactgcgctggcctccagggcctgct

SEQ ID NO: 176631 - DNA, 517 bp, Zea mays
  unsure (1)..(517): unsure at all n locations
  Clone ID: MRT4577_92679C.1
cccctgctggtacccggtccggaaatctcccgggatncgnaccccacgcccgtccgcgccacagcgggncagcgcgggactggcaggccgtggtagtacacgggcttgctcgctcccgcggtggccgctccgtcgcaggtatcttgaccgcgcatgttcactgacgctgttccaagaaaagggacatctgcagggacatatgcaccaattatgtcaccacttttgcatatactgttacgtatacagggtatgcgacacctgagccagtggctacggatgagggaactgctgagacggatgccatgactgatgccgtcattgataatgccgttggaagtggagggggttgttgagggcctttcttgggacctgacgaggcactatgatgaaatctatcatggcttagaacatcgtgggaaacatcctggatgggatgcaggacggctcgagacacggtcagatacaaacacagaagaaaacggtgatgaagatgggtatggaacataggaaggtacac

SEQ ID NO: 176632 - DNA, 268 bp, Zea mays
  Clone ID: MRT4577_9267C.1
atatactcgtgacaaaggaagaattgaagtacggcaagccattcacgcgatccagctattttagacactcagtcatgggtcgaccgtggcgcatcattccgactctctgtctcgctgccagcgtcgtatcagtgaggggtcaaggaaacgcagcagacgcccagaatgagcagaagccaattgcgtctcaagaacacactgcgggtggaaacccgctgacttctgaattttcagagtttgtgctcaagagattggatgaatggaaggt

SEQ ID NO: 176633 - DNA, 537 bp, Zea mays
  Clone ID: MRT4577_92680C.1
tttttttttttttttcgggcagataaaaagttctgtttgaaaaaaaaaggtgagaaccaaactgaggttcgagagagaagtgaacagtgtcaaaaaaggttgtcataaagatttcttcggaacccctgatagaacgcccgagagaacaattagaagattaagatacatgactttgcccagaatcagtgataaagaatctgatttcgctgttacgcgcgtgtgatcgtatgccgtattgtggggggtatggcaaaatgatattcaggaagaagcctaagttaaactcttgtacagtcgtccaaccagtaacgggagcagtcctccacaaatatgtagtttgcttgtcgtgaaaattaaatgtccttcgccgctatatttttgcagaaacaagatacagagaaagaatgcctgtccgggcatcttaggcgaacctggccaggacaggattgttcatctgctcatttaagcaaggatgaaagcagcgaaaccagcgacggcagcgaagacggcagagccggcgaggccagcggcaccagc

SEQ ID NO: 176634 - DNA, 713 bp, Zea mays
  Clone ID: MRT4577_92681C.1
agctcaagtggtaccttgtcctcctgtgctacttcttcgctcccgtggttgcgttctgcaactcctacggaatgggcctcaccaacctgaaccttgccccgacctacggcaagatcgccctcttcgcgttggcctcgctcgtcggcagtgatggcggtggagtcatcgccggccttgcagcctgtggcatcgtaatgtccgttgcctgttccacagccgatctaatgcaggacttgaagagcgggtacctgaccctctcgtcgccgcggtcgatgttcactgcccagctgatcggcatcgcgctcgggtgcgtcatagctccgctcacgctgtggctcttctggacagccttcgacatcggcgaccctgacggggagtacaaggccccctttgccatcatgttccgggagatggccatcctcgggatggagggcttctccgcgctgccactgcactgccttgacatctgctatgccgccttcttcctcgccttggccaccagtctcctcaaggacgtggcgcccgcaaacgtgtccaggttcatccccataccgatcgctatggctgcgccgttctacgttggcgcctactttggcgtggacatgttcataggcacggcgatcttgtacgcctggcagaagctgaaccgggagcaggctgatggttacgcggtggctgtggcgtccgggctgatctgtggagatgggatctgg

SEQ ID NO: 176635 - DNA, 400 bp, Zea mays
  Clone ID: MRT4577_92682C.1
accactcctgcagattactcatccgttctcgatacagaccgcaatctcagcatggggtgcaggggaatgtccctggtccctccctcaaccaaaagccctattacagcagatacctatggtgcatttgttggcacaaaacattaaggaacatcaactacaacaacttgtgctaagaaaccttgctgcctactctcagaaacagcaatttcttccattcaaccaactggctgcattgaactatgctgattatttgcaacaacaactaccattcagtcaattagctgttgtctacccccatcattttctttcattcaaccaaatggcaacattgaactcttgttcttatttacaacatcaacaacttccaccatttaaacagctatcttatgtgagccctatt

SEQ ID NO: 176636 - DNA, 285 bp, Zea mays
  unsure (1)..(285): unsure at all n locations
  Clone ID: MRT4577_92683C.1
aaaaaaaaagcccnngannccccccncnnccnnccccttcccaacgcnncncgcggcggggggaagaggcgaagaggcgaagacccgncgaagggcggggcngcacncgcgnncangnnncnccacgagnangncgacggcaganacgggcangcgcnnnggnacagcaacnggggggcccanggggagcagcnncncagggacgncccnngnaccaangccagggggggggggnggnggngganccacacacnnncnngaccagccagagaagggggagggggg

SEQ ID NO: 176637 - DNA, 408 bp, Zea mays
  Clone ID: MRT4577_92684C.1
gaaaaataaaccagtccaactatatatattagcataactgaagatttatcacggctcacagggccttatcctgacttatcagggggattgcatattatccatccatgcaatgcaccaccacataaatgctagagaaaaattacaaaaggaattattaatgcaatggcactgtgtcgatcgcgccgctaaatgcatgaaggaagggaaagggaaaagctagctagcgccagcagctcacagattgtagccgcctgcggcagcaggcttggtcgcggcatcggcggaggccttgtagccggctttgccatctgcgggcttggtagccgcttccgcagcgggctcgggagcggcatcggctgcgggcttggcagcggacttggtggcggattctgctgcgggctcgggagc

SEQ ID NO: 176638 - DNA, 262 bp, Zea mays
  Clone ID: MRT4577_92685C.1
gtcgccatctccccaccacctcgtcaccgcagaccatgcccccacggggcccccgcgcggacgtgggctaacggtgaacgccacccaaacacacggtgaccgtgcagcccgggaacaccgggttgcacattctgggctccgtcaaaaagggggagccctgccctttgaaatgcggaagcgcctgttaattgctcttcctccaatgccgcgcagtgcgcacaaggttttatgaaggggggggaaccggtatctccatttggca

SEQ ID NO: 176639 - DNA, 2373 bp, Zea mays
  Clone ID: MRT4577_92686C.1
cgtcgtcctccctctcctcccgggaaggcatcaaaattctttgctaaaaaaggcttcaaaattctccgcttagggaaaaaaacttgattaggagcaatccatcgtttctttactcctcgatcgagagccccattcgttaggggttagggtcgtagcgagggctctgaaattggaatcccaacagaggaattacacccgctttgggacttcggagaagggaatgtcggcaaccatcgaccggctcgcgacaccgagtcatgagggtcgtgcacacagtgacgaaaagcgagagtgcaattctgatgaagagaactcagaaggagaaagaaagcccaaaaaggattccttcaagaagagagcagttactacagggtatagatttaggcattccttaaggagaaagagtaaaacaaagaatgataaccatatagcctcaatagaagacataagagatgttcaagagctggagattgttgaaaggtttcgccagtgtttacttgatgatggtctgttgccagaacatcacgatgattatcacacgatgttgaggttcctgaaagcaagaaaatttaatattgacaaagcaaaacatatgtggtcagagatgcttagatggaggaaggaatttggtgctgacaatatagaggaatttgactacactgaattagatgaagttgtgaagtactatccgcagttttaccatggtgtggacaaagatggaagacccgtttacatagaactaattgggaaagttgataccaacaaactagtgcagatcacaactattgaccgctatttaaaatatcatgtcaaggagttcgagagatgtctccagatgaggtttccagcttgttctattgctgcgaaaaggcacatagactcgtctactacgatattggatgtgaaaggcgtgagcctaaagaacttcacaaaagatgcaagagagctaattatgcggttgcagaagatcaacaatgacaactatccagagaccttatatcaactgtacatcataaatgctggccaaggattcaagatattatggggtacaataaaatcatttcttgatccagaaaccgcttcaaaaattcatgtccttggaaacaagtaccaaactaaattacttgaaataatcgatggcagtgaactcccagaatttcttggtggcaagtgcaggtgtgaagaatatggaggttgtccaaaatcagacaaaggcccttggaaggaccctgaaattttcaagagggttatcaatggtgaggcaaactatggtcgacaagttcttgctgtatcaagcataaatcagaaggaagttggttgtactgaacacacaactgtggaagatgtttcttcttcaacggctttagtggatcccatcataagccctaatttgacccatgtggatgagttaaaatttcaaggacatgcttcctcatctgatgctcctcccattataggggatagcatccctgctgctggcaaggtcatggatgcatgctccaatccaagaaacagctcgacaccttccagctcaggttctttctctttgagaaatataccggcaacattgggaggacttaaaactcgaattgttgcatggtcaacattcgtaatcctgaccttgtcagcattcctctgttctgtgctgagcatagtgaccaaaaggctctcaaaccaggccatcacatgtgaccactatagtgctgacttccatcaaggatatatgggaaatggcacccttacatccgtattgacacggcttggtgagctggaggagaaggtacaagcacttgaagcaaagccaccccaagtgccatttgaaaaggaggaattgttacatactgctgtttaccgcgtggatgtgttggaagctgaactaatttctatgaagaaggccttgtatgagacattgattcggcaggatgagctgcttgcatatattgaccaacaacagacagccaaattttgtcggcagaagttctgtttctaagtactggagtacctgccacctattttcgtctctttggagatcgcatgcagctattgtggacccagtatacttgcaaatgttttcatatttgttgcagtgtaaagaaatgcaatttttagaaatacataggattgaggagcatggtagcttgtcttgagatcgtgttttagcgacaaaaacagaaaagcttgataccttgtacgcattttcaaccagatgcaggcgtaatctttccccagtatttggtgcaaggctccagtatttggtttgcttgtattatactatctctattctcgaatatttgtcatctgctagtttatttttaaactaaaacccgccaaataaaaagaacggagccagcccatgtctttgtttggggatgt

SEQ ID NO: 176640 - DNA, 821 bp, Zea mays
  unsure (1)..(821): unsure at all n locations
  Clone ID: MRT4577_92687C.1
aacacccgtcccgaaggaatttggtgctgacgatatagaggaattcgactacacttgtattattatgaagttgtgaagtactatccagggctttgccatggtgtggacaaaggagtttgagagatgtctccagatgaggtttccagcttgttctattgctgcaaaaaggcacatagactcatctactgcgatattggatgtgaaaggcgtgggcctaaagaacttcacaaaagttgcaagagagctaattatgcggttgcagaatatcaacaataacaactatccagagaccttacagcaactgtgcatcataaatgctggccaaggcttcaagatgttatggggtacaataaaatcatttcttgatccagaaactgcttcaaaaattcatgtccttggaaacaagtaccaaactaaattacttgaaataattgatgacagtgaactaccagaatttcttggtggcaagtgcagatgtgaagagtatggaggttgtctgaaatcaaataaaggcccttggaaggaccctgaaattgttaagaaggttatcaatggtgaggcaaactatgttaggcaagttattgctgtatcaaacataaatcaaaaggaagttagttgtactgaacactcaactgaggaaaaagtcaacgatgcctctgtcgaatctatttctgaggtggaagatgtttcttcttcaacggctttaatggatcacatcataagccctaatttgacctttgtggatgagtcaaaatttcgaggacatgcttnctcatcagatgctcctncctntattaggggtagcatncctgttgctagcg

SEQ ID NO: 176641 - DNA, 489 bp, Zea mays
  Clone ID: MRT4577_92688C.1
gacgcggacgcgtgggcggacgcgtgggatgatgttgaggttcctgaaagcaaggaaatttaatattgacaaagcaaagcagatgtggtcagagatgcttagatggaggaaggaatttggtgctgacgatatagaggaattcgactacactgaattagatgaagttgtgaagtactatccacaactttaccatggtgtggacaaaggtggaaggcctatttacatagaactaattgggaaagttgatacctacaaactagtgcaaataacaactattgaccgttatataaaatatcatgtgaaagagtttgagagatgtctccagatgaggtttccagcttgttctattgctgcaaaaaggcacatagactcatctactgcgatattggatgtgaaaggcgtgggcctaaagaacttcacaaaagttgcaagagagctaattatgcggttgcagaatatcaacaataacaactatccagagaccttaca

SEQ ID NO: 176642 - DNA, 730 bp, Zea mays
  unsure (1)..(730): unsure at all n locations
  Clone ID: MRT4577_92689C.1
attctggaaaaccgcacgaaaaagcgctcctggacggggaagacgacctggtgctcgtgcctccctcccccgagatctaccaaaacccgcgccccgcccatcccgttcctccacctcaccgtccggcgagccccgagcacaccagatcgcccgcgtagctggcggcgcaccgtggaaccgcgcgccagtcaagggtggtggtcccaggcgctcgagccggggcgcgggcgacgcggagacgatgccggtggcggcgtcggccatctacttcctcaacctccgcggggacgtcctcatcaaccgcctataccgcgacgatgtcgggggaaatatggttgatgcattcaggatgcacattatgcaaacaaaagagcttggtacatgccctgttcgacaaataggaggctgttccttcctttacatgaggatcagtaatgtttacattgtgatcgtggttagcagcaatgctaatgtttcttgtgctttcaagtttgttgtggaggcagtggccctcttcaagtcctactttggtggaacttttgatgaagatgctatcaggaataactttgtgttaatatatgaacttcttgatgagattatggacttcggttgtcctcagaatctctcccctgnaaattttgaagttatatattaacccaggaaggcgtacggtcgccattttcctccaagccttcggataagcctgttccaaatgcgaccctgcagttta

SEQ ID NO: 176643 - DNA, 1436 bp, Zea mays
  unsure (1)..(1436): unsure at all n locations
  Clone ID: MRT4577_9268C.1
gtagttcttgcatgtgcattgtctgctcaaagtttgactcagcatctaatacttgtagttgggttggttgtgatgtatgtcttcattggtgccacacagattgtggtctacgccactctctgattcgaaaggggcaaagtgcttcaagggcatatggaactactgagatgcagtttcactgttctgcctgtggatatccatcggagatgtttggttttgtgaaggaagtatttcgaacatgtgcacaacaatggaggatagacatgctggttagagagttacagtatgtagaaagaattttttctgcaagtgaagatgtaaggggcaagagggtccgggacttcgtgaagcagatgctaattaagtcagaaaacaaggcctatcatgctgaagttgtcagatgtgtcattgcattcttttctgatgatggtgctaaccttggcagtgatccatcagtaccactgaaaggcattccatgcagcatttctgaagctgttgatgggattcctagttcaagtcggaaggcatggataccatttaccctagagggacttccagttttagacaaaacaactcttcctaccacaagcacagggagcccatctgtgcctagaaaatctggtgaagctgagtttcagacaattgataataagcctgccactgatgaactggatagcttgatcaggttaaagcaggctgaagcatatatgtaccaggaacgtgcaaatgatgcacggaatgaggttgacaatctgagacacattgttatggtaaaaaatgcacgaattgaggaagattatggcacccatatcgctgatcttgacataaatgagttacaagagcggcgcaagcgaaggattgaagaactccaagtaattgaaaggacacaccatgaatttctcagcatgaaaactaggatggtagctagcattggggagttattgtcaaaaatggaggcactgaaacaaaaccgaagcacatgaactgaggttactattgcagaaatcgaagttgctcaacttgtttaaggaagcctgcacatattgttcttacaggaatgcgcaaagcatcgacatgtgaggggtaaccgaatgtctcactggggatgagccaccccagggccccccacgagtagccgaaggaggagaggtgcagacggacgacgaccatgatggtcagaatgtaacataggtagatatagaggatgtttggtttccatgaccaaagtttagttcatgtaatattaaatatttgaatatcaattataactaataaatgtagacttaattatatttaataaatttgtctcgtctttatctgtataattagttttataactaaattatatttaatatatgcaattattattcaagctactgctgtgatagaagattctttcactttggatcatttcaaacacatangcagaatgatga

SEQ ID NO: 176644 - DNA, 1105 bp, Zea mays
  unsure (1)..(1105): unsure at all n locations
  Clone ID: MRT4577_92690C.1
gattgctcccgatcaacgtcctctaccgcaacctcgtgctgagcggcgccgcgttcggggcgcaccgctggctcgccgcgctgcagcgtgcgtgcgagcggtttgcgtccctggccaccctcggcgtgccgcaccacgacgtcgccggagtgacgccggaggggaagcggagcatgatgaggctgtcgcagcggatggtgagcagcttctgcgcgagcctgagctcgtcgccgctgcagcggtggacgctgctctccggcaccacggacgtgagcgtccgggtctccacgcaccgcagcacagactccggccagcccaacggcgtcgtcctcagcgccgccacctccatctggctgcccgtccccggcgaccacgtcttcgccttcgtccgcgacgagaacgcgcgctcccagtgggacgtcctgtcgcacggcaatcaggttcaggaggtgtcgcgcatccccaacggctccaaccccggaaactgcatctcccttctgagagtgagcaaccgaccatcaaatcttgctcctccgtcgtccattaaacgcgcactgtgctgttggattatgacggttttgacgatgacgaccactgacgacggcgcgcgacgtcgcagggcctgaacgcgaaccagaacagcatgctgatcctccaggagagctgcgcggacgcgtccggggcgctggtggtgtactcgccgatcgacatcccggcggcgaacgtggtgatgagcggcgaggacccgtcgggcatccctttgctgccgtcgggcttcgccatcctgccggacgggcggccggggtcgtccggcgcgggcgcgtccagcagcgccgtcccgctcgcggcggcgccgccgcctccgggctgcgtggtcaccgtcgcgttccagatcctcgtcagcaacctgccgtcgtccaggctcaacgccgagtccgtcgccaccgtcaacagcctcatcggcaccaccgtgcagcagatcaaaggcggcgctcaactgcgccggccctttgatcgctcgnctnacccccgccacccttcgncgncacagtgactgacgagagttggtccgcccgttgaatgctcgcattcatggaacccacct

SEQ ID NO: 176645 - DNA, 378 bp, Zea mays
  unsure (1)..(378): unsure at all n locations
  Clone ID: MRT4577_92691C.1
aaagananaacaccgcgtgcgctcgcacacaagctctccaaaagcgtcccgagcaagtacacctgcgtcaacaacaaaaccagtgtggatcaggacgctattcggtactactaccacgtgctcatccagttccaggacaacaacagcaacctaaaaaccgcggacctcatcgaggccgccagtcacaactggactcctattgcgcacaactggggcaccacaacaaaacctcaacaaccgcacgaagctcaaaacaccggtcgagctccggctaacctccgactcccgcagaaagctcgtccccaacaacgccatacagaacatatgaaaacccagcaagaactaccgatccttgggcaactacccctgaaaagagaa

SEQ ID NO: 176646 - DNA, 194 bp, Zea mays
  Clone ID: MRT4577_92692C.1
cgcacgcgtgagacaaccactaccggttcttctgctagctggagtgagccctgctaccgttttgactcaaccacattatgcgccgtactagcagatcgctcatcctaatgctggcacactgctgcaactgcaacaagtgctgcccttgaaccaacttgcttcgacagacccaggagcaatctagcaacaaccca

SEQ ID NO: 176647 - DNA, 568 bp, Zea mays
  Clone ID: MRT4577_92693C.1
gactcctatagggcgattgggtttctcgaggccggccggggatccacagtatccacccccaccggttggttctcctcctttcccggagacatcctgcaggcatcgacaggagaaatggttcgtacggaggaaccgcccgccggccaccgtacgatgggccacgcgaacgtacctcggcacataagcgaggagagaaactgactgctacaaccagccagcggcagagatcccacaggcaccctcccaggacaacgtgggttacttagatcctatgatacttgaacaggacgcaatctgcttatgaaggaggagtccttacagttgctgtctttttacatgactaatgtcttctggatggatctgaggttacggatctgacccatattgatcctcccaaaattcaccagagtgtgctaactatatgcgctctgatttatgaaggacacatgtgagccatccacttcaaattcgaacaccatcttgtgagtatacatgctcttctgactgcacctaatccagatgacgcctctatgcggatactttgccacagcactggaaatccaataag

SEQ ID NO: 176648 - DNA, 378 bp, Zea mays
  Clone ID: MRT4577_92694C.1
cctctcctctcactttctgaattccccgttgctctcccgtcttccctcctcccctccccaaacccccaccccaacgcccagatctaccctccccatttacagctttctctccggccctgcgccccagggcaccgcgccgcccgaaaccgtcggcgccggcgcgatgcgcgtgcgcggcggctcgttatgcaacgtcagatatgacgaggaggagcggacgccgctgctcctccactgcggccatggattctgccgcgcgtgcctctcccgcatgctagcggcagcccccggagccacgctgccgtgcccgcgatgtcgccatccgaccggcggaggggggtcagtctctgcgctgcggttgtacttccccattctatc

SEQ ID NO: 176649 - DNA, 2134 bp, Zea mays
  Clone ID: MRT4577_92695C.1
ccggccgggattttccgaccgacgacgaagacgacacttcaacccaacccccggacgtcaattgcttcctctcgattcaaaatgaagtactcgctcgcccccttcatcctccgccggccgtggcttgcccgctttttcaagcccgccgctacctggtacgtcaacactgccgggcaccgccagatgggcctcaaatacgacgatctcctcgaggaggagaacgagaccgcccaggctgccctcaagcgcctctctaaccgcgagtcctacgagcgcatctaccgtatccgacgtgctgtccagtgcagttaccagcacaagctcctccccaaggaccagtggactacatccgccgcggacaagccctacctccagcctcttatggaggaggtcgccgccgagaaggctgagaagaacgagctcgactccatcgctgtcgtccgaaagcactaaattatttttggccctcgggttgggaggacagtaggaagaagttgaagagcaggacggtggttgaaagagggaattgcccgcctcctagagaaatggcggccacacctcaacggactagacaattcccgtgtatcctatgtagacgtctaacttgactcatttgcaaaaaaaaaaaaaaaaaacccggccgggagccgcatcccttctttcattcgccgccgccgcctgctctctgctgccgtcgccatggggagaaggcctgcgagatgctatcgccagatcaagaacaagccataccccaagtccaggtactgccgtggtgtccctgaccccaagatcaggatctacgatgttggcatgaagagaaagggtgttgatgagttcccctactgtgtgcaccttgtctcttgggagaaggagaatgtctccagtgaggctcttgaggctgcccgtattgcctgcaacaagtacatgaccaagtctgcaggaaaggatgccttccaccttcgggtccgggttcaccccttccatgtccttcgtatcaacaagatgctttcgtgtgctggggctgataggctccagactggaatgaggggtgcctttggcaagcctcagggcacctgtgctagggtggacattggtcaggtcctcctttctgttcgatgcaaggacaacaatgctgcacatgccagtgaagctctgcgtcgcgccaagttcaagttccctggccgccaaaagattattgagagcagaaagtggggcttcaccaagttcagccgtgccgactacctgaagtacaagagtgagggtagaattgttcctgatggtgtcaacgcaaagctgctcggtaaccatggaagacttgagaagcgtgctcctgggaaggctttcctcgaggccgttgcttaagtccaatctacagttggaatgcgaatccagacgttttgctttagcctatcttattttgctttgtgcaacatgaattttaagtgtatggggtattacagtgccttgtcttgtgtgaacctgcttatctcgtgctgaacatcgttatgcatggaagtacttatcttttgttctgctaaaaattaagtgttctgcgtctaaaaaaaaaaaaaaaaaaaaaaaaaaaaaaaaaaaaaaaaaaaaaaaaaaaaaaaaaaaaaaaaaaaaaaaaaaaaaaaaaaaaaaaaaaaaaaaaaaaaaaaaaaaaaaaaaaaaaaaaaaaaaaaaaaaaaaaaaaggggggggccgtttttaaaaggaccaaatttacttccccttccttgcaaaggtaaaattttttttttggggcccccaaatttaaattaatgggccggggttttaaaaacgtcggaactggaaaaaccctgggtttccccaatttaatccctttgaaaaaaatccccttttccccatttggggtattaccaaaaaggccccccccgatcccctttccaaaaatttgcccaccctaaatggcaaagggaaccccccttttagcggccctttaagcccggggggggggggggttccccccagggggaccgttacatttgccaggcccttaggccccgttcttttggtttttttcctttcttttttcccccctttcgccggttttccccgtaaagttttaaatggggggctccttttagggtcccaattaagggttttacgg

SEQ ID NO: 176650 - DNA, 691 bp, Zea mays
  Clone ID: MRT4577_92696C.1
ttccatttagttaaatctacattgtagctggacaaatgtttgaatgcagcattgcgcgcatgtgtttagggggcgcttgcatgaagtcttgcgtgcgcactgcatgcgtgtgtgaagggacggaggactacatctttattttgcaggataagatactttttgctatagtctggtcctgtttggttcttctagaactaatcgttagcctctaaaattagatatagaggttttaaacactcacaattgtcagctatttaacaattagttcattaactcgttaactggattaatctagctattagcaatttgttagctggctaactattagctcttggttccaaacataggccttaatttgagctttctcctttgggtgagtttattcttaatgcctccttaaatttccctcttctcaaaatcaaaaaatgtatttactttccagatgttttcccctccttttcaaattaaagatgttttgactttccagattttggtatgcttgtagttaaatctacactgtagataaagaaatgtttgtggagaagtaaaaatcccttatttggtcgtcatggtaaatggctgcggtggacatgtgcagtctctggcgactgatgttcagtgatcttgctgttctattgtttgtatattcgtgtcggattgttattctgagcaaaaaaaaaaaaaaaaaaaa

SEQ ID NO: 176651 - DNA, 1622 bp, Zea mays
  Clone ID: MRT4577_92697C.1
ttgggaccctcgaggccggccgggtctatataaagtgtccctctcttccctccaagccctagacgcaccccttcctcgtttcgccgcctccgccgacaccgactgcctacctcagctgccgtcgccatgggcagaagtaagttcgcctttttgattaacctccttcgtacgcttctactgcgttgattgttgcagtccatagggtactttcttttagtccggcgcaaatttcgactagatccacacgaaatcgggtatatgcttttgatgatcccggggttcttactgtccacgggcttaatatttgatgtttgtttgctgagttgatgatttgtggaactcgcaaagttgttacgtattatcgtatcaacaagagaatggctgggacctgggggatttggtaccatatattcacatttcctgtgtataaagtcaacacgctcataatttagaatccgtgtagacctttatctgtcaaaaaaggggagtattagtcatattccatggcattgtgaataacgcatttagtattagtattcgtttgtatgccatgaatcaacactataggaccaatctgtctacacttcatttgctcattctgcctgcttaataaaagcactgttgtatattttgtagaaaataatgctctgttttgcatcaattcaatgatttatatctgtttgcactgaataattttatcactgcagtgcattgctattatgctgttgataaaattgagctttatgtttctgaaactttgctagggcctgctagatgctatcgccagatcaagaacaagccgtaccctaagtccaggtactgccgtggtgtccctgaccccaagatcaggatctacgatgttgggatgaagaggaagggtgttgatgagttcccctactgtgtgcaccttgtctcttgggagaaggagaatgtctccagtgaggcgcttgaggctgcccgcattgcctgcaacaagtacatgaccaagtctgcaggaaaggatgccttccaccttagggtccgggttcacccgttccatgtcctccgaatcaacaagatgctttcgtgtgctggggctgataggctccagactggaatgaggggtgcctttggcaagcctcagggcacatgtgctagggtggacattggtcaggtcctcctttccgtgcgatgcaaggacaacaatgctgcacatgctagcgaagctctgcgtcgcgctaagttcaagttccctggccgccaaaagatcattgagagcagaaagtggggcttcaccaagttcagccgcgctgactacctgaagtacaagagcgagggcagaattgttcctgatggtgtcaacgcaaagccgctcggcaaccacggcagacttgagaagcgtgctcctgggaaggctttcctcgatgccgttgcttaagtgcggatgcgaatcctgacgttttgctttagcgtatcttactttgcttcgtggaacatgaatttcaagtgttttgagggtattacagtgccttatgtgaacttgcctatcttgtgctgaacatcggaatgtatcctccgagtatgtttaatcgcattaattttattggaaatttgttgccaaaaaaaaaaaaaaaaaagcggcc

SEQ ID NO: 176652 - DNA, 772 bp, Zea mays
  Clone ID: MRT4577_92698C.1
ggaaacggaaacttctctacccgcgcccgtacacggctcttgcctccatggcctccacggcggccgcggcggcggcgccggtggtgatggtgacgaacgacgacggcatcgacgcgccggggctccgcttcctcgtcgaccagctcgtcgcccaggggcgctaccgcgtcctcgtctgcgcgcccgacacagacaggtcgggcgttagccactgcattacatggcgttctgcacttcgctgtaaacgtgtcaatatcaatggtgctacagcatttggagtttcaggaactcccgctgactgtgcctctttaggcatctctgggaagctctttgatggtttggttcctgatttggtgcttagcggaatcaacattggcaataattgtggattacatgttgtatattctggaacagttgctggtgctagggaggcatttatatacgggattcctgcattatctatgtcatacaattgggttgctggtcagagcagtgttaatgacctcaaagtggctgcagaggtttgtatccctctgataaatgctgtcatggtcgagatcaagagtggaacctaccctaaaggatcattcctgaatatagatgtgccatctgatgctgcacaccacaagggatacaaaattacaaagcaaggaaaatatatggccagaattggatgggagcaaacagtctaccaaaagccttctgtagaaagttaccagacggcaagcatggatattgacggtgaaaaggacagagatatagacacttcatc

SEQ ID NO: 176653 - DNA, 796 bp, Zea mays
  unsure (1)..(796): unsure at all n locations
  Clone ID: MRT4577_92699C.1
ggccgggcccgggacacagcacagcacacgcttccttctctacctcgttagctagcttagcccggccgagggagagaagcagaagcagtagaggcgaccttttttttctgttctctgatcgagctctgaagaccggggatggcgtcctgggcggctctcctggcgctgctgctctcggcgttctcggcggcggcgcagctggacgagaggttctacggccagtcgtgccccagcgtggaggacgtcgtgcggaaggagatggtgcgcgcgctctccgtcgcgcccagcctcgccgggccgctcctcaggatgcacttccacgactgcttcgtcagggggtgcgacggctcggtgctcctcgactccacggcgaacaacaccgcggagaaggacgcgaagccgaacctgacgctgcgcggcttcggcttcatcgagagggtcaaggccgcggtggagaaggcgtgccctgacaccgtctcctgcgccgacgtgctggctctcatggccagggacgcagtgtggctgagcaagggccccgttctgggcggtcccactgggggcggcgggaacggcagggtgtccatctccaacgagaccgaccagctgccgccgcccacgggcaatttcacggagcttggcccagctgttcggcgccaagggcctggacacggggaactgtggcgnggctggtcggcgnccacaccatcggcacgtcgcactgcttctccttctcggacgcctctacacttcacggncctggacgacgccgcgacacgnacccggagctggaccgcgc

SEQ ID NO: 176654 - DNA, 620 bp, Zea mays
  Clone ID: MRT4577_9269C.1
cattgggtacctcgaggccggccgggactccctcttccacatagggacctctccgagtcgtggcgatggccaccgcgcgcctgtccctccgggtcgtgcggtccaaacgctgaatcgcctctgtcgtcgctcggtgtgccgactctctctgcggcatcctattgtagtcgcggcgttgacgcatccgaaccgtcggagacgaagcgtctggagccgtacgacgactaagccttgcgaccccagcacgacgctgagaagagatccgcgataccgaaggccatatagtgatcagctggccgccgcggctctcacgaaggacgtgcatatctctcactcgtgtgatggttggtacttctgagttcataccgatacgtggtaggtatatatgctcacagagatctcaatagtgccaatggcaatgatctcgatcatattcagctgggagtcactggagtcagccacgcgtagaaccagacatatgtcatgccggcgtgcgaccgatctggtgaacactgacggggtggatgacgggaactccatgacaacgcttttgtgtacacatacaacttgaactgaagcaccttaggagacttggacacagactgtcaaacacaaggttg

SEQ ID NO: 176655 - DNA, 348 bp, Zea mays
  Clone ID: MRT4577_926C.1
cgtccgaactcccggtcgaccccgcgtcctgtcgtccatgaaggagcgctgcggctgcacccaccggggcccctgctgctgccgcactactccaccgtcttccttctcattggggacctcccagtcgaaatggtacatgaggttggcgagcatgatctccatggtcgcgagcgcgaagttggccccggggcagatccggcgcccagaccggagcggcaggtacctgaagtcctggccgctgtagctgttggacttgtcccagccgtcccgtatgaacctgtgcgggatgaactgcttgggcttgtcccagaccgttgggtgtgtggcgatggtggtgtcgtttatgat

SEQ ID NO: 176656 - DNA, 1262 bp, Zea mays
  Clone ID: MRT4577_92700C.1
cattgggtacctcgagccggccgggccgggagtagaggttgtacttgagacagacaggacggacgtgcacatccgccatattcaccctcgagtccggccgggccgggagagcagggtgtacttgagacagacaggacggacggccacatccgccatattcaggcatggaagcaccggctgcgaagcgcgtcctccgcgtggccgccatcagcggctccattcgcaaggcctcctggcacagcgggctcatccgcgccgccgcggaggtgtgcgaggactgcatcccggggctgcgcgtcgaccacctcgacgtcgccgacctgccgatgctcaacaccgacctcgagacgaacggtggtacgggcttcccgcccgccgtcgaggcgttccgcgccaaggtccgccatgccgactgcttcctcttcgcctcgcccgaatacaactactccatcaccagcccactgaagaacgcgcttgactgggcttctagaggagtgaactgctgggcagacaagccggccgccatcgtcagcgcgggaggcaacttcggcggcggcaggtccagctaccatctgcgccaggtcggggtgttcttggacatccatttcatcaacaagccggaactgttcgtattcgccttcttcgagccggccaagtttttcgacagcgacgggaacctcatcgacgccgacaccagggagcgcctcaagcaggtgctcctgtcccttgaggccttcacgcgcaggctccagaacaacaaggactgaagcagcagctccccgggatcgccgtgctaataataataatctctacttccttccttcagcaattagtaattcgtggtcgtcttattacaaaccaaagtatatgtgctcgaacctataataaaatacatggagaacttcgctaaaaaaaaaaaaaaaaaaaaaaggggcggccgggccccatcccccgcccccgctcgcgcgggtgatatttcatgacacattcttcgaggaaagcctggaccagaagaccgaggatggcaagccttttgctgatgtcctcactgagggaggcgtcctccctggcatcaaggtggacaaggccaccattgagtgtgctggcactgataaggagaccaccaccccaggccatgacgaccttgacaagcgttgcgccaagtaccactacgaaggcgcccgctttgcctacgggcgcgcttgttcctcaaaattgcgcctactgaatcatcacaccttgccatcgaactggacgctcag

SEQ ID NO: 176657 - DNA, 188 bp, Zea mays
  unsure (1)..(188): unsure at all n locations
  Clone ID: MRT4577_92701C.1
cgggccccccctcgagttttttttttttttttttcgcagggaacgaaaaatttattcagggccctaaacaatcttgtacgtgtttatctgcctacaagacnngcagcagcagcttaccccnngtcaggcgtggcctccatggaacccacaagcagatacccaagatnntcacagcaagggttcatgaa

SEQ ID NO: 176658 - DNA, 825 bp, Zea mays
  Clone ID: MRT4577_92702C.1
tccgcgtggccgccatcagcggctccattcgcaaggcctcctggcacagcggactcatccgcgccggtacgtacgtctgttcttttctcgctgaaacaccatatttatatatatataggaatgggtacactagcttggcaattatccagccgcggaggtgtgcgaggactgcatcccggggctgcgcgtcgaccacctcgacgtcgccgacctgccgatgctcaacaccgacctcgagacgaacggcggcacgggcttcccgcccgccgtcgaggcgttccgcgccaaggtccgccacgccgactgcttcctcttcgcctcgcccgaatacaactactccatcaccagcccactgaagaacgcgcttgactgggcttctagaggagtgaactgctgggcagacaagccggccgccatcgtcagcgcgggaggcaacttcggcggcggcaggtccagctaccatctgcgccaggtcggggtgttcttggacatccatttcatcaacaagccggaactgttcgtcttcgccttcttcgagccggccaagtttttcgacagcgacgggaacctcatcgacgccgacaccagggagcgcctcaagcaggtgctcctgtcccttgaggccttcacgcgcaggctacagaacaacaaggactgaagcagcagctcccgggatcgccgtgctaataataatagggacatttacatttcacccactagtgtggacgtgctgctcaaatctaccccgcccaaattttctacttagttttcccctcctacctccacactttgctcagaaatcacctcacgacggcattttcttcc

SEQ ID NO: 176659 - DNA, 702 bp, Zea mays
  Clone ID: MRT4577_92703C.1
gcggaccttagctcgggcaccacatacgagacggcgcccaaccccaagggccgctggctgactaaatatccgggtacaatgctgcggtttgcctagcccaaagtcagatacgtggacactatgactcagggaaagcacgaacataaatgaacacactggcggcggatggggctcttcgctactaccggacgataggctcatagcatcagctagcacgaaagtaacacttgccttaaactacagatgcacacacatgcaagctatcgcatgacgacatgacaggtgcagaaggaacggagatatatagcattgtcgtctaacgacgaacagcgcaactatcaagctgcgacagggctaaacgatcaattcatgtcgtagacccaaagattgatgggggatcgactgcgacagatggacctatacctgctgcagatcctgaagtgaaccatatatacacgcagtgtttcggacattagggccgtattgacgaatgtctgcatgtggggagcagagctattacgctccacgtagtggaacagtaaagtgttgcatatggacatgagaagaacaccgcttcatatgatgacttggatggaggctagtacagatggcaattcaacccattgattggaggagaaatgccgcagatggagagctacagtgttgtaaaaccgtcagatcaacggtagcgacacacaatta

SEQ ID NO: 176660 - DNA, 873 bp, Zea mays
  unsure (1)..(873): unsure at all n locations
  Clone ID: MRT4577_92704C.1
ctcgaggcttggccgggaaaaaaaaaaaaaaaaaaaaaaaattttaagactgagtctgangccaatctgacatggtttgatcanngcgactccannagccaagatacttaatgggtggttgatggtnnttcgtatggtgggcgangaaccgnngtttcaacccaagctannttgaattantcnntgctgnnagattcnntagcaaatgtnnngaaattcannttcaagaaaaagnnaagttaattggggcaagtatttnnttgaagaagatnncagtcaggatacctgggggaaatatgtnnctttggtgggttgatgaccactttctgaaggctnncttgaaatggggtnngctgtcgagaaaccctgnnattgtgtggnngaaaatctggnnatatcaacagatatngnntgatcaagaaccagtacnttactggggaaattatnntataaaacatctgaaccaaaganngcaggaagctgacccagagcaatntnntccgtgacccatctaccaatannctgatctcgaagttcaggaanaaaatgtctctcctgngaatggtttgccaatgaatacaagaagntttggttgctcgctggagncttgtgaccaacaagtctcaggagggatcccagttctgtagaggatttggtggcattggtggcatgttgcgctaccagctggatatccgttcttttgatgagctntctgatgatgacgatgtgtatgaagactctgactagcaatcagccaatctcatgccagtgctggcccatggaaggacgcaacagctcgacctcgccatacctacgcaggagcacacgnaaagcaactatccaaggattaatgggcatgggccagcgtcatcc

SEQ ID NO: 176661 - DNA, 436 bp, Zea mays
  Clone ID: MRT4577_92705C.1
aaccattgggctgatttatgtgcttgtatgtatgcctgctcaaagtccgactaccccgaggatcagatgtagaggttagctgagggggaatccacacccgaggggactgctacgcttactaacgaagcctaccgcgataaaccctataaagcgccgacgctcgactatccctcgcatctactgcgtccttccgcgatccctacgcacggacgtattcataataccgagaggactacgaacgtatacgtttcgagggatctgcgtacagcgcgtcatacgcttaataatatgctaacggatactaatttagagaatttcactacggacgaatcatgtatctacgtctctgtcgataagaacgatcagctagctactgactctccaacctcgtcgacttagatcgactcatcgattcatggacctacatcgtacgatt

SEQ ID NO: 176662 - DNA, 584 bp, Zea mays
  unsure (1)..(584): unsure at all n locations
  Clone ID: MRT4577_92706C.1
nagtggttcaccaccacacccacataccccatccctagacacaacaagcgggctgatgcacgggagactgatacacaaaacagtgcactaaccctgctccgagcataggatcgtccatacgccgcacaccgagactgcaagagatcgatgaaactcaccttaaccgccatgtatctactccggactgggcctgtcatcctgacagagactccatccaatgaagcgctcctaccagttcatccactgagggctgactgacaggccgaagtacgactgactcggcaccaacgctctgcttttggctggcacacaaccaatgacgaggctgcattggcactcaaacatccttgatgaccatacttgattggaaaccagacaggactaaagggtctccacggctaagcaatcaacactacacaacacgacatggttcataccaatggccgatctaccactgaacccatgcttcactcatgggcaccgcacccactaacagaacaaaccttgcctgcctatgaacaacaggaacttaccaccatgccctataagtcatctgtcctgtgaatcagcgcatgacattaacc

SEQ ID NO: 176663 - DNA, 537 bp, Zea mays
  Clone ID: MRT4577_92707C.1
ccggccagctcacttacactcattcactttactcatcgacgcaactcaacaaacaaaaatggagactatatatctcatcatcggtcttttattctgttacgggtggccgagccatattcgcggaccggtcccccatccccgagacctcaggaaaggtctcaaagtgaccgaggcatgagagttagacacagacctctcttcaaacatgcatgctgaggaagacttttacgccgtctggtgacctgcatgccgacgccatcgtgcacacgtctttcctactaatcgactgaccagcacgcatacaaccggtcatcgggctattgagaaggtcaaacctggttcagtatcactagaagtatgctggaaagatttgaaccataagatatatcgactatgggctgatgttaagcaagcactggcgagggcagccctagaacttcagattatgttgcgttcaatcagggatagttgcccgcttggcgtgctatggacatagctgctaccagcgggaaaaggtcggccggtcgcagtatcgca

SEQ ID NO: 176664 - DNA, 1091 bp, Zea mays
  Clone ID: MRT4577_92708C.1
gctgccggacaaccgccacggccgccgcgccggggtacctcgaggccggccccgcctcctccccgagcgagccgcacgccgcgctcctcctggctctgacctacatgcggctgcgcgagctgctgtcctgcgctcgcacgtgccgcggcctccgcgaggccgtcgcgggggacccgctcctgtggctgcgcctcgtcgtggagccgccgctcagccaccggatcacggacgaggcgctcctcgcgttgacggacagggcgcaggggaggctccggtcactccacctcctcgggtgcccccgcgtatccgacgccggcctgctgcgcatcgtcgagcgcaaccacgacgtcaccgagctttttgtgcccagatgcacaggattaacagctgatggtctggtgaaaatcattcattttctgcatgggcagcacaaaggcaatctaagtcgtgttcgactgcatggtatctgcaaggtgaataaccaccatctcgatattatcaagtctctcatgtgcagaggtagccaacaacaagatgctcaagcacttcactacaaccatagagtccatgaagtgctgaacacggacgacggtcgccctattgatgtagatttgtgccctttgtgcagaaatgtgagactcgtgtttgattgtacaaggaagaactgcagggaagtgaaggatggccggtctcgatgccgcggttgcttcttttgtgttgctagatgtgaaacttgtggtggctgcatcgacctggaggagctcggtgagtctggactagcctgctctgactttctgtgcatggattgctggctcaagcttccaaaatgctgcacatgcaaccgtccctactgcgagaggcattcaaatttgaaagagaatctatcagcgtctgggcagttcacatgtcaggagtgtgcagcgtttgctacctcactcagaagtcggggagaaggttactagaagagatgttggctgctctgtctcggtaaccaaataattgggacttttaacacgtgactcgttcccctgtaacaaacagcctttcttattgattcaatcatctcgtgtggacggagcttataagacctg

SEQ ID NO: 176665 - DNA, 177 bp, Zea mays
  Clone ID: MRT4577_92709C.1
gtgacacaacacgcaacactgcatgtggcatccagtcacatcaatcgagcttctatgactgccaacttgtctcccctcggtatgctcagagctctttctttaacagttgctaacgctacaatttttgctgaccgatcacacgcttctatagcaaaccttgttgccgcatacctttca

SEQ ID NO: 176666 - DNA, 378 bp, Zea mays
  Clone ID: MRT4577_9270C.1
ggagacatgtcgacctttccatgcgcatcgaccagccgctgtcgtgtccacgcaccacgctcgactcgatcgagagagagagatccttcttcgccacgcgcagcatgcctgccaagccgagacccgttcgttcactgaccactcgctgccacgcagtccgcacccgccatccacccacgaccacgaccacgaccacgaccgcgacctccccggcaagactcacacggtggaagggaagaggaggaggtttcagacgaagagcgccgcgttgttcgcgtctgcctgcagggagtgggagagcgagagcgagagcgtctcggccccgctctcgctcgcggcggacagctcctgggccccgagcctgcaggtggagcgcga

SEQ ID NO: 176667 - DNA, 152 bp, Zea mays
  unsure (1)..(152): unsure at all n locations
  Clone ID: MRT4577_92710C.1
gnaatttctgtggntgttgaagctggnataggttcttgctgcaagtgaggaataagacagttctggatattttagttaaagagggcatcagacgtggctatttgatttccagacgatgtgaaaagcctccaggaattagttctagatcgcga

SEQ ID NO: 176668 - DNA, 259 bp, Zea mays
  Clone ID: MRT4577_92711C.1
actgcgttcctccaccaccagatatatcgttggacacatagtacaaacaggatctacatagcgaggtcggcgtcgaagatggcttccatcatgacttccaagcagatcgctagtgcttgacctgcttcattgccatgaccgctctggccttacacccctgcacatccgacgtgcgcatgggacggagcccagaccacaacccggactcccccaccaacgccggaggcgcctccgccaacgagccgctcctcgccggacg

SEQ ID NO: 176669 - DNA, 1514 bp, Zea mays
  Clone ID: MRT4577_92712C.1
caatgctcgaggtcgggggggggcggcgaagtttagtcatcgtctccagctgctgtcttgctcttccccgccagcaccagcacgcagcacgcagccaccacaccacccgtcacgtcactactgctccttcctttgtcctctcctgcctcacgtctcacgccagcagaagcgccaaacaccagcagcggacgaccacgccaactctaggtctacgaggaaggaggggggagggaggagcagcgcagcggcagccgatggtgtcgatgagctcgacgccgcaccctctggatccgtccgttccggccgtcgtggggggcggcaaggaggaggaggaggcggtggagtcttgtgccgccgccgcgcccttgccgccggttgggatcgacgacgacgaggagggcccccggagagtgcgcaagccctacaccatcaccaagtcgcgcgagagctggaccgaccccgagcacgacaagttcctcgaggcactgcagctctttgaccgtgactggaaaaagattgaagcatatgttggctccaagacagtaatacagattaggagtcacgcacagaagtactttttgaaggttcaaaagaatggaacaggtgagcatttgcccccacctaggccaaagcgaaaggctgcccatccatatccacacaagtcctcaaaaaaggcccttcaagttgtcttaccacaacaagtttcgcacataatggagcaaggctgtggtacacctatggatgtagctactgttgctacagactctagtgtaaataatgcttttcctgttcaacatttcagtccgaggcatacacaagccatgccagactttgctcgtgtatacaacttcctgggaagcatatttgatccagagacaaatgggcatttgcagaagttgaaggaaatggatcccattgatgctgaaacggtactgttgctgatgaaaaatctgtcaatcaacctaactagtccaaactttgaggagcataggaggttgctctcttcggatgcctcaagcatggatcaaaagtcgggctcttcccgggttcatctcccgttcatgataacgagcaagtgagagaagcagctggctggcctgaaggcaagaaggtcgtttggagtcgtcacactcaggagcaaggcgatgcgtatgtacatatatcttaataagcagctttaggatagcttggtttgctcgacccacatgttgcaagtttatgcgcctttttctttattctctgcccctccagttttgcccattgtagtatggaacttataacatgcgtgttttatgccgcatcttacaaaatttttttgtcccatcacaaggatgaacgggtggggcatgtgtgtgtgttttttgccgtgtgtgtatgtatacaacatgcggctgtgtgtagatcaggctatatatataacagactctgtgctgttctattattgccctcgtttcaaatacttgttttttttgccgttattaataatattattacatggagtatggtattagtat

SEQ ID NO: 176670 - DNA, 130 bp, Zea mays
  Clone ID: MRT4577_92713C.1
gtacggtctagaattcacgggctcgagcacgcgtcaggccggactcgccgcccgcgccggagctctgcaacccgccgcagccgcatcaacgttcctccaaagtctctagccggggccaccgccaccgccc

SEQ ID NO: 176671 - DNA, 170 bp, Zea mays
  Clone ID: MRT4577_92714C.1
tcccctccgccgctccccccagtccccacctcacctcgtcaaccccctccttggatagggttgaggtcccccgtcatgagcgagagccatggactcgttcacctgctgccaggtgggcgctagggcagcgaccggagactcgtccttccacagataccggccatggagcg

SEQ ID NO: 176672 - DNA, 118 bp, Zea mays
  Clone ID: MRT4577_92715C.1
gcatcttctggattctagtaacttatgctcctggtttttgtttctccattccaatactaacttcctaccaacatgaatatgggttactaaacatttcaatccttgtgtaggggtttct

SEQ ID NO: 176673 - DNA, 1806 bp, Zea mays
  Clone ID: MRT4577_92716C.1
tcgaggccggccgggccgggccctctcatcgtgttcttcgttgtccaccttggcccacgggccaacgctcctccatcctgtagtgtagagtatattcccgttgcgaccgagccgagcatcgatccagccacactggccactgccagccagccatgtggcactcctacgtatactacgtgagaggcccgctcttgctataaacgaggcagctggacgcgactcgacacatcggccgcaaacctcgacgaaggaggaacgaacggacaggttgttgcacagaagcgacatggctttcgcgcccaaaacgtcctcctcctcctcgctctcctcggcgttgcaggcagctcagtcgccgccgctgctcctgaggcggatgtcgtcgaccgcaacaccgagacggaggtacgacgcggccgtcgtcgtcactaccaccaccactgctagagctgctgcggctgctgtcacggttcccgccgccccgccgcaggcgccggcgccggcgccggtgccgccaaagcaagcggcggcacccgccgagaggaggagccgtccggtgtcggacaccatggcggcgctcatggccaagggcaagacggcgttcatcccgtacatcaccgcgggcgaccccgacctagcgacgacggccgaggcgctgcggctgctggacggctgtggcgccgacgtcatcgagctgggcgtgccctgctcggacccctacatcgacgggcccatcatccaggcgtcggtggcgcgggctctggccagcggcaccaccatggacgccgtgctggagatgctcagggaggtgacgccggagctgtcgtgccccgtggtgctcctctcctactacaagcccatcatgtctcgcagcttggccgagatgaaagaggcgggggtccacggtcttatagtgcctgatctcccgtacgtggccgcgcactcgctgtggagtgaagccaagaacaacaacctggagctggtgctgctgacaacaccagccataccagaagacaggatgaaggagatcaccaaggcttcagaaggcttcgtctacctggtgagcgtgaacggagtgacaggtcctcgcgcaaacgtgaacccgcgagtggagtcactcatccaggaggttaagaaggtgactaacaagcccgttgctgttggcttcggcatatccaagcccgagcacgtgaagcagattgcgcagtggggcgctgacggggtgatcatcggcagcgccatggtgaggcagctgggcgaagcggcttctcccaagcaaggcctgaggaggctggaggagtatgccaggggcatgaagaacgcgctgccatgagtccatgacaaagtaaaacgtacagagacacttgataatatctatctatcatctcggagaagacgacgcccgcccgcccaataaaaataagccaagtggaagtgaagcttagctgtatatacaccgtacgtcgtcgtcgtcgttccggatcgatctcggccggctagctagcagaacgtgtacgtagtagtatgtaatgcatggagtgtggagctactagctagctggccgttcattcgattataattcttcgctctgctgtggtagcagatgtacctagtcgatcttgtacgacgaagaagctggctagctagccgtctcgatcgtatatgtactgattaatctgcagattgaataaaaactacagtacgcatatgatgcgtacgtacgtgtgtataaaaaaaaaaaaaaaaaaaaaaaaaaaaaaaaaaacgtggacacagagctggggaacctcatggaggtgacgccggagc

SEQ ID NO: 176674 - DNA, 310 bp, Zea mays
  Clone ID: MRT4577_92717C.1
caacatgtgtgaaagagttgctctatctttcttgaaatgaaatatgatgtttttgcatgtttttctgagactgtcttgtcaattcgtttgaagatctgtctatttagtatctacctaaaggataatttggttatctctagagctcatactattcctgaatttcaatcatgcacagaccccacagacacaaacagtccatgattatttctcaatgtgtgatgtctaaagtgcggctgctcgcgatatagaactagtcttcattgcttgtaaattttaacaaaatgtttgggagaattaacgtgtttttgga

SEQ ID NO: 176675 - DNA, 427 bp, Zea mays
  unsure (1)..(427): unsure at all n locations
  Clone ID: MRT4577_92718C.1
aaaaaatatttctgttcttgttggccttagctcatnntattttgcataccctttcttatcacatgnaagnaanaattattgactattatggntgcgtaanntttaagttcttaccaccagtttgtttgttaactagnnagattaaaaattntctagtgtggggcgcgggggnnnacagtttttttcttcttnnnccttgcagtcnggaaaattaagtgagtacaatcgtcagaagggtgaaagagtgcgaagcattggcacataaagtgtngaaccaagcgnnacagtgattttgttgaaccgaatgacaattctttgtgaagaccgcccatnttgccaattctcttgccttttgtcatgtggtgaggaaacctntaatctggtacctcaaacctttggcattgaatctaaatctactaggcccaac

SEQ ID NO: 176676 - DNA, 514 bp, Zea mays
  Clone ID: MRT4577_92719C.1
ggccgcttttttttttttttttttctttattttttttttcttttcttttttttggttatttcttgtttttgtttacatcttgtctcctttggtgatggttgacactacttttcttatttgtcgtttatgagtaaaggagaaaagctattgtttctttgccagcggatccattacatttaggactacagcacaaagggaccctcagcaccaggggggcggcggagacagagttgcaaggacagggacccgaaaggtgcaactgcaggccgcacatcggcggcagctgctgagcaacctgggccgccatgagggcccccagcccgccctgcggctggggctgcaggaaggactgcaggaccacaccaaatgccgcctggtaccggtgcattgggcccaccagcactgacctggaggcagcactgttgctgcagcgcctggcactggggcgagccgccaaaccccgaacgacgggctgcaccggggcctgaggcaactcgacgcactggcccaggaa

SEQ ID NO: 176677 - DNA, 154 bp, Zea mays
  Clone ID: MRT4577_9271C.1
acggtagtggtctcatagatagcgctagcagctgtagaaaccgccaccactatgctaggagtggaagcctctgtcccgcagcagcagccattgcggcgttcctggcacctccctgcacttccttctatcggtcgtacacattccttaccccctg

SEQ ID NO: 176678 - DNA, 685 bp, Zea mays
  Clone ID: MRT4577_92720C.1
gccggccggttccagacacaacccagaatacgcgaatttctactatcctatctcagatagatagactgccctgccatcttatctgtatcagtatcatacataaggccgaccgagagcgagggagagggatgcttgttccgaagctgcgaacgctgacgctggccagtgctcctgtcctgcaccgtgatgcctcccccgggcgtggtgtgcacatcaacgtcaggctccaccgtgaacaacacacagatgtcctgtctgccgaaccctgagatgtcctacgacgtgacaccccagccatgctgcggcaatgtcctgagcctgttggaataatgcaatatcaccccctaaccgccatcaccatctgcgtgtgcctaaaaaacgacgccaacgacgccaacgttcaacttatctacatcatacgcggctctcacatgaccagcatagtgcaaaggcatcctgtcgaacgagatcagcaccaacgttaactgcagccccaataattaagtgaggtctacagcgagcgtatcccccgaggaatgcgtgtatgatatctggcttatagtaataaaataatgttaatgggatgtcaagctatatatacgcgcgacagtgactagtaatacatgcggtcaatgaatcgcctactacatcgtaacactgtaacaagcccggatgtatgcaactt

SEQ ID NO: 176679 - DNA, 457 bp, Zea mays
  Clone ID: MRT4577_92721C.1
ccccccagtggtgaaggaagccccaaccctysccccgctcggcyccsmaggaggtycgccaggccggcctggtgsgcasgccactgcccttgcmaagtcacccatcgcccgcgccgasccaaagscccgggagctctmcacccgctacgascctgtggcaagaaggsgtsccgccgaggcctgggtggccctgamccgtctccctcyggygccctcggtcaccagsggccgtccyccccactcgccgcacagctctcytgccacggtacaacttcggccggtcgcgtgatggtgccaacgcscgggamcgccgtggccacctmyctccccgctgsgtcgcccactgcagccgcgcccgcccgccgtgttccaggtaccccgtgsctgmcgytgctgcagcaccagagatgcagccacatyccttcccagtagaagatgaaatggaactgctcgaact

SEQ ID NO: 176680 - DNA, 315 bp, Zea mays
  unsure (1)..(315): unsure at all n locations
  Clone ID: MRT4577_92722C.1
cagctgtcccgccgagcgaacgagcgacaaccagaagccacccacaggcggacgcgaggcgaacggagcagcccgacccaagaggagaaacnccggccggcgacgcgggggaaaagggggaagacgccggagcggangaaggcgggggcgcacgcgcggacgcccgnccagcagaaggggaggggggggcgngggaaggacaacaccaccaagaaccaccacaaggncaccgagaacgggancnccgccacgcccacccncacccccgncgaaggcacccaccaaaacgccagggggnacaaagagcaagagaag

SEQ ID NO: 176681 - DNA, 390 bp, Zea mays
  Clone ID: MRT4577_92723C.1
cccacgcgtccgttcaagatcgactcaacatgcctcccaagaccaaggctcaaatcgcggctggcggtcaggccggttctcgtgccgggaagaagaagaagtggtccaagggtaaggtcaaggacaaggccaacaacgccgtcatggtcgacaagcccacctacgacaagatcctcaaggaggtccctacctacaagatgatctcccagtcggtcctcatcgagcgaatgaagatcaacggttctttggcccgaaaggccatgaggactttggaggacatgggtttgatcaagaaggtcgtgcaccaccacggacaatgggtttacacccgtgccaccggctcggactaaagcgcttagcccgatgactggccttcgactttcgtcaaca

SEQ ID NO: 176682 - DNA, 354 bp, Zea mays
  Clone ID: MRT4577_92724C.1
agctctaatgcttggaacaaataatgctcatacgttcacagagttggcaattgtggacacagactgacctgacaaataggatcatgataatttgacgatcttgcactaacaatccaagcaaagaaaaacagaaccccagcctaaaaatggggatcaggaagaataggaaggtgaaagactgcatgggcttgtccagtgtggatccagggcgatacacctacgacgagatttcttgatttatcaaatccgacaactaacaaattccatacgagggtgtggcaatgactaacggctcacgatcgaagagccgctactcaagtgtggtacgtggttggagctgctacggggaataat

SEQ ID NO: 176683 - DNA, 914 bp, Zea mays
  Clone ID: MRT4577_92725C.1
gcctgattaaaacccgtcctctgtccgtcctaccaccaccgctcacctcggtttggctttctcccctcttccgcacccgcttctcgctccggattccggattccctctgctctttccctaacgaaggtagccatggcggggagaggtaaggcgatcggctcaggcgccgccaagaaggccacgtccaggagctccaaggctggcctccagttccccgtgggaaggatcgccaggttcctcaaggccggcaagtatgccgagagagtcggcgccggcgcccctgtctacctcgctgccgtgctcgagtatcttgctgctgaggattctgattcaataattggggccctctccgtgttcgttcgtgcaggttcttgagctggccggcaatgcggcacgtgacaacaagaagacccgcatcgtaccgcgccacatccagctcgccgtccgcaacgacgaagagctctcccgcttgctgggcacggtgaccatcgctagcggtggtgtaatgcccaacatccataaccttttgctcccgaagaaggccggcggcggcagcgccaaggctgcggctggtgacgaggactaagtccttgactacgcctggtggcacctccaggatgctgccgtatcaacatgtgtctgtgtagtacgttaggtgttcgttgtagctgggtatgtgggttgctgtaacactgctaaactaagttactcttgtgcttgctaaggattaagttctgtatttgttgctataaaaggtgcatcctttgaatgactggttcatcaatcatagaaaatgttcatagtgtcccaatttgcatttcgtgtgtctggatcatttcgaaatgttgcgctgtgttgatttggaatttatttctgagattgaatgcgaaaaaaaaaaaaaaaaaaggccccta

SEQ ID NO: 176684 - DNA, 563 bp, Zea mays
  Clone ID: MRT4577_92726C.1
gggtacctcgaggccggccggaactgatagtaccaccatctatgtacttcaccgaaccaacagatacagcctcaggtagctataggagcctaccacccccatgacccaccactgccactcctccatagagatgacgacaatgagatgtgctattgctcataaaatcgacctaatccatctaccgatagctgcactctcctgcggtgctaatagctgtgcagctcttcatcctgctttcatcaggcctgctcttacacatatctggacatccgcaacataatagatgccatgaacttctgaagcattgttctatacatccgagcacaactgagccttgactaccacatcctcagcatctgcctcctgctcaaaagagttatatgttacctccagtaactatgcttttcccttgagacctatgtagctgaaatagatgtaggaatgaccagactcttgccttgactattaaacatcaactgtgtgagttgataacggactgcctatttctcattgacatactactatatacatttacatgtgtcatctccatcttgctcgctagt

SEQ ID NO: 176685 - DNA, 1155 bp, Zea mays
  Clone ID: MRT4577_92727C.1
ggtaccctcgagggccggcctcgagggccaaaaaaaaaaaaaaaaaaaaaaaaaaaaaaaaggctcgaattggtacctcgcattgccctcgaggccgcgccggggggggggattacaaacccgtcctctgtccgtcctaccaccaccgctcacctcggtttggctttctcccctcttccgcacccgcttctcgctccggattccggattccctctgctctttccctaacgaaggtagccatggcggggagaggtaaggcgatcggctcaggcgccgccaagaaggccacgtccaggagctccaaggctggcctccagttccccgtgggaaggatcgccaggttcctcaaggccggcaagtatgccgagagagtcggcgccggcgcccctgtctacctcgctgccgtgctcgagtatcttgctgctgaggtaaagaaggcttccaattttgtggctaattcttttatttttgttttgagcattgaaaatttggctgctggggtttcctttttctttttatataaaatgggtgttaattgctgaaattacctgaattgaagtagaacaataggcggattttggctgaagatctaaacctatggttggttgatttgcttttttcttttgaaccagtaaggattctgattcaataattgggggccctctccgtgttcgttcgtgcaggttcttgagctggccggcaatgcggcacgtgacaacaagaagacccgcatcgtaccgcgccacatccagctcgccgtccgcaacgacgaagagctctcccgcttgctgggcacggtgaccatcgctagcggtggtgtaatgcccaacatccataaccttttgctcccgaagaaggccggcggcggcagcgccaaggctgcggctggtgacgaggactaagtccttgactacgcctctggtggcacctccaggatgctgccgtatcaacatgtgtctgtgtagtacgttaggtgttcgttgtagctgggtatgtgggttgctgtaacactgctaaactaagttactcttgtgcttgctaaggattaagttctgtatttgttgctataaaagatgcatcctttgaatgactggttcaaaaaaaaaaaaaaaaaaaaaaaaaaaaaaaaagaaaaaaaaaaaaaaaaaagcggcc

SEQ ID NO: 176686 - DNA, 564 bp, Zea mays
  Clone ID: MRT4577_92728C.1
gtcaaggtgggattggggatgtggggatctggcgaatccccgacgtaggtgtcgacgcagccgattgctccatcgactcgtttgggcgaaggtagcggcggcgcttttggtcaaggagacagcgactggtgtgggcgatgtggcttgctggagggtggatcgagctcggtcttcctgcgacgtgtgtcgtcaccaagcttcgatttggaatcggcggagcctggggtggattctcggccgatgtttctcccacggcgtcatcccagcctcggtgctgggtgtctactgcggcttccttcaaagctttgatgcgatgggctccttcggttctggggtggccatggtgtctttatcgacaacgacagccggcgacggcggcggttggtggagacgtctagcgatttcgggaagcacggggttcttggatctgattgtaatttctttatttttgaggggcctttgtgcaagatggctgagacagctgtccctgtatcctcgagcgtatctgtattcgtatctgtacttgtacgctttttcttaacaaataatacaggtatgttcatc

SEQ ID NO: 176687 - DNA, 339 bp, Zea mays
  Clone ID: MRT4577_92729C.1
ggaaaacaataaccggggaattactactccaaaatgacggggttatgcagacccattacaggaacaggggtgtcaatcagggacacatgtttttaagcttaaaaataacccggaaacagtcaacggaagccggacaaaaaattttgtaggcgcaagaataaacaaggccctttatattgtacaaagcaagctttttgtatttttaaatgccggagaatttgcaactgcaagcaaggtttttaggggccaaggccgattgtcctgccttttttcctggggaggcctgttttgaaattgtttcccaggtggggggcgtccttcttcagtttttttggtttt

SEQ ID NO: 176688 - DNA, 459 bp, Zea mays
  Clone ID: MRT4577_9272C.1
atgcccgacttcccgattctccaatacgctgatgacactcttatcatcatgaaggcatcccaaagagatttgttctgtctgaaaggaattctccaccctttctcgcttgcaactgggttcagaatcaacttccacaagtcttgtcttctgtcaatcaacctcgacaccgtcaaaaccgatcacttggctgcaatgtttggttgccaagttggcgctttctctttcacctacatgagtttgcagatgggtctcacaaagccgaaaattaaagattatcttcctctcatttctaaaattgaaagaaggttgaatgccatcaatacttggttgtctatagctgagagactcacgcttgtcaactccacctttttggtgatgcctattttcactatgtgcacccttaagatgccgatagtcatgatcaatatcattgaccgcattagaagggattgtctttag

SEQ ID NO: 176689 - DNA, 169 bp, Zea mays
  Clone ID: MRT4577_92730C.1
catcctgcctgatgcaaacatttcctcttccgatcgtgccgacgtttagcgtggtacgaggctgctggttctcggcacggtcgagatgtctgaagtgtccgttagaaaccacgcggacgtggaggacgcggacgccgggtagctgatggacctgccggcgagcttcggc

SEQ ID NO: 176690 - DNA, 327 bp, Zea mays
  Clone ID: MRT4577_92731C.1
gcacgggaagaatcacccaaataataatctccggtgaacaaaagtttaaaacaaaacaaaaaaggttttttgcgaaattgccggccgtaaccccccccgaaagggaggcttagttttacgggggattttgggaagtaaaagctgttgagatgtggcaccaaaagccgttgttttttacgggggcccaaagagttttggggtgaaggggagttgtaaagccagccagcccggccggggccgacaaacccggggggaccacttttttctgggcaccctgaacgcttggcgccggtacatgtattttatttgatccacggggggcctctt

SEQ ID NO: 176691 - DNA, 214 bp, Zea mays
  unsure (1)..(214): unsure at all n locations
  Clone ID: MRT4577_92732C.1
gcaccgccgncgccangcacgacacnccagggggggacgggggcggcagcaccctcgcccnagnggcgagggcgacggacggaggcggaggagacgnccacgggagcagcaagcgcncaagccaaaagggaacaaaaccgaaaaaggaggaagngcaggancancacnaaggangacagggcagcgagcggggagaaaannggcagggcacccc

SEQ ID NO: 176692 - DNA, 228 bp, Zea mays
  Clone ID: MRT4577_92733C.1
gaaactcgagtggcgacgagcaacctcgtccatccggttgcgatgtcgccgtgctagaataactaccgaccatggaggaggaggagatcaccgagggctcgaagaacctcaccgtacaccggcacacgcgagtggcttcggccgtgagaaggcgcaaaggagggccgaccggcatcaccagaaacccgaatccaggttgaccaacaacaagaaagccccatcttcttc

SEQ ID NO: 176693 - DNA, 265 bp, Zea mays
  Clone ID: MRT4577_92734C.1
aaaaaaaaaaaaaaaaaaaaaaaaaaaaaaaaaaaaaaaaaaaaaaaaaaagaaaaaaaaaaaaaaaaaagaaaaaaaaaaaagatgaaaaaagaaagaagaaaaataaataaagagaagtattaggaggggatggcgcccctagtggtttttacagaagtggggcttgttctgagaattttatccattgatcatggtttatgtacatgttttacccttctttttatacctgttatatccggctaaagggctcctttttttaacg

SEQ ID NO: 176694 - DNA, 128 bp, Zea mays
  Clone ID: MRT4577_92735C.1
gctgttcatcgccgtggacatcgcccagggctggcgttcctccaccaggtggctcacacgaggcacctcaacgtctgctcggagaacgtgttcctggactcgcgctacaactcgctgctcagcgaggt

SEQ ID NO: 176695 - DNA, 914 bp, Zea mays
  Clone ID: MRT4577_92736C.1
cattgggtacctcggggcccggcgggagtctcccacattcccctcccccggccctcgccatcctctcccgctaaccccaccccgtcgccccggcctcctcggtccagcggcgagcgggtccgtccggtcccgacgccgcaccacatcaccgcctgctcccacggccgtcctcactcgacctcgatcggaacccccggatcggaggtaccttcgcgcgcggctccgctccgacctcgtcctccatcggttggcatcggaagcggcggcggcgccgttcccagccagctttcgaaagggcaatcaatcgtcaggctttttgggagctgtgttggggggaccggggggaagagtgaagttactgcagaggctaacatttaggttgtcgagtgatggcgcaaggcgccaatttccctggtttcattggcgccgtgggtggccatgatggcggtgtgaactttggcgggaacttctgtgacatggccttctaccagaagctaggggagggctccaacatgtcggttgacagcctcaacagcatgcagaccagcatgcatggcggatccatcaccatgtctgtggacaacaacagcagtgttggctctaacagtgactcccgcactggcatgcttggacatcctggtctcaaagggcctgtcattgtgggcagctactcggttgggcacagcatcttccggcccgggcgggtgtcccatgctttgagtgaggatgcgctggcacatgctctgatggacaataagtttccaactgagacactcaaggattatgaggagtggactattgatctggggaagctgcaccttgggatgccatttgcacaaggtgcctttgggaagctctacaggggacatataatgggggaatggatggtgctattaaacttttggagcgacctg

SEQ ID NO: 176696 - DNA, 383 bp, Zea mays
  Clone ID: MRT4577_92737C.1
gcggcacgcgtccgagaaatctgggaacctacccacgagccgatccatgctcagacgactcgccgtggcgaggcgacagttactgttatccccggcactgtgcgtaccgatcctgctactaaggggggacagtctctgggtccaccagagagcattgcctcgcctcggccttcgtgctctctgacagccctaaagggggctgagaggcgtaccagagcagcaccgacggcgcgagcgggttgttcttcgacctgcgcgcccgggtatccaaagtgctgaccgtgggaagcgcctacgttatcaggtggaacccggctcttgggaaggtgctcccgcggcaccagatcatgcgactgatctagcgcagaacgatcttacactag

SEQ ID NO: 176697 - DNA, 1369 bp, Zea mays
  Clone ID: MRT4577_92738C.1
gagcctctcgctcgttcattggctttcttctgcctcgcctttgttgatcttttccccttccagtctcccacattcccctcccccggccctcgccatcctctcccgctaaccccaccccgtcgccccggcctcctcggtccagcggcgagcgggtccgtccggtcccgacgccgcaccacatcaccgcctgctcccacggccgtcctcactcgacctcgatcggaacccccggatcggaggtaccttcgcgcgcggctccgctccgacctcgtcctccatcggttggcatcggaagcggcggcggcgcgttcccagccagctttcgaaaggttttattccgtgattgcaggcaatcaatcgtcaggctttttgggagctgtgttggggggaccggggggaagagtgaagttactgcagaggctaacatttaggttgtcgagtgatggcgcaaggcgccaatttccctggtttcattggcgccgtgggtggccatgatggcggtgtgaactttggcgggaacttctgtgacatggccttctaccagaagctaggggagggctccaacatgtcggttgacagcctcaacagcatgcagaccagcatgcatggcggatccatcaccatgtctgtggacaacaacagcagtgttggctctaacagtgactcccgcactggcatgcttggacatcctggtctcaaagggcctgtcattgtgggcagctactcggttgggcacagcatcttccggtctgccttctgtctttgacatgttatcgtagagtacacctagctgtcgtcaccagtggttgtaatagaggtagctttatgcttgactaaatacccttccgttataacaagtgcatgctcttgctgctcgctgttatgtgtcttcatcatcatgcggcagcatgtggaaaaaaaaaaaaaaaaaaaaaaaacagtctgccttctgtctttgacatgttatcgtagagtacacctagctgtcgtcaccagtggttgtaatagaggtagctttatgcttgactaaatacccttccgttataacaagtgcatgctcttgctgctcgctgttatgtgtcttcatcatcatgcggcagcatgtggaaaaaaaaaaaaaaaaaaaaaacagcctgccttctgtctttgacatgttatcgaaaagtacacctagctgtcgtcaccagtggttgaaatagaggtagctttatgcttgactaaatacccttccgttataacaagtgcatgctcttgctgctcgctgttatgtgtcttcatcatcatgcggcagcatgtgaaaaaaaaaaaaaaaaaaaaacagcctgccttttgtctttgacatgttatcgaaaagcacacctagctgtcc

SEQ ID NO: 176698 - DNA, 873 bp, Zea mays
  unsure (1)..(873): unsure at all n locations
  Clone ID: MRT4577_92739C.1
ggccttccatctccccattcccctcccccggcccttgccatcctctcccgctaaccccacacccgtcgccccggcctcctcggtccagcggcgagcgggtccgtccggtcccgacgccgcaccacatcaccgcctgctcccacggccgtcctcactcgacctcgatcggaacccccggatcggaggtaccttcgcgcgcggctccgctctgacctcgtcctccatcggttggcatcggaagcggcggcggcggcgggttcccagccagctttcgaaagggttcctgtctggtggttcgacgcatgttcggtgccaaaattgccattttaggggcaatcaatcgtcaggctttttgggagctgtgttggggggaccgggggggagagtgaagttactgcagaggctaacatttcggttgtcgagtgatggcgcaaggcgccaatttccctggtttcattggcgccgtgggtggccatgatggcggtgtgaactttggcgggaacttctgtgacatggccttctaccagaagctaggggagggctccaacatgtcggttgacagcctcaacagcatgcagaccagcatgcatggcggatccatcaccatgtctgtggacaacaacagcagtgttggctctaacagtgactcccgcactggcatgcttggacatcctggtctcaaagggcctgtcattgtgggcagctactcggttgggcacagcatcttccggnccgggcgggtgtcccatgctttgagtgaggatgcgctggcacatgctctgatggacataagtttccaactgagacactcaaggattatgaggagtggactattgatctgggggagctgcaccttgggatgccatttgcaca

SEQ ID NO: 176699 - DNA, 3290 bp, Zea mays
  Clone ID: MRT4577_9273C.1
aattcggcacgaggcctgtgggctgtgggctgtgggctgtcactgacctcttcccttctgtggccgcgaatttatctggtgccctgagctctcttgtgtgtgatctgtgaatcgcagaatccttctcgccaacagcccaacacatggaaaagagagctgcagaagcagacgcctaaaacatggccgcagtatgctcctcattcacctgccgcgtctagtatttcggaaatattttgtatttattaaagcaggagagggaggcaagcagcagccgaggccgagctatctctctatttccccctcgcccagctcagatccgaagcctgaaggaaatcgcgccaacaggccctagccccagatgcgcgccgccgcttgctgcctgcgctgctgctactgcttctaggggtcttgcggcgatgctgggcgtcgagcccgagagcggaggcgccgcgtcctcctccgccgcagagaattttgacgctggccagtacgccttcttcgggaaggagccactcgaggggttcgagctcgggggtttggaggaagccggcagtgatggcaatggcggtggattcagcgggccagatgaggggctgtaccggctaaactcggttggagacgagattgacgatcagagtaacttgtctgacattgatgatcttgcaagcaccttcgctaagttgaaccgaagcattagtggaatccggaatcctggtgttattggggacaggagatccatttcaagaggaagttctttaactcttgactggcctgaggatgtggagttttcaaactgggtagatcaagatgtatttgaaaatgaggaattccaggaaagtaaaagatggtggtcatccaattcttcagtgcagcaaggggattccaactccagaccactaagtcgaacatcttcctaccctcagcagccactgcagcaccggtcaagtgaacctatcgttttaccaaagacttcttcatttacctcatttccaccacctgttgctggtggtggtagagccccttaccctgctcaaggccttacacgtcatgggagcattccatcaattggcgctgggctccaaatgggttctccgagcatgtcactttctgcttctccatatcatatggtcggaccatctcatgggctgccatacacgggaggcatgccttatggtgctcttaacctgcctgtaaacaattcagtgcagaatgattggtcgaatcatgttaaccctttcactggggagcatcttaatctactgcccaatttattgcacaaacaattatcacttcctaatagcccaatgtcgtcactcctattttctcagcatcagcagagattggcacaggtccaatcatcccatcagaattacctcaatataatgccacacgtcctatatccccatcactccgcagagattacaagcaggtttggttctgttggcagttcccattcatcaagagacaagagatcaaggtcggggaagggaaaacataacattcgattctctcaactaccatctgatactggtagccagaatggtgacagcggaggtataaagtttagatccaagtacatgtcatctgaagagatcgaatcaatcttaagaatgcagcattctgcaagccacagcagcgatccttatattgttgattactatcatcaagcttgtatggcaaaaaggggtgccacttctaagcaaaagaccaatttctccccaacatcaatgaaagatgtaccatccaagtctcgatccagcagtgatcagcacacatatcttcaggttgatgctcttggaagagtatctttttcttccatacggaggcctcggtctcttcttgaagtcgaccatccttcatctgctgatggctctcatgatcagaagtccactgtgaggcccctggagaaagaaccaatgcttgcagcaagagtcactgttgaagacgccctttgccttgttcttgaggttgatgacactgaccgtctgttgcagtctagccagtcacaggacaacattttcgaactgaaacgaagacggcaagtcctcctggaaggtctagctgcatcattgcagtttgttgatcctctcggacccagcaaatctggtcattcatctgggtcagccctgaaggacgatgttatttttctgcgcattgtttctctgcccaaaggacgtaagtttttagcacgttaccttcggcttcttgtccctggcagcgagttgacccggatagtatgcatggctatttttcgccatttgaggttcttgtttgggggtttgccatcagactctagtgcagcagaaactacagttgctcttgcgaagactgtttcatcttgtgtgcatcacatggaacttggtgctcttagtgcctgccttgctgctgttgtttgttcgtctgaacagccacctctgcgccctcttggtagctctgctggtgatggggcttctcttgttattaaatcagtactggaccgagcaactgagttactgactgatcgccatgctgcagccagctacactgtgccaaaccgtgctctctggcaggcatcatttgatgctttctttgggcttctaacaaaatactgtgtcagtaagtttgaaagtatccaacagatgtttgtcacacagacaccgagctcaggaatcggacctgaggcttccaaagctactagtaaggagatgcctgttgagctacttcgtgcaagccttcctcatacaaacgagcagcagcgccagcggcttcttgattttgctcagagatccatgccagtaacaggtttcaatccctcaggtgctagaggtgggcacatcacttcagaatctgttcctggatgatgtaactgaaggagacacacaagggcaaagagtcaatgcttttaaacattgatgagatggtcttcagctgataattgttgtatctgaagacatgcatgccccattataagttgtgagcgagcttggagaagttccgattgctcaggaaagtagccttcacttcaggttgtgacgtaagtttaggtttcagagtaatcgaatagaccagtgaaatgttccttatgtgggtcatttaatatagtacccacctgatgatatcataatactggaacaggaaatgtaccccttcacatttctactagagtcgatgttcttcgtaggccattgtggactggtttgcacatttactgggcatgtatttgtttatattctgacatactgttattgagctactcctgtcctgggtcaaaaaaaaaaaaaaaaaaaccaaaaagggggccggtacaaaaa

SEQ ID NO: 176700 - DNA, 382 bp, Zea mays
  Clone ID: MRT4577_92740C.1
aaaattgaaggttttttttttttttcataaggcacgtatgttttaacgttgtaaaggttttgttgtctaaaaaaaagggaacagccgcaaaatacccctgtcgcttaaaaggaggagagaggaaaacgcttaagggagatgggctcttaaaagaaggagccggtgttactctcctattatgggggggggaaaaaagacagttaaaggggcgcttcccggcctcttgaaggccccccttactattccaagaaaggggaaagtacgtaaaaaaagacaccctaactgattgctggaaggaaaagaaatttttgggcgcccaacccctaaatttacctctcacaaggcgggaagaaaatctatgccaaccaaaatagaatttttt

SEQ ID NO: 176701 - DNA, 2399 bp, Zea mays
  Clone ID: MRT4577_92741C.1
atccttacggcgaaactgaatcagataatccgtacgccgtccccttgcacagcaaacatccatggcgactgcccgcttgccctctcgctccctcctgtccccggctcagcaatcctatccacggcttcccgcctccgtccgcctctgcctctctcatcacgagcaacctcccaccggccccaagcggcaccgacgcgccgccacttctcatcctgccttttctgcagccgcgcggggtcgtgccaagaagattcccatcgcggacaccgatgagcccgccgccggagtccgcgtcaccgatcacggcatctcttaccgcctcgatggcgcgccatttgagtttcagtatagctacactgaggccccacgcgcacgccccgtagcgctccgtgaggccccgttcatgccgttcgggcccgaggccacgccacgcccgtggacgggaaggaagccgctgccaaagagccgcaaggagcttccggagtttgactcgttcgtgctgccaccaccggggaagaagggggtgaagcccgtgcagtcaccgggtccgttcctcgccggtatggagccgagataccaatcggtgtccagggaggacatactcggggagcccctaaccaaggaagaggtctccgaactcgtgaaagggagcctcaaatccaaacggcaactcaatatgggcagggatggtttgacacacaatatgttggagaacattcattcacattggaagaggaaaagagtttgcaagataaagtgcaaaggtgtctgtacaatagatatggataatatctgccatcagctagaggaaaaagttggaggaaaagtaatacaccgccaagggggtgtcatatttctttttcgtggtagaaactacaattacaggacccgcccatgttttccgcttatgctctggaaacccgttgcacctgtgtacccgcgccttgtcacgaaggtcccaggtggcttaactccagatgaggccacaaaaatgcgcacgagaggacatcagttaccaccaatttgtaaacttgggaaaaatggtgtttatgccaaccttgtgaagcaagtcagagaagcatttgaagcatgtgatcttgtccgtgttgattgctcaggtcttaacaaaagtgattgcagaaaaattggagctaaactaaaggatctagttccttgtatcttactgtcttttgagtttgagcatatactgatgtggagaggaagtgattggaaatcatctcttcctccattagaaaacagttatgaagtgacaaaggtgcaagaaagttttagtggcaaagaatctaatgaaaaggttacacattcaggaaatgttctgacccagattgagttggtcagtgttgcaacatctcacaagaactggaacttggatgaaggtcaagaaaaatttaaagattccattgacagtgatatggtactgagttctgcaaaggatgttcctgcattgttccattctacaggtatatctagaactgaaccctcagcagacattccattggaatattccccattaaatccagtatgtgatattatggatccatccctgaactgccgaagtatcccaacaaacaactgtgaaaatagaactctggtagagaagtcagaacattgtccggatgattataatttggaaatgaagaggaaaagaaacgatggtacaaaaggtacagttgttctaaatagcggttctaaagtagagggattgttatgtcttttggaacaggccattcacagtggcagggcacttgttctgagtgaagatgagcttgctgattcagatctggtctatgaaaagtctgttgcttttacaaagtcaattccgcgaagactggtttttgagaatactcgaaggaagtccagtgccaggagaaatgtgccagacaatcatgcaagaactaaaacacatcttgtagaaaataaaatgttgagcagttctgttgaaaataaatttatcgttaatggaggatctgcaatgcagacagaccatggacaagagtttctttctgatgttgttcatcaaggtaccttaagagtagatgaactagcaaagttactagcttgagaggtgattgctcttttatcaaccacatagaccagtatcaacatcctttgaaacatatgcaagatttgcatgaactctgaatttggttaaaacaggtctcaggtctgttgcgtcgtggtgagtcctttttaaccttgaaatactgaactataatcctgtgcgatgtacaaaccaccttcagaatacatattctctgatttgtctgttgtcaccaaaaaaaaaaaaaaaaaaaaaaaaaaaaaaatttaaaaaagccccggtaccagggggggggggggggggggggggggggggggggggggggggggggggggaa

SEQ ID NO: 176702 - DNA, 294 bp, Zea mays
  Clone ID: MRT4577_92742C.1
gcgcgccacagcttgcgcccgcaatggcactcgtctccgcctactcgtcctccaccaccgacgtcacggggctccccagtaatggacagcgggcgtcgtcctccttcctcagcggcaagacgctgctgagacaggccgaggcggcccggccgtcgttcgccgtgcgcgccgcagcggaccccaacaggccgatctggttccccggcagcacccctacgtcgtggctggacggcagccttccctgctacttcggctttgatccctggggcctggggtctgacccggagagcctgc

SEQ ID NO: 176703 - DNA, 553 bp, Zea mays
  unsure (1)..(553): unsure at all n locations
  Clone ID: MRT4577_92743C.1
ctcggcagggcacgggagtaggggcagcggsacttgccttagkgctgcgstcatcgagcgargttstctaatacgtcggtcagsstcctcgccatcctccccckcakcgaagkcarcrgcgacctcctcgtartccttckccaggggcsccaagtcctcaggggcccksgaaaaractcaccttcctccataccctcgacccgacgtaccagkgsagcaaagaccctktgcgtagagwgaggtsgaacttgttgtscattccggaaarcaccgcsacaasrcgtggggggggggggagatsattcacaccggcrcgcttcacgcttgtgccrgggtgcgccaccargcacaasgstrggaggctttgtagttgatgccgcactttaagccagtckggsagcaggccacsarctggattggggcttttgtckttattgtkgccacagcgangcagttcacatccttkggggaccacatcaccacccntacattgaggcggsaggccatttrckttccatggcggggggtcscacktgggcrtcattgraaatgg

SEQ ID NO: 176704 - DNA, 362 bp, Zea mays
  Clone ID: MRT4577_92744C.1
gtgaagtgggacgtcgtggggttccacgcgtaggagctgttcgtgccggatatcgccgagagtggctgttcgccgctatgcgcgattctctgtacaccggccacgcttgacacgttgaatgttgtgccggtcggcgacaagtgtacatacgtgttgcatggttgtggattgagttaccgtgcgcaataattctggtgcgtgttgaacaaaacttcgagacggcgccgcggaggctgaacaagaccctcatcgtggggcgccactggctgccggcgtgtacggtgctcggccacccggaattcatttcgggacgggcccatgcagggggcctatttttccctataccgaacggtatgcaagct

SEQ ID NO: 176705 - DNA, 266 bp, Zea mays
  Clone ID: MRT4577_92745C.1
cacgcgtacgaccaagtaaatctcactatcaacttccttttatcaatggctaccaagaccttggccggggcttgtcttatagcccttcacgggagcgcaacaatagctttcatttttccacaatgctcaactagctcctagtgccattattctcacaagttcctgccaccagttactttaatgggcttggcacaacctagctgcgcaagccaacatgcaacatcttgtgctagccgtgagcgccttactacaaccaattgcctaat

SEQ ID NO: 176706 - DNA, 294 bp, Zea mays
  Clone ID: MRT4577_92746C.1
ccggccgggcccaagcagcgaaatccaatctagaagcacccctctccctctctctctcttcgccgtccgaagctccgcaccccaatctaatcgacacctcaccgagatgggccgcaagttcttcgtcggtggcaacttggaaatgcaatggaaccacagatcaggtcgagaagattgtcaaaaccctgaatgaaggacagggtccccctgtagatgttgtggaggaagtatatcagtcctgcttatgtattgcttcctttggtaaagagcacagagtgagccaagtagttaatg

SEQ ID NO: 176707 - DNA, 428 bp, Zea mays
  Clone ID: MRT4577_92747C.1
ctgccccccaaaccaagacacgctggccaggggacacgggacgccaaacaaaaaaagaacaccaaaaaaaacggcaacccaccaaagcccgggaaaccccacgggcccaaacaaccacgccgacccgaaacaagacaggaccgggccccacccgaggaccaggtccaccctgtggaggagcccggagggggagcccccaccccccccgggggggccccccttcacgtagaggccccccccgggcgcggggcccccgaaggggcccaggaaattgaacggccacaggaagtggagggcccccccaaagggacgccccaccgggaccgggcacgggggaccggcccggaaaccccgaccgggcccccccagcgtaacagggttcccaataggggggggccatagagcgggccgaaaccagggccaaaagg

SEQ ID NO: 176708 - DNA, 362 bp, Zea mays
  Clone ID: MRT4577_92748C.1
attattaattttctttaattaaaactctcttttaatccatgtttctcaattcaaatttttttaattccaaaccaaagacaagacgacccctattaaaaaaccgccccgaacacaccaaacagggaaaaaaaattaattttaaaaaaacccccccactttgctccacccaagggagggcaattttggccccccaaaaaaaagagggggaggtaaaaacacggtggggcgccccctttcactttttctcaaaggggggcccaactaaattcgtttaaaccttacctcgagttgaggcgacccaaccctggtaagggcaaactgttcccttcccataaacccccattccaaagaaaggggggaac

SEQ ID NO: 176709 - DNA, 330 bp, Zea mays
  unsure (1)..(330): unsure at all n locations
  Clone ID: MRT4577_92749C.1
ccggccgggaagccgnacagcgcgcaccccngcaacccgcgcgcaccgcgccgccacaccgccggcggagcaagacagggccgagngagccgaccaccccgcaagggccccgggagccaagagcaaggccgacacccaccaccgcacggccccagcccgacagcgcccccgcgaccaaggcgagcgcaacggacaccgggggggcgccaagaccgacaacagccaccagccagcccgcggcgcgccgaagggcaaggccacgcagccccaccccgacacaggacaagcgccacaaggagcacagcgacggaaccaagggcacgcacacag

SEQ ID NO: 176710 - DNA, 1109 bp, Zea mays
  Clone ID: MRT4577_9274C.1
ccacgcgtccgcttgattgatacttatggaaaggctggtcatcttgagaaagtatcagatacattcaaccaaatgttgagcgaaggtgttgcaccaagcgttgttacatttaactcaatgattcatgcttggggtaagcaccaccgaatggagaaagttgcttctttggttcgaatgatggaggaattccagtgctttcctgacaccaggacttacaatatactgatcgcactttacagagaaagcgatgatattgatattgcagagtactactactggaagatgaaaacagaaaacttggtaccagatgttgtgagctgccgcacgctcttatatggatactctatcaggggcatggtcactaaagcggaagcccttctgaaggaaatggatgagaggggcttcatggtagatgaatacacacaatcagctttgacaaggatgtatgtaaatgttgggatgcttgaacaagcttggcgttggtttgacaggttccaccaccatatgaattctgaatgcttttctgcaaatattgatgcttttggagagaaaggatacatagttcttgcagagaaggcttttgtatgttgcctaaagaagaagatgatcagtgtttctgcatgcaatgttatgatcaaagcatatgggttggtagggatgcttgatgaggcatgcgagatagctaatggcatggagagaatggggtgaaccatctttgagaaaaagaatgttgacagttgattggctgtctggctgatgcacggtgaattcataggaatcattttcacatgggtgtggatcctgctgaaatcttctgcagttgctagacataacatcatccattgtgtactggtgttgacttccgcgcatggtgtgaagattcacttttgtatatttcgttcctggaaacacaggggagagctgcgtatcattattaataagaagaaacactgttgtattcaattaccacctgtttttttatttaaactaaaactcttgttattggaaccaggatttccccccctgatattctgttctgcatttagggcatttacttcccatatggtgatgtttccccatatatgatatatgagcatgattgatagttc

SEQ ID NO: 176711 - DNA, 385 bp, Zea mays
  Clone ID: MRT4577_92750C.1
aaaggggaaaagatatattacaaggtacgcacaaatttacataagtttttatacaattatattacaacaatttttctagaatcttttgcagaaaagtcctttggagcatctgttaagcttcagcttgtcattcttcagtttcatcatctggcttaaggtggctccgagcttcgtcaccagctatttttcgcccgccgtttacccaaatctgggtcataaacctgtttcctatgcttcgggctaggcttgggatgtcaaccaaatctgccggcgacaaaatgaagtttggcctatttacaatctttccgtgtgtgcagccagccttcaagaaagcggtagccgtgcctcgagaagctagcagggtgcagaaatcagcatgcccaac

SEQ ID NO: 176712 - DNA, 279 bp, Zea mays
  Clone ID: MRT4577_92751C.1
cgatgggtacttcgagccggccgggcttgcctccgcatcgtcggctccgacatcgtcccttcgtccccacgagcaaccgataatccgccggcgttgagatgtctggtttatcaggatctcctatctggtgacgagctcctgtcgcgttcattgacgtactaggacgtcgcgacagccgtcctgtgcgagggcctccccgcccgcccgctgtcgatgcggatcagaggacccccccgcatatgcgccctccgacctcccgccgcgcaagcgcatgccgcc

SEQ ID NO: 176713 - DNA, 644 bp, Zea mays
  unsure (1)..(644): unsure at all n locations
  Clone ID: MRT4577_92752C.1
ggagaaagccgacgcagcagaaaataacagaaggagccaaacacgcgcttgcgaagctacaagccccagattaatgtatatgcccccgtccatcccttccatcaaggagaaggtgagggccgcatcgttcgctcttccacacccagcatgccgaaccttgaaggggatcaggagcttcaaggcagagggccccatcccgagaactggggggcctacggtggcgcccccgccacctatgccacccaaaaggccgcgttgtgtccaccttctcccacacctgtccggaggcctcacaacagtcccggcgaatgccctgcgtgcgtccactccactntcaagcgacaacccaggaccaccatttatccttgacgccacaatgcctagtgtgacgaccacaaccccaaatgctgtaaacctgtggcatgaggccgtgacgctgcagtacccaagtaagggggccaaagaccagcaagagctcttgagcaggaacaagctggaggagggcacccaggggccgttctttggtttcttgcccaagaatcagatttccaacacgaaggagggccatgctttgtgtttgcagtaagtatgctaacaacagaatgcaacaggcacaggattttgttcagcaaatggaagatcct

SEQ ID NO: 176714 - DNA, 309 bp, Zea mays
  Clone ID: MRT4577_92753C.1
ttccgaacacaccaagcgaagcgcactatcaacaaccttaacatcaagggctcccaagatatcatccctccttgcgcttcttgcgctatttgcggagcgcatcaaaggcctccattatgccacattgctaacttgctcctagttccatcattccaaagttcctgccaccagttactacaatgggctttgaacacccagatgtgcaagcctataggctacaacaagcgattgcgggaagcgtctaacaacagccaattgccaaattgagacaacaatcattggcacatcttacaatacaaaccatcgaaa

SEQ ID NO: 176715 - DNA, 362 bp, Zea mays
  Clone ID: MRT4577_92754C.1
tttttgataataacccaaaacaacttgagtatgatgtgggtgcaattaaaaccagaagcccagaccatggacaagaaagggataacaaagcgaaacacaaaaggccaaatacaagaggcacacaaggctacgggaactgaagcgacagggggaagaaaccgaacggataatagcgacccgagaatgggaaccgtgaagggagggaacgctacatgctgcacggaagaccaaaggaggaggagcgctacaaaggaaaacaggaagggggaagcccccgcgtgaaccccggggagaaaaaaaaaaaggggccaagacggccaaaaagggggccacccgggggccaaagaaaaaaccggaacccc

SEQ ID NO: 176716 - DNA, 1789 bp, Zea mays
  Clone ID: MRT4577_92755C.1
gcaaaatacatttttcgtgtatatatgaatatgaaaactgattggagtgaaaatgattatcgtccgtctcctcaatgtagagtaagcaataatgatccaacttggggaaaaatcagtaaaataattggccagttcagcaagagctgaaactcaaggtttgcgtgggaacttggagaaatctgggcgtcgtctctccatgtacgcgttcttcccttcctttgcctcctccgtgccgtagaatattagcgtggcattcccgccgagctcctgaaggcctgcgtggccatcatctgccgcgttgagtgcagatttcagcacgcgaatagccacggggctgtttcttaagatctgacggcaccatttgacagtttcttgctccagttcagcaagcggtactacggtgttcacgagtcccattttgtcagcttcgtcagccgtgtagaaccgtgacagaaaccacatttcacgggctcttttgggtccaacctgtccatgagaaatatatcattggagcaacaacagcatgctgtttatgtatcgcgagcatgtcgataatatgaaatggaatagcgtacaagtcaacatgcttgatgggggcaatgtgttattaagaatataatcttttgagtattgaaggtgtttcttttcaaagtgtgtgaggaataatgcggcattttctactacctcactagattgatagtatgataactcaccaaccgggacattatcgaagatccataaccagcatcaaagcttccaaccttgggccctgtctgcccaaatatcgcgttctctgctgcaattgttatatcacacaccatgtgcaaaacatgtccaccaccaacagcataaccagcaaccatagcaatgacaggctttggaagacggcgaatctgcacctgaaggaaaaatggttcgtccgatgttctcagtactaagataaccactaatgccttgaaggttaatcatttttagtttttttacacactaatactagaagtgccaacgacaaggaacatctgctcctgcaaatttactaagtggtatatcagcaaatattaaaaaaatatcagtagacaggagttctagtcaaaagtatatgtcaccgtcatgttctgaaatctgaacaatgtaagtcagttcaaacctgactaaagaaaccatctgaaagtggagagaaagcctgcattgcgtgtaaacagatcggagatagaaacacatctgcacctggagatctaagacattgaggcggccaaagctatcgaagtccacatatccatcagaatctcttaacgcctggtcaccgccactgcagaacgccttggttcccttccctgtaagaatgatgactccaatcgaactatcatctctggcatcgttgaacgcgcgcattagttccttcacggtcagcggacggaaggcgttccttctgtcaggccggttaatggtgatcttggcgatgccctctccgacggccttctcgtagatgatgtcgacgaactccttccctgactcgtctgtggcggtgcgccactccggtggctccgatggcacgtcgccgtgcacgcgcctgtagctgtcccccgccggcgaggacgacgacgaggacgctgccgcgggagaaggcgcgaggggaggcccggtggcgtgtggggccgggaaggacggaacgaggtgggcagcgacgcgagccagcctcctctccgcagcgtccatggcgagagccgagagctaagctagcacgggacgggcacgggtgggccggacgcgtgcccggccggcctcgagg

SEQ ID NO: 176717 - DNA, 293 bp, Zea mays
  unsure (1)..(293): unsure at all n locations
  Clone ID: MRT4577_92756C.1
anggannctttttttctgctcaaaacaggagagggcccggcgacgacccaggtgggcgacagcaaacacagaacgagcagcaacacaagggcctgtcgtagcgagccgcagttcaggcggggggaggccacacaagcgcgggcggggcggacgggagaggctggggcatggggaggaagcgtggggagagggtgaaggggaacgccgtgcggctcgaggcgctgacggacagccgggacgcgatgaggcaagggggggccagggcacaggggggggcgccgggtgaagaggcc

SEQ ID NO: 176718 - DNA, 390 bp, Zea mays
  Clone ID: MRT4577_92757C.1
cccacgcgtacgaatgggatcaaatgtgttattggaagcgtcgggctaaacttcccggtagtatgtgtgattgagagcaggatggatatcaaagggattagatgtgagtataggtgggagtggatcggatgcattgccatacgcaggcgtatacactgaagcatcaactgtactcctcactgcatgcctgtcctcgcctaaggcaaccactgatgaaccccgcatgccacacacacccacactgactcacacactcgccgacaactacagcaccaactccagtccccccaacaactgtctcaacaactgggtctgtcattcacgcatgcatgcataacgtcctcgtgaactacgactggtactacgacttcatgcatacggtcattgaca

SEQ ID NO: 176719 - DNA, 344 bp, Zea mays
  Clone ID: MRT4577_92758C.1
gcaacaaaaattatttagcgataaacgagaacttataagacatatattcagtccgtgttaatcttctattaatagtcgtgaacattctgaacacaacttcaaacattagttgacgagttattctgaccgaggttcactcttcgtccaagacttaaattaaattttggactcaatatatcttaggtggggaagtccttcagtcaggttcataacttacaattggggatcatcaattcttaagatatatatgcttaactgtctactgaggaatcttgtttcaatttttgtagaatccactctggctttgtactccctttttctagttagtacagcccctaaatccc

SEQ ID NO: 176720 - DNA, 777 bp, Zea mays
  Clone ID: MRT4577_92759C.1
gccggcccggccgggaggcacctccgctcctgtcctcttctctcgtggtaggctgtaggcaggcacctccgctcctgtcctcttctctcgtcgcttcctccgtctctcggcgtcgaatctcctccaaccaccgcgcacactctactcgacgcccggtggaaggagttctccgggatttgagctgtttctgccctcacctccgctaggccggcgtcgagtggagatccaatcggaaatcgaactgacttcatcttctgttgcatccccgtcaggataagccatgccaggagtgatcacaaagttcgcggttacatccatggtgatgtggatggccccggttgcgatcgtttatgggttctactaccaggcgtttccaggtgtgagtcggatgtcatcctcggcgcagacactcgccagcgggttcctggctgtcatatcggttaatctggtgatcggcttgtacatattcatggcgatgaaggagactcgacaccaggagccacagccagacccgaccttcctggcaaacgccaaagcgagtatcaaccagccaacatcctctcaaccgagtgatgattccaaggggaagggaaaggttgagtaagccgtagcatgtcatgttgatttttggtcttgtgtatgttaagtgcgtgctgtttaggaggaatagttgtgcgtgcacgccataacacaacatcgcaatctttaaagttcatgattttgctgtaattcttgacagttatggtcatggagccatgtgaagttgaaacttttgtc

SEQ ID NO: 176721 - DNA, 334 bp, Zea mays
  Clone ID: MRT4577_92760C.1
gtaatagattttagctacaacacaaacactaaggccctggtcgggttcaccggaatagaccaggatttattgtagcttatcaaaatatatataaattagagaagtaatctgggttggaatcaatccggagcttcaatccctaacaaccgaacagggcctaagtaagctcaaacccactctccggcaaccacagagatacaaacctgctgctgtggcaggggggctagatatttagaattatctgtgtctgctaccagggaagatgtaaactgtaaccagctagctagtgagggaagcaagccttgtgaatgttggtgcctatcttaggccctga

SEQ ID NO: 176722 - DNA, 192 bp, Zea mays
  Clone ID: MRT4577_92761C.1
gaggttcggccggggcagcgaaccaaaccacgctgtgggcggctaccactgagctcctggcccatcggctttctctctcttcgtactcgctgttcaccttcagattgcctgtgttctttccctaacgaacggactcgtggcgcgcacaggcttggtgattccttcacgcccctgcaataaggacacggtgca

SEQ ID NO: 176723 - DNA, 864 bp, Zea mays
  Clone ID: MRT4577_92762C.1
cgtgtgtatggatgttttctcactactttttactgttctaattagttgtggttttaaggagcatacaacaattgagagcaacagtgatactctttacaagatgtgtttgtactaatactgttggagataaaccacctgctaaagaaaaaaatgtaggacaatgttgatgaaagcattgtctttattgtgtaggacaagcctgagcctccaccggaaggccgccttcctgatgccacccaaggttctgatcacctcaggcaggttttctccacacagatgggtttgagcgaccaggacattgttgcactttctggtggtcacaccctgggaagatgccacaaggatagatctgggtttgagggagcctggacatccaaccctttaatctttgacaactcttacttcacggagcttctgagtggagagaaggaaggccttctacagctaccaagtgacaaagccctcctctctgatccatccttccgcccacttgttgacaaatatgcagcggatgaggacgctttctttgctgactacgccgaggcccacctgaagctttccgaattgggatttgctgaggcgtaaggtgaggtgctcataaagaaggggacaggcggggcagggctgggcaggtgcggatgaagattgttgcctagctgatttatcttgtcttgctggctatttggcatctaaggccaaatagaaccagaagagtatggtggatgtaataaacaatcgtcggccttgtgaggcaggcccatcttttgtgtgtttcccttgaatggttagagtaatgtgatttcctttccggcattgatgaactcagctgaagatgtagtgtgtaatgtcatggttcgtttttct

SEQ ID NO: 176724 - DNA, 422 bp, Zea mays
  Clone ID: MRT4577_92763C.1
ggaacttgtaagtgaattatgtgcctgaaaccggagccaaccaggatgatgcccttgcgcgaattgaaaagctttcaaaagtaaacccgatgcttggcttccgtggggggcggcttggaatattaaaccctggattggcatagattccaaccccggccaattttgaagcctgtttaaccatgaccaaccattgtttttgggaacaccttgacaccctggttggataaggggtcgcaaaaaatatggttccttttggcggaacccccccagaacttggggcataagggaattttattcatccaggtgatgaaaaaggggtccgcaatggtgggaaaaattttcgggaccaaggttggacaatggatgcaaatccctaggccggttttggaggttaaaaaaatagggaacaaggctaatttttc

SEQ ID NO: 176725 - DNA, 329 bp, Zea mays
  Clone ID: MRT4577_92764C.1
cccagttgcaacaacaatccttggtatatctaacaatacaaaccatcgcaacggggcagtaacaacaattcctaccagcactgatccacctagccatggtgaaccctgccgcctacttgcaacagcagttgcttgcatcaaacccacttgctctggcaaacgtagtttgcaaaccagtcacaacaacagttgcatcatgtttttgccatcgctcattcaacttgccatggtgaaccctgccgcctacctacaatagtaacatctgtttttatctatcccgcttgctgtggccattgcacctacataccttgaacaacatttgttgcaac

SEQ ID NO: 176726 - DNA, 1339 bp, Zea mays
  Clone ID: MRT4577_92765C.1
cattgggtacccggccgggagctgcccaaacaccagacacagactccaccaccccgcttcgatcttctgttgcagctgaaatctgtcagattctgcagttcattccaaatggctgctgcagcagagcacggcaactgcgatgcttgggcggccagagacccttctggggttctctcaccatacaagtttaaccgcagggcagtgcaaagcagcgacgtttcgctgaagatcatatactgcggggtgtgttacggtgacgttatgtggatacagaacaagcacaacgactcagtttatcctctggttcctgggcatgagatagctggggttgtgactgaggttggcgcagacgtcaaggccttcaaggtgggtgaccacgcaggcgttggaacctacgtgaactcgtgccggcactgcgagaactgcaacagctctctggagaactactgcccagaaacagttttcacttacaacacaactgatgctgatgggaccatcacaaaggggggctactccactcacattgtcgtccatgaaaggtactgcttcaagatacccgatggctaccctctggcgcaggcagcgcctcttctgtgtgctggaatcaccgtctataccccaatggcgcggcacaacatgaagcagcctgggaagtcgctgggagtcattgggctcggtggcctaggccacatggcggtcaaatttggcaaggccttcggcctcaaggtcacggttttcagcacgagcgaatcgaagagggaagaagccattaacctccttggagcagataactttgttatatcgtcagacacgcagcagatggaggccctgaaaaactccctgcacttcatagttgacactgcttctggtgaccatccattcgatccgtatctctcgctccttaaggttggcggtgtgatgacaatagtgtgctttccaagtgagatcaagatgcaccctgcgagcctcaatcgtggtgggcggaccttgtctggtagtattgtcggaggtacaaaagacatccaggagatggttaacttttgcgcggagaacaaaatctatccagagatcgagatcatcaagatggattatatcaacgaggctctcgccaggcttgttaaccgagacgtgaaataccgctttgtcatcgacatcaagaactctttcgagtagcatgctcattcacatgatccctgtcttctttgtcaatgtatgagagataatgagtcgtttcgaataaagcttagacatgataaataacaagtatgcttgtgactgtaaaatcgttctataaataaatgcgctgtgttgacccaaaaaaaaaaaaaaaaaagcggcc

SEQ ID NO: 176727 - DNA, 419 bp, Zea mays
  unsure (1)..(419): unsure at all n locations
  Clone ID: MRT4577_92766C.1
tttccattcaatgtgcaggttttanattatcatgtgctaatggacttgactgtgctataaagaggtaaaagagtgtacatctgacaaaccaccttggcttatttattgatatgtgcttcaatgcatttgacgaggaagctgacctcgatgttcttgttgccccctttttttatgttacatacttgcgatgcagctctggagcccttcttcagcgcagctgctactcagtttatccttggacagcaagttcccttctctcttttttggaaggggttatcttgggatgtattatgtcatttgagtgcgctgttgatctacaagtttttgttttaattttcctttcctttttaatgcaggaaactctaatacaatagtggcttttgctgtgaacaaggctgatttgttagataaagattgag

SEQ ID NO: 176728 - DNA, 318 bp, Zea mays
  Clone ID: MRT4577_92767C.1
agaacctagaactccaaaagcattacatgattcattagtgcaggaagggggggggctttttcaagcctttgtcacatttcccacggttgaactaactaaaattgccctgaatctagcacatgtctttttgtccaaaggaaatcctattgcgatacgcttttgaagaaatacttcttctaacaaagcttcctaaagcattatacaattttatttccagaccttgatatatttcagacgtcgtttttgaactgaatagtaacaaaacaaacgctgtgagtatatatttatatgttgttactgaaaactatttctcataca

SEQ ID NO: 176729 - DNA, 476 bp, Zea mays
  Clone ID: MRT4577_92768C.1
cgattgtgtacctcgaggccggccgggaccaccttcgcctagaggcctactcttgtaaacttcctaccccgttggaccggacacctcaccttcacccaccgcccggcgcccgactgtattcggcctagcactggggccgtctcgttcgagatcgccgatggggcgttcgacgatgtctacagccgcaacatggacctggaccgcgtcgcgttgtcggcgcggcagcaccacaagctggacgagacgcagcagagctggctgctaggcccgccggaggccaagaagaaggacaagtacgtggacctcggatgagtcctcgccaagctctagctcctctggtggaccttgtggtgcggcgtcatcttttttttcctcatcgacctccccatcatgatcgcctagcccatccatggacaagaagccaggcccgccgacgccagatcagtacactcaggagctgcacaacggggtcctct

SEQ ID NO: 176730 - DNA, 381 bp, Zea mays
  Clone ID: MRT4577_92769C.1
gggggggaaaaaatgggtatgtcccccttttcaccccgggggggggttattcccgcggttttaccataacaaaagggggaaatttggcctgttctaaaaaaaaataaaaaaaattttttgaaaaaaacaaaaaggggggggggtctttaaaaaaaaaattttattcttggggtaggacctaaaacagggggggacatttcccgggccaaaataattcatcggaaaacttttttacaccagggggaaaccgcggattatattaaaaaatttccacccgccgcctaggggaggggatgcaaaagggggattgtttgttgggggaaaaaaaaaatgtcccggggaggttataaaccccggggggccaggggaactttttttggt

SEQ ID NO: 176731 - DNA, 126 bp, Zea mays
  Clone ID: MRT4577_9276C.1
atgctgagcagacaaggtcgcccgtctgtgtcgattaaggatcgtaacattgactggcctgatgtggttcagactttgcaactagccatataccctggtatgggacagggttacgagtcgctttga

SEQ ID NO: 176732 - DNA, 2216 bp, Zea mays
  Clone ID: MRT4577_92770C.1
tgctttcgccgtgacataggttcagatggttcttgccatggtaaggaaggacaagtgaatgtttgggggatgaaaaaggaagtgcaagaaaaaagaaaagtagctcccgaagataatagttcaggatacagcagctgaatcagcagtagtgattctgacacaagtgcagatagctatgaggaacagaaaaggagtcaagctggagggagaagaaatgagctgattacacaaaggcagaaagaggaggaaagaaaagagcttgaaaagcaacagaagagagaggtagagacttggtagcagaagaatgaattgcaaagaaaatagatcgaaagaaggcaaagcgtggaaagaactctgggtctgagtctgatacagatagtggccatggcaaaaagaaaactaaacatgtaaagaatgatcggggtgggagaaagaagatacaagtgaagaactctcatcaagattccgagcctgacacagatagtagctatggcaagaaaacagaacatgcaaggaatgatagggatgagagaaagataccggtaaagaattctcgtcatgatttcaaatctgatatagatagtggatatggcaagaaaacagaagatgcaaagagtgaacactatgagagaaagatgttattggtgaagagctctcgtcatgattctgagtctgatacagacagtggttatggcaagaagaaaatggaacatataaagaatgaacgcgatgagagaaagaaggtgctggtgaagaactctcgtcatgattctgcgtttgatacagacactggcgatggcaagaagaaaatggaacatgcaaaaaatgaacgtgatgagagaaggaaggtaccggtgaagagttctcgttatgattctgagtctgatactgatagtggctatggcaagaagaaaattgagcaaacaaagaatgtacgtgatgagagaaggaaggtaccgttgaagagttctcatcatgattctgagtctgatgcagatattgactataggaagaagaaaatagaacatacagagggtattcgtgatgagagaaagaagataccagcgagaagctctcgccatgattctgactctggtgcagataataatgggaaaaacaagagaccagtgcaaagctcttgtcatgatttggaggatgagaagcctagattgagaaattataattatggctctcgggcttccgagcatgagaaacatagtaagtacaaggaaagctttcgccatgactcagattcagatggttattcccgtggtaaggaaagacaattgaatgttgcagtgttgaaaaaggatgtgcaagagaaaagaaaagtagctacctcaagtgatagttcagattacagcagcagcctcagcagtagtgataatgacacgagtgcagatagctatgaggaacagaaaaggagtcaagctggagggagaagaaatgagctgaatacacaaaggcagaaagaggaggaaagaaaagagcttgaaaagcaacagaagagagaggtagagaagaaagagctggataagcaaaagcaaagggaggaagagaggatggagatggagaaggagaagaaaaggcaacgagagagggaggaagagagacagagggagagagagcaatacgaaaggaaaggtggaaatgatgtggagagagacaacaaaaggaaactgatagatgatcggtatgatccaaattcaagtagagatagagaagagggatacagagactctcagaacagagatgacaatagaaggcaggaagagcatggtcaacacaatagatatatggatagtcatgattccaagaggtcaaggcatgactcgcattaccattcaaggagggattatgaacaacgctattctagagacgaacatagagacagaaggcgtcactaaatgttggaagaatgccgttctaggtggacaacttattctcagctatcacccataagttccagtcccagatcttttctacggcagcaagaccaacccatcagtacctccgctgcagcattaatctctgcttttgtttgtatcatactttggattttactacgcaaagagcgaagtctgcaatatgtaatatgttgtggaacagacatgaacggtaggatttttttttgttggaatttgtggtgcgcatgttgctgatcataattatgataagttttcttaagcttatatttgatgagctccaggtttttc

SEQ ID NO: 176733 - DNA, 238 bp, Zea mays
  Clone ID: MRT4577_92771C.1
gtggttttttttttttttctccttccggtgggctggccgctgcctgtttggtggcgcctgtgtcctagtcgcggctgggttcgtggcatcgcgctctggccttgtctcgtctttttttgttttgtgtcctggctgggcccccctttgtggggggggcgggtctcttttattcctctgtgctcctgcgctcttgcccttcttgctgtgtctcttgctctgtggtactcgctctctttcc

SEQ ID NO: 176734 - DNA, 644 bp, Zea mays
  Clone ID: MRT4577_92772C.1
aaaaaaaaattaaaaaaaaaaaaacttcctcatttgccctcgccttcctctccactcgagctcacggagacttcactagccagccatggagaccctgagcaggttgctcatcaacatgtgtatcgtgttgctgctgctcctcactctgggccttgccgcgaacttcaactacgctgacgcggtcgccaagtccatcatctccttcgaggacccacgctccggcaagctgtcgccgggcaaccgtatggccgggctccctagctcagcgagtccagcctcagcgacgacacccagcactacgatgaccacctgacctcgatgtatagtatatctatatccggagtgcaggtggatttggtgggcgggtactacaacaccggtgacatcaacaacttcaatctttggagacccaagcaccttgacgtccacctctgctcgcccaccgtctaggtgaaggaagggactacttgccttgctgagatgaccgatttgcaccgggttcgcagcgttcagtagattcatacctggagatgagttcagacttcagagggatatggtttggcagggtgtggttcatgtatgataatcttggcatctgacttaagccctgtgttgcagggatgcaacttgattcattcctggag

SEQ ID NO: 176735 - DNA, 811 bp, Zea mays
  unsure (1)..(811): unsure at all n locations
  Clone ID: MRT4577_92773C.1
cattgggtacctcgaggccgngccgggaaattccccacacccgccaccccgcgcacggcctctctcctttctcgagagagcgaagtaaacgggacagcggctgctgccacccagtcttgcaaggcgccaaggacggacggaggcgacgactcgcaaggtagctctgctcgggcgaggcagcagcagcacgcagcagtactccgttcagaatcaggagaggagacgttgttctccgggcactcgagtcgaagtcctgacgagatggacggcaatgcgaggtcggcggcgacgaatcagaagaagcccgtcgtcgcggacgacgacctcgtggagctgctgtggcacaacgggagcgtcgtcgcgcagccccaggcgcaccagaggccggcgcccacctacgaccccgaccgcccgggcaccagcggcctcaccggcgaagagaccgccgcgtggttcccggacaccctcgacgacgcgctggagaaggacctgtacacgcagctctggtacagcaccatcgccgacgccgccccgcagcacgagggcacgctcccgggccctacctcgaagccttcgccttcgccgcccgttgggagcagcggcgtcgagtcgagctgggctggcgacatctgctcgaccttctgcggaagcaaccaggtgctcaggacgccggcaaggatcagggggaaggacgcggcattgcagtcggagttgccgagcaataccggcgcgcacgacggcacatcgtcatccggtgggtctggaaagcactatgggggatcccggctgcccagtgacagcgtccatgtac

SEQ ID NO: 176736 - DNA, 318 bp, Zea mays
  unsure (1)..(318): unsure at all n locations
  Clone ID: MRT4577_92774C.1
cggaataccggggcggccacgcgtccggctaggtagccagccagaaggacgttttccgtatgatgggaggaagaacantggcccggccggtcgtacttgcgctggtgaccatcatcgccatcgcggcggccgagggggaccaggtgaagtgtggcgggtgctctccgtgcggcggcgccgactgcccggtgctgtacccgttgccgtcctcgccaacgtactactactacagccctaccccacccgcgacctaccccggggagtcctcgttatactaccagtcgccgccggcgggcgcgtacatccagatcgggagcg

SEQ ID NO: 176737 - DNA, 2446 bp, Zea mays
  unsure (1)..(2446): unsure at all n locations
  Clone ID: MRT4577_92775C.1
tcctcattgtgccctcgcctntcctctccactcgagctcacggagacttcactagccagccatggagaccctgagcaggttgctcatcaacatgtgtatcgtgttgctgctgctcctcactctgggccttgccgcgaacttcaactacgctgacgcggtcgccaagtccatcatctccttcgaggacccacgctccggcaagctgtcgccgggcaaccgtatggccgggctccctagctcagcgagtccagcctcagcgacgacacccagcactacgatgaccacctgacctcgatgtatagtatatctatatccggagtgcaggtggatttggtgggcgggtactacaacaccggtgacatcaacaacttcaatctttggagacccaaagtgctgtttttttttttcctaggaattgactgctgattgaatattgcttgctgtacagatcagtacacacagtaggacaggagtcggagttggcatctcaggggagaggggttgctatctacctgcaactctgcatttacatgtagatgtagcattcgtgtccagacaagcattgccatattgatgtagatacactgcagcgcagctacagagatgccatccgctcctcatcacgtcagtatttccagggattgccagaaaagaaagaccctttcttgatcccattcaattctcttgaacgctgtactgcagtctgcacagcagtatgcagctcgagttcttccgtagatagaatacggcggtagacaggctgttgtcttgtaacctatacaagactcctgataataactctagaactaagcttacatgtcaaagaatatggttctgacacttctgtacagatatacagcttaaggcatgattttgatcactctaaactccatggaaagttggtggttgccctgccttagaagttggtataacagtactagctgccacttccagtatcttattgtgttcttcggcttgtgctatttgatgtccatgaacgacatggggtcctggtcctggtacctggggtaccactgctgctcgcccgccatctaggtgaaggacgtggctacctgcatccctgaggtgaccgatttgcacctggttcgcggcgttcagtggattcattagattcatagctggagacgagttcagagggatatggtttggcagggtgtggttcatgtatggtaatcttggcatctgacttaggccctgtgctgcagggatgcaacctggattcattcctagagccatctgtggaatgaattggtgaacaccaggaaacatcattggcgccatcccagaagtcatccacatgatctgaacttgcatttggagtgacttcagatactcaatcgtctcgtctaatatcgacgctttgtcagtcttgttgcagtgcgggatgagctcttgcaacgcgcgcatcttttcattgatccggtcccttcttctcctctctgagagattgtgaacttcagctgcacgagtccggcgtttcgtcccatatcgccttgatggtttcgtttcctcacttgcctcctcacactcggcatcctcactcggactatctgagtcgtctctacacctcccctttctcttctgtacatggacgctgtcactgggcagcccggatcccccatagttgcttccagacccgccggatgacgatgtgccgtcgtgcgcgccggtattgctcggcaactccgactgcaatgccgcgtccttccccctgatccttgccggcgtcctgagcacctggttgcttccgcagaaggtcgagcagatgtcgccagcccagctcgactcgacgccgctgctcccaacgggcggcgaaggcgaaggctgcgaggtagggcccgggagcgttccctcgtgctgcggggcggcgtcggcgatggtgctgtaccagagctgcgtgtacaggtccttctccagcgcgtcgtcgagggtgtccgggaaccacgcggcggtctcttcgccggtgaggccgctggtgcccgggcggtcggggtcgtaggtgggcgccggcctctggtgcgcctggggctgcgcgacgacgctcccgttgtgccacagcagctccacgaggtcgtcgtccgcgacgacgggcttcttctgattcgttgccgccgacctcgcattgccgtccatctcgtcaggacttcgactcgagtgcccggagaacaacgtcttctctcctgattctgaacggagtactgctgcgtgctgctgctgcctcgcccgagcagagctaccttgcgagtcgtcgcctccgtccgtccttggcgccttgcaagctgcaaacaggagcaggctcagggagcttttatgaggcagctctgtagcagcacggcatgagagcacacaagtcggagcgctcgtacactgggtggctgcagccgctgtcccgtttacttcgctctctcgagaaaggagagaggcc

SEQ ID NO: 176738 - DNA, 803 bp, Zea mays
  Clone ID: MRT4577_92776C.1
tattgctgctgatataaccggtactaatctgaatgcttctcagcgccatcaagagcacaggcatgatgaagagagaaccttgcataccatagctaaggatgtacagcatcatcagcaccatggccaccttccagcctcttttgccgagcaaccctccaactccaagtatggtgttgagcaaatgaaacctcaacctcaacagcccaagatggtcaggatgtattcagctgcctcccagcagcccatggactatgcacttaaagaaaccagcccctttctcggtggtggacagattgttggtggtcgggttattggtggtgagaagcatgctagtacttatgacttagtggagagaatgcagtatctgtttgtgcgtgtggtcaaggcacgggacttgcctaacatggacatcactgggagcctggatcctttcgtggaagtgagagttggcaactacaggggcataactaagcactttgagaagcagaggaaccctgagtggaatgctgtctttgctttctctagagaacgtatgcaggcctctgtcattgaagtgttggtcaaagacaaagatcttgtcagggatgattttgttggcatggtgcgattcgatctgaatgatgtgccagtacgtgtgccccctgacagtccactggctccagaatggtaccggcttgttcataaggatggggacaagtcaaggggtgagctgatgctggcggtttggattggcacccaagctgacgaggcatttcctgatgcatggcattcagatgctgctacacttgaggatccatctgctg

SEQ ID NO: 176739 - DNA, 791 bp, Zea mays
  Clone ID: MRT4577_92777C.1
ctcgaggccggccgggacgtccgccgaccgcccggccctatctcacgctcgatctcctgccgccgaacccctctactgctcgatctgtgctgatctgttgcttttgtcatgctcccttttgttgggtttttcttttttcttcccccggagatcaggtcgtgtggtgtgggggcgctctgatccggatggtgcagcgccgcgggatcgcccacggccatgattgatcgcgaacgagcagaggaaatgcaagttaataatgaggcaccactagggtgcctcaagccaaatatttctcagtataactctccagagcagataggtggtgttgaagggtttcctgagaataatgaaaaaaggaatgatattgttgctgcggaaaaaatctgggaggcgactccaaaccaaggccttagcaggcccatctaccgacaagaattttatgcctggccatatatttattcagattatcaaatcgtgcgtcagccactaccttatggttttgacaaccaattttatcagataaatagggaccacggtttccctattgagaacagggttcaatatcttccattcaagatgctccctcaaggtcacccccatgatgcacagcttcaggagtttcagtattttgtggttattgactttgaagcaacctgtgacaaggtgaacaatccatttccacaagaaatcatcgagtttccatctgtcttggttaacagtgcaactggaaaactcgaagaatgcttccaaacatatgttcggccgacgtatcatcaatttttgactgattt

SEQ ID NO: 176740 - DNA, 324 bp, Zea mays
  unsure (1)..(324): unsure at all n locations
  Clone ID: MRT4577_92778C.1
gcnntacgctctgagaaccatctacagagctgacactgatgatattgctgaacaaggtgttgcgacaggacatgctctgcttgttctagatattgcagtactgaanngngcnntgtccgatgtcgtaccaaatactgccagaggctcgctgtctgaaggaacacagtgtggggtacatgttcccgatcgctgcgatatgaggggtggcaggcctgaagagagtgcagcgtaagggctcggagggtgcattggagacaaggccatagcgtccaatgaggccaatactcttgcgtcagagggacactgtgattaagaaagtgaaca

SEQ ID NO: 176741 - DNA, 687 bp, Zea mays
  unsure (1)..(687): unsure at all n locations
  Clone ID: MRT4577_92779C.1
aggcgcctgcctctcgccgccgaacggtgcctttcgcgttctcgctccccctctaggttttttggtttttttagtttcttcctttgcttcttgtaggggnnngnngccgncncacccgcagnncnngagacangcagagccaganagngngccacgggngcaggacccnnncngncnacccaagaggngcnccgagcgngngnngngcggnangccangnggncaccaangngccgccnccagcaanggaganggcncgacccanangnggnggcngccagacannanngangnangcncgcagngcaacaacngnaagaagcncangnngngacacagncaancnngncagaccagngagnagcanagcncaagngaaccgnggccagngccaaacanggnngangnanccanacggagcaccgtcngncaaangngcngnnngcaacnncanacaanagnnggcggggngacncccanganaccnnngccaccaccagcacnaacngcancaagtggaacnncananancancccgncaannnccgngccgacgaancaaccgcggaatggaacggggngncgnngaaaacccaangacagnagangacaagggaaaannggngagcaagggggnagnaggggnnacgagcggcgggaaaaangacggcanacacaaccccggag

SEQ ID NO: 176742 - DNA, 759 bp, Zea mays
  Clone ID: MRT4577_9277C.1
actcgcgaaaacctaccgccgccgctctccaaggtcccaaggctccagatctccctctctcgcagctacctcggtggcctttggagcgcacgagatggcggaagaagccccagcaccagttgttgccccagcagaggcacctaccccggttcttggtgagccaatggacttgatgactgctctacagcttgtcatgaagaagtcaagtgctcatgatggccttgtgaaggggctccgtgaggctgccaagtccattgagaagcatgctgctcagctttgtgtgctggctgaggattgtgaccagcctgattacgtgaagctcgttaaggcactatgcgctgagcacaatgttcacctggttactgtgccaagtgctaaaactcttggagagtgggcagggctttgcaagattgactctgagggcaaggcaaggaaggttgtgggctgctcttgcgttgttgtgaaggactacggtgaagaatccgagggccttaacatcgtgcaggagtacgtcaagtctcactagatgagaatgtttcatgatgcaaacacttgtgttgggcattttggtcctcggtttcatttatactttattctcgggcttcctattgttcgaagtttcaagtgtgagcctagcagatatcgtcaatttggacctctgaacctttgtttatcaggcagctgctgcctttagcgtaaatcatcaagagctgataatatatttctctttgcaatattacaattttgattttttgccct

SEQ ID NO: 176743 - DNA, 814 bp, Zea mays
  Clone ID: MRT4577_92780C.1
ctatatgatgtgaaactttgaaagggaaagcgtcaatctgttcgattgtgatgtaccatgacagttctttcatattgaataggaagatctgatagatagagaagggaaggggaagcaggagcaggaggggttcgtcatcgcgtggtggccgcgccgctctgttcctccgtcccctcctccttccggctctcgctgtcacatgtcgtgtggtgtgggggcgctctgatccggatggtgcagcgccgcgggatcgcccacggccatgattgatcgcgaacgagcagaaaaaatctgggaggcgactccaaaccaaggccttagcaggcccatctaccgacaagaattttatgcctggccatatatttattcagattatcaaatcgtgcgtcagccactaccttatggttttgacaaccaattttatcagataaatagggaccacggtttccctattgagaacagggttcaatatcttccattcaagatgctccctcaaggtcacccccatgatgcacagcttcaggaatttcagtattttgtggttattgactttgaagcaacctgtgacaaggtgaacaatccatttccacaagaaatcatcgagtttccatctgtcttggttaacagtgcaactggaaaactcgaagaatgcttccaaacatatgttcggccgacgtatcatcaatttttgactgatttttgcaaggagcttactggcatacaacagattcaggtggacagaggtgtgcctctaggtgaagccttactcatgcacgataaatggctagaggacaagggcatcaagaacacaaac

SEQ ID NO: 176744 - DNA, 738 bp, Zea mays
  Clone ID: MRT4577_92781C.1
acagacgcgtggggttctgactgcatgtatggttttatttcagaatcttaattgcactgtttataattttcttatgtgtgtagtttatttgatgccgccaccagaagtaagagaaaccatgtcagccagccattggatcaccaccattcgcgctgttcggcgtgcgcacccgatcccgtctccgtgcggctttgtgagtagagaagggaaggggaagcaggagcaggaggggttcgtcatcgcgtggtggccgcgccgctctgttcctccgtcccctcctccttccggctctcgctgtcacatgtcgtgtggtgtgggggcgctctgatccggatggtgcagcgccgcgggatcgcccacggccatgattgatcgcgaacgagcagcagattaccctggtccatcagcatttcattgtgtgatgctacaggaaatgcaagttaataatgaggcaccactagggtgcctcaagccaaatatttctcagtataactctccagagcagataggtggtgttgaagggtttcctgagaataatgaaaaaaggaatgatattgttgctgcagaaaaaatctgggaggcgactccaaaccaaggccttagcaggcccatctaccgacaagaattttatgcctggccatatatttattcagattatcaaatcgtgcgtcagccactaccttatggttttgacaaccaattttatcagataaatagggaccacggtttccctattga

SEQ ID NO: 176745 - DNA, 693 bp, Zea mays
  unsure (1)..(693): unsure at all n locations
  Clone ID: MRT4577_92782C.1
aattcggcacgaggatggatctcctccctgctcacgggcctcaccatcctcaatggcgagtgtaaaacttcgcaccaacacactcgacaagcttgatggcgacccctacgtcaacatccgcatgggcaaggtcatgtaatttttatcttcatttcaatagtgattgaagcaaatgaaaattttaaaattttggcagtgagtatgcaacacttccaagcaatggataatgtattaatgtggggctgtgggcgttggaacgtgcgtgttgactagctttgattagcttgtcgatatacatacttagccatctattttttcttctcctttcaaatgctatgctattgctactgctgttggagtgtaccatttaacttgatatatgatttaatagatgctttgtgtgcataaatcgtctacagttaccatctggacttttttagccatgtttgagagatgtgacggagtttggatttcacttaaaaatgcaggtccagttgatgtttaatgtgcctgaactgcagttacagtcataaagctcaaacaatcttgagcatttggttntacattatattctctggtttctgtttttgggatttgtgttctgatgatgcanacgcnttcattntttatgttgctcctgcacaagatttcctgcacaaccaactgttttttgaattctttatgttatttgat

SEQ ID NO: 176746 - DNA, 150 bp, Zea mays
  Clone ID: MRT4577_92783C.1
cgtgtagtggagtgtagcatcatcagaatccagcaaggagcaccgtgtgtgcgtgatgttgccggatgagatgtacgcgtaggcgttcattgcagaagacccgctcaagcgcgcggggtccgcatcggcgcatccgtcgaggactctaca

SEQ ID NO: 176747 - DNA, 2325 bp, Zea mays
  Clone ID: MRT4577_92784C.1
atctcacgctcgatctcctgccgccgaacccctctactgctcgatctgtgctgatctgttgcttttgtcatgctcccttttgttgggtttttcttttttcttctcccggagatcggtcggaaaaaaaaaaaaaaaaaaaaaaaaaaaaaaaaaaaaaagccaccagaagtaagagaaaccacgcgtgtcagccagccactggagcacgaccatgcgccacgtcagagaaaccacgcgtgtcagccagccattggatcaccaccattcgcgctgttcggcgtgcgcacccgatcccgtctccgtgcggctttgtgagtagagaagggaaggggaagcagagcaggaggggttcgtcatcgcgtggtggccgcgccgctctgttcctccgtcccctcctccttccggctctcgctgtcacatgtcgtgtggtgtgggggcgctctgatccggatggtgcagcgccgcgggatcgcccacggccatgattgatcgcgaacgagcagaggaaatgcaagttaataatgaggcaccactagggtgcctcaagccaaatatttctcagtataactctccagagcagataggtggtgttgaagggtttcctgagaataatgaaaaaaggaatgatattgttgctgcggaaaaaatctgggaggcgactccaaaccaaggccttagcaggcccatctaccgacaagaattttatgcctggccatatatttattcagattatcaaatcgtgcgtcagccactaccttatggttttgacaaccaattttatcagataaatagggaccacggtttccctattgagaacagggttcaatatcttccattcaagatgctccctcaaggtcacccccatgatgcacagcttcaggaatttcagtattttgtggttattgactttgaagcaacctgtgacaaggtgaacaatccatttccacaagaaatcatcgagtttccatctgtcttggttaacagtgcaactggaaaactcgaagaatgcttccaaacatatgttcggccgacgtatcatcaatttttgactgatttttgcaaggagcttactggcatacaacagattcaggtggacagaggtgtgcctctaggtgaagccttactcatgcacgataaatggctagaggacaagggcatcaagaacacaaactttgctattgtgacctggtctaactgggactgccgtataatgctggagtcggaatgcagatttaagagaatcaggaagcccccttattttaacaggtggatcaacttgagggtaccgttccaggaagtgtacggggacgtccgctgcaacctgaaggaggcagtccagctggccgggctcacatgggaggggcgcgctcactgcgggctcgacgacgcccgcaacaccgctcgcctcctggcacttctgatgcaccggggcttcaagttctccatcaccaactcactggtgtggcaacctgccgccgctccgcagtcaaccgccgccacctgccacttctccccggaccgctctccggacccagtcgtcgtccagctccagcaccagcagcagcagcacaagccgaaggaggcgctggggtctcccgcgtcgcaggtgaacccgtcgtacgccacccccgcgggagggaaggacagagccatgtactgctactgcggggtgctgagccggtggagcgtcgtgcgcaagccgggacccatgcaggggcgctacttcttcgggtgcgggaactggaccgccaccaggcgcgccatctgcccgtacttcgcatgggcctcgtgaatagcaaagcaagcagagatctgggctggtgctttaaccgagggaggcgcgccatgttgctgcggctggctgctgcgcctcccagttccgtatatattattgttattattattatggtataataactttgctcgcgagacaaatggaggttctctaggtagtgtctctaacctgtcgtactgacttctgtcgatagaagagaatggggccagatgctgcttaggtgtgatctatcctatccatccatggataataaagaagtttgtggattgctgttttattaacttgatggaactccgtaggtgtggtttgtgcaacttggattttgaaggcttgtgcgtctgtgagtgtttgatcaaatcgaaggtggtgtttgtttgctgaatgaaatggttatggaaggtgcctattattcctgacaggaggcgctggggcctcccgcgtcgctggtgaacccatcgtacgccacccccgcgggagggaaggacagagccatgtactgctactgccgggtgctgagccggtggagcgtc

SEQ ID NO: 176748 - DNA, 212 bp, Zea mays
  unsure (1)..(212): unsure at all n locations
  Clone ID: MRT4577_92785C.1
ggggccggccgactctttcgccaaactgcggatagagcagcgagccatctatattancgcgagcgcaagcacgtacgtgtggtgaagtttaagttagaagaggcaccactccctgatcgatggttgcccatgcttttctttccgtccggaagttgctgggccgccccttgcatttgtccgtttttagttcgtcttcaagtaaagctcccttc

SEQ ID NO: 176749 - DNA, 632 bp, Zea mays
  unsure (1)..(632): unsure at all n locations
  Clone ID: MRT4577_92786C.1
ttcggccgggncaataaaattgtagtcgtaatggctagatgagtgcgtttaagtctttatacactagattgtgtgttcaaacccccgcagctacacattttaaaaaaaaaaaaaaaaaaaaaaaaaaaaaaaaaaaaaaaaaaaaaaaaaaaaaaaaaaaaaaaaaaaaaaaaaaaaaaaaaaaaaaaaaaaaaaaaaaaaacccggtccaacaccccttttaaggaaccccagagggcccctgggttgccgcgggccccttcttcttcttgtttttgcaaacacccttgtgggccggttgggggggtcccggggggaaaaaaaccccccccttaaagttttcttggcccaacgggggggggggcccggccccaacggggggcccgggggcccaggcgggggggccaaacacctcaaaaacccctttgggaagggggggggggatcgacaccccgttgcccggggccccccccctaaagtcctcaaagccgttcgcccccccccagggcacttccttgggccccggaaaggacaacttttccttgaggaaaaacaaaaatttggtgtcccaggcgggggagtccaagggaagccccgtgccatttttgggcccgaacccccgttttcacccc

SEQ ID NO: 176750 - DNA, 783 bp, Zea mays
  unsure (1)..(783): unsure at all n locations
  Clone ID: MRT4577_92787C.1
gtacgcctgcaggttccggtccggaattcccgggtcgacccacgcgtccggagcgacaagatgaatgcgggctcagaccccgtggtcatcgtctcagcggcgcgcaccgctataggctccttcaatggtgccctgtccaccgtgcctgtccacgaaatggggacaactgtcatcaaagaagtcctgcagagggccaaggtggctccagaagaggtgtccgaggtcatatttggacatgtcttgacggcaggttgtgggcagaatcctactcgacaagccagtgtgggtgcagggatcccctattcggttccagcatggagctgccagatgatctgtggctcgggcctaaaagccgtgtgtcttgcagcccagtccatagccatgggcgactccaccattgtggtagctggaggcatggagaatatgagcaaggctcctcacttgactcacctgagaacaggagtcaggatgggtgaggtgccactggctgacagcatactctgtgatggtctgacagatgcctttcacaactaccacatgggcatcacagctgaaaacgtagccaaaaaatggcaagtgagcagagaggcccaggacaaggttgcagttctgtcacagaacagggcagagcatgctcagaaagctggccactttgacaaggagattgtgccagtgcctggtgtcttccagaanaggtctttactgagtgaanatcgatgaatttccccgtcatgggagtaaccttgagccantggcaagctgaaaccttactttcttactgat

SEQ ID NO: 176751 - DNA, 263 bp, Zea mays
  Clone ID: MRT4577_92788C.1
ccataaaaaccgggaaagggaccttcttatttcgggggggccccttccctcacccaaaaaccttttttttgggtttccacctaatagccaatcaaaaagggggcccccccaatgatgtgttgttggtggggggccccccggcctgccaaagcaggtgggccaaagggcaccaattgttgtatttgaaaaagggtggcggggttacccccaacccgctggtaaaaaggcccacctgttgcttggtaaaaaagaaaccccggttt

SEQ ID NO: 176752 - DNA, 740 bp, Zea mays
  unsure (1)..(740): unsure at all n locations
  Clone ID: MRT4577_92789C.1
gtaccctcgggttcggccgggatgaactgaataagaaaacatatgtgatattgcctgcctaatcttcttctcgaagttcctctctgcccttttccccttgctacttcctctgcgattcgtggtgctaacaggtggtatcagagctagttcatcctagagagtctagatccaatcccgggtcggcgtcctcgttccactgcggtggctggcatggacgctgcgatgcagaaggttctagaggccttgagccagatggaagagcgattcacggcgacgatggagggtcgttgcagcgcgatcgagcaacgcgtcgacgcggtggcgcagcaagcggaggcccgtttcatttctctcgagatgggacattccgaagtggatcagtggcgtcctgaagtggagaagcgcctagagaacctcttcctcgaaaccaagcgcgccaccaagttcatggaacgggagacgctgaccgccgatcaatctaagtcaggtctcttcgctccttccgggtcggcatcgtgacaaccttctgccacgaagcaagcagtcgacgggccattcggcaaccactctgaaccatatcaccgggctcgtgggtttgggcatggtcctgctcaaacccaggtcccggtcaagggtacgtaccatgatccacttcgctttgattcacttgatgatcccgtttgccacactgngatggatggaggtcgggacggctaccgttgtgggcatggtagtctgct

SEQ ID NO: 176753 - DNA, 175 bp, Zea mays
  Clone ID: MRT4577_9278C.1
cctcaacccaggaacagagcgaggcgacgccgcggcacctcttctccggcgagggaaatggcaaccgttccagggatctgattggcaggtgtgaggaagaacaactccttcctgtgaacagttcggcaacgaatgccaagtgcagttcacaagagcgacaactctaaaatcatcc

SEQ ID NO: 176754 - DNA, 218 bp, Zea mays
  Clone ID: MRT4577_92790C.1
ttcttcctacagtatctactctcacaagtactgtcttgtactccaattcttcaaacttatcttgacccatttacatatacaataggatgttggatactcaatcgaacatactgacccatggacatctaattaccagctgctaaatattcagcatacttcaaacaacttactctacatacgctccatcatcttcatctacatcttatcctattacaaac

SEQ ID NO: 176755 - DNA, 397 bp, Zea mays
  Clone ID: MRT4577_92791C.1
gttctatatctgctggagttggtctactacatttttgtcccaccatttcaaattttaagatgattggcttttctagatacattgcttcaactattgtatgtcgaagtgcatagcaaaatcaatgtatctagaaaaactaaaacgtcttaaaatggagggagtattattattcagagggtgccgtgggggagtgggactatcctaaacgagtgaaataacaatattacatttgatgccttgttatagcagtatgcaatacattagtatactcatagttggagtagcgaaccatcttagagtgagaaaactgtagccagcagaacagcattgtctacaaagatgacaattttgtttagctgtgctccttttttgtaccttttaagttgagacctgatgc

SEQ ID NO: 176756 - DNA, 284 bp, Zea mays
  Clone ID: MRT4577_92792C.1
gcttagctatccgtctctctatctacatgcggtggaattaatagatggacggcaatgtggaggacgttctcctgtgcgccaaccgctactcggagcgccagtcaatctgcacggcggcgcagggcacggaggagaatgactacaaggagcctccgcctgcgccgctgttcgatgcggaggagctgacgtcgtggtccttctaccgggccggtatcgccgagttcgtggccaccttcctgttcctgtacatcagcatcctgactgtgatgggcgttacaagtcgt

SEQ ID NO: 176757 - DNA, 343 bp, Zea mays
  Clone ID: MRT4577_92793C.1
ccatccaaaacaccgcaaatggtttggccaaaaacatgggcccccgatggcgggacaggaagggatagagcccatcccctagttcaaactttccaaaaccgggaagacagagcagaattcaggccctttcccccttgatgcggcccccgagctggatgtcctggggcatgaggggacccctttgggcggggagggcccaaaggtgggggtcctaaaagagcccccccaaatccccctggggggccttctgcagggggggaacaggggaggactggacccaaaggggggttttaaaattttgcgcgatctcacacaccaaccgtgggaaggcgactttccggag

SEQ ID NO: 176758 - DNA, 602 bp, Zea mays
  Clone ID: MRT4577_92794C.1
aattcggcacgaggaggaggccagtaccgcagtcccgcgcagccggccattcccatgccgccggcacccatgagatggcggcgcgggggccgctcgtcatcgcgtctccttcagcgagccctcctcttggccgccttctccgctgcggccctcatcctcctcgtactccagcaccaccacggtcctaaacgcccaaacccttccgccgcgtcccacgcccgcgactcctcagacgagctcctcgacgactcgcctcccgcggagcgggatccggatgccagtgaccctgcggtagttgttgacagggccacgtgcgcaacggtggagatgatgggggaggaggccgctggtgctgggcggggctctccggagcaggccagcctgcgggtccgcgagatgatccggcgccacttcgagctccacggggactgtatccttttggggagtacatttcttataccaaccaatcattcactattcatgaaatcaaacatttgtggaggaagcatcgctggactaggacatatggtagagatctgaatatcagagtggatatttttgaaaatccaactgagacgaatgttctgtgtagtgactggaat

SEQ ID NO: 176759 - DNA, 227 bp, Zea mays
  Clone ID: MRT4577_92795C.1
tactttcttccgaacaaatccggatttcataggggcatctactataaaccatatcgttaatggcctctatcaacctgatgattcacaagcttgtaatacaattgacgcgtctagtttaaacagttacagaagaagctcttagttttgggaactgaaacttaagcaaaactttctatttctgctcatgatctccagactctgtttcaaactttttgttgcggttatat

SEQ ID NO: 176760 - DNA, 685 bp, Zea mays
  Clone ID: MRT4577_92796C.1
gcacgagcctgattcctacatcgacgtgaagaacaaggactacggaggtgagccgcaacagcgcccctgttccgttcggtgtctctgatgtcttcttcttcttcatgtcttcttcttctttgtctgtcgtgtccaggtgacaagtacgtgaacggcgagataatcccctgcacgtacccgacgtaccagccgaaggagcggaggacgtccaagtacgagagcaggcggtacgagaggcggagagatgggccaccggcggccagcaggaaaccgaggcagcaggcaccagctcagactcagaccgagtccgcgtcttcgtgacgagctctgcaggcattttgtccacgtacctacctacctagaagtagaacaagagaggaggacgcctaaaattctgtcgccttgggcaccgcgtactggactggacaggcgggtcgggatccatcatccatcgtcagccagaaaaattgtcgctgtccaagcagcctgggcagcttgtgtgtgtgtgtgctgataagcctgatatcttgagctagctgtggcagaaactgaaaaccctactcttcccccccactcgttagtgagctgtgtgctgtgtgatgccgactggtgtagagctgtatcgctgattgcgtgaaaccgaaatgctgtggctttatttagactgaagttggcacttcgagcc

SEQ ID NO: 176761 - DNA, 763 bp, Zea mays
  unsure (1)..(763): unsure at all n locations
  Clone ID: MRT4577_92797C.1
ccggggntcatacaatttctgtctgctttcccagttcatgttgtgttcagcaaactattttagaaacttttcatgatgtattgagttaaatattaaggacaattattgtcgttttacgtctagaatatttctgccttttcttaactttttttaacccatgtccttcaagaaagttttaagacaggagttagtatagccatattaagtacgtgaaattttgcgtaatttagtgataacaataattttattgatgccttttagttgggatgccattctttcctgattttgtattttgatgtactttccattgtctccttgcaccttcagtcacatggctcctaaagaccattctttctattgcaagtgaaaaccatatttcatcatttactgtctgtaggtacgtgagcaagctattttactcaatcttggttcgttgcgagcaattgctatgtatgcgcgtgttcttatattcaactataacaggttaatgttcatcttatattaataagtcatttccttttcatgatcttacaaaatgttttatgaacttatcaattatctttttaacttgtgtagcccaggagggaaggcctttctagggttattactgtctaggttaaatccaagaaacatcaatggtgggcctgcaatgccttttcagcttgaggtaacgaatatatccagtaatacatattcatggtatgggagcagctgtgaacttgtgaactgatattctgccacgtaaaaagcattttctttctct

SEQ ID NO: 176762 - DNA, 1719 bp, Zea mays
  Clone ID: MRT4577_92798C.1
ggcacttcagtctaaataaagccacagcatttcgggttcacgctgtcagctatacagatcgacacctaccttaacacactcgccacctgtctagggggtacctcgaggcctccgggcgggctctctctgaccttatccccttcggcaaaaccttgcgcgcaacaatggccgcctccctcccgaccaccgccgcgcgcctcgcggccccggccttcgcctaccggtcgcccaaggctccctccgccaccgccctcccgcgtgccgccgccttccctgcaatcgccgtcgcggcggcgcccctgcgcccgcgccgcgcgccgaggccggtggcggcccgggccgggggcgaggagagggagacgatactgctccccgggtgcgactacaaccactggctgatcgtcatggagttccccaaggaccccgcgcccacccgcgagcagatgatcgacacctacctcaacacactcgccaccgtcctcggcagcatggaggaagccaagaagaacatgtacgcattcagcacgaccacctacaccgggttccagtgcaccgtggacgaggagacgtcggagaagttcaagggtctgcctggggtgctgtgggtgctccctgattcctacatcgacgtgaagaacaaggactacggaggtgacaagtacgtgaacggcgagataatcccctgcacgtacccgacgtaccagccgaaggagcggaggacgtccaagtacgagagcaggcggtacgagaggcggagagatgggccaccggcggccagcaggaaaccgaggcagcaggcaccagctcagactcagaccgagtcggcgtcttcgtgacgaggtgcatagtgcattgcaacttgcaagacgcagtctcaatctctaaccgtatgttgaggacttgagattggtgtgtactttttaaccccggtgcttctttgtatcagctctgcaggcattttgtccacgtacctacctacctagaagtagaacaagagaggaggacgcctaaaattctgtcgccttgggcaccgcgtactggactggacaggcgggtcgggatccatcatccatcgtcagccagaaaaattgtcgctgtccaagcagcctgggcagcttgtgtgtgtgtgtgctgataagcctgatatcttgagctagctgtggcagaaactgaaaaccctactcttccccccgactccttagtgagctgtgtgatgccgactggtgtagagctgtatcgctgattgcgtgaaaccgaaatgctgtggctttatttagactgaagttggcacttcgagccatcggatcactccaagccccttgttcgttcatcgcgtatttggctgtgctaggctcgtttcctctgcaggcattttgtccacgtacctacctacctagaagtagaacaagagaggaggaacgcctaaattctgtcgccttgggcaccgcgtactgggactggacaggcgggtcgggatccatcatccatcgtcagccagaaaaattgtcgctgtccaagcagcctgggcagcttgtgtgcgtgtgtgctgataagcctgatatcttgagctagctgtggcagaaactgaaaaccctactcttcccccccgactcctagtgagctgtgtgatgcggactggtgtagagctgtatcgctgataccgaaatgctgtggctttatttagactgaagttggcacttccagccatcggatcactcc

SEQ ID NO: 176763 - DNA, 834 bp, Zea mays
  unsure (1)..(834): unsure at all n locations
  Clone ID: MRT4577_92799C.1
tcgaggcncggccggggccggggaatatccttgctgtgatccaattccacccccgaaaatggcagccctcgcctcccttctccgccgccgcagccgccgccgcgccgacgtcctcctccgcacgctctgcgccaccaccactgcgccccccctcacgtcctcggccgccaagacccgcctccgccgcgagtacgacgccgaccgcgccgtctccctcctcgaggccatcgacaccgcctccctctccgccggctctacgcgccatgcgctctcccttgccgcacgccgcctcacccgcgccggacggcatgctgatgccgaggcgctcctctcctcccacatcccagcttccccaaccgagccgcatctctcggccatcctctgctcatacgcctccgccggcctccctgagaaggccctcgaagccttccgctccgccgcgccgtccctcccgtcccccatctccccgatgcccttcaacgccctcctatcggccttcgtccggtgccgccgccaccgccgcgtcccggtcctcttcgaggagctctccaaggagttctccatcacccccaacgccacctcctacgccatactggtgaaggctcactgtatggtccgccatgacgccaaggctcacgaagtgatagcccggatgcgtgaggaaggtatctcgccgaccaccaccatctacaccacaatgattgattccatgtataagcagaagaaggtagaggaggcccagactttgtggaagcagatgctggaaagcggatgcaagccagaccatgcaacatataatgtggaggccatgcaccacggactcatggcaagccg

SEQ ID NO: 176764 - DNA, 283 bp, Zea mays
  Clone ID: MRT4577_9279C.1
tcactcactactccgacatgctctccacctttgacaaccttctcaaccacctcaaccggtttgggtacttcatcaacgacattgacctcaacaacctcgtattcgacctcctggtccgctacataccacagcttgcacctttccgtttcgacctctacatgtcttgccccttacacttcagctcgttcgacctctacacacaccaactggccaacacactgatcaacaactaccatcatgcgcatctccggcaacgaccttgcgcataagctcgtccctgccg

SEQ ID NO: 176765 - DNA, 277 bp, Zea mays
  Clone ID: MRT4577_927C.1
aaaaaagaaaggtagagtgcgatgggggttgttttaggagtgatttataaatactttgggggtgggtttttttttttttgggctttggctccctttcctatagattgctttatgtaaatcgtgcaaggctttaaaattgggcaagagatttgagatccctgggtttcagtctttaactggttcttataccctagtctcttttgttgtaggtaaaaatgagattgatgtggagactcttgtttttattccttatcactaaggctgatgaagggatgcg

SEQ ID NO: 176766 - DNA, 386 bp, Zea mays
  Clone ID: MRT4577_92800C.1
ggtgcagggacgaatcccttgacaccagggatgtgcccacgcccacccggcacccggtggcttgcattgcgccgcagcagcgacgaatcgcaacgcaacgcaaggctgcaggggcggtggtagcttagctagctctactgctaatcctcgtcatcttccaaaccttgcagggtcacctgtcgcgccatctgatcactgccctgttgcggcgggtgtaattcactgctgcagctgtggactgcgcaggaccacaaggccggtcgctctgctcgaggtcgatggaggagtcatggagactagaacgtttagcttgggggggcctccctcaccaatggcgcccagtgacttgccatcgtgctcgtactacctgctgacacacctgcaag

SEQ ID NO: 176767 - DNA, 628 bp, Zea mays
  Clone ID: MRT4577_92801C.1
ggtacaggccccctctcgagtttttttttttttttttttttttttttttttttttttttttttttttttttttttttggttgtggttttttttttttttttttttttttaaaaaaaagggcttttttttttcctaaaaaaggcccctttaaaaaatttggttaaacttttgggttttaaaatgggggtaaaaaacccccccaaaacccccccccggaattggaaccgggccctaaggaaatttttgggccttttttcaacccccaaattcccaccattggttttaacctttaaatggcccaaaatttcagggggcctttttgggggggggaaaaaagggggggaattttttgattcccccccttgggtcccccccttttgggttgggcaaaaatttcctcccccccaataaaggggcgaaaagggctttttaatttttggccaaaaaaaacttattttaaaaaaaacctccaaaagggggggggccccaaatttttattttttaaagggggggccccccaatttttccctttgttaaggggaaaccctactgggaaccccttaaaactttttttcccaggggagtaaagttttggacaatttaaaacatggggggcctaaattttggt

SEQ ID NO: 176768 - DNA, 124 bp, Zea mays
  Clone ID: MRT4577_92802C.1
ctgctacaaatcagccactcgccccttcccgccggacgctggtcctatcgccatgcccgcgagcaggcgcgaccccggcaccggtggccgacgctgcgctcctaccgggcgggctgcgtgccga

SEQ ID NO: 176769 - DNA, 848 bp, Zea mays
  Clone ID: MRT4577_92803C.1
aattcggcaggagggtttcactagtcaccctcaccccttcctcccgatcctctctcggatctcgccgcgcgctgccgcgctcgaaggtgagcggggccgcgatgcctgcggtgcccgttcccggaggcggtggctcctccgacgccgaggagctgttccgcaccaagcgcatcccggagattcgcgcggttgagggcgccacccgacgcgagatctccgccaaggaggaggagctccggcagctcgtcgggcgcagctaccgcgacctgctcgactcagcggactccatactcctcatcaagcagtcctccgatgcaatattctacaacctcgcccgcatctccgactccttgtcgtcgctctcgcctccccctgaaccctctctcgccgtaagcgccgtatcgccgtctccgtcagcgggagggcgcgcgaggctctacgcgctggccgcgcgcgccaagtaccttgttgacacaccggagcacatctggggggctcgatgagggcctgctccttgaggcggcggggcggtaccttgcggcgcaggtcgtacacgggcggctctcccgcgacgccacggccgccgcgcggttccctctcctcgcgcaccaggcgcagctcgtggaggcgttccggccgcagatctcccagcgcgcgcgcgagcgcctcgccgaccgccgcctccccgtagcggcccacgctgacgcgcttgcggccgtggccgctattgactccccctcgcttgccccggcccaggctctcctcctcttcctcacctcgcgccgcgcttggatctcccaagccctagctgggctcgcctcggatctgtcatcctacacctctgtgct

SEQ ID NO: 176770 - DNA, 219 bp, Zea mays
  Clone ID: MRT4577_92804C.1
agcgatggctggagcctgcgcactgctcatcgattttcgtctttgccgtctcggacctggcctcgcgggccgagttttgcttgcggtggagccgcggccctggccgagatctgcatgaagactccgtaccccgacctgtgcaccatgacggcggtgaagcacgccaacacgtacaatgtgttggacacggtgacggtgctcgatatgcaagtggacacc

SEQ ID NO: 176771 - DNA, 423 bp, Zea mays
  Clone ID: MRT4577_92805C.1
ctcgagccggccgggaaacctgttcctcacgagatctgtgatgtcatcctccgacatctcgaatcacctccgtgttgcttcatgaccgcgtcactagccaaggccttctatcacttgatgaatggatgctacgacagatacactactgtgactcagaactgcaaggtggatctaatcgaacatgatgaaaacccttggcggtgatcatgggttcccccaccaatgatactcctcctgcatgttgtacccacctccaccaattagatttgcactgcccctaaacttctatcctcctcctcaagagatatacccttctccctctggggcatacccacccaatatgagtatcctcacgaagctgtctacccacctgcacgcggtatatcctacctgccctactaccccgagctcattctcaccatg

SEQ ID NO: 176772 - DNA, 503 bp, Zea mays
  Clone ID: MRT4577_92806C.1
aacaactagaagcatagaagcacgaagcaagcagacaactagaagcactaagcattaagcaatcagccaagcagacaactagacaagcagacgtgcggccaagcaggaagcagcggcaggcggcagccgtgcggccatgcgggtcggcgcctcggcgggaccaagcggcaagcagcccgcagccggccgccggcgggacaagacaaccggtcaaccggacaagcagatcagcggagcaccggagctggcggctggagcgtgacgagtccgaggctccgagcggctggaggcctggaggctggagcaccggcaggagcggcctgcggccgagcaggcagctgtgcgggacgctggcagtgcggctgtgcggaacgccgtgacgaaccctaatctctattctattagtgggccggcccaaggtattgcccaggcaatactgggccatactgggccctccgcccctgctctgctccaaattatgaaattattatagatcatttttt

SEQ ID NO: 176773 - DNA, 276 bp, Zea mays
  Clone ID: MRT4577_92807C.1
agcagtggtaacaacgcagagtacttttttttttttttttttttttttttttatgatattttctcatgttatcattaacggatcagatggagtacaagagtggcctttcaactgtacagataaaccgcggaaatttttctgatatttacgtacactcatgaatcactcacagagcaggggttcacaccaagaattaccctgaagacagaaaaaataaaagaatcctgcactcacaaaaggagggctcttctacaaaataaggaaaagagtaatgat

SEQ ID NO: 176774 - DNA, 306 bp, Zea mays
  Clone ID: MRT4577_92808C.1
ctaaaaaccggttgtattgccaaatctgggtggcgaaaatagcctgcacagtgattggctacacagtgctacgcggtgctcaccaaatctggaaaaatgatgatgtgaacactttgactgtttcaagaaaaaaatgcaggaacaatgtggaaatcctattgaaccaaatcacctacttgtatctttgaaccctatgtatgtttcggcttttaacccccgttgctattttcccaacttatttcaatttcattcaagcgaaaaaaaaggtgaaagattggtgagccttgtggggtcgttttctttgat

SEQ ID NO: 176775 - DNA, 114 bp, Zea mays
  unsure (1)..(114): unsure at all n locations
  Clone ID: MRT4577_92809C.1
tcctcgagggcgccgggttcccgttccggtcanatggctcctgaggatggactcctgttgacttgctgctgctagtagtcgattcgcacgcgnttcactgatggacaccccggc

SEQ ID NO: 176776 - DNA, 927 bp, Zea mays
  Clone ID: MRT4577_9280C.1
ctagcttgcccagccccgccgggccatgggcaaatacatgcgcaaggtaaaggtttccagcgaggttgccatcatggatgtcgccgctgctccgctcggggtccgcacccgcgcgcgcgccctcgcgctgcagcgccttgagaagcagcaggtgcagcaggaggagggctgcggcggtgagtacctggagctaaggagccggaggctcgagaagctgccgccgcaggtggcgtccgtgaggaggtgcggcgggaggaaggtggcggccacggcccccgccgctatggaggaggcggaagcatcgtacggggagaacatgctcgagtcggaggccatggggaggaataccagggagacgacgccctgcagcttgattaactctgagatgatcagcactcccggatccacaacaagatccagccactcttcccaccgcagggtgaaagctcctcctgtgcacgccatcccaagttcaacggagatgaacgagtacttcgctgctgaacagcgacgccaacaacaggctttcattgacaagtacaactttgatcctgtaaatgactgccctctcccaggcaggtttgaatgggtgaagctagactgatagattcagaggacatgagagcagcagcatggaactcacctccgctccctccaccgccgcagcgtcgtggcagaggcgcataccgtcgtgttagctttgtttctgttgtaaaaacttagcgttagcttgtagccttaattgtcgcgtgtcacagtacagaactgatgctgagttacagcaccctgatatgatctggtccctcaactccaatgtaacccttaacagctcattctgtaaggaacctatcatcctgttaccagttgccgaattaatgaagtagagctagataatgatgttcaaaaaaaaaaaaaaaaagggcggcc

SEQ ID NO: 176777 - DNA, 396 bp, Zea mays
  unsure (1)..(396): unsure at all n locations
  Clone ID: MRT4577_92810C.1
ccacgcgagccttcccntctcctccncccttgccttctcccctccatctccgctgcntcccggcgacagaacaccggaatggatccggcacangttaaaggaataaaagggctcacttcaccaactttcaccttctttgctcaaaaagaatcttatccttatgtggactcgactccnccgaaagacaccattctctacagctgagcttcgcagatctcaccacatcccaccatcgattaatgttaaacttggatacaagacatcacttacttctggattcggggccagacagatagccacttggagcatacttcaaacaccaggtctatttttttggcacatataggacgttttttaacaaagatactcaccatctaataggatattactatcttt

SEQ ID NO: 176778 - DNA, 886 bp, Zea mays
  unsure (1)..(886): unsure at all n locations
  Clone ID: MRT4577_92811C.1
aattcggcacgaggcgcatcaccgtgcccccgcccccgctcgaggggggagtgtccgcgagcgaccctctgcgctcgcgcgaatcccgcctgagatcgccgccgatccgaagcagcggcaccgtaaccctccccctcgcgagatccgcgaccgccccatcccggcgccacgggatccacgctccgccctcgcccttccccacccccatccgctaatctcgcggccgatccgcgcccggtcctgaccccgcctccgtcctccgcaccgccactccgtcccccgtcctcggcgccgccgtctcccgctcccctggcacgccttcggggtccttgcgggcggcaagcacctccgtcccggagacatctgccgctgcagcatagaccaccatgtcctcgctcggcagcaccgatgttgacgatggcaacgaggaggaggacggctccgcgagcacccccgagatctaccgctgccactcccacgcagttgcgtgtagcctctccatgtgatttccccaatgtttcccttcctctgtagcctctccgacggcgccgccgccgttcttcctcggccgtcggcgacattttaagaacgcctgaggctgttcaaccacttcatcgtctttttgactgcctcacattgaaggaactttgcaacggactgttatatgatctatgaaagaatgcatgcaacaagatctccagtctgatactgatgaagaaactacaaaagaacacatagccaccatcaatcaagacaaagggaaaactaccattacctcaattggatttctggtttttgggctatcattggatttctggttaactgaaatatgtaccttgcagtagctctatgtctctatatggcattatggngtctaaaactggat

SEQ ID NO: 176779 - DNA, 957 bp, Zea mays
  unsure (1)..(957): unsure at all n locations
  Clone ID: MRT4577_92812C.1
tgagacgtccaccgtgcccccgcctgctcccgcaagtccgcaatacgtgcccccgcccccgtcagtgtccgcgagcgaccctctgcgctcgcgcgaatcccgcccgagatcgccgccgatccgaagcaacggcaccgtgcccctccccctcgcgagatccgcgaccgccccatcccggcgccgcgggatccacgcctccgccctcgcccttccccacccccacccgctaatctcgcggtcgatccgcgcccggtcctgaccccgcctccgtcctcagcaccgccactccgtcccccatcttcggcgccgccgtctcccgctcccctggcacgcattcggggtccttgcgggcgacaagcacctccgtcccggaggcatctgccgctgcagcatagaccaccatgtcctcgctcggcagcaccgatgttgacgatggcaacgaggaggaggacggctccgcgagcacccccgagatctactgctgccactcccacgcagttgcgtgtagcctctccatgtgatttccccaatgtttcccttcctctgtagcctctccgacggcgccgccgccgttcttcctcggccgtcggcgacattttaagaacgcctgaggctgttcaaccacttcatcgtctttttgactgcctcacattgaaggaactttgcagcggactgttatatgatctatgaaagaatgcatgtaggaaatatctgtgaatgctacttatattttgttatgcctccttggtcattattctgaaccatagaacatgatctatctccagttgtattttccccttctatggaatcaccattgttggttagtggcaacaagatccccagtctgatactgatgaagaaactacaaaagaacacatagccaccccatcatcagacaaagggaaaactaccattacctcantngggattctggnttttgggctatcatgggatttc

SEQ ID NO: 176780 - DNA, 300 bp, Zea mays
  Clone ID: MRT4577_92813C.1
cggcggcagcgcccagagaggatcgctgcacagaacagcaagcaacaggccataatcctagacgagagcctgactctgtcagctgacagcgcctccgcaatgaagatgccctgccccatgcgcggagccgcagggctggtacagagctggcgccaacctgactacgatcatggagctccagcagctgcacccccacgcgcacacccgaggcaatcgaaacgcagaccgctggcagtaacaccctaatacgcctggtgtaggcagaccagcgccatacacacaacccctacagatacaggg

SEQ ID NO: 176781 - DNA, 217 bp, Zea mays
  Clone ID: MRT4577_92815C.1
gacgacgatggcagtcctcactccaagccgcggccaccctggagcacgcgggcaagatcggcggccgggcgccctttgcctcgctgccgtcccgcccgtcctcgcaactcgcctgcagggcgttcggcggagacgccggcaccaccaggatcacgtgctcgctgtaggacgtcgccaggaggtgcgacaaccccaggaacctcggcgccttcgcgct

SEQ ID NO: 176782 - DNA, 277 bp, Zea mays
  Clone ID: MRT4577_92816C.1
aatgagcacggctcattttctctacgtgctggctgtggtcccttgctcaagctgtcgggcaccagatcgcctggcttcctggtcgtccagctcgctggtggagccctggccaaagcggcagcagcgccgaggtttccctctgcctcgcacgctcgactcccaagctttactctttttcccatcactcccagctcgacatcgacgtccgctgctcagcatggccggcctcgccgtaaactagctccggtctctggcagccgcggcgctcgtctgcttc

SEQ ID NO: 176783 - DNA, 1252 bp, Zea mays
  Clone ID: MRT4577_92817C.1
cacacacagacaacaacgagttaacgaaagccttttatccaagctcagggaagctcacagtttcgttggatccaatcttttatccaagctcagcgatggcttctcgtcagcagcatcctactagctaccacgccggcgagaccaaggcccgtgccgaggtgatgagatgagacgcgcgcgcaccgcgcttccagccgccgtgcccgcgcgttgctcgctccgtcgtccttttgcagttacctactccacacgatagagtggacactaacgttggctgctgcatcgcaggagaagacgggtcaagtgatgggggcggcgcaggagaaagggagggaggccaagcacaaggcgtccgacgcctccgaccgcgccatggggatgggccacgacgccagggaggcgaccagggagaaggcgcgcgccgccgcggaccgaaccatggggatgggccacgacgccggggaggcggccaaggacagggcgtaccgggccaaggacgcggcctccggtgccgctggccgcgccagggacactgcgtccgacgcggccggcgctgccggggaccgcgcccgcgacggcgcgcagcagaccgggagctacgtcgcgcagacggccgaggccgccaggcagaaggcggccggcgccgcgctgtacgccaaggacaccgtggtggccggcaaggacaagaccggcgccctcctgcagcaggtgagatgcacggtgatgcctagtcattgttagcttctctcccgtctttgctactgcgaaaatgggttattcgatctcaaaatacattcgttcttcggctgttcaggcaggggagaaggtgatgagcacggccgtgggggccaaggacacggttgtcagcacggccgtgggggccaaggacacggttgtcagcaccgccgtgggagccaaggacgcgatgatgaactcgctcggcatggccggcgaggacaaggacggcaccaccaccaccgacgccggcaaggacaccagcacccgcaagcctggcagggactattagaggacacggcagccaaacttctcagtgtttctgttccagaagtttctgatcccatcatttaggttcaaaagtttctcatttcatttcaaactttcagtgtttggtgcatgctgtaaactctcttcaggacgggtcgtttgacatttgtgtcgactgaagcctccgcgctttcgactcaacgatgtatatgtaataataaagtcgcaaagctgttgttttattttc

SEQ ID NO: 176784 - DNA, 1022 bp, Zea mays
  Clone ID: MRT4577_92818C.1
ggcggcaggctcgccgacgagttcagcggtctccgcctcgccgaggagcacaccacgccacctcctctgtcaccgctgcccgccgcgccggtgatgccgaagagcatctccgttcgctcgcccggctatctcaagatgatccagaacggcaagcatcgggcgtccaagccaacgaagggctcgcagcgcgtgttagtgggcatggaaggcggagtgaaggaggaggagaagctcaacggcgggctgcagttcgaggtgtacaaccagggcatgctgaagacagagctctgcaacaagtgggaggagaccggcacgtgcccgtacggtaatcagtgccagttcgcgcacggcatcgccgagctccgccctgttatccgccatccgcgctacaagaccgaggtctgccgcatggttctcgctggcgttgtctgcccctatggccaccgctgccacttccgccactccatcacccctgccgatctcttcctcccgcgcccttgaagatgtcagtccaccacccactgccactctctcgtccgcttccaccctctccagctctacttcattgtgcggttataccatcgtcagtcttcagaacccaaaaaatgtctgattagttgtgattcagaaaatgatagccgtaaataagctatagatagatacacgagatagaaaacaaaaattgttctacgtaattagcacacaggcaagatgtgaatatgtagttctagacacccaaggtattcatatggggttgatcagggcaatcaaactcaaatatgagttatgttgggattattgtattcgtcgtatcgtttatatacacagtttaggttatgatgttctgcctagttacatttttgggcaaattggatgacaaactggtgagttcatgtaagtaaactaaggctgttatctgaatatctctgatgtgttgaacacttggcaaaaacaagcaccttctccgttgtattgtttcggaacaattgaagcaatgaattatggaggtgtttagttgaggg

SEQ ID NO: 176785 - DNA, 442 bp, Zea mays
  Clone ID: MRT4577_92819C.1
ccgggtttcgacccacgccgtccggggactaaactatgcaggaactgtttgaagtaatacaatgaggagccatgctgttcaatctttggctgaatatccatagggaggagggccttgacctgcgctatgaccgcctgacaggaccacacatctaatatcctaccaatatctttggaaccagagatatggtttttcagcctaagacctctaggtgattctacacattgaacagagtataccttcttctcaaaacagatactaggttgacaaaaataatgcaccctgcttccgtcccaacttatactacattacatacgtggataaattatctattatagaccacttgagccaaactttggcaagttttattgaatttatagaccaacctttttgacacaaaattatcggatacaccatgaaatatatttgtcatagacgttct

SEQ ID NO: 176786 - DNA, 229 bp, Zea mays
  unsure (1)..(229): unsure at all n locations
  Clone ID: MRT4577_9281C.1
gctttgatcccagggccatgaggtttgagtgccctagctggtcgatggcgtctcttgtgttangtgcacagcttgggggttcggtatggtgaaagcaatggaaaactatttatgcttgcatctatgaaggatgctgtgctacagatggcgtattgcttggttctctgtgcaggagatggtgctgcaagtgtaggaggggacaagattgtagctcgtgagtatggaagtg

SEQ ID NO: 176787 - DNA, 1518 bp, Zea mays
  Clone ID: MRT4577_92820C.1
cccacgcgtccgcttctctagatctcctcctcctcttcctctctatctctctctctccccaaccaacaacctgtcgattaagctagctctcagctcatcccggcctcagaaccaaccaattcctgttttagacggttaacaacctacaacaacagttagcatggccacaacacagagcaggggcggcggcggtgttgttcccgttgaggtggacgaggagcacggccgccgccggcagggaggagcagcgccgcaggaggaggaggaggaggaggcggccgagaagccggagctccggcgtggcccgtggaccgtggacgaggaccacaccctcgtcaactacatcgccgacaacggcgagggccgctggaactccctcgcccgcgccgccggtctgaagcgcacgggcaagagctgccggttgcggtggctcaactacctccggcccgacgtgaagcgcggcaacttcaccgccgacgagcagctgctcatcctcgacctccacacccgctggggcaaccggtggtcgaagatagcgcagcacctgccggggaggacggacaacgagatcaagaactactggaggacgcgggtgcagaagcacgccaagcagctcaactgcgacgccagcagcaagcgcttcaaggacgccatgcgctacctctggatgccgcacctcgtcgacgccaccgctaccaccgccgacgacgaataccaccaccaccaacaccaacaccaagccgctgcagcaggcaacatcgacggcctgctcgccggcggcgacgtcgacgacgtccagaacgctctggcggcgggcgtggccgctgctatggcgtcgtcgtcgtccgactcgctcgcgtcggagccgtactcgtacgaggacggtggcctcctcgcgagcgtgcgcgccggcgaggacatgcagctggtgatgagcggcggcggttgggcgatggcgcaggaggccaacgaccaagggctgtggccgtcgtcgtctggtcatggtctgtcgtcgtcggtgcaggccgctgccggtggtgccggccagtttgaggacccggagctcagtggatgggtgcaaggtttctccgacagcattattactggtaacctttgggccttggaggaaatttggaagatgcaatgagcaattttgcgttttccacacgcatccaacgaagagctagcggaaatgtatacgactagtgatgttgacagtagatagaacatgaggttgtcatatataattctcgatctctccctctctctctctatctatatatctctctctctctctctctctctctatatatatatatatatatatatatatatatatatatatatatatatatatatatatatatatatatatatatactctaactccaaatatactatacggtatactaaagttgtatagcattttcatttttttcctcgtttttttatttcgcctcttaaggttcattcttatagaggttggaaaaggagggtattgtttatgcaagtcgaaac

SEQ ID NO: 176788 - DNA, 1443 bp, Zea mays
  Clone ID: MRT4577_92821C.1
gatatcaatctccccccggactcagctaagaacatgtatacggccagtgcacatttgagcccctataaagggaacaacatctggcacttgagggcggcggtgtcatgccgcagaagcatctgaatgtcatttggggaacagtagagcatatgcatatttcagattttttttttttttttcgaagaattgatgtacgcgttaaaaagaaattgtcccagatttgtctctcctcgcttcaaaacttctctaccggctctatatatatgtacacagctagcaacttacttcagtttgacatgaatcacactaatacaaagtgatgtacaatgccagggaaggagagatcgcgcccttcactgggggtgggggtaaaagatacagaacatctacaaagagaaccgcccggttacagttcagtgccaaactagctgcaaaactgctgaggtaaggcctcctcgcttcccgacattacctcttccctgagtgatgaatcatttcttctgctatctcccccgtgcggggctgcggaggtgtccaacaacgtcattgatatttgaactgtccttgcctgtgtccaacaacgccattgatatttgaactgtccttgcctccacttcaccgtgattactatcaaattcagcacgatgtgattccagaaatcacggagtctctcaggtttcctgtgatatgcgccattgactgaatctttccaagacaagcaaacttctacaaaggcaaagcataatgctcatgcccagacattatcagccttacgatgagcgacagtctccgaaacacaattgcaagtgacatgttatgagtgactcatttcaataggcctctgaaaaatctttaattctttgcttaataatctgcagttcctcatgaagcaaaaggaagaccttcttcatcaatttatgccttgctcctgattcatgatacatgtctctgagtctttccaccgtgttataatactgttccttgtctctttctttcgcaacattgagatcatcctgaacccttaaaaaatctgacttagttttgtctatctgactgctcaagtaagaatagactccatacttctcattgtactcctgcacataatcttcgaattgtgagaaatcttttattggacctttgagttctggtgcatctttatcatacttggagaaaaataaattatcatcatctgaagaactgtctcttctctttctacctgtctttgtctcaatcaaagagttgtttctacttctttcctcattatctgatgtggatattgatttctgcattcgagacactatgacattattagtaccgttctgtggaagccttgaggttgctttcttcttctgcatatcagcatactctagcattccactatgtgccatcctagtttcccttttgcttgttttttctcctgacctatctggatacatatatgat

SEQ ID NO: 176789 - DNA, 410 bp, Zea mays
  Clone ID: MRT4577_92822C.1
gaaaataaggacccacctgtgtgtttttatgcttttggaaaacaaaaactttacaacaggttaaatgcagatgtgtggggatgactccggcaaccgaaattccgcagaatagacaatgcccaccccttttaacccaccagaatgggggaccaccaccgccctaataaaccaatgggagtgtgtatgaccttcctttcccgaatgttggcaaacaataccgggtccttcgaaagtcccgtgatattcgatctgtaaatgcccgctaacttatatgttatgttaatatgaggcgcgccagagagagctccttaccataaaacgtgcccggggccataccactggctggcggagctagccgccgactctgcctttgtcgccaatttgcgcatagtcaacctgtcctaccttgg

SEQ ID NO: 176790 - DNA, 1098 bp, Zea mays
  Clone ID: MRT4577_92823C.1
gccatctcgagatcattacacatgcatggttgacttgcttggtcgtgccggtcatctcaaagaagctgaggagctcataaaggacatgccaacggaacctgactctgtgctctgggcttctctgctaggtgcttgcaggctgcataagaatgttgagttgggggaacggacggctggaagattgtttgagcttgatcctgagaactctggaccctatgtccttctctcgaatatgtacgctgagatggggaaatgggcagatgtttttagagtcaggagatccatgaaggacaggggtgtcagtaagcaacccggttgtagttggattgagataggaagtaaaatgaatgtgtttctggcacgagataatcgacatccatgcaggaatgagatatacagtactttaagaataattcagatggagatgggcagaacgagtatagatgaaattgatgatgacttgatgaattactgctctgaagcctgtggatagaagtagaaagtcagatgacttcagaagtaggtgttgacagcttgcttgatatcatatttgcgaggttagtacatccacattaggacaggccaaaagcaagttggctgaccggaagggtcttcttacccaggagagaagggagggtgttgacataaaaaatgtgccgacaagattattggacttcactactaagttcctgatgtcaagatgatgaaggaaaatatttggcgcaacaagaaccggagcccaaaaagagggctttgggttcagccctgcccaaactgtcctagcccagatcaattttaagctcccaaccaacatatctgctcactgtcctcaaccagctaaaatgacttcccaagaatggaataagctacggagatgggggatcactggatcaggaactctctgtgggtaaatgcaaggtggcatggacaccaatgtgtcagctattagaaatgggtggccttggcattctggaccttgaatgctatgcttgagctcaacgcttatggtggctgtggtttgaatgggttgcactagagtgcccttgtattggcatgcccgcccctgcctgtagagctttactaatatattttttctcg

SEQ ID NO: 176791 - DNA, 473 bp, Zea mays
  Clone ID: MRT4577_92824C.1
ctcccagccgtcgctagtcgctcgctccatcaccgataaccaagatcccaagacctcctccagcctcctctgctctcgcgccggcacccgcacgcatggctgcctgtgtcgacaagtggcaccccacgcacgccggccgcctcaccggcgccatctaccgctacttgccggacggcgccacggaccgcgcggtggccgccgccgccgccgcgccggcgtccgcgagcggcggcgacgacgacgacgtctgggacgagctgcgcgcggaggcgcaggccgacgcggacgccgagcctctgctccgcaagtactacgccgacctcgtcctgtcgcgcccgtcgctggaggccgccctcgccgcgcacctgtcgggccaagctctgcgtccccggcgcgctgccgcaggacgcgctccgggacctactggccggcgcgctggccgcgcgcccggagtccggccgcgccgcgcgcgc

SEQ ID NO: 176792 - DNA, 259 bp, Zea mays
  Clone ID: MRT4577_92825C.1
catcactcatctcatgacattcatacgagacacacaaagggcatctccgtgtattcgacttccgaagcaagctttcataagatgcgcgcgaggaaccatccaagtgatcggtttgatatatgaaagaccagatgatgcaaaactatgtgtaaaggatctcatattgctgtcatcaactattcaaatgactgatagtcgacgtaaacttactaaaatatctggctgcacacaggagtgacgaatccaaggtctcaacaca

SEQ ID NO: 176793 - DNA, 256 bp, Zea mays
  Clone ID: MRT4577_92826C.1
tggatgttttcgacgacctgtatgggttaattggaactgagacctatgggaacatgtattggggtgtgagcattacaaaacaaactgcaagcttgatgctgaatgctgcaataggctatgcacttgcatatgctgtcacgataaagttagtgaccatacaatgtacaggtaactcaagacgaacactcatggactgtgatgaccatgtgatatggtgttaatacaactacattcacacgtaaagcttggtagatct

SEQ ID NO: 176794 - DNA, 404 bp, Zea mays
  Clone ID: MRT4577_92827C.1
ctctttctttttttttttttttgtttttttttggtgtttgttgtttttttgtttttttcttccttcccccccttttttaaaaaaacacactggccttcgacggctaaactgggggaagaataaacctacggggaggtacggaaggaaattctcggggggggcaggggacaaaaaaccccggggggggggggcgtctatgaggaattacggggcgggggggaaaaatggggaaaaagaatgatctttcggggggggcccccccccccaggggggtggaggcttacccaggggggggcgccgccccggggagaaattcaaggatacccccggggaacaaggcctggcgctgcttgttgggggcaaaggaaaggttcttgggcgtatctgggggatggatcgggggg

SEQ ID NO: 176795 - DNA, 311 bp, Zea mays
  Clone ID: MRT4577_92828C.1
accctggaagcttaaacctataggttttggatatttttttttttttagagggaaaacctactatatggcgctttatttggtatgaccaaaggaaattgggggggggaatattttgcacgtcgggggatgggcactgtttacacccttgaaaattgaaagagattctgaaaaaaaagggtgggcttctgagctaatttcccaacctcgccttggcgccttgtcaaaaaattgagggtgacgctcaaattttttaatttttggaaaaataaattggaccacttcattctaaaaaaaaacccccttttgaaaaa

SEQ ID NO: 176796 - DNA, 360 bp, Zea mays
  Clone ID: MRT4577_92829C.1
atgtgagccggcatcttcctaaacatacgctctgttttctcgttcaccaggttctccgtagggcgaactcgatagctatcaaatccaaatctctgctttggatctacagttcagctacttcttcggctgcctcgacttgacaaccctctaccaattttttcaaaacgaacttagcacctacaaacacgtacttgattcccatattatcctcaatcttcacacacaaaattcacaagacttctgattaagaaccttctaaactgatgatgtcatacctaacgcacatgctggcataaacagctaacatcttgaatgacctaacatcactctcaactagttacactaactcagttggcttct

SEQ ID NO: 176797 - DNA, 401 bp, Zea mays
  Clone ID: MRT4577_9282C.1
ggccgccgtacccagaccggatcgaccaacaatacaggaccgagagaggtatacgggtcgtcgggtgcatggctgtcgcaggtgccagactgtatggaggggagattgcctatgtctgcaatgtgctatagagctaatgcaacgctgcctgactgctcgagacgattatgaacgaagcgggtctgtaccgttgattttattacatgaggaaggctccggatataacgataacattatctaattactactattctattgtacatactatatcataaaaccacaacataactgaaacataatggctgcagtatatgaggatgatggacttgcaccaaacactatataacttgcatatgactatgccgctcgagcgtgccgctgccgccagcagcagcctgtac

SEQ ID NO: 176798 - DNA, 262 bp, Zea mays
  Clone ID: MRT4577_92830C.1
taatttttttttttttaacttgaaccggtcgggggactttcaaacccgggggcgttgaataaacagtgctgcatgtttcgcgtatgcctatgcctagatcagctagttccaaccatatgcttcacgcgctcgtcctaacatcttaaccatgatgtaccttgttattacacctccagacagacaggatggtcattattaatggacatggactggaacctaaagcaacagaggcatcctgctttacttgatactggcagaaaaa

SEQ ID NO: 176799 - DNA, 379 bp, Zea mays
  Clone ID: MRT4577_92831C.1
catgtaaacaccggggtttacatctagaatgtacaattagcagttcacttcacatatctgcaactgcaagctcgaagggaaatggagtgatgtcgcaggcacagtactacagcagcacagcacacacatctgcaagcaaagctttgggaacaacacacaaaggctcacgcacgcacgcacgcacacggtagaagcagccaagaaccgcaaatggtcaacgcaacccggaaggtctcacggcgacggtggccagtcgaagccggcgaagctctcgctgaatccgccgccgtagaacctcacctcggggttctccagtccctgcccgtcgtcccagatggccttgtcgtcgcttccgacggcgtagtagtcgtcgtccatg

SEQ ID NO: 176800 - DNA, 361 bp, Zea mays
  Clone ID: MRT4577_92832C.1
gacccacgcgtacgaataaagtaccaacaatatttttttttatattaagcctacttatactcgccgggttttttcaagtgctgctacccctaccattttctcacaatgctcacaagcttctatatctttccttttttctccttacctttcaccatcattttcttttatatcttaaaacccaattctttaaccctatattatccaacattcaatctcatctttcattttacctttatcaccctttttcctccaacaatcattacccctattacagcaattacctttttttcatttattttcacaaaacattattttcacaacaactacaacaacttgtgctagcaaaccttgtttactactc

SEQ ID NO: 176801 - DNA, 2044 bp, Zea mays
  Clone ID: MRT4577_92833C.1
ccgcccttcgattccctactcaaacgcagccgccgagcgcctctcgcctctcgccctacaggaggcaccctacagaacccaaccaaaaagcgccggcggcaaacagaacccaacccaaagcgccggcggcaagcgaagagaaagcgccggcactaatccgacgatggacgcgtcggccggcggcggcggcaactccctgccgaccactggcgcggacgggtcgaagcgccgcgtctgctacttctacgacgcggaggtgggcaactactactacgggcagggccacccgatgaagccgcaccgcatccgcatgacccacgcgctgctcggccgctacggcctcctcgaccagatgcaagtgttccgccctcaccctgcccgcgaccgcgacctctgccgcttccacgccgacgattacgtctccttcctccggtccgtcacccccgaaacgcagcaggaccagatccgcgcgctcaagcgcttcaacgtcggcgaggactgccccgtcttcgacggtctctacagtttctgtcagacgtacgcggggggctctgttggcggcgccgtcaagctcaaccatggccatgatatcgccatcaactgggccggcggactccaccacgccaagaagtgcgaggcctccgggttttgctatgttaatgacattgtcctcgccatcctcgagctcctcaagtaccaccagcgcgttctgtacgtggacattgatatccaccacggggacggcgtggaggaggctttttataccacagaccgggtgatgacagtctcattccacaagtttggagattatttccctgggacaggggacattcgtgatgttgggcactcaaagggtaaatattactccctgaatgttcccctggacgatggtattgatgatgagagctaccagtcgttgttcaagccaataatgggcaaggtgatggaggtcttcaaccctggtgcagtcgtgctccagtgtggtgcggattcattgtcgggtgacaggttgggctgtttcaacctctctattaagggtcacgcagaatgtgtaagatttatgaggtccttcaacgtcccgctgttgctgcttggtggtggtgggtataccataagaaacgttgcacggtgttggtgctacgagacaggagttgcccttggtcatgagctcactgacaagatgccacctaatgagtactatgagtattttggtccagattacactctacatgtcgctccaagtaacatggagaataaaaacacacggcatcaattggatgacataaaatcaaaacttctagataatctttcaaaactccgacatgctcctagtgttcagtttcaagagcgacctcctgaggctgagttacctgagcaagatgaagacaaagagaatcctgatgaaagacatgatgctgattctgatgtggagatgaatgatgccaaacctttgcaggactctggaaggatgtcaatagtgtagctgcagaacattctagaggcactggacctgtggctgatggagttggttcctcgaaacaaacctttccgaatgccactagtcgaatggccatagatgaaccaaacgctcttgagagttgagcaagagggttcaaacaaattgcaggaccaaccatcgatgcacctcaagtagctaatgtcatctgtagcctgtcgattcttttgcgcaaattcattaactgtaggcaagccatgcgtggactgaagcagggagcagaagcaagtgctcgaccaagaagttgtgcatctgaaatctatattttttgcgcgtcatatttgtattaccgacagttgcaaacgatggtttaatcatgaaaaatttgtctttccacccttggcttctgcagtggaaggggttgatatcgtagtatgcatcaattatgcattttgtccattccccatccccaaatgagaagtgggtagtccccgacgggttttgaatggccaacagttttaagggagggaagcagcccggaggccaaaaaaaaagcaacgagatgtacggcaaaaaaaaaaaaaaaaa

SEQ ID NO: 176802 - DNA, 1320 bp, Zea mays
  Clone ID: MRT4577_92834C.1
agcaactaatccctgatttacatctgctatctatagcagctaggattctatgcctgatttacatctgctatctatagcagctaggatatccacagatggcatattctattgcctaacagggccgtcgcagagtggacagttgacgccggcccgttagtgatggggggccaggttcggggattttctcggccgggaccattgtttcggtctcttcttatatggaataccgggagggcggtctttccctccccggccgagttttttttaaatacatcagctacagaacttgtcagttgtcactgatgccatcgcatgtgtacatgttttaggtgatgttttcgtttcaaagaaaactgacaagcaaaagaagaggaagataaagaaggttgaggacaaaatgcttggatggggtgggcatgacgataagaagctgatgattcctgctacagtaattttaaggcacatgttcactcctgctgagctgagagctgatgaagagcttcttcctgagcttgaggctgatgttagagaggaatgcatcaagtttggtccggtggataatgtcaaggtttgtgaaaatcatccacaaggtgtcatattggtgagattcaaagacaggaaagatggtgccaaatgcatagagaagatgaacggcagatggtttgctggacggcaaatccatgcgagcgaagacgatggctctgttaaccatgctcttatccgtgattacgacgcggaggtgtcaaggctggatcgatttggacaagagctagaagagtccacatagagtgtatatatacacacacacaccagggtttagagtaggtgtgttacctcattcataggtaggttcgcctgattgaacatgagaaagaagttattggatacacctgctaataagagtagtgaccggcttgcagagctggtgatatcatcactagcgaagtagcagcacactgctttctcaaatgtgttgtttaatgaatgagaagctcatatcgatactattaacctcggctccctatgaaagtacaggcatttctatctgaaatggaatttttatatgcaaaaaaaaaaaaaaaaaaaaaaaaaaaaaaaaaaaaaaaaaaggtcagttatgagccatgagcacgtcgtttgttgctgcaagcctgcagctgaaagaggttcattgtttccgatgctaacatgtaacacctgccatttagtacggagcagtacccagcttgttagttgattattgttttacacttttgaggaagatatcactgtctttgtcatctttcattcacatattatttctttttgctttacattaaa

SEQ ID NO: 176803 - DNA, 339 bp, Zea mays
  Clone ID: MRT4577_92836C.1
cttcccggggaaaggggtaacaaaaaatttttttttaagaattagcccaaggtctctggggccctttatccgggttttttgacccacaagttcaacaaagggcctgggtctaaatgcaaaggcaaggggggtttatttcaagactaaaacgtttttttttccccctattttttcaccctacccagtcttattgaaaccagccatgggcctaggaacctggggggccccaaacccccccacttctccataatttaaacgggcaaggccgctactgttttttttttggccaacgggtcaataaggggaatcaaagttggccccgcccttttggggaaaaag

SEQ ID NO: 176804 - DNA, 455 bp, Zea mays
  Clone ID: MRT4577_92837C.1
ccggtacgacgcccctaaggccgcgtttcgcgcccccgcgtagcgcaggtgctcctgctccgcgtgccgccgccggagccccggcgagcgccgctcgacggcctcgtaccgcgcggcgacgccatcgaggcggtccacgacctccttccagtagccctggaagaagtactccgtctcgacgaaggtcttcttccccagcctctcccagttgttgaggagcaggtacacgagcgcggactggtcgcacgccacgtcggagtccttgtcgctgagcgtggctctgagcacctcccccaccgggcgtggtcctccgggtacgcggggcccatgcgcgcccactcgtccatgaagtcgagcgaccactggcagttgcggatgaggaacacgccggcgttcagccccagccacgacttcctcacgaagaacttgtcgggccagccatacacgacgaagtt

SEQ ID NO: 176805 - DNA, 188 bp, Zea mays
  unsure (1)..(188): unsure at all n locations
  Clone ID: MRT4577_92838C.1
tttttatctaactctctctttcnncaaggcgggactgtaatttttttcatcttgcccaaagaaccgcttgctgctccattagttgcagcatccaccttgttccattggaaagaattacatttaaccccttccttacatacatgggactacttatcctacttacagtctttagccgacgaaccaactca

SEQ ID NO: 176806 - DNA, 836 bp, Zea mays
  Clone ID: MRT4577_92839C.1
ttctctacttcactcttatcttatatttcctttatttcaaccctccttatttttttttttttattcttttttttttttctattatccggtgcatcgacctgtcaagcatggggcatttatttaaactgctgtcctttttacaatggactttaataaaggtcttacattttaggataaagagtcacggggtaacaaatgtgagatgaatgctggtcagttatctgttgttatcctcttcttcatgcccagtctgtgtgccccccctggggctggctctgtggccgtggatagcaaatgcgcctctgcgagtccagagcaccagcgtcctatcgtgcttcccagtattcaagaacgctgtgggaagaagcaagcaagcaagcagcaaccccatggaggtggagtcggctctgcgatgccatgccacccagctccacgtgcatcaggtacaagaatctgggggatatttgcctatccgcgaccagcctttgcctgagaggcaggggaccatggctgcctgcctgatgagcacgaggcacgagcagcagcagccgccggccggccagcggccaggcttttgacgcactggatgcaggctggccaaaggactgacaccagctcgatcagctgaccggcatccatccgcccgccacgccagatcccatgcttgtttgataacaacagctcatgcatactgtgaaaaacaaaaggaggagcacagactcgaatccgagtaaaattcagcagtgtgaagccatagcagcctgtgaggttctcatcaagctagctggacctctgtcagcaaaacccagagctggaatctcccacctcgctctgct

SEQ ID NO: 176807 - DNA, 487 bp, Zea mays
  Clone ID: MRT4577_9283C.1
ccggccggggagctcctggcaggaacatgcaaggtcattcacggaccagcacgtacgcttgcctaggaaaatcaatggcgtagcattagcaatatggtggtcgtcgtcgtgcgtgccttggccgtccacggcagctgcagcatccgattccttggccgtcgacgtgcgtgccgtctacgacatgcacatgccgcaccaggagacctgattccatggataggtggttgcagttttctccttgttggatcaccccagcaaaaattcagacacatccacatcaacagcaagaaataacaagccgctgcaattttgtggtaagaagtcggcagaatcgatccatgcgtagacgcagcatcgaccaatttctaccaactcctggatttcttccattcacagttaaaaagtcggctcaacaagccgtgccaattttgtggtaaaataatcacagcctgatcaaaattgcaaaaaaaaaaaaaaaaaagcggcc

SEQ ID NO: 176808 - DNA, 471 bp, Zea mays
  unsure (1)..(471): unsure at all n locations
  Clone ID: MRT4577_92840C.1
gggggcacagaacccttgnacgctccccccttgaactgttaagggaaggcatgcaacggtacaaagaaaaagaaacacactcgacggacagactcaagcacacttagacctagcttaggctcacaagttcaaacaagctcaatacattacacagtggagtagggtgttacgctccggcggcccgaaccactctaaactcttgcgtgttcttgagttcgtgggtaatctgccaacatttttttcgcttaagccccctcttcatcttaggattagggcgggtgcattccgccacccgaccggagatttccctctccgatagtatcccacagtgtaatcaaaggcaggacaaaaattaggctgcgcacatcaaagcaaagccatgacaacactatcttgagctaggcatgtctgatttaaaagaacattgctacaatgtaggcaagcaacgaaggatntaaaagaacaaccaat

SEQ ID NO: 176809 - DNA, 511 bp, Zea mays
  Clone ID: MRT4577_92841C.1
gagtggcattaataatagagtcagatgggccaaggcccaatacaacattgacctaaatagaatccccacacaacacacacagtacatttcaacagcccctgcagtcgaaactgtagccatgttgagattggactgaaattcctcaaacaccatcgtagggagtcccttggtgaagacgtcgtcaaactgagaagtagtcgggacatgaagaactcgcacatctccaatggcgacacactctcgggtgaagtggatgccgatctcgacatgcttcgtgtgatggtgttggatggggttggtggagaggtacacggcgctgacgttgtcgcaatagacaagagtgctcctcgtcagcggactgtggagctcctaaggcaggtgacagagccacgcagttaggcatgacacagtactgggcctcggcactagagaaggaaaagacccactaccgcttcgaggaccacgagacaaggctatcatcaaggaatatgtcatagcccgaggtagacta

SEQ ID NO: 176810 - DNA, 377 bp, Zea mays
  Clone ID: MRT4577_92842C.1
cgttccatttaaacacacacccagcgaagcgcactagcaacttcctatcttcaatggctaccatgacattataggtctatgcgcttcttgccctttctgagagcgcaacaaatgcatccattattccacaatgctcacttgctcctagcgccatcatttcacagttcctgcctccagtcacttcaatgggcttcgcacacccagctgagccagactacttgctacaacaagcgcttgttgtgtgcgtcttactacatcctatcgggcacatacaacagcaattgtgggcacaactaaacataccaacggtcgtgtcgcatcatggacaacaacgtctaccatgactgacccaactggccgtggtgaacccttgttcc

SEQ ID NO: 176811 - DNA, 273 bp, Zea mays
  Clone ID: MRT4577_92843C.1
ttgatggcgtgatgtctcacagaaagttctccgctcccagacatgggtccctcggcttcctgcctcggaagcgcacagcaggcatcgtgggaaggtgaagagcttccctaaggatgacccgtccaagccggtccacctcacagccttcctgggatacaaggctggcatgactcacatcgtgcgggaagtcgacaggccgggatccaaggtgaacaagaaggaggtggtggaggctgtgaccattgtagagacaccacccatggtcgttgtggg

SEQ ID NO: 176812 - DNA, 740 bp, Zea mays
  unsure (1)..(740): unsure at all n locations
  Clone ID: MRT4577_92844C.1
atttttcggccgctgcgtcgtccctggccttggcactggcgccggtggtgctggagtactactactactcctgctatctcgttgcgtcccgacaaccagaaaggagaggagagaggggagaggaaagggggaagccaacccagctgcaacacacggcggagcgagcggggcaggggagaatccagcgatctctctgcgaggaggagatggcttcagtaggcgttgctccctctgggcacaagaacagcagcggcaccagcatgggtgctgagaagctaccagatcagatgaacgatttgaagataagagatgataaggaagtggaagctactattattaatggcaagggaacagagactggacacataattgtcacaactactggtggcaaaaatgggcagccgaaacagaccgcgagctacatggctgagcggattgttggtcaaggttcatttggtattgtattccaggctaaatgtttggagacaggggaaactgttgccattaagaaggtccttcaggataagcgctacaagaaccgtgagctacagaccatgcgcctgcttgaccacccaaatgttgtagctctgaagcattgtttcttttctacaactgagaaggatgaactgtatctnaacttggttcttgagtatgtgcctgagactgtccatcgtgttggcaagcattacaacaagatgaaccagcgcatgccactaatctatgtgaagctgtatacatac

SEQ ID NO: 176813 - DNA, 470 bp, Zea mays
  Clone ID: MRT4577_92845C.1
aatgcaccatgcatcctcgtactcgatttcctactcaccctgcatccaaggtattccgtagacgaccgtgaggaacgagccagagaagcaggtatgagcgcgctggcgcggcaccgtcagatccggtctcgccctcctccgcgccaacctcgcatgcctccgaatgccgcgaccgtcgctcaggtttcgaggagcttcacgtggcaatcctgcaagctgacggcgaaatagatcaaggcgctctacctcctgatgaagctgaacacgctcgatgccaccgtcttgctctatgaaatcgcctaaaactaatggagtggagaaagatgaatctgacatcaaatctattgtttaggctaacaagaacatgccgttagttatatcaattcatagaggatttaggagtccgacgagagaataatctgaagggtatagccaaaaaaaattgctgatgcttaaggtatgagactgtt

SEQ ID NO: 176814 - DNA, 176 bp, Zea mays
  Clone ID: MRT4577_92846C.1
tttttctcttttttcattttttttcaaattttttgtttggttttttttgttagagaaacaatgcaagaagctttcatgaggtttggttgaccctcaacaacatatgacctttgaagggccacgagaccctatgcatccaaactggttcaaaagggcacagacgaactggggcctcc

SEQ ID NO: 176815 - DNA, 883 bp, Zea mays
  Clone ID: MRT4577_92847C.1
acaatcatttcggccgctgcgtcgtccctggccttggcactggcgccggtggtgctggagtactactactactcctgctatctcgttgcgtcccgacaaccagaaaggagaggagagaggggagaggaaagggggaagccaacccagctgcaacacacggcggagcgagcggggcaggggagaatccagcgatctctctgcgaggaggagatacaccaaaacacctactgcttctgtgatttgatgcgctgctgaatcggcgtctcttggtttccgtaacagatggcttcagtaggcgttgctccctctgggcacaagaacagcagcggcaccagcatgggtgctgagaagctaccagatcagatgaacgatttgaagataagagatgataaggaagtggaagctactattattaatggcaagggaacagagactggacacataattgtcacaactactggtggcaaaaatgggcagccgaaacagaccgtgagctacatggctgagcggattgttggtcaaggttcatttggtattgtattccaggctaaatgtttggagacaggggaaactgttgccattaagaaggtccttcaggataagcgctacaagaaccgtgagctacagaccatgcgcctgcttgaccacccaaatgttgtagctctgaagcattgtttcttttctacaactgagaaggatgaactgtatctaaacttggttcttgagtatgtgcctgagactgtccatcgtgttgtcaagcattacaacaagatgaaccagcgcatgccactaatctatgtgaagctgtatacatacccagatatgtaggggctttggcttacattcctggccgcaattggagtttgccccagggatattcagc

SEQ ID NO: 176816 - DNA, 831 bp, Zea mays
  Clone ID: MRT4577_92848C.1
aattacaaatcatttcggccgctgcgtcgtccctccgccttggccttggcactggcaccggtgctgctggactagtactactactactgctatctcgttgcgtcccgacaaccagaaaggagaggagagagggggagagaggaaagggcaagccaacccagctgcaacacagggcggagcgagcggagaatcgagggatctctctgccaaggaagaggaggaggagatacaccaaaacacctactgcttctctgatttcatgcgctgctgaatcggcgtctcttggcttccgtagcagatggcttcagtaggcgttgctccctctgggcacaagaacagcagcggcaccagcatggttgctgagaagctaccagatcagatgaacgatttgaagataagagatgataaggaagtggaagctactattattaatggcaagggaacagagactggacacataattgtcacaactactggtggcaaaaatggtcagccgaaacagaccgtgagctacatggctgagcggattgttggtcaaggttcatttggtattgtattccaggctaaatgtttggagacaggggaaactgttgccattaagaaggtccttcaggataagcgctacaagaaccgtgagctacagaccatgcgcctgcttgaccacccaaatgttgtagctctgaagcattgtttcttttctacaactgagaaggatgaactgtatctaaacttggttcttgagtatgtgcctgagactgtccatcgtgttgtccagcatttacaacagatgaaccagcgcatgccactaatctatggtaagctgtatacgta

SEQ ID NO: 176817 - DNA, 533 bp, Zea mays
  unsure (1)..(533): unsure at all n locations
  Clone ID: MRT4577_92849C.1
cacatgcgcaacagtgtggtacttgaacgtggaggtgggacagttgtagcgcactgtcttgcgttgctcgctttgtttgtgaccacgtccgtagataagggttcatgggaacagctgngggtgcatatgctgccatgaactgatggctctgatgtgttcatacggtaaccacttctgtactcattgatgcaacgttcagtacatgcaagtgtggtgaatggaaaatcttcattgactagctgattgattattcctctaagaagaagattgatgtcactttccaaaagataacagaggagaacacgcttgattactaatgtctataactaattataccactcgcatataactattgactacgcaataatgtgaataaaaaaaaaaactaccactcaattcatattattctcactgataaatgctgtactttcgcattgcacgacgtgttgctagctttaacaactttcttatttcggctgtgattagcacaacattaatatttattgaaatattagataataagcttgactatg

SEQ ID NO: 176818 - DNA, 331 bp, Zea mays
  Clone ID: MRT4577_9284C.1
attgggggggacccaaaaacacccctttagcccttaagacataccaaaaaaaaagcctgcagggagatacaggcttcaacgacccgctaaaagatttgtttgaggcacgggggcgcacaaaccgggggtaaaaccagctctaacaaatgggccaaatgggcgtggaaaacaaaaacccagagggggaaaagcaaaaccgccgcgaaccaaaaaaaacccttgggactagggaaaaaaaaacgggcggaaaaaggaaactatgggcgggggggcccccccgggaaactcctccaggtccccgaggaggggtcgaaaaccccggcacgggggc

SEQ ID NO: 176819 - DNA, 556 bp, Zea mays
  Clone ID: MRT4577_92850C.1
gtgcgtcgaagcatatcatgagtggacaaaaatgctgtaggcttagggtctctgcagttcgatagtgaacctgccacaggcgtaggcccaaccagcactcaatggactatggttcgcaggaaagatgattacagtgtcatctatgtccgaccatgactacaactctaagttacaaaacttgtctgcatatgcaactaagagttggtacacatcccccatagttcgttaagctgagtttacctaatgctgtatcattatatggtagactaaaccaacaccttattgttttgatgacaggataaactcaactgcagcgctggctaagacatccaatgaaacattgttctcaatttacggcagatacacagaactccatcccttatttagtccaccgaacgaaatgatctctgttctccagccgctattcaggttcagaacattgaagagtttacatggttaaactcaagctacagtccagtgctgaggcaggcggatacgcaggttatgattgatcactacttcacatctgagcatgctaggctcgattaaaatccca

SEQ ID NO: 176820 - DNA, 770 bp, Zea mays
  Clone ID: MRT4577_92851C.1
ccggccggcagccgccgcaaccttctttctacgatgcctcgcaagcccaaacggaaggctccggcctcaccggcgaggcacgacccttcgccggagccctacccttcccatgcctccccctgctcggcacaatgcctggtagtccgcgacgccctcctcgcgttccacgggttccccgaagagttcgcggccttccgcgtcctccgcctcggtggcctctcgcctaaccgtgaccctcggccttcgtcccccacagtgcttgacggcctcgtcaccacgctcctctcccagaacactaccgacgccatctcccgccgcgccttcgcctcgctcaaggccgctttcccctcctgggaccaggtggtggatgaggagggaaagaggttggaggacgccatccggtgcggcggcctggcggcgacgaaggcggccaggatacggtccatgctgagggacgtgagggagcggaggggcaagatttgcctcgagtacctgcgggaactgtcggtggatgaggtgaagaaggagctctcgcggttcaaagggattggaccaaagaccgtggcatgtgtgctgatgttctatctacagaaggatgattttccagtggatactcatgtactccgcattacgaaggctatgggctgggttcctgctacagctagcagggagaaggcctacattcatctaaataataagattcctgatgatctgaagttttgattgaaattgtcttttgtactcatggaaagctttgtcagtcatgtacc

SEQ ID NO: 176821 - DNA, 451 bp, Zea mays
  unsure (1)..(451): unsure at all n locations
  Clone ID: MRT4577_92852C.1
tttcaaatacgaggtcggcagtaatcttaagtgccgaggactcgtcgcctcccgcgatggacgcagacaaaggagaaacacggtcttgcatgttgccgataccgcacccaggcagacggggaatacgcagcgaacggagtatagcacgcttcaagtggaagccccgccatgattctgaacgtcgaattcttggacagcattgctcactctgggatataattgaacaagggccgcgtacccttagaacggtcctccatggaaccaccgccacctctgcgctgaacgccaatacctggaaggtgacgacgtgtagcacgccggtttngtggttctcccccgctgcaacatactgattataacgacgacacgcgcattctagtctcaataataatcaacaggagttggctgatctgatgtaccacctgtgcctcgataacggcgctacggtctg

SEQ ID NO: 176822 - DNA, 483 bp, Zea mays
  unsure (1)..(483): unsure at all n locations
  Clone ID: MRT4577_92853C.1
tccgaatttccaggttgaaccacacccttccgnaaaaaaaaaaaaaaaaaaaaaaaaaaaaatttttttaaaaaaaaaaaaaaaaaaaaaaaaaaaaaaaaaaaaaaaaaaaaaaaaaaaaaaaaagggggggccgttttaaagaaccaaagtttacttccccgggcttgcaaggtaaaaatttttttttagggcccccaaaattaaattaacggcccgcggtttaaaaacgccggaccgggaaaaacccggggtttcccaaattaaatggctttgaaaaaaatccccttttggcaagttgggttaaaaccaaaaaggccccaaccaaccgcctttccaaaaatttgcccaccctaattggaaaatggaaccccccctttacgggcccttaaagcccgggggtttggggggttcccccaagtttgcccgttaaatttgcaaaggcctttggccccgctcttttggttttttccctttcctttt

SEQ ID NO: 176823 - DNA, 365 bp, Zea mays
  Clone ID: MRT4577_92854C.1
aaccaaaacaaaaacaatggcaatgttccaaaatacacattgcctttccaatttaccaacaatgacatcacaccacaaatcatctctactaatataacacctgatattgttcttgcttcttcctactctcattaattaccactatataatcttgaaattcatcttaccaactatacaccttcctactacactctccttctcttttctctccatattctcaaaacccattctttatataacgaatattacttcaattataataccactttttaagatttctcttcttacccatcttattataacaatccttaccctactctctttaattttaaccttattactactaccacttttaacccaatctt

SEQ ID NO: 176824 - DNA, 101 bp, Zea mays
  Clone ID: MRT4577_92855C.1
gacccactcggccgtgggaaaacgttcaaagcatggggccacacttggttgggtgttagcagtctccttaatgcatcttgtgcgtataaaatttgacactg

SEQ ID NO: 176825 - DNA, 205 bp, Zea mays
  Clone ID: MRT4577_92856C.1
agcgaccccatcgcgcgcgcgcccgacaaccgcggggcgctactacaaccgctaggaggagtacgcgtcgctgtggcgctacacggaggcggaagatgacaccaagcggaccgtggccgctgaagccgtactgggccaagggctactcccgactcggcgccgcgcacgttgggctcggaggcgcgcccaagggggggggaggcct

SEQ ID NO: 176826 - DNA, 446 bp, Zea mays
  Clone ID: MRT4577_92857C.1
acaacgaggccggcactttttactttacgatgggcaacagaaaaggcggggccgggaaacgcctatattctaccttctcaagtacccagccacccagggatacctatcgtatcccctaaacgaatgaattcgtccgtacgttttgctgcagaccatcaatttctttctaccttggtttagcggatgaagaagggggtgaacgaaataggtggtacaagaaggagagctagaggaggagcccagacctacagggatgatgacgatcacagaccacaataagaaggggaaacacatccacaggaacaaatgaaaagagaaagattcgaaggatatgcattcctaggagaagacaatcattaataaaagaacaaggaccgctggtcttcacaagaaatattccaagggatgacttatctttgtaaagtaacaatcgagtttcgttaccc

SEQ ID NO: 176827 - DNA, 3925 bp, Zea mays
  Clone ID: MRT4577_92858C.1
gagagaggtggaggaggagacgaggtggattcagcggccacggcgacgccgaggcggttgtcgccgagggcagcagcgagccccacggaaggcgacgcccggtggggtgacaccagctcgtacggcgctaagaagaagcatagagttttatgtcagcttccgaatggcgattgggcattatgcacacgtcaattacttcctctggtgcatgagtcggttgtaaaggtttctgaagggaaggtactgagattgaaaaccgagtgtctacaacctgccaaatcctgaaattcttgatggagtggatgatcttatgcagctaagttatctaagtgaaccatcagtactgtacaatctgcagtacagatactccaaggatatgatttatactaaagcaggtccagttttggtggctgtcaatcctttcaagaaagtttcactgtatggtaacgagtacatcgatgcatatagaaataaatcaatggatagtccacatgtttatgcaatagcagatgcagcactttgtgaaatgaaaagagatgaagtcaaccaatctataattataagtggtgagagtggagcaggaaaaacagaaaccgcaaaaattgctatgcagtacctggcttcccttggaggtggaagtggcattgaatacgaaattcttcagacaaatccaatactcgaggcttttggcaatgcaaagacattgagaaatgataactcaagtcgttttggaaagcttatagaaattcatttcagtaccactggaagaatatgtggtgccatgattcaaacatttttgcttgagaagtccagagttgtgcaatgtgcagttggtgagcgatcataccatatattttatcagctgtgcgctggtgcacctgcctctctaaaagagaagttgaatttgaaaaaggtggatggatacaaatatcttaagcagagctgttgctattcaattgcgggtgtggatgatgcccaaatgtttcgaactgtgacgcaagctatgaacattgttcatatcagcaaagaggaccaagagagtgtttttgcaatggtctctgctgttctttggctgggggatgtctcgttcacagtaattgacaatgaaaatcatgttgaaatcatagtagatgaagcttcgaaaacggtttcagaacttcttggctgcagtattgaagatctcaatttagctttatcaaagcgccacatgaaagttaataatgaaaacattgtccagaaacttacccttgctcaggcaactgacacaagagatgctctggccaaatcagtgtatgccagtttgtttgagtggcttgtagaacaaattaataagtctctctcagttggcaagcgtcgaactgggagatctatcagtattcttgatatctatggctttgaatcatttgataagaacagttttgaacagttctgcattaattatgctaatgaaaggttgcagcaacatttcaatcgtcatttgtttaagcttgagcaagaggaatatgtggaggatggcatcgactgggcaaaggttgacttcgaggataatcaggactgtttgagcctctttgagaaaaaaccactgggactattgtctctgctggatgaggaatctactttcccgaatgccacagatcttacttttgcaaacaagcttaagcaacatcttgactcgaattcttgcttcagaggagaaagaggcaaggcatttgctgtccgtcactatgcaggagaggtggcttatgatacttcgggttttctggagaagaatagagatttattgcacatggactcgattcagctccttgccaaatgcaaaacttctctgccaaaaatgtttgcatcgaagatgctagttcaatcagataattctatgtctgttccatatagatctagtgctgctgattctcaaaaactaagtgttgccatgaagttcaagggtcaactgttccaacttatgcaaagactggaaagtacaacgccacactttattcgttgcattaaaccaaacaatttacaacttcctgcaatttatgaacaaggacttgtgcttcaacaacttaaatgttgtggggttcttgaggttgtccggatttcaagatctgggtatccaacaagaatgactcaccagaagtttgctcggcggtatggttttcttcttcttgaggatgttgcatctcaagatccactcagtgtttcagttgcaattcttcatcagttcaacattttacctgagatgtatcaagttggctacacaaagttgttcttccgaactggtcagattggcaaccttgaagatactcggaatcgtactctgcatggtattttaagggttcaaagctgtttcagggggcatcaagcccgtcatcatgcaagagaacgaacaagaggagttttgactcttcaatcattcattcgtggtgagaatgcacggcaaatttactcctctttgttgaggaaacatagagccgcagttgttttgcagagaaatgtgagatgttggcttgcaagaaggtatttcataaatgtccggaaggcctcagtgataatacagtctggtattcgtggcagtcttgttcgaagatgtaatggcaatattgatctaataaatgtgctaagagagtttgaatcaaaacaggaggcacatggtgaccaaattttgatcaaggcctcagtcctggctgagttacagaggcggatactaaaagccgaggccacagtacgtgaaaaggatgaagagaacgagatgcttcatcagcggcttcagcaatatgaaaaccgctggttagagtacgaacagaaaatgaaagctatggaggaaatgtggcagaagcaaatgcgttcgctgcaatcgagcctttccgtagcaaagaagagccttgttttggatgaaacgcctaggatgtcggactcatcagtggatcagagctgggaaagcaatgggaaccaccatgtcagcagcggttctcagctggtgccacacactggtggacgtgaaatgaacgctggcctcagcgtcatcagccgcctggcagaagaattcgagcagcggagccaggttttcgctgatgacgccaagttcctggtcgaggtcaagtctgggcaggcggacgccagcctaaacccagacatggagctccggaggttgaagcagaacttcgactcgtggaagaaagatttcagtggacggatgagggagacgaaggtgatcctgaacaagctcggcaatggcaacgagtcatcgcccaactctgtgaagcggaagtggtggggcaggctgaacacctccaagttttcgtgagtttattatgtattgattggtaatttgtagatgtaaccggtattttacacgccggtgtggttctagcttcctagagtttctactctacgggtgctgtgaaagtccagtgtgttggactggatttgtattccacggagggcgagttgtatagttctcccacaatggcttccttttgaggggtcaaggaccactgaattgtgatgtaattacttgctgaagtagctgtcgaaggggggagattgtgagtgcttaatattccactatccttgtgctttactttctgcctgttgtagattcatagatttaaatgttggtatggtgtgacataatctatcatccgatgactcgtagcatgtttggtttgagaaatgagatagtttattatttctcaaaaaaaaaaaaaaaaaaaaaaaaaaaaaaaaaaaaaaaaaaacaaaaaaaaaaaaaagaatcaaaaaaaacttattgaaaattaataatataaataaaacacataatcgcttccttcttcataaaattactttcatgtctaggaaaaattaaaactggggggcctgcttttaaaaagaccaatttattacctctgatttcaaactattatcttttttttttttggaccaaaaa

SEQ ID NO: 176828 - DNA, 368 bp, Zea mays
  Clone ID: MRT4577_92859C.1
ggcaaaagggcccccaagggcctccccttttaaaaaaaaaccaaaaatttcaaatttggggggggtttttaccaacaaaaagggggttatcggtttttgggcctttaaaaaacaccgggggggttattttttaaacctttcaactacaaaaaaccaaacttggactttcaccaaaccaatgagaaggtttttgttttttaaaacccccagcaacccgggggaccgtttacccaaaaaaaaaaaaaaaacacaaaggggccagaaggcaaacttttgggggggggggggacccccccccctcccccaaattttggaaaccgggccggaagaacccaacaaaattttcgttcttttgggccccctcgggg

SEQ ID NO: 176829 - DNA, 401 bp, Zea mays
  Clone ID: MRT4577_9285C.1
ggccgggccgggattcccctcgaacacatcaatgctatccaccttccgcgcttcgacgaacgaaccctacgcatcctcagcgacatgatgaacatctcgcagacacgaacgtcaaacacaggaacggtggacgcgacaagcacggacgcgaccaagaatgggacatacgatgttccaactgagccaagtgttgcccaaaagataaagctatcaatcgtctctggcagagggaacgaggagagcagcatgctgtgagacaacaacatgaggaatgagtgcatgatcgatatgttgttcccacatcgcacgcaaggcatcatccctgtgactcatgcgcactccttgtatactttgcccccccccccccacatgagaacaagaggcaccgtgatgcaccgcta

SEQ ID NO: 176830 - DNA, 498 bp, Zea mays
  Clone ID: MRT4577_92860C.1
ccggccgggatgtccccatcacgccaagggctactaggtgataatctctatcggaggtgcccgcgtctgaccatgtccacccatcccttcatctaaaactgcgggaactcacatccagttggtgtattaattgcggtaccttccttcaatgcccacctcctgtgtgcacaatatggcttgccttcccaatcacaagaccgcccagaaaggcaagttctcctatcttaccgtcaaccactactcatatgacagatacactctgaacgaggaattattctgaatcgctccactacatgaccgactttctaagctaaacaagcagagctctaccaaacagtccacgacgactctcatataccctatgcataaaatgcttaagtgctggacaaggagagagatgaataccgcgcggcgctaaaggagacgtccacgactatgcgaaggagcatggtcctggaacacagacggaggcatcaaggaaggcagatgcctgcactg

SEQ ID NO: 176831 - DNA, 501 bp, Zea mays
  Clone ID: MRT4577_92861C.1
ggcatatgcgatgctttcagagctgtccgaccgaccttcgcgcgatacgcaggatatggaggagacccgtagaaggacagactagtgcataagagagacagtatatgggatgtatttacagatgacgagaagcatgacttatacacaatcacactgcataaattgcaactgatcactaccatcgatcatcaggaagatattgagctaaaggaaagtctaggtgttagtgcatacagattatctatatcttggccgcttatatttcctgatggcttggggggaaaagttaatgatcgaggaggcggcatttataatgatctcatcaactttatgaatgctaaaggtacttgagccttataccagctctatatcattgtaatctctcgcatacatagcttcacgaagagtctgtatcggtggatatctgataaaaatgggtaggactttgcagtgcatgcagaagcttgattaggatattatgcagacagagtgaatgattgc

SEQ ID NO: 176832 - DNA, 736 bp, Zea mays
  Clone ID: MRT4577_92862C.1
cggccgggatattctcctacactgactccgcctctccagtctcttccacccgcgatctctctctaactcctctactcggcagtccttatgggaccagattaaaatcagaatcaaaggatgtatgaaggatcggcaggctcgtcggacacgtccccctctcatcgaggatgcctagctcgttcccaataacgaccccttcattaccacggactagatgatctacatgttcgactacgacaccgcgcacagacactgcaaggacaccgacattacgctcgaggactccaagacccttctcttcggagacaagccggccaccgctctttgtaatgaagaaccctgaggaaatcccgagatgagaggttgtggctaagcatgtcgaggagtccaccggcgtcttcactgacaaagacaatgctgctgcacatctcaaggatggtgacaagaatgttgttatctctgccctcaagcatagatgcacccatgtttgatagaggtgcttgtgaggactagtacacctcggatggtagcattgtatccaatgctatgtgcaccacaaactggcttgctccccttgatatagtcattcatgacaacttcggcattggtgagggattgatgacagctgttcatgccatcactgccacccagaaaactggtgacggatcctcagccaaggactggagaggtggcatgactgccaactgtaacatcattcctagcagcaccggtgctg

SEQ ID NO: 176833 - DNA, 182 bp, Zea mays
  Clone ID: MRT4577_92863C.1
ataaagcacggaatcttactttgtcgaacctatccttttccaatcgcatcgctggcccatgggattcgataccctgcaccttattgtcatctcatagacaggatcaatgaaaactcttgcttaccttttacctgtcattattcatctcaatgcgccgtctattcttttccccgtctatcatc

SEQ ID NO: 176834 - DNA, 389 bp, Zea mays
  Clone ID: MRT4577_92864C.1
ccacgcatgcgtccctcactctcgtcgccggttggaggaataagacgaccaagcgcactgcccgggaatctggcgatgtctacctcgagctcggtagtaagctctaccgtttctcgcaacatgatgaccaagagcaatatacaacgctgtcattctcaataggcgtactatggagtaaaaccaatccaccaccaatctacatgctccgatcttgtcaagtatatggaaagaaaagagaagaacatttctagcattgtctgacaaacacacatgacaacaggatccatgacagttcagcaatgaacgttactgtcctgaggttcactgagacagaaagggccatgattgacaattctgcgagctagtgcctcacatttgaccagatttgt

SEQ ID NO: 176835 - DNA, 154 bp, Zea mays
  Clone ID: MRT4577_92865C.1
tgatattgcgatgtgccatgctcgctttcgccgagtggtagatgacgatgctgcctgagttgcggtggtgtggatgcgcagactcccggcatatcagaatccgcagtccccattggccggcctcatatccccttatccgcttggtgacccgccg

SEQ ID NO: 176836 - DNA, 435 bp, Zea mays
  unsure (1)..(435): unsure at all n locations
  Clone ID: MRT4577_92866C.1
nncgcaaaacccggggccgcgagccccggcgggaccggccgccgtgccaaacttggtgggtgtagccaatatttaaatgagaacctttaaggccaaaaggaaaagggttccttttaaccggacttgcacattggttaacccatccttaaggaccgggggaaaccccgcagataacgcgatcaccccccttaccccaaagggaattgggttaaaatatttcccagcccggacctggcggcagacacgcgacatttggaaatcccgagacacccgcgggggcctcgggaagagatatattttctgtttaacgggccgccaaccctgtgaataggttcaacccgaggtagggtccaccggccggaagagcaccgcacatctcgcggtgtccggtgcgcccccggcggcccttgaaaatacggaggaccgaattccgtc

SEQ ID NO: 176837 - DNA, 264 bp, Zea mays
  Clone ID: MRT4577_92867C.1
gccagtattcgctcgagaggagaagcaaccgaatcgggttccggttccagtggtattgcgacgaccgagatccgagtcacgcaattgttttcgacgcgacggcgattcaaacgctcccgcaggaagtgtgcacggtgcctgtcgacgggggtagcgtgaagcaggaatgtactctaggggcggacgttggggacgtgtcgttggccgtcgagaacatttcgtggcaggcgacgtcagggccgatggaccgaggtccgacactgc

SEQ ID NO: 176838 - DNA, 870 bp, Zea mays
  Clone ID: MRT4577_92868C.1
cattgggtacctcgaggccggccgccgggccgctcaagttcccgaacaggaaggaggacgcggtgccgctggacgtggcgggcgtgtggcgcgccatggaggagtgccagcggctgggcctcgccagggcgatcggcgtcagcaacttcaccaccaggcacctggacaaggtcctggccgtggccgcggtcccgcccgcggtgaaccaggtggagctgaacccggcgtggcagcagcggacgctgcgggcgtactgcgccgaccggggcgtccacgtcgccgcctactcgccgctgggagggcagaactgggacgggcggggcaacgccgtgctcgactcggaggtgctcgcggagatagccagggcgagggggaagaccgtggcacaggtggcgctgcgatggatacatgagcagggagtgacgtgcatcgtcaagagctacaacagggagaggctgaagcagaacctcgagatattcgactgggagctgaccgatgacgaccggctcaagatcagccacatcccgcagaggaaggttgtcgaggcgagcggcttgttctcgcaggagggtgagttcacctctgttgatcccgcggaactgaatattgtggaggaataggaactggactgcaaaatggcccccgcctgtcggtgttgctccgtataggaacatacgaataataaggcaacgttcgccctcggtgtttcgggggtgtattccacgatgttttccatccccgttcagttcagtaaagattgtgatcgtataatattgaggacttctttggaacgatcgagctatagtacatggttccgtaaactttgtatgaattttctgatctaaataaagtggggttttacgaacaact

SEQ ID NO: 176839 - DNA, 375 bp, Zea mays
  Clone ID: MRT4577_92869C.1
gggggaaaaacctttggcccaagtttttttaaaattggacaacccggggggttaaagggacaaattggggtggttgttttttttaaggggccgaagcttcgggtggtttttttaaaaacagtcttgatggccccccttcctgataacaatggtttttaggaaaacccgtttttttctgggttttgcaaaaccccccccttgttttaagcacccctttttgtggtttaattttggggggattttaggggggggccccccccgggcgaaacaaaaaaaaagggccgcccatgggaggttttccccccgcccttttttataaaaaaaaaaaggggggggtggggctaaaaccgcgcgggggttatggggggggggggg

SEQ ID NO: 176840 - DNA, 821 bp, Zea mays
  Clone ID: MRT4577_9286C.1
gccggccggtgcacgagcctgcctttgccggtcccaagcccggatgagaaaatgtggagggaactgcagggtttcttcttagtcccatgaatggtatcagggtactgggaagaaatgttgtttggtcaaaacagctggactctgagagctcagacgggcgtaacctaaccatcaagcgcaagcggcagtacggtcacgtctccagacgggcgttacctaaccatcaactgcaagctggtagcctggtagtaatactggttcacggctgcctgcatgcaagttcttttttcccctgttgaacaagtttatttatctcattacccgctgaagaactcaacgcacagcaagctaagccgtttggttaatcatcgaaacaatggatacctctaatcttcttcaaagtaagccatgtacaaaagggacttaggtccttccctgggagatgtctgtaccgatggactagcttgactttagtgatgtagctgttacctggtcttaatttgttcttgtccttccgttcttgtttccatgttgatttctgttccccactcgctcctcgcagcccatttgaagttcgtcagacttacgcacagcagagagcagacacaaacttggacgagaatcggccactgcttgccatgggaccctgagcgcagcatgcccaattcggggattctaaccgagatcgaaaaatatatttgcacctggatgctgaaagttttatgctttgttagaattgtacccctgtatttgtaatgggccaggcccaactcagttattaatatacaagcccaccctagtgtagggttagagtttcagtt

SEQ ID NO: 176841 - DNA, 280 bp, Zea mays
  Clone ID: MRT4577_92870C.1
gcctgcaggagccggtactgaagttatattgccgggtcgacgagctcttttgtcggcgggcgccctttatggtcgtttgtaggagctagagttttacaacgcagaataggtgtggatcaccttgatgcccatgcactactgctgacaaaaatgtcaatgttaatgccattctcaccaggccgagttagtctagtgcattagaaaattaatgcacgtgccaggagtgcatttagaactgactaaggagaaagatcggccacgggggatagatatgtaatgc

SEQ ID NO: 176842 - DNA, 252 bp, Zea mays
  Clone ID: MRT4577_92871C.1
atgcgaaaaaattaaaattttcaagggcccccattataaaatttggtccagacccctaaaaaattaggaccggttctcctgcagggcaaaagacaaaagaagacaatgtggggggaaaaaaaaaaacaccacttatttcaggccattcaatttggtttggggtggcagatgccaaaaacaaaaccccactttttttcaaaacgagctgggatgattaaggggggtttatgtattgaaaccccccagcaaatt

SEQ ID NO: 176843 - DNA, 492 bp, Zea mays
  Clone ID: MRT4577_92872C.1
acaagcttttttttttttttttttttttttttttgtttttttttttttttttttttttttttaaatttttttttttttttttctctttaaaaaggaaccccggcccccaccccgccaagggcaaaagcccccacaccggggccccgcccggggggaacccggccagggcccaaaccggggggaaagaggggcccacccgcaacccccgagaaaaagggcaacccgtgacaaaaacacaaaaaacacgggccccaaaggaaaaaggtaaaacccggggagcccaaagggcgaaccaacccccattaaatggggggaccccccgggcccccttccaaaaggaaaaccccaccgccccgggggaggaaggaaacggccaaagcccggggagaagccgtttgggaaataggcgcttttccccgtcccccggcagtggaaaggggggctcggtcattcgggggcgggaagacggttcaccacaaaaaaaggggggaa

SEQ ID NO: 176844 - DNA, 342 bp, Zea mays
  Clone ID: MRT4577_92873C.1
cggccgggccgggccgtttcgtcatgactaaatgttccttgtgtacaattaaactgaaaaattgaacgttgtgtactttttatgagatttactgtccatcatataaacttgcacttgaagctatacatgattactttttgttgtgctcacttccctggatattattcattatttacctttttgtttgttccaggtggaggtttaataatggtcggtgatggtataaatgatgcaccagcccttgcagccgcaacagttggaatggttctagcccaacgtgccagtgcaactgcagtggctgtcgcagatgttctgctgttgcaggataatatttgtggggtg

SEQ ID NO: 176845 - DNA, 719 bp, Zea mays
  Clone ID: MRT4577_92874C.1
taggggccttttttttttttttttttcaggataacagaaattcatcataatgaaataagttcacctaatttactattacaagctagatgtttttgagatcagcacacaatcacaaagttattttacatcccaagagttgaagttctctctcacaactcacaacaagagtgggtagatagataaaagagcaaagatatcacaaacttctccccatttttggcatcaagcaaccaaaatgaagaaaaaaataagatcaccacccaccatagggaccatgaccaccactaggatcaccaaagaagtaggtgcccaagtctggagcggaagcaggaggaggaggaactgaagcagaagcagcaggaggagtaggaggaggaactgaagcagaagcagcaggaggagtaactggttcatcctcagagatttcttggtcggacgcactgaagggaactccataagtttgttgatgccactgatcaagagtgtcggccataggaggtggaggattatacggacgaactggaagcaacggttgaccagcgacatgacgtctaaaattctgatccaactccattgttcttcgtacaagctcagctgtgtgaattgagttctctcgatgtatggcaaacatggcattgaaccccttcttgagtaaagctctaagacctccttgcttacctcggtcaccacggctcgtggggcgagaggcagcggcagcc

SEQ ID NO: 176846 - DNA, 353 bp, Zea mays
  Clone ID: MRT4577_92875C.1
cttatgtgtccgctgacacgtgggcggcagtaggagcgaaccctgcatcactagatgagtgaaggaccttgttcactcgccgtccggagttatcaacagagccattatggatggagcacatatatcgacgcctacttctgggcggacgccgagcggtgccaggtgacaaatgtgattgcaagccggatctcgggttgctatcaaagccacacgatgacttatggatccatacgcgcaagaccaagttgctgttcggttcaagatttgctgtagggttactgaggatacagtcgacaaggactgacgaataggagaaggagcaggcggcactgactgatgggactgctatcact

SEQ ID NO: 176847 - DNA, 153 bp, Zea mays
  Clone ID: MRT4577_92876C.1
ggccgggaacgactcccagagcgctccccggcagccgcgtccttccgtccgcttccctttccttggataaccacggcagacgttctgccttaccttaggcatggagtttgttccagagtcactttatcgctggctgaagcgctacgaagacat

SEQ ID NO: 176848 - DNA, 634 bp, Zea mays
  Clone ID: MRT4577_92877C.1
gagagattccgtgaagatggcaggaaaactactctacggctggttgatatggagtcagcatatttgactgtggagttcttccgcaagctcccacaggaagttgacaagactggaactgcaaatcccagaactgcaaatcctcctgctcctggaaatcccagaactgcaaatcctcctcctccttcggatgatcgttacactgatgcacatttcaggaggattgcttctaatgtgtcctcatacattggcatggtatctgaaaccctgaagaatactatccccaagtctgttgtccactgtcaggtccgcgaagctaagcggtccctgcttaatgatttctatactcaagtgggcgggaaagatgctaagcaacttgcagtactccttgatgaggatcctgccctcatggaacgcaggttgcaatgctttaagaggcttgagctgtacaagtctgctcgggacgagattgattccgtgtcatggacacgatgaaggtaacacttgtcttccattagacacattgtaatttgactaatgcagaattagcagctagctagtatgcacaatggttgtcaaatattactagaccgatcacctgtctcgtatcatagcctgttaatatcagttgtgtgct

SEQ ID NO: 176849 - DNA, 147 bp, Zea mays
  Clone ID: MRT4577_92878C.1
gaccatctgcctggcgacggacgcatatgacacactcatgctcaacctcacagtccttcatggctttgaccccggcccaacggtcatcctcattaccctcaagcacgtaactatttacgacttcaacatctgaccatcaaccaagcg

SEQ ID NO: 176850 - DNA, 2419 bp, Zea mays
  Clone ID: MRT4577_92879C.1
ccccgtgtaaacagggatgcggacggctctatcggtagatgttctcggctcgcacacctcagatccagcccggcagcggagcgctccccctgcacctcgattccttcgcttccttctagaaccttccgctccctccgttgcaacactagcacatagcttcctcctcttcccaccccgaagatgacgaccatggagaacgtgatcgtgctcgtgaaccgcatccagcgtgcctgcaccgtcctcggcgaccacggcggcggggacgccgccgcctccctccctaccctctgggaagcgctcccgacggtcgccgtcgtcggcggtcagagttcggggaaatcatcggtgctcgagagcatcgtggggcgagacttcctgcctcgaggatcagggatcgtgacgcgtaggccactcgtcctgcagctgcacaagacagaggccggggtgcaggagtatgccgagttccttcacatgcctaagcgccgcttcactgatttctctattgtgcggaaggaaatccaggatgaaactgacaggttgactggaaagacaaagcagatatctccagttccaattcatctcagcatatactctccacatgtggtcaacttaacattgattgatctgccgggcctaaccaaagttgcagttgaggggcagcctgaaagcattgttcaagatatcgaaagcatggtgcgttcatatgttgataagccgaattgtattatattggctatatctcctgccaatcaagatatagcgacatcagatgcaatcaagcttgcccgggaagtggatccaactggtgagaggacatttggcgtgttgacaaagcttgatttaatggacaagggaacaaatgcacttgacgttcttgaaggaagagcttacagactgcagcatccctgggcattcttggcctgctggacctgcaagacacgtctgccatctatcttagttcaatttgttagcgttattgcttgacattttccacatccgggatgaatgacgcgtgctgcgtgagctgcatggttcgaaacaggccagtcaactcccgcatgaagcttgttcagtctgccgatacttatttgccttcctcgcgttcttctctggtcagttgcgcgctctgttgatgtgacccttttggtccgtccgggaaatcgtcgcctgctggccatggattcacgctttctagaggacgtgtgttgcccgccgtgcgcccttccatgagttccccgcatagaacaggtcgtcttcctggaacagaaaggcgaagcgcgtggcgagctgtcctgattttgacgagtccatgcatcttcagcagattggactggtcgccctcagtgcaagaaatgaagctggttgtttcacaggcagatggttatcagcctcatttaattgctcctgagcaagggtaccgtcggctgattgaatcttctctcaattattttagaggaccagcggaagcctctgtagatgctgtgcattctgttttgaaagagctggtgaggatatccattggggagacacaggagttaaaacgatttccatctctacaaacggagctagctgctgcatgctataaggcccttgagagattccgcgaagatggcaggaaaactactctacggctggttgatatggagtctgcatatttgactgtggagttcttccgcaagctcccacaggaagttgataagactggaactggaaatcccagaaatgccaatcctcctgctccttcggacgatcgttacactgatgcacatttcaggaggattgcttctaacgtgtcctcatacattggcatggtatctgaaacgctgaagaatactatccccaagtctgttgtccactgtcaggtccgcgaagctaagcggtccctgcttaacgatttctatacccaagtgggcggggaaagatgctaagcaacttgcagtacttcttgacgaggatcctgccctcatggaacgcaggctgcaatgctttaagaggcttgagctgtacaagtctgctcgggacgagattgatgccgtgtcgtggacaagatgaaggtaacgcgtgccatgcttgttaatatattcgctttcttcattagacacattgtagttctactagtgcagaattagcagctagccattgtgcacactgattgtcaagtatagcagagcgatcacctgtcttgtatcttagcctgttaatatcagtagttgtgtgcttgactgcttgtgttgtatctttgtctcaactcccaactgttatcaggtgcaaatttctgtccttagtaacccatgtgcaaacttgtatgcacgagcgatacctggattctgtaggatgcacatgccgatcttcttcccatgctgtagttaggtgtagactgcagaactgggacttctaatgtgaaaatattgttttatgc

SEQ ID NO: 176851 - DNA, 158 bp, Zea mays
  Clone ID: MRT4577_9287C.1
aacgctcccacgcgtccctcctcgcgccccaaacccagagaacagtgctcgcgccagaaacgtcgcgctcgcgccgcacctacgtcaggatgcgcgcctctgctgctgcaccagcggagcgaagatagaccgtctgggtgtggaccgagacccggaag

SEQ ID NO: 176852 - DNA, 283 bp, Zea mays
  Clone ID: MRT4577_92880C.1
ccagctacacccacgcatcctacaaaaaaaaaaatacaaacattataccttaaacaataaacaacaacacaacaaagacaaattaaaaacaaatcaacacctacatcactaacaaacccaccaaaatctaaactcaaaaacctctaatacattaccctaaaaacaaagacttcccagatcaataaccttaccttcacttataaaaccatcatcatccccatcaacatcaactacaccattaaccccctattacactacctctgcatactctgcaaccacaaca

SEQ ID NO: 176853 - DNA, 881 bp, Zea mays
  Clone ID: MRT4577_92881C.1
ccggccgggccggatatgcttgcgaggctgatccaaacgtatctcagtcgctcatcgctttctacgtcaccagagatttgagaatgaatgagtactcgaaagcaataataccagccatcatattctgcgcaactttcttctgttccatcgtcctgcaggagatcaagtggaccagccggcgcctcaagtccctcctcaccgtcggcgccacgctatgggtcatctccggcgtggccgtcttcgtcctcccgagccagatgaacagcctgatgtaccctctcgccatggtcatcggcgccgccaacgcgctcgtcatggtcacgacgattgggctggagggcgcgttggtaggggaggaccttaacggctgcgccttcgtctacggctccctcagcttcctggacaagatctcctgcggaatcgccctgttcgcgctagaatcgtacgaagacacgatggtgagctacggcgagacgaggggcctcaacacggtgagcaggtacgggacgggcctgatcccctcctgcttcgccgtactctccctggtggtcacctccacgctgaggctgcaggacgacaccccgagagccgcctgcactggatgccccgctgcttgtctgattgtgaccgaagaaaaaaaaaaccggtggtgtgatattgtcgctcgctcgggttggaagagagaggaaatgtgcagcctcttcaattaggtttgaggggggatacgtcgcctgctttcaattagttttgaaacgggcccctttgtaataaaattttccattccattccgtggcgttggcatcatggcatataaacagattcaaagttttggggttaaaaaaaaaaaaaaaaaaaaaaaaaaaaaaaaaaaaaaaaaaaaa

SEQ ID NO: 176854 - DNA, 755 bp, Zea mays
  Clone ID: MRT4577_92882C.1
tgtgcaggctacattctttactacctatgttcttacttcaggatgggctagtctatcatcagaacttatgcaactctttggtcttacatggaactttttaagaagatatcttctgagaattaaggaggatagtgattttctttactcatttccctatcacactgaaatgccaaaagttctgctgtttggactgctgggtttcacatgctctgtactagcacctctaatcttgccctttttactgctgtactttttttcttggctacgtcgtctaccgcaaccaggtgagagtgtagggttaaatctctgttttaaagtcgatatatgcccaatttaagtgtcggtattactataataaagaatattgagtgaagcctagaaatttggcaatgacagattcttcacgagttgcatgatctctattatgcttcttatgatattctgagtgtaacttgtagctaaacataagaaaatagtttcctattagataattttttttcgttatttattttaatatggagtgaagaaactaaggttgtccgtagtagatcgtgtaaaatagtggatttacactgaagattacactgtttacagtgtgaagtttgaaataggggatgagataggatagctgtcggagatagcctaattaaaacctttggttgtgtcattagccattacggtttagtaaatttatgttttaacagaataaagtttgctaagaactgtcttgtgtggtgctttgagctaatgagttt

SEQ ID NO: 176855 - DNA, 597 bp, Zea mays
  Clone ID: MRT4577_92883C.1
ccgggttcgtacccacgcgttctttaaaaaaaaaaaaaaaaaaaaaaaaaaaaaaaaaaaaaaaaaaaaaaaaaaaaaaaaaaaaaaaaaaaaaaaaaaaaaaaaaaaaaaaaaaaaaaaaaaaaaaaaaaaaaaaaaaaaaaaaaaaaaaaaaaaaaaaggggggggccgtttttaggggttccatttttacttccccgtgtttgcaagttttgggtttttttttggggccccctaatttaatttcctgggccgcgtttttaaaccgtcgggttgggaaaacccttgggttcccccattttattccctttggaacaattccctttttcgccggttgggtttttacgaaaagggccctcccggttcccttttccaaatttttgccctccttgttgggcaatgggaccccccctttttgcggctctttacggccggggggtggggggtttccccccgggttttcctttacttttgccgggcgcttttgggccccgtcttttggtttttttcctttttttttttcgcccgttttgggggtttttttccccgtaaattttttttatttggggggtttttcttttgggggttcccgctttt

SEQ ID NO: 176856 - DNA, 386 bp, Zea mays
  Clone ID: MRT4577_92884C.1
gggggggggcggggttttttttgcccggaattgggagcctggtttatggccctatgattaagggggggcccattaaaatcagcaattcagcccagcaatggcccccccccaaggggagcttgctagaaataaactggcggcgaccggggggtaccctaccatcggttacattaggccatacagggtaaaccactccaccaccctggtggtaggggggggctagtcaggaacaaaaagcagggcgtcgccccccaagggaatggcgccgcccccgcctttttcgggctggtgggaggggccaatcaaaaaccaaaaactcgggctccccctgcaaacgggacgggccaaaaagttttccccgtcaccggaaaccccgtgggtgcccc

SEQ ID NO: 176857 - DNA, 350 bp, Zea mays
  Clone ID: MRT4577_92885C.1
ctgacgcttgggttgctattcactctctcgatcctagctgtcctcccaagaatcgcagcagccattgtcatcaccacgcatgccttcgtcaacactcgccacctgcttgccgacgcctgagcgcctgctgctaaaccgctgcatctgagctcgcatctcacgctgccgtcgtctttcttccgcggaccggccccgctccgctgcgtccacatagtaggcggaggaggcgcccaatgtgttcgtagccccgcatctggaccccatttctccatacctgatcttatgtggaaacaatgtcgggctgctccttaattcacatgttgagtatttctacttcatcacgttgactt

SEQ ID NO: 176858 - DNA, 276 bp, Zea mays
  Clone ID: MRT4577_92886C.1
cttacactctaacatgttgcaaacaatgggggcagattctgagactaacccatatcggacattacgtgacaacagccatgggacgctaccaacccttaatcaagggaggcaacgccaaaacacccgggtgtgagtcaccacctccacactggcaaatgggctcgctctctgaacctcgcgtacatggttccaggatgcacagacgcagctagttagccaggctgggctaaagatggacgtgcatagatcgaggctcatccctgctacggccaaaca

SEQ ID NO: 176859 - DNA, 532 bp, Zea mays
  unsure (1)..(532): unsure at all n locations
  Clone ID: MRT4577_92887C.1
gcatgatctgtttttatgaagggatagatgcatgagctgtggacctggcaacctgaagcatccttcctcatcgatctgtttcgttggtatgatctcaattgacaaagtctgctgaagtggtactacgcgccctgcaatcctcattgagccgttctgacgtaggctctagctccatatatttagggcgtcgtcctcaacagcctgcacaaatctctagctgacaatgtcctggtggtggggaaacgaaggaagaacaaaattaatgagctgtggaaatagatcaaggaagttcactatggtgcaaacagagcgatgaagtgcaccctaacgacgtcttcttttttcttatctctcctccacgcagacttcctagcgtagtacctgcacaaatctctagctgactctgactattgatttcaggaggccaaatcctgaaatccaataggcagccatcctggcccggacgctcaaaaaantcgacgtctgagagcgacagagcaatgtaggagtgcaatctgaacagagtttcact

SEQ ID NO: 176860 - DNA, 727 bp, Zea mays
  Clone ID: MRT4577_92888C.1
ggccggccaggggactcaagttcgtccccggctggtggggtcccacctatcatcatctagcgccgtcggggtaaaaaccaggcagagctcacggtgaattctccggcgatggcttgcgctcctcaacggtctccacccatctataaaaccatggcgtgggttttccctcccctcatccttctcctctgtgtaccgcgcgacctatgagagtgtgggcatggtagaccgaaccggggcggaatccgttcaccgccgtttggccttctcgccagcgtcttgctcctcgtgacagcaccggaggggccgcctaggaggagggagtctagtgctgacctcgggcagaggtgatggccactgtcgcggcggcgattcctcaccgtcgtggtcacggtgtcgtagttccgctccgcgccgtggactgggtcagctacgtctccatccctgcgtgaggtcacgagtcaccctgaagagcaagttggtacctgcaaactcaagtgtcaggtgaagaacaggtaccacaggatgaggcgcatggaggatgctgtgacgagttcgtgagaggtctaggccgtcgtctcccagtcaactttggggttgttggaccgttgtttccttataatgtaattatttatttattttgtatagaacttgtattatatagtaaagatgtgacattcgatcctgtgtcatgattcatcatatgtgtgaaaaaaaaaaaaaaaaaaaa

SEQ ID NO: 176861 - DNA, 823 bp, Zea mays
  Clone ID: MRT4577_92889C.1
atcgaaaacccaccgcaccctttcatcagcctgcctgtccactgttggcttggtgacttcctccgctccgctccgctcccctccgctcccgaacggtcgatctttgcatggcagcagcagctggctccaaggggcgggcgatcgctggaagcttcgtcagccgcgtcctcgccggcaaggccgcctcgccgaggagggccgtgcacgcctcggcgtacgacaagaacctggaggaacaggtgcgcccggcgttcgtgccggacgatgtgatcggcagcgccgggagccccgacaagtactggagcccccaccccaagaccggcgtgttcggcccggcggcggtggaccccaagctggccgctggtggcgcgccggacgccggcgcggatgctgcaggaggcacggtgctggaccagaaggtgtggttccgcccgctcgaggacgtcgagaagccgccccccgccgcgtgagccgcgcggagctgctagcccagcccacactgctgctcgctcataaaaggggcggcgggagagcctggcaggcactctgctcgtgctcggctgggctccctgcttatagcactacaatattatactactagtagtggtgcttgatagcagtgtgtggctgtgctaataccagtatacatatataatactggttctactataatacagtcgtatcaggcatggcgtgcatcaggactggttgtgatagtagcaacgtgatgctcgtgcctgtaataagaacaagcaggcgatgtgtgcctgtgatgtaccggtggtcgtcagtggttataagtacttggggtcaatggtttctg

SEQ ID NO: 176862 - DNA, 692 bp, Zea mays
  unsure (1)..(692): unsure at all n locations
  Clone ID: MRT4577_9288C.1
cctcgaggccggccgggccgggaactagcgcatagtatctcctgagctccattcatcatcccaagtgtttactggtcttagatcacatggcattccctcggctgtccctcgccgtgctcagctgcctggcgctgctcgccgcgacggccgcgcaccgggcgcccatcacggggccgtcgccctcggctcctcgcggcctgacgacactggcggagcggctggagggcgcggagacgcagcagtgctgggaggcgctggtggagatcaagtcgtgcacgggcgagatcatcatcctcttcatcaggggcgaggcgttcctggggcccggctgctgccgcgccatccgcgtcatcgagcaaagctgctgggccgccgactcgatgatgtccatcatcggtttcaccccgcaggaaggggacatgctcaaggggtactgcgacgcgggcgacgacaacgccaccggcgggcagagcggctcgccgccgcctcgcggtgctgatgacgcggtcggtgctgtccgcggaagcttcgccgccgtggncgggaaggaagggctccatgcaccgtaagnatgggggatgtngttcgttcgatcgtttccacgtccaatctcgctgaataaattgtctcgagaaagtttggctttgccgagataaacaatatatagtgacaattcttgctcctgcctaaaa

SEQ ID NO: 176863 - DNA, 843 bp, Zea mays
  Clone ID: MRT4577_92890C.1
ggggaaaacccaccgcaccctttcatcagcctgcctgtccactgttggcttggtgacttcctccgctccgctcccctccgctcccgaacggtcgatctttgcatggcagcagcagctggctccaaggggcgggcgatcgctggaagcttcgtcagccgcgtcctcgccggcaaggccgcctcgccgaggagggccgtgcacgcctcggcgtacgacaagaacctggaggaccaggtgcgcccggcgttcgtgccggacgatgtgatcggcagcgccgggagccccgacaagtactggagcccccaccccaagaccggcgtgttcggcccggcggcggtggaccccaagctggccgctggtggcgcgccggacgccggcgcggatgctgcaggaggcacggtgctggaccagaaggtgtggttccgcccgctcgaggacgtcgagaagccgccccccgccgcgtgagccgcgcggcgctgctaggccagcccacactgctgctcgctcataaaaagggcggcgggagagcctggcagtggcaggcactctgctcgtgctcggccgggctgggctccctgcttatatcactgcaatattatactactagtagtggtgcttgatagcagtgtgtggctgtgctaataccagtataatactggttctactataatacagtcgtatcaggcatggcgtgcatcaggactggttgtgatagtagcaacgtgatgctcgtgcctgtaataagaacaagcaggcgatgtgtgcctgtgatgtaccggtgtcgtcagtgttataagtacttgggtcaatggtttctgcaaaaaaaaaaaaaaaaaagcggcc

SEQ ID NO: 176864 - DNA, 244 bp, Zea mays
  Clone ID: MRT4577_92891C.1
gcgttcgttttttttaatatatgtaatgctaccccaactacagctacaaggtttccggtattcaaatgatccgagtattatcgaaattttatttctgacactaaggactgaacaagaagctaaacaaaaacggctacaacatttacaccacaacatttctagcatgtcgtggtaggggctatttatgcagactatccgatttaagtagattcaagtggcattattctctagtaaaaaaaaaaaa

SEQ ID NO: 176865 - DNA, 900 bp, Zea mays
  Clone ID: MRT4577_92892C.1
cctcgagccggccgggaaaaaaaatcgaaaacccaccgcaccctttcatcagcctgcctgtccactgttggcttggtgacttcctccgctccgctccgctcccctccgctcccgaacggtcgatctttgcatggcagcagcagctggctccaaggggcgggcgatcgctggaagcttcgtcagccgcgtcctcgccggcaaggccgcctcgccgaggagggccgtgcacgcctcggcgtacgacaagaacctggaggaccaggtgcgcccggcgttcgtgccggacgatgtgatcggcagcgccgggagcccccgacaagtactggagcccccaccccaagaccggcgtgttcggcccggcggcggtggaccccaagctggcagctggtggcgcgccggacgccggcgcggatgctgcaggaggcacggtgctggaccagaaggtgtggttccgcccgctcgaggacgtcgagaagccgccccccgccgcgtgagccgcgcggcgctgctagcccagcccacactgctgctcgctcataaaaagggcggcgggagagcctggcaggcactctgctcgtgctcggctgggctggactccctgcttatatcactacaatattatactactagtagtggtgcttgatagcagtgtgtggctgtgctaataccagtataatactggttctactataatcagtcgtatcaggcatggcgtgcatcaggactggttgtgatagtagcaacgtgatgctcgtgcctgtaataagaacaagcaggcgatgtgtgcctgtgatgtaccggtgtcttcagtgttataagtacttgggcccaaaaaaaaaaaaaaaaaaaaaaaaaaaaaaaaaaaaaaaaaaaaaaaaaaaaaaaccccccccacacccc

SEQ ID NO: 176866 - DNA, 310 bp, Zea mays
  Clone ID: MRT4577_92893C.1
atagatcgaggggagcaagagccagaccctgacggatgagggggtggagccccacgaaaccggcgcgaagacggccgaagagcgcgaggagacgaagaaactgcaggagaagcacgcagcgctgaagccaaacggagggaacgggacgaccaagggctgcacagggaccaagaacgacaaagaagtgcgaaacgggcacacaaaaccagaccctatggagaatcaaaaagagacccagaacaagaagaagggaagcaaagacccgaaaccaccgaagaagcgcggcaacacccacgatgacacacagaaa

SEQ ID NO: 176867 - DNA, 1327 bp, Zea mays
  Clone ID: MRT4577_92894C.1
ccggccgggctgggctccctgcttatatcactgcaatattatactactagtagtggtgcttgatagcagtgtgtggctgtgctaataccagtataatactggttctactataatacagtcgtatcaggcatggcgtgcatcaaaaaaaaaaaaaaaaaaaaaaaaaaaaaaaaaaaaaaaaaaaaaaatcgaaaacccaccgcaccctttcatcagcctgcctgtccactgttggcttggtgacttcctccgctccgctccgctcccctccgctcccgaacggtcgatctttgcatggcagcagcagctggctccaaggggcgggcgatcgctggaagcttcgtcagccgcgtcctcgccggcaaggccgcctcgccgaggagggccgtgcacgcctcggcgtacgacaagaacctggaggaccaggtgcgcccggcgttcgtgccggacgatgtgatcggcagcgccgggagccccgacaagtactggagcccccaccccaagaccggcgtcttcggcccggcggcggtggaccccaagctggccgctggtggcgcgccggacgccggcgcggatgctgcaggaggcacggtgctggaccagaaggtgtggttccgcccgctcgaggacgtcgagaagccgcccccccgccgcgtgagccgcgcggcgctgctaggccagcccacactgctgctcgctcataaaaagggcggcgggagagcctggcagtggcaggcactctgctcgtgctcggccggggctgggctccctgcttatatcactgcaatattatactactagtagtggtgcttgatagcagtgtgtggctgtgctaataccagtataatactggttctactataatacagtcgtatcaggcatggcgtgcatcaggactggttgtgatagtagcaacgtgatgctcgtgcctgtaataagaacaagcaggcgatgtgtgcctgtgatgtaccggtgtcgtcagtgttataagtacttgggtcaatggtttctgaaaaaaaaaaaaaaaaaaaaaaaaaaaaaaaaaaaaaacaaataataaaaaagaaaaattacgccccactaaagaaaaaatgaataaatagctgcttaactgtgtgaaattgctatactcttgcatttgtgcaaatcatactagcaggcagtatcaagtgtaataccctgctgagcctactaagtgaaagacctgacattaataacgggggggctaattgagggttttgagtcgggtaaaactggcgtgcctcagtgagaataatataagccgcacactgcgagaggcaactggcaaagtgtggggtgatccgct

SEQ ID NO: 176868 - DNA, 276 bp, Zea mays
  Clone ID: MRT4577_92895C.1
ggaaagctggcacgcgtgcgggctccggcgcggaattaatggctggacccacgcgtcttctcttcagaggccggcctccattctagcggttggtgtttagacatgcggtttccattttcagcccagcgctcatgggcggcgccggagcggcgagcgagaatcttgggcagtagtagcagcagcaggcgtcaacgtcgccgacggaaccggctgtagtgtctacgaacctcttcgtggcgagagtgctacagtatctgcacctttcgagcgcagtgg

SEQ ID NO: 176869 - DNA, 385 bp, Zea mays
  Clone ID: MRT4577_92896C.1
cgagtagatacctcgcgatggctggagcctgtgtagtgctcagcgtcctcgcagctgccgtcgcggtccaggtagcgcggccgcgatctgcacgcgggggagccgcgcgagttgcgcggcatcgcatgaacacactgtcacccgacctgtgcaccagaactgcggagaatcacgtcagtaggtataacgtggtagatgctgtgacggtgctagaaatgcaagtggacgcttacaagatacgtgtcaaggccgttcggatgctcgccaacgatgaggtcaacactgcagcgacgcccgacgtgctgatggagcagaagctctgcagtacctactatctggacgtcgccgacaagctcggtacctgcaagcgctccatcagtttccg

SEQ ID NO: 176870 - DNA, 232 bp, Zea mays
  Clone ID: MRT4577_92897C.1
atgctgactttaaattggtgggggccacaaaaggaaaccccaaatcagggcaaaaaaaaaataataccttggggccccgcccaacaaaaccaatgtcttagggtatcccgccagttcactgaaggggccaaaagggaagcaacccaacaattggatcgttccccgaaaaggttggggaaggtaacaaaaaaccggcacaaaactcaagtggactttttcgcaaaagaggggg

SEQ ID NO: 176871 - DNA, 411 bp, Zea mays
  Clone ID: MRT4577_92898C.1
gggcccccaagaaaacccagcaaccaaaaacgggacgggataaacaccccccaaaaatggggattcaaacaatggtgtaaaaatacagggaatgccccaagccattttattatggacccactatttatcacccaaaagggcttaaaggggccgggggctccttgggctttccatcatctccaggggcacttccggaaccatggggaattagtttcccctcggaagggggaggtttaaagaacttccgggggggccccgaagccttccacaaggaccacacacgcaattggggggggggaacaaatcccgccaggggggccaccaaccctggttccccccaatacatgagaggggcaacaaccccaaaagcctgggttcccggggggcccaagaaaaaaacaaacgcggggg

SEQ ID NO: 176872 - DNA, 361 bp, Zea mays
  unsure (1)..(361): unsure at all n locations
  Clone ID: MRT4577_92899C.1
ggggcggagcaccggcgaccgccagcacacaatgcataatttgtaccacaagcagctgcggggccaccgngcgtaccttggcaccgtgccccatcgactcgacctccaaggcaatgaagcagcaagaaaactacgccgatcccttctctaagaaggacatgctttatcatgaagccccaacgcccttcagtgtgcgcaacattggcaaaactctgggggggggggaacaaggcaccattattgcctctgatggtctgaagccataggctttgagggttgtctagctgatcttcacggggacgaggatcatgcttacaggaaaatcacgctccgtgctgaaaaagtgcaaggcaggaatgtg

SEQ ID NO: 176873 - DNA, 295 bp, Zea mays
  Clone ID: MRT4577_9289C.1
gtctacccagggccacccagcggccctggggcctacccatcttctggacagccaagtgccctcggagcctaccctgccactggcccctatggcgcacctactgggtcactgattgtgccttataacctgcctttgcctgggggagtggtgcctcgcatgctgataacaattctgggcacggtgaagctcaatgcaaacagaattgctttagatttccaaagagggaatgatgttgccttccactttaacccacgcttcaatgagaacaacaggagagtcattgtttgcaatacaa

SEQ ID NO: 176874 - DNA, 1317 bp, Zea mays
  Clone ID: MRT4577_928C.1
cattgggaccctcgaggccggcggcggggattgttcatcgagctgtcttgtccccctcttggcctcttctttccggcgatgggcgccggcgtcctcctcggcgacgccgccggcctgggggcccacctcgccgtacgccgccggaggacgcgcctctaccttcgcaactgggcctccaagcccctgcgcccctcggtctggctcggcgtggccgcctgtgtttcacagaatcgcgaccgccgtggccacgtgaccaggttctccgcctccgcctcgagcggcagtgacgagcccggggagctgtccgaggatgaggcgcagagggagtgggaagcggagctgaatcgccgactgaaggaggccgaggagatggaggagttggagcgcaccgccgagcagctgcaaagccaggccgccgccgaggcccccgaggagtcggaggaggagaagcgcgagcgtgtccgccgcgagctccagaaggtagcgaaggagcaagcggagaggagggagacggcgaagcaaatgtttgagttgggtcaaaaggcgtacgggaaaggaatgtatggacgatcaattgaattcttggaggctgcgctcactatcatacgtccctcctctctactcggtggcgagatccaaatttggcttgcaatggcatatgaagccaataggaggcacaaggattgcattgcattgtacaaagagttggagagtagccaccccatgatcaacatcaggcgccaggcagctgagcttagatacattttagaggcacccaagttgaagatatcaaatgacgaggtggtcacaataccacaaattgggagcagctgggattggtatgctggaacatggagtgacaaaatcaaggaacaagaggacaagaaaaggaagatgagtgctgctagcaaccaagttcaaccttctccaaacatctttggagacctctctttcttgcgaccgccaaatgaatggaagaagagtgcatgggtggttgttaccttgtggatccttttgataggaacagcaatctatctgcaatcatgaatggctcctgcagctctgaaacaagccattcacatctctgcgaggcactggtccatggttcaacagaacccagagatgtcgctaatatggccgtgtctcagactgttgcatttgttgtttttttttgctgcagtgtaaatactaactactgtaactagcaatacaagcagatgccatctagttcaattgattagaaatcaatctgtctgctcatatacacttgatgatattgcatctggagttgatttgatattaccgtggtaggagttt

SEQ ID NO: 176875 - DNA, 213 bp, Zea mays
  Clone ID: MRT4577_92900C.1
ttttccccccggggggataattgagtggtaaacgggggcacacaaaaggaagggggatcaaaggctttctgagaggacacaaaaattggaaggggtttgagttctcaataccacaatggcactgtcacttaacttacttggtacattgcccttttctaacggcagttggttttggcccaccaggctctctggtcctgggccaccccgggcttg

SEQ ID NO: 176876 - DNA, 309 bp, Zea mays
  Clone ID: MRT4577_92901C.1
gccacgctgttcgtccacgcgttaggactgcgttcgcctcagatgcttacttacgcgccccttgactggtgattggctgcatctgacgcggacgagccggacaggaaaagctagcttgcacttaccaacctatcggccggcggtggtaaactgcctgcacttgtactgagatacaatggacggcaacgtagatcatcgggagaggggacacggggagctgaagcggatcgagatacaagatccatcgcctggtgaacttccataatcgacgctatggactgcttaaaaaggcgtgcgatctatccgcgc

SEQ ID NO: 176877 - DNA, 294 bp, Zea mays
  Clone ID: MRT4577_92902C.1
cgaaatcccggggccgaccaacccttcctccaacccttccgcttgggtaccaactttaataacttgaacttgccccccgccgtttggagcaacgtccaacccttgttcttgaagaccaacccaagttccttaatcttggtgaagaacttcaaccgttacttgcccggcgggaacgaaaaaacggcgccgccaagaacctcccccttcctcgctttaatgaacggcttttcttcttaatccgccaagaaccccttaatgtttttaacaataaccggggccaagaacggtttgaac

SEQ ID NO: 176878 - DNA, 193 bp, Zea mays
  Clone ID: MRT4577_92903C.1
atcaattaaagcaatttattgaaaatttattgattatgccagtaaacaataggggggggattttaaattttataatacaacaattagtacgaaaagacatcacctgcacaacaattaacatatactaatacttatgtaggtatatactatggatggcctctatgcccatttcaaacaccataagtaccatttc

SEQ ID NO: 176879 - DNA, 655 bp, Zea mays
  Clone ID: MRT4577_92904C.1
cctgtaatatcaatcacatgtgtgcgtataatatctgttgccaagggatcgattattccccaaaaaaaaaaaaaaaaaaatttgtctccttaatttccccggcccctgtaatcatcaatcaccatgtgtgcgtataatatctgctgccaagggatcgattactccccaaaaaaaaaaaaaaaaatttgtctccttaatttccccggcccctgtaatcatcaatcaccatgtgtgcgtataatatctgctgccaagggatcgattattccccaaaaaaaaaaaaaaaaatttgtctccttaattcccccggcccctgtaatcatcaatcaccatgtgtgcgtataatatctgctgccaagggatcgattattccccaaaaaaaaaaaaaaaaaatttgtctccttaatttccccggcccctgtaatcataaatcaccatgtgtgcgtataatatctgctgccaagggatcgattattccccaaaaaaaaaaaaaaaaaaaatttgtctccttaatttccccgccccctgtaataatcaatcaccatgggggcgtataatatctgctgccaagggatcgatttttccccaaaaaaaaaaaaaaaaaaatttgtctccttaattctcccggcccctgtaataataaaccaccatgggg

SEQ ID NO: 176880 - DNA, 315 bp, Zea mays
  Clone ID: MRT4577_92905C.1
acgccctgctcccccaccccatgtcaacggccaccgtgccgtctccgtccccgtcctcttctccctcgtgtggaactcgccctctgctccggatcggcgcggcccgtcgtttcgccatggcatttccgccatgggcggctctgctctttgcggaacaatctggtgctgtatttggcagcggcgggagcggactctggaggagggagcgtctgcttcaaccggacgttcagcttcagaaactccctcacggataccaggaacttcctgctctacgggcccgacgacttcccggacccagcgcggataccttcctac

SEQ ID NO: 176881 - DNA, 597 bp, Zea mays
  Clone ID: MRT4577_92906C.1
cattgggtacctcgagccggccgggaagacttccgctatgtaataataatatttgtgacatttatctctatacattttgtcattatatgtgaaaaaaaaaaaaaaaaaaaaaaaaaaaaaaaaaaaaaaaacacatattattagaaaaccaactaaaaacataaaaaagccccttttttgtgccacccatggcagctaaaaaatgtcgcctccgggtgccccttgggctttcaaaaatttgtgcccccgtgaccctcttggcactttgggcaggggctcctaggggtccctttttcccccagggccccaaacccccggtgtttcccgtttgcccccacccctttctccaaccgtggtggatccaaggggaaaccccatttggcatcccccctggatcccccggggtcctccaacgggcatcttcccttttacccccgtggcccctggagaatttattggcccaaaacatcagggcccttcggggacattaacgggcgcaaacaaacggggctgcctactcacaacaactggggttgcaaaccttggaccaactatctgaaaagaactctgcttctcatttgcaccaacaacggctac

SEQ ID NO: 176882 - DNA, 586 bp, Zea mays
  Clone ID: MRT4577_92907C.1
ttgggaccctcgaggccggccggaccactcctctgcaccttcttacaacactcagcagaagtggctcaccgacatgttagcacagccacatccccatcccggcactaaaactcccaccaccacaaccacttacagctcaactgtctactctgtcgcctcctgcacggcttgcctctcatatatgtcactcttggcgtcaccatatgccgctcctgtgcccgctgccataccgcgccatctctgcgaactgtcacccgtaccggctgctagagcagacgccggagcacgagaagacttctcctgactacatcatcgccgacgggctgcatatcctctacgtcctcaccgacactaaggtgttcttgctggacaataacttcggggccatgacgtgggacaaggtccatctgaattacccaaagcgctccctcctgatatcgagacatgatacatccccttcgacacacggataccatgatcgtagacttgcaatgtgcacatgaggcattccagatactgttgctggctctcaacgggcatgacctgattcatacttcagacgtctctgcctaagggcttaggtgct

SEQ ID NO: 176883 - DNA, 661 bp, Zea mays
  Clone ID: MRT4577_92908C.1
tatattcgccctttcgagcggccgcccgggccgggtacatggttgtcactgctcctaggtgctgtcggaccgtccgcctgacccgcctgggctgttcggcggtgacccagaccgtctgcgtttgcgtgccggaccatctaaggtttgcaaaaaaaggggttgttcctggtcgtgtgccagcgcttgtcccctagagttggaggccgtgatggtgatcttcaatatctctcctccatctggggtcttttctgccaccactgtcctacaagaaattttgatgttttcatcggcctcttgtgggttgtcgatgacgatctccttgcctttgccctaatctgtcatgttaggccaaaccaaaacttttttatcatcaaatttgatcatatttattggaaagggctctgtgtccacctgcatttcttgaaatctcaattggccctcgttaatggctaattggacctgtcgtcaaaacacattacaatcattagtggcgtgagagaatgaattatgccacttgtagtaagcacgatgcttacgttcgtcggcagatggaataatatgatctattttaacgttgtcgcttttgagtaattcattgagtattttgtcacattttccaaccttaaatgtaaatttaacctcttcttgtcatttcctttga

SEQ ID NO: 176884 - DNA, 468 bp, Zea mays
  Clone ID: MRT4577_92909C.1
gtgcccgtagccgtccaggacgtctggggccgacaggtacgaccgaagctcctcctacccgcggcgctgctcccttagttgcgaaccaacaggaagcacacgctggatccacccgccggattcacacagtacgcatgggaagccaagattcaggtgcacaaggaagacaacccgttcctggaaaccgggtgctccttgaggatgagaagactatctgaacaacctattcaaaattctcaacccaaagatatacaactacaacccatatacatacataccatccttgaccacacttataagcatgacgggtacactgcctcatcacgcctgacgtgaaatggacctatcgaccccctatcaatgggacgctcaccaagcttcacaccacaactttgctgttcaagcccattgtgcacataaatagcaacgtgtccatggatgctgtcacacaggtgaaagaaccacact

SEQ ID NO: 176885 - DNA, 390 bp, Zea mays
  Clone ID: MRT4577_9290C.1
ttttgttggtttttttttttttgggttttttttttttttttttgtttttttttttaagacaagaacatctttttttacttcaagaatcaatagggcccctcgcatggtccatcctattggcgggagcaagcatccttaagaaaattctgggcaatcactttatgcctggaactggatcccatcaaatcgacaggttggtcaagctctactggttatgggaagaaattctttagggttatgccttcagtggctcagtaagacatgaactgggaatacaacctttacaagaacaaaacacgctgtgcaagcaccccttttaaaaaaacgaggggctgagaacaaagtacctgtttaggcatgtttttactgggccgggggccatggttttct

SEQ ID NO: 176886 - DNA, 914 bp, Zea mays
  unsure (1)..(914): unsure at all n locations
  Clone ID: MRT4577_92910C.1
atttcngcacgaggcctcggcgccctggcgcgccttttgggtttctgagaggggctgcgctgggttgccttccccgctgctcgctctgccggtcgccgccgtggaagagctacaccacgacgagacacaggttctcgacccgtcatcacccacagcgagggtccagctccagccgccggaggcccggagttgctgttgacgacttggcgatgctgtggtttccaggctgaccaagggaggaacagggtacacagatctcaagaagctccatgagggcgaacctgtgccccggcgcgcgaggctgagcttcttgcacgctgcgcccaccccgagctcgccgatgcgccgccgccgccgcagccacggcccacggctgtccagccggcgtgctgacgcggactgacctagacgcaggttgccctgcccgttccctttttttctgagttagccgcttcggcaggcaagtaggacgaggagcagcagctcagatttcggatcctggcactggcactggcatgggctcgtttgggatggacatggactggaaccagaaggcctccgtgctgctgtgggactgggagaacctgccgcccgcagccgcaaacgggagcgagagccacaggacgaccgctgccgcgcctcagtttgcgggccttgaggccacagggcatgaaccggcgcgttcttccgtatccgcgtcaatccattctctgcccaatgccaaggggaagaagaacaagaacaacatggagctcatcagtttcgcacctgccaaagggcccgacaaggacactgggttcggtgatcagcagcggagagccggtgctcggcctgaagcttggcaagagaacgtatttcgaagatggctgtggactanggcagagcggcaagagttcgccggcgttaggcactgc

SEQ ID NO: 176887 - DNA, 840 bp, Zea mays
  unsure (1)..(840): unsure at all n locations
  Clone ID: MRT4577_92911C.1
aaaaaaaaaaaaagactgtgtcgataattgggagtcttgtcttcctcatctagtcatctgctcccctttcctcgccgccctgcctcgccttttgggtttctgagaggcgctgcgctggtttgccttccccgctgctcgctctgccggtcgccgccgtggaagagctacaccacgacgagacacaggttctcgacccgtcatcacccacagcgaggtgagattctcgctgaaagattgggcgggcgggcggaccgagggagtggcggcggttgccagttacctgctgccacgatgcacgcgtgcagggtccagctccagccgccggaggcccggagttgctgttgacgacttggcgatgctgtggtttccaggctgaccaagggaggaacagggtacacagatctcaagaagctccatgagggcgaacctgtgccccggcgcgcgaggctgagcttcttgcacgctgcgcccaccccgagctcgccgatgcgccgccgccgccgcagccacggcccacggctatccagccggcgtgctgacgcggactgacctagacgcaggttgccctgcccgttccctttttttctggtgagtactttggccttgccttttgctgcagcgccttgactggcgtactcgtgtcgtgggcggtaggttatgttcccttgcctctctctcttggtgctgctacactatgttctggtcttgccgtgatcgacgattcctctgttaacgntcaactgctgttctggtctttgcactcgcgtacttacctgcgaatctatcatgatgcataactgagtgcctgcccagatatgcttggtctacccgaacctttct

SEQ ID NO: 176888 - DNA, 298 bp, Zea mays
  Clone ID: MRT4577_92912C.1
ccggaattcgacggcacgcgttcggcgacgcattcccaatacggtttggattcagaatgtgctggtgctgctgtgatctgtagcgtgggtgaactgatatacatgccaataacgaatatccagtacaagacgttcgtgcgtggccttgcctgtagcaaggtcaagtagtcctatgatagcgaattgaacaagtactggaagaggctcaatgcgcacaagaatcggatgatcgagacgcataggtgaactgtgttcatgctctgcacgatgaggtctgatgaagctattcagaaagaca

SEQ ID NO: 176889 - DNA, 253 bp, Zea mays
  Clone ID: MRT4577_92913C.1
gatgtggtctcttttttttttgggtgtggccatccatccgaaagcaaccagccacactgccgaaccatccatttgtctcgttgtccgcaaccacttggaaatttctgggattagcggcggaggagagcaaataacaacgggctcaaaaaaatatcttggtgctgtggtgcagggcatcagcaaaggcgtggtggtggacagcctgctgtcgtccatggtgaggacggggaagccgccggacttcgtgctgtgc

SEQ ID NO: 176890 - DNA, 659 bp, Zea mays
  Clone ID: MRT4577_92914C.1
cacactttcgtcgccgagagccgagcccgaggacgaggagtcgaggacgcacctcccctctcgtctctcctctcctcttcccttcccctcagcaccacgtccgacgcgctcctctctacgctgctgcccgccgccgccaagggctgctcccgtatccgagcgcgtcccaccacgtcgcccactgccatggtgatctcggctgagccgcgcccgccgcctcccccggatccgcccgttgccgacgcggcggcggtggaagcggcggctgcggtcacgtcgaacgcccgccaggccgccgcggtcacgtcgttcccgtcgctcaagacgtgggggagccacggggccctgcgttgcgcccacgtcaaccgcgccggcgacgccaccgccaggcgctcaccagggaagctcgccgtggtcaaggagaaggcgctgagccatctccacgaggtggaagctgggagcagcgacgacgccgacgcgggccgcgtggcggcggcggaggccgcccccgctctgccaccgtggaagctgcgcacccggcggcgccccaaggaggcggcgccgtccgggagcatggcagcgccgcccgagcggaggccgtcgcgggcctgcgcggaggctcttgaccgggcgcggttctccgtgacgctcacgagcga

SEQ ID NO: 176891 - DNA, 108 bp, Zea mays
  Clone ID: MRT4577_92915C.1
cggaccgtgggtgcgatgtccttgccctgcagaccgacgagaagtcaaagaatccgcactggcgcgcgatcgggtacagcccgccccctgcaatcgacgagccggcgc

SEQ ID NO: 176892 - DNA, 593 bp, Zea mays
  unsure (1)..(593): unsure at all n locations
  Clone ID: MRT4577_92916C.1
cgcccacgcgtccgcccacgcgtccgcccacgcgtccgcggacgcgtgggttttttttttttttttttttttttttacgaaagcagaactactctattgtttcaacgaaccatccccacaaccaactccattcgtggctcatgagcagtgggctcgagtggtttggtcgaggcgtttagcgcgaacacactgcgtgccctcgttattgcctgccgatcgcaggagcaggaccgcaacagatcaaagcctcatgcagcctctaaatgcaaccgcaaccgtcaccgaggctggatgccgccccgagccctgagcctctcgcgggcgaactcgccggagaccggcgcccgcctgtgccgcggcggcgccccgaactcctgccgcggcgacgacgactcgtcctgggccctgtgcttcagcggcggctgcggcggctcgtcgtcgtcgtccgctggctgttcctgcgcccccgcgctgctgctgctccagccgaactccccgacgcgctggtgatagcacttgacggccaccgccagcatgaacaccgcccagacgcgcgacgccgtggacgagacgttccagaccagcgtgaagnn

SEQ ID NO: 176893 - DNA, 708 bp, Zea mays
  unsure (1)..(708): unsure at all n locations
  Clone ID: MRT4577_92917C.1
gttttcacgcccatctgcacgggccacgtcgaatcgttcgagctcctcccacggcagccatggacaccgccaccacctccctgcttcttctccctactcctccctcctcgccgcgcgctgttcacccacgcgatttactgctatctcgctctctcccaatcctcttgccagatgatggttgatctggaggacatcctttcacctgcgcgctacaatgacgctggaacgggacatggtgggttagttgaagatgatgcgcccagaggatgatacctaggatactggagcggccgcgccacaccactaccatgcgtggaatggactagaatgacaacaatgaacgcgacaacgacaagcaccaaatacgcattttgaccttgaaggaccacatggacaccaggatcaagaacgactgaagatgatatggagaaaattatgaacaaacctgatctacaatgaactgcaaagaagctccagaaaaaaactcatctctgatgactaaaaaaccattgaacacacagggaaagatagagacgatgatcacgactatgttcaacatattcaatgctccactgatgaagangagatatgccatctggacactccctggatggcatcggccacactacgagaactgcgctggaatctagggatggtgagacacacaccgcgtgcgtctactaggcatactcgctccactatgccatt

SEQ ID NO: 176894 - DNA, 196 bp, Zea mays
  Clone ID: MRT4577_92918C.1
atcctctttattatgtaatcatccgagggcccattggctgaggaccgacatgcatatatagagcggatcctaccacagagaagaaaacatcatggtgcggctaatgtagctattagggcacacgaccaaactgatacttcttggtatgatcagctaacgcactgacttctttagagactataaccacataagagct

SEQ ID NO: 176895 - DNA, 328 bp, Zea mays
  Clone ID: MRT4577_92919C.1
atacacacgtgactattcatttagagatacacatatcgcaaaggtagctacctatgagaagcacagacgatggaaaaagcattgctggcctcgccgctactgatgctccagctgccgtcatctcctaccacgaagacgacccgcctacctgccgtgccagacacatcatccgtggccgcactgcagatcttcatgaggtacatgggcccgccattgacaacaccaccacagggctgaatgccgagtgttccaaacatgaaacctgttggccatgagcatgcaacaccttgagatgatcaccgtcatgtcgtatatctagtagaagtgt

SEQ ID NO: 176896 - DNA, 226 bp, Zea mays
  Clone ID: MRT4577_9291C.1
ttaccaaccagagggaaggaggaaagaagatgaggattggattctcctctacccttgcttccttgttccatgtaggttcccctatctagctaacgaccgctaagctttcaggtagagatcaaaacgaactggaaaattcacgatttatccggtatcatatatcgtttttccttagacctatttcgcaattgcaggcacaaaacgggaacatggcagacacgatata

SEQ ID NO: 176897 - DNA, 513 bp, Zea mays
  Clone ID: MRT4577_92920C.1
gagtttttaggagataaggatctctagctagataggggcggccaaccagcctatttatgtaattaatggatgagaaataaagtagacaagaattagaagggagaaaccctcctcttgctcggccgtgggcagaggcccccggccggtgttaccatcgatacacctctctaatccctcaccgatctagcaaccataacacgttcagatcacttttatgtgatcaatgggtttaatattcttttctgaacaaatttcaagacttaacctttagaggcggttcacatctagtctaatccaaggcagtgacgtaaaacgatgtacataacaagtgccagaaaaggacctgaataaacaaaatctactgataatctgcatgtagcattttcattgggattgcagagaaaatggagcattctttattgctacaaaagtgcatggtcctgtttttgtatagtttcattcaggctggggcagccactaaggtgccgtttggttcatatatttgaaacgtaa

SEQ ID NO: 176898 - DNA, 393 bp, Zea mays
  Clone ID: MRT4577_92921C.1
gcggcgcacgcgtcctgagagactagttaggtatacttcggttgatatctgaagaatgtaatgaactaaaggtgcaaaatgccatgttaacagacaaagtctcaatgatgcaggatacttcaaacaatatcattgaagaaaaacaaactaaaacatccatgcaaacaaagatgagtaccataaatgaggggaacaatgatctagctactgacaacagaggttgttgtctagttaatgaggaaccagacctgcaagtaaaggtccaatcattggaaagcggacttgtcgaagttctagagaaaaatagcatgtatatgacacaggtgaagagccccactacagagcagcaagcttggagtaggaatggagagggggataacgatgacaaaatag

SEQ ID NO: 176899 - DNA, 990 bp, Zea mays
  Clone ID: MRT4577_92922C.1
cctcgaggccggccgggagttgctatctagctgctggttcatcacctgcaacaacttcaagcggccaagaaacattaccagcagctagcttcggtttactggggcatggagcaaacggacgaggcgtcgtcggtgaacgagcagagcgcggagcggcactccacggcgtggctcgacctcacgctggccgtgagcgcctctctcccggcgccggacgacggggactcctcgtccgccggcggctcaaacgacggcgacccggccaataataagcccgggtctccgcctcctgatcctgctcccgctcccgcgccgcccaaggtgttctcctgcaacttctgcatgcgcaagttcttcagctcgcaggcgctgggcgggcaccagaacgcgcacaagcgggagcgcagcgcggccaagcgctccgccaccacgccgtcgtccgcgtcggcgtaccggtaccaccacctccacccggcgcagcggatggccatggccggcctgccgctcgaggcgcacgccgccctggtgcgcgccgcgctgcgggtcagcccggcaagtgcgatcatccaaaagggcgacgccagccaggagctcgccgccgcggcgcggaaggctgccggtgccgggggccccagcgccacgagcacggcccccaggttccacgacggcgacggcgacagcgccgccgccgccccgtgggcgccggcgctgctctacgagatcgaggagccggtcagctcgacgtggccggggagcttccgcatgaggacgcagcctgagccgccgagctcggaggagcaggcgtcggagtcggagcagagtaagaagatagacttggatctcaggctgtgaaagtgaaactgaagccgaaacatcgtcgtagttacatgttgcatacttgtagaggaggaggagctcgcgcgaccagcctgtactttgatttctaactagtttcgattttcaccagtatatagttgtttgtcagctgcc

SEQ ID NO: 176900 - DNA, 695 bp, Zea mays
  Clone ID: MRT4577_92923C.1
ccggccggggcgcgaggccggccgggagacccaggtgcgtgtttgattccgaggcggggatgacgagcccaatggtggccaccccggtccagttccacacaaccggccgcctcagcttctgctccttttcctttcccagcgcatcagggaggcggcgattcgcggcggtgagggcgtccgcggagacgatggcgacggagaagctgggcatcaaggtggagcgcaacccgcccgagtcccgcctctccgagctcggcgtccgccagtggcccaagtgggggtgcgagaagagcaagttcccgtggacctactccgccaaggagacgtgctacctgctgcaggggaaggtgaaggtgtaccccgaaggccacggggaggagttcgtggagatcggcgcgggagaccttgtcgtcttccccaagggcatgagctgcacctgggacgtcgccgaggccgtcgacaagcactacaacttcgagtagccgccgccgccgactagccctgcggcgctcgatgtagacttgctgtgctcttgtactctgaaccaccgtgtaataaagctccggattagggtactacaatactgtactatctgtttcgaaaaaaaaaaaaaaaaaagcggccaagacctgaaactattccagctgatcagttttaatactaataaaactatggagcacgtgccggattactac

SEQ ID NO: 176901 - DNA, 715 bp, Zea mays
  Clone ID: MRT4577_92924C.1
tgacagccaagcttttcaacttggcaaaactgaaaatatcagagctatcttctatactcacttcagcaactgatctcagcaatcagtaacacttacacttgcctgtaaatcagtactccgtacattaaaatccatagaccaaaacatgctgctaccgaacatttcacattcccatttgttccattcagtgcatggctcatatagcatgctctcatttgtttcattagtacatgtttcacagtaccattttctcaagcacaccagcaaacattggggggaagagtaggaaaaaaagaatgcccctaagcttggcatcctaatttctgaagacacggtctacaaatttttgctaccgaatgctgagcatgtggtttgcctaatttcagagcataagaggaggccggaattgacaaacatcatagcagggtcatccggtggaatgaaggccgacgatgttgccaagaaggctctggacggcatcaaatccgtaaaattcattgtcccctgtaatttcgagggcgcaatgttagccgtagccaccgctggtttatccccgcagagctccccgttaatggcattcctagaagtggttggcgctggactcatgcggtttgcggcaatttgtttccagtggaattggttctccaccatcgagagctattatgccaagaaaaagaagagcgagtgatagcacaaaccacagctggacattatt

SEQ ID NO: 176902 - DNA, 376 bp, Zea mays
  Clone ID: MRT4577_92925C.1
ctcattcttcggcacacgcgtaccagcgatcccactcccgagcagcaaatgatcgataactcttgccactagatcattctatagctgctatagctctaggcctacctagtaactagtccctcggtcgggtagtaatcagccttatcaacgtgacccatggccactgcatagggccacacccccaccgatctgtcgaccaaggaagcgcctgaagcggagaccccgactgcgaccgccgccgtgcctcaggagggtgcacccgccccctagcccaaggcggaggagccagctaccctggcgggcaccgagccaggtgacgacgatgagcccctggaggcccccggggcagtgcatgcacagactcccgactagcttg

SEQ ID NO: 176903 - DNA, 863 bp, Zea mays
  unsure (1)..(863): unsure at all n locations
  Clone ID: MRT4577_92926C.1
aaagaaccgttggcggacgcccaccaaccaaaaaaaaaaaaaaccacgcctttcctccccgccggggctctccactctcgctccaacgccgacggagaagccgcagctctgctccctcgctctctcttccgggagcgcgtggctctattccattcgcgcccgctcggctgacaacggaggataaaattttgatcctttcatttgttggacattggatcaactggtgctgttatacatagaaaggagttcattgtaatttctcatctatatttagtggtgccataatcatttttccactggcgttcggcaataatgtcggagagcgagttagcagtaataaaaccagaggcgttaaagacttatatctggcttcagtgctttgatggttccattcagcaagtggaggaggaggttgcaatgttctgccccatgatatgtcgtgaaattgtgaaaaatggcacagggtcgtccaaaaatcatgctattgcgctccctgaaagagttaatccagccagtttgagtttgattcttgactactgccggtttcatcaggtcactgggcgctcaaacaaggagcggaagtcctttgatgaaaaatttgttaggatagaaacagaaagactctgcgaattgacttctgcagctgacagtctacagctaaagcccacttgttgatcttactagtcgagctcttgctcgaattattgaaggaaagacacctgaggaaatccgtgacattttccacttaccagatgacttacagnnaggaagagaaagtggagcccctaaaaatggnaatgatgatcctagggatcgctatttgaaccggntgtacgcgaaagagcggaaagagctccaggagc

SEQ ID NO: 176904 - DNA, 291 bp, Zea mays
  unsure (1)..(291): unsure at all n locations
  Clone ID: MRT4577_92927C.1
tcctgtggcgtttccctcgcaatcgtccggtggcgaggatcaaatcgctacaactagctagggtttcgtcgcctcatctctcgtcgatccatcgatggcgtccgagggcgaaaacaagaggatgatcacgctcaggagctccgacttagaggagttcgaggtgngagaagcngtgnccatgggaggtggactctccnccacatgatcgaggacgactgcgccgacaacggcatccccctccccaacgtcaactccaggatcctctctaaagtcatcgagtactgcaacagt

SEQ ID NO: 176905 - DNA, 846 bp, Zea mays
  Clone ID: MRT4577_92928C.1
cctcgccgtcgaggagggggccggagagaaaaaaaaaaaaaaaaaaaaaaacaaaaaaccaaaaaaccccacgcctttcctcgccggcgaaggagaagccgcagcgctgctctcacgcccctaggagcgcgtgcctccattccatgtgcgcccgcccaccggaggataacctttgatcatttcgtttgctggacattggatcaactggtgctgttatacatagaaaggatttcattttaaattctcatctatatttggtggtgccataatcatttttccactggcgtttggcaataatgtcggagagcgagttagcagtaataaaaccagaggtgttgaagacatatatctggcttcagtgctttgatggttccatacagcaagtggaggaggaggttgcaatgttctgccccatgatatgtcaggaaattgtgaaaaatggcacagggtcatcaaaaaatcatgctattgctctcccggaaagagttaatccagccaatttgagtttgattcttgactactgtcgatttcatcagatcactgggcgttcaaacatggagcggaagtcctttgatgaaaagtttgttaggatagaaacagaaagactctgcgaattgacttctgcagccgacagtctacagttaaagccacttgttgatcttactggccgagcgcttgctcgaatcattgaaggaaagacacctgaggaaattcgtgacattttccatttaccagatgatttaacagaggaagagaaattggagcccctaaaaatataaatgatggtcctgctaggattcgcctactgaaccggttgtatgccaaaagcggaagagctcaggagcg

SEQ ID NO: 176906 - DNA, 285 bp, Zea mays
  unsure (1)..(285): unsure at all n locations
  Clone ID: MRT4577_92929C.1
ancannagnaagggacgccagaanggcacacaaccaaaacgagggagcacancaacagccannacaacaagaacgacacaaccaaancanccaccaaccaagnagccggagaaaggaccgggcccaccacaaaacgccccgacncgagnnaaacaagattttagacggcgggggggncgagcacaccancaaacaccaaaggagcggggaacnnaaccggggggncccgcaaaancaggggaggcgcagagggggccggcccaggaaacaggggaggcgcggggg

SEQ ID NO: 176907 - DNA, 536 bp, Zea mays
  unsure (1)..(536): unsure at all n locations
  Clone ID: MRT4577_9292C.1
aattcggcacgagggaccggatgatgcattactagccaaccaaatcggtcgctgagccaggccccaggcccaggcacgccgctcttctcggcagtaacggaagccgagtcctctcccaccccggggcgggactcgccacttcccattcctgtgcgcctgcctcgcctcgcctcgcgtcgcactacccacccccaccagccaccaccaccaccaccaccaccaccaaccaaatggagcgcgcacgccgccacgccagccgcgcgctgctgcgccgcctgctcgcggcggccgcggcctcgcccgccgcgtccccggccacgtcgtcccgcggcatctccaccctgtcgccgccgccgccagccgcggggaagcagcagcgccgctgctgccctccaccccgcggcgcgcaccagcacgcgcaggcgcgggcggtgtcggtgtcggcgctgcagccgagcgacaccttcccgcggcggcacaactccgcgacgcccgccgagcaggaggccatggcgnccgcgngcggcttcggcggc

SEQ ID NO: 176908 - DNA, 853 bp, Zea mays
  Clone ID: MRT4577_92930C.1
aaaaaatctcaaaaaacacgcctttcctccccgcttgggctctccactctcgctccaacgccgacggagaagccgcagctctgctccctcgctctctcttccgggagcgcgtggctctattccattcgcgcccgctcggctgacaacggagctgtaggttaacctggtaaaccaattaccttgaagctgaactgtgccgttgaagccaaaatttattacgataaaattttgatcctttcatttgttggacattggatcaactggtgctgttatacatagaaaggagttcattgtaatttctcatctatatttagtggtgccataatcatttttccactggtgttcggcaataatgtcggagagcgagttagcagtaataaaaccagaggtacaatcccctgcagcccccctctccggcgttaaagacttatatctggcttcagtgctttgatggttccattcagcaagtggaggaggaggttgcaatgttctgccccatgatatgtcgtgaaattgtgaaaaatggcacagggtcgtccaaaaatcatgctattgcgctccctgaaagagttaatccagccagtttgagtttgattcttgactactgccggtttcatcaggttactgggcgctcaaacaaggagcggaagtcctttgatgaaaaatttgttaggatagaaacagaaagactctgcgaattgacttctgcagctgacagtctacagctaaagccacttgttgatcttactagtcgagctcttgctcgaattattgaaggaaagacacctgaggaaatccgtgacattttccacttaccagatgacttaacagaggaagagaagttggagcccct

SEQ ID NO: 176909 - DNA, 449 bp, Zea mays
  Clone ID: MRT4577_92932C.1
aaaaaaaaagagggacacacgccccattttttttaacccaaagggattggattttatacaacccaggggtttatttagggggaacaacagggggtacataaataacaaaggtttttacggaccgagggccccacaaaaattaaaatcagctaaggcaaaagtttttttttaaaaaaaaaattggccgaggactaaaacgttacaaaaagcccaggggccagggaaacggggggggcccacggccccggggagctcggggccgccccgttgtccatgtcccggttgttgggggggggcggcccaacccccttaaagttggggttgccgccgaaaaggttttggaggccggaaacgttttcctgggccaggcccaccttgttgggccccaaggtgatggtgggaaacataaggggggggggcttggccgaggggccaaggccgaggggggg

SEQ ID NO: 176910 - DNA, 357 bp, Zea mays
  Clone ID: MRT4577_92933C.1
aaaaaaaaaaaaaaaaaaaaaaaaaaaaaaaaattaaaaaaaaaaaaaaaaaaaaaagaaaagggaaaaaaaaaaaagggggttgcataattacatactaggggcggcctctttatagattctatgtttttcgtccccttgcttgaatcgtctatccttttttttagggcctcctaatttgatttaaccgtccggggttttacatcatttggattgttaaaacctcttctttcccctactttaattcttggaaaacatcccctttattcctctggcgtatattcaaataggcctaaactcttttgctttttccaacttttgcccacctttattggcgtttggggtggtccttttttc

SEQ ID NO: 176911 - DNA, 234 bp, Zea mays
  Clone ID: MRT4577_92934C.1
ggcgggccgccttttttttttttttttttatattcgacccacgcgtagttttcagcaacttcgggtggtcacaaaccgggaaaaatttgaaacaaacgggggctcaatgctgtcagggcaaactaatgtatacagaaccttaataaccgcgagaaccatgaatgcatagttcgcgtgttatgtaacggtagcaaaccaactttcaacataagaaagctcgcaagctgcatcact

SEQ ID NO: 176912 - DNA, 820 bp, Zea mays
  Clone ID: MRT4577_92935C.1
aatggtcagtggacaaataaatattccaggctcttcttgtctgctcctgctcgtccgtcgtccctcactggttcgatcactagccaccgctccaagaatccactagtccttctcgacttttacacgcaagaatccgatcttgtaactacagaccaccgattgggaacatggaagcaatagtactggtgcagttcgtggctgcggcggcgctgatatcttctttgatcggcggcgccgccggcgaggccgtggcgcaggagctgcggcaaggcctctccgtcgcccacgaccagtcctactcgcagttccagccggtgctcgccgaccccacgggcgtcttcgcgctcggcttcctccgcgtcaactccaccatgctggacctcgccgtcgtccacctcccgtctgccttcccgctctggcgcgcgatccccgaccgccccgcgccatggtctacagccgcctccctctccttcgacggcggcctcgtcctcaccgaccgcgcggccgacaaggtgctctggtccaccgctgccacctctgcctcggccggcgaccgcgccgtcctcctcaacacgtccaacctccaaatccagagcactggtggcagcagttcgcccgacgtggtggtgtggcagagcttcgactacccatcggagaccatcgtccagggccagaacttcacctccgcggcgacactctacagcttcgaccggcgcttcgccatgcggctggggagcgactacttcggcctctacatcgagcccccgccatcttcgggcggcgtcgctgcggccatgtacttcaagcacacggcgatgga

SEQ ID NO: 176913 - DNA, 916 bp, Zea mays
  Clone ID: MRT4577_92936C.1
atcttgcagtgcagtaacaccatgattttccacacaaaaaaatagaataacggatgcatgaaagcatgatgttaactatgcgtacacagtgaaaaacaataagtgcatctcattgaacatatagatatgtgtttatatgtggtctggtctggacgcatgcatggttaacttaaactaacactcatattacttaatataaccgcatggtgcagtgtgcaagttttggaaggccttggggacaagtacttgaaagatctcactccaatgccttgatcgatcgacatggtcagatccaaagtactcaccccacagaacggccatgaaacttatctcgtcactcagttgccttgatcgacatggtcagatccaaagtacaccgcaccagagcggacttgttgccgctgctaccgcctgtagctgcctctaacctcctggcatcctcgccaccccggagtgacagggagagcgagagaggcagcatcttatcgttgtccacctcctgctgttcacttaatccgataccttggatcttcatcttcttcatctgcttgtcggcagctcctcccatgtcgtcgtcgttggggctcaagcttaggtgcaagtccggcgtgccaccgttcccctccattggcgtcttcatcctcttcgtcgttctggtcccagcgcacatgtcgccggttactttgtttagctcctggaacgtatgcagctggagccgggagcctagggcttcacttgtcaccatggggtgatctgacgatgatgttaagttagcggagcctcttcccatagacagcagcaggtggtgactgcccaacgcaagagtcgtggacgcagctgccgacattgtcctaggctggggccaagatgagctggtgccgttccgatctgcgcttctggtgatcgttacgccgtg

SEQ ID NO: 176914 - DNA, 500 bp, Zea mays
  unsure (1)..(500): unsure at all n locations
  Clone ID: MRT4577_92937C.1
gccgggcatatggnatgtagcaccgcgcttgatcggtgnacatggctagccattacgcacttaaagaagtgnaagggagggtaatgtcctggagcttgacaagcaattatgcatgtgagaatgtgcagaaccagatttgcttgagctcaagaggtggagaactgattgaacgtgtgaatagactatgatgggctaggacgaggacccttgcgttgggaaaggacgattccgatagctggaaagtctagccccatgggaggctgtctctcccatgggttttacaccgcgtgctcggtgacgggccgagaacccggcggtgttctttatgatttgatcgctcaagacgccatcccctgtctactaaatcgtttttacgtggaggaacgaaccgaggagcttctcattgcggatagagaaggcggtcttattgtacacaggcttccattcattatgagaaagcttgttcccctccttgaacaggtatctccttgggttagtcc

SEQ ID NO: 176915 - DNA, 604 bp, Zea mays
  unsure (1)..(604): unsure at all n locations
  Clone ID: MRT4577_92938C.1
aaagttgaaagattcaactataaagtgttgttttaggcacttacgtggcagagcttccttgcccagtaccagccagtgaattccagtgttctgagagagaacttgcgaagagatactgagcaaatagtgaataataaaaataacagaagctaacatttattgagtacctactgggaacctggacctgctaaatgatttatatgcatcatttcgttttatccacataacagggataggatgggagatatgagcataatcataggcacacagatactgcggccaatgaaagatgtgacagctaagacagacagaagctggtaacttgctcaaggtccagagctaatagacagcagcgctggcaatgaggcagtgattgaggtgcctgtggctgtcttcctgctgtcccggtaaccactgtcatctgacctaaaaccacgggctgaggttaatttatattttttaccagcaatcttacttcattttctgctgccgaataacagggaacctcaggttgggtaaagaaaaatttaagtggcccatagttntagtggctgggaagaccaagagcatgngtgccggatctggcaagaggctntgtgttgca

SEQ ID NO: 176916 - DNA, 489 bp, Zea mays
  Clone ID: MRT4577_92939C.1
atgggcaagggcaagaaaggtagaggttcgcctcgccgctcaagagacaagcggaagcgtgacccaagtcctccctcggaggacttcggcgactcggagtattcaagggaggtttcctctgagtccgaggggtcgccggtctatgcttcctccccggtgtcgtctgatgactcggacgacttccaggggttagccaccgagatgtggacgtacatccgctccgtcgagcacgccgggctcgaaggcttggatgagtcagaggtctcctcggatgaggagaactcctccgacccgtccaagggagagagcggcgacaacagggacgatgaaggcaacgacagtggcgatgacagcggcgacggtgacgacgacggtggcaagggtggcggtgaaggcagcggcggcaagggcaacaacggcgacgacgacggtggcggcgaggacggcagcggcagcagcaaggctagtggcaaagcgccactggtctaa

SEQ ID NO: 176917 - DNA, 305 bp, Zea mays
  Clone ID: MRT4577_9293C.1
agcagtggtaacaaggcagagtacttttttttttttttttttttttttttttattttttttttttttttttttttttttttttttttttttttttggggggcaggattctccggatccctttatttatctcatataaaaaggggggaacactaccacatataaggggattttcggggggcgaaatgtataatatgggattaaagactggtaatgccataccattttcacaccccacatttactttcttattggtttgggccccaaactaatggcttcccgcgtcctctgcgttgttcccactggt

SEQ ID NO: 176918 - DNA, 367 bp, Zea mays
  Clone ID: MRT4577_92940C.1
ttttgctgaattgatgctacaaacaggaaggttgaggaggtaccagaccaacaggctgaatcatgccaaagggacaatgttgggagcaactggggctataatcaaaacggatttatagatgagaggtgctcatggaggcctaagggtcctagggataaggagcaccgactctatgtatattagaagctcgacaagttgtaccagaaccagaggaggtacgagcctagtggtagccatgagcgtggggatcatcctaaggaggccaacagcgcgcagcaggactgaaagcccgcagctaccaccgagcacggtagcgccgtggagccctgcggactcgtggcctggagcctgatcaacgacacctaca

SEQ ID NO: 176919 - DNA, 172 bp, Zea mays
  Clone ID: MRT4577_92941C.1
ctctaccctgcagctacggtccggaactcgcggttccaggcaggcgcgcgcggctggactcgccctgcgcgcttatcaagtcgtcggcggttcactgtgcctcattcccgcgtcgacggttctaggtctgcggatgaggcttagtacggcttcgtggcacttctaccggtct

SEQ ID NO: 176920 - DNA, 512 bp, Zea mays
  Clone ID: MRT4577_92942C.1
attcggctcgagcgccactgttcttccaggtatacatactgttactggaggtaaaggcgcggtacttccatgacaaggctttgccggcgtgccgccaaccgaactgaacagaaaaccgcacaggccacgcgagcagagattgtctagcgcgcaagctgtgacgcatcctgatcagtatggaggggtgccagacagccctccaggcaatgccaggtggacatttatatggacctgctccacaagagcacagttatcaacagttcaaagcttagttcatctcctcattgaattcctactgggagctcgcctgttggggctgtgcccaaatctacttcaccaatgtagcatcttactttgcatcttttagaaaaaaaattaactccagccgcaaaggtacaataagttcaaacatcactgccttatggagcgtaagagattaggcactggccagaatgagcaaatgaacttactgtatcgctttctggccatactatctgagagtataatctaat

SEQ ID NO: 176921 - DNA, 291 bp, Zea mays
  Clone ID: MRT4577_92943C.1
aacccacaccaactaccaatctccgcctaattcgacggcgcacccccctcaacacaagggcaaccaaatccccaacaccccatctgcgcacccaaaaacaaaacagtggccgcgttaccccctcgaccaaaacaaggtgatacgcaaaacatccagaacggggggaggggaacaaacaccagccctaaacgtcaaaaagaacacgaacgccggggatacttttccctaaaaaaaataccatcttttttttgcagcgggcttatttgaaaacccctttttcttttactcgaa

SEQ ID NO: 176922 - DNA, 545 bp, Zea mays
  Clone ID: MRT4577_92944C.1
cttaaaaaaaaaaaaaaaacaaaagaaacaagcaaaaaaaaaaaaaaagaaaaaaaaaaaaaaaaaaaaagcttaaaccaatttgttcgtcccccgtagggaccctttgggccttttttcggggccccccctccccccttcttgccgccgggggggggggcccttgggcccttttcccccctccttttggggggccttcttcccctttgccgggggttttttccgttttgccgggggggttccccccgttccccgccttgtttaaccttgcgggtctcccccctttttccggttggggggattcccttttgggccgcccggcccgtctttccttccgcttgcccggcctgttttccccccgtttgccccctcctttttcgcttttgtcccccccgttttgggggtttttccccgcggggttggccgtttttttagccccgtaccccccgcttttttccttttctttcttgcctttttttttgggtttccccgttttctttttcatgccgggttccgtttgggccctttatgtttccttttggggg

SEQ ID NO: 176923 - DNA, 271 bp, Zea mays
  Clone ID: MRT4577_92945C.1
tacacgcgtacgtacggttgttaaaacgacttatgcagaaccttctcaattggggctatcgtgcactaacaaaaggaatctgatcaaaccatttatcttgctgtactatctatatgcagtgatcctcatcgctgcgatggtcgctgatgagccatcgaacgatcaggaaaaatgaacacatcgaatccacgacgagcttagtgaatgcgatgacgtgcagcgaagccttttaagcgaaacgaaattccaactaaatcatgatacccatcac

SEQ ID NO: 176924 - DNA, 403 bp, Zea mays
  Clone ID: MRT4577_92946C.1
aaaaagcattaaaggccacaaggcccattcccggggaaaggttcatttcttagggaaacagcagttgggttttgatggggcccgatgccaaacataaaccccaatccaaatccggcccaaaaattggccccaaaaaaaaaacccaaggtaaattattcactggaggcaaaaccccaaggacatgcccgggctcacggtttacaaaaccaaagggggggcaaacttgggggcccaaaggcccaaaacagaacagggcgaacttttaaaagccctgctcgatcaggaaattgccgagcctttcaacacccatgttgaattgccctggagaaattgggttggcgcaaaccccaataattaggggccggcccggttttttggaagaaaagccccccgggcccttttt

SEQ ID NO: 176925 - DNA, 138 bp, Zea mays
  Clone ID: MRT4577_92947C.1
gccgcttttctgctgcgtacacagaaacagctctttgctcgctgtcgtggagttcttcccctgttcgatggtcaccgggaggtactgcgacgcgaggctttgcgtgccctccgattgctgcataacgttgcttgatcg

SEQ ID NO: 176926 - DNA, 1302 bp, Zea mays
  Clone ID: MRT4577_92948C.1
gggtacctcgaggccggccgggatcttctcccccagctccccagcaccagtccccaattatttggcctccgtcagagaggggagaaagacccgttcgaggcggcggcgatgtcggggcgcggcaagggcggcaagggtctgggcaagggtggagccaagcgccaccggaaggtgctccgcgacaacatccagggcatcaccaagccgacgcttggatcccctcccttgctttgccgtgtccccgcccaaaccccgtagccgccgccacagcaatcgctgccgccgccgctggaggccgggccgtgggggctgaaatgaaggaggtggtgctccacgtgtatgacgtgaccaacagtgactccgagaagacgaacaacaccatcctccagatcaaccgcatcttcaaggaccgcatcggcctcggcggcatcttccacagcgccgtccaggtctatggcgaggacgagtggtcgttcgggttctgcgagtccggcagcggcgtgtttagttgccccataggcaagaaccccatgtacacctaccgggagcgcatcgtcctcggggagaccgagtgcggcatcgccgccgttaaccggatcctgcgggagctcagccgcgagtggcctggccactcgtacgatctcctctccaggaattgtaaccatttctgcgacgtgctctgcgagaggctcggcgtccccaagctcccaggttgggtgaatcgctttgccaatgccggtgatactgctgtggttgttgctgagaacacagcagttaagttcaggcaggctaaaacagaaatcgtgaatgccagtagagtagcatacagatttatggcaggcctgacttccaaaaatcaagcctcacctgagtctccgggtaacaatcaaaacagaggcagccctagtttccagggagcttggttcaagaacatcgtctcagctggtgcaaagccttcatcgagtggatcgacacgcacacattttcaggacgctgatgatggaacccctttgcaacatcaaagttcaacagagcaatcaacacagttgtagttgcttcccagcatatcaaccaacaattgaattgaatctgtcaatctgttgtgtaacattagctaatatctgttcgaaacctgttgttaaattgtatcagtagtgtaacagttgctgagatttgttcaaaaactgctattttgcatttgtccgtgaatcagttttttgcatgcagcattgttgaagttgaacgctctgatgtcatgcgtacctgcttcagttttttgcagcatcgttgtagcacattctc

SEQ ID NO: 176927 - DNA, 312 bp, Zea mays
  Clone ID: MRT4577_92949C.1
ggcaaaaagcccttgatttaatacggggggagaaatttgattcaccaccccacacggttaccaaaaaaaaatgggccgctaggggccggccggttttttcccggtaacacgaggggctaaattagctaattgagggcccagctgggacgcaccactccgggggggggagggggccccaaaccctaaaaaggaaaaccggggggggaaccccttggaaggaaccccgggggggggcccctgggggtaaaagggggggggaaaaaacaccctgtaggggaacccgggggggccccacctggtccaaaaacgggg

SEQ ID NO: 176928 - DNA, 214 bp, Zea mays
  Clone ID: MRT4577_9294C.1
ctctccccacatttctacaagacatcatacccctacaccaacaaaaacatcattcccactctactataaatctaccaaaacatcatcccatcaccaccgacatactactcacacctcttcttcacacaactgcatcgcaaactgccacaactcctacatcttaacccaccccacatcaaaccaaacctccaacaatgaaactaaccccaacata

SEQ ID NO: 176929 - DNA, 528 bp, Zea mays
  Clone ID: MRT4577_92950C.1
ctcgaggccggccgggatcgcatctttgcatctcgactcgcttcacttcactccaaccacaacccaccaccaactctttactcacaatggcctctacctctgctacctcgaccaccgagtcgatcaccaacaccatctctgacgctgccaactacgtcaaggagtctgtcgtcggcgcttccgccgagtcgaagaaggaggccaacaaggaggtcgccaagggaaacactaacgcttcggtcggagaccgcgtttcggctggattctcggccatcggcaacaaggctgacgagtccaaggcgaacgccaaggctgacggctacaaggagagcgcaaagaactaagttcgaccgccctttagccccccttctcctcgattccccttttctgtgtctaggctttctgttgttctcttccgtccgagtcgagtagtcaaatcaaggattccccacccctgttttcccccctgcttcagttccacctgcgaaatcgaagtcgatacctaaaaaaaaaaaaaaaaaagcggcc

SEQ ID NO: 176930 - DNA, 179 bp, Zea mays
  Clone ID: MRT4577_92951C.1
tctttttccaatctagaagcgcccctctccctctgggtctctctcttagccgggcaagactcctcaccccaatctaatcgacacctcgcctagatgggccgcatgatcttcaccatcgacaactggaaacgcaatggaaccacatatcaagtcgagaagacagttcaaaaccctcaatg

SEQ ID NO: 176931 - DNA, 445 bp, Zea mays
  Clone ID: MRT4577_92952C.1
gcgcatggagtggagcaacaaaagggatggtttacataaaaaattgcctgacaacgctgctccgctagatcactagacgctcaccaatggagtttgggtgtctctataaaggagaagggccccctgacgaggagaaggggacggaacgccccctttttagtacataaacaaaacaaacaaacaatgcgcacgcatttcttcccgtgtgccatacagccccttctattctagttccaccctcaccttattgagacgaccggtgacaatcaacaactttgcagatgcaaagcaatttatcctcaaaacacctgtttgttcggctcaccgattgaagtatcccccccccaaaattaataaaaaatgctaaacaattaaactaggtttgctaattgattgattggccgcgatcttccctagtatattcgaggccggactgcacaaggtt

SEQ ID NO: 176932 - DNA, 121 bp, Zea mays
  Clone ID: MRT4577_92953C.1
cttacacatttgcacatgggtcggatctcctctacactttccatcgctctgctctgctacacgtctgagtccgaccaggcaaaagcaatacagatccatagacaggtaatactgccatttc

SEQ ID NO: 176933 - DNA, 338 bp, Zea mays
  Clone ID: MRT4577_92954C.1
aaaaaatgacaattaaacaaaaagaataaggattgctgtagaatccaaaccaacatacacgaccaaagccaccacaaaacaaagactatactttttacctaaattaaacttcaatggcccttgctttacaccacataatactggtaaagaccaccacttaacccaacttaattaacttacagaacatacccctttcacctgctggcctagtaacaaagagaaccgtgccgatcccctcttcaaccctacaacagcccttatcgaaactaaaacgcaacctgcagtggcgcattatatacaacgcatgcttgggttaccctccacacaacctgatcact

SEQ ID NO: 176934 - DNA, 297 bp, Zea mays
  Clone ID: MRT4577_92955C.1
cacttctcgacgtgcgctcgccactgttcctcttcctttttttccaaaagaaaacggagtgacaatacagctcatggcaaaggtttatgctctcaatccatccatccatgcaggtgccatccggtcaccctgcaggggatgctatagtagctaccgaaagcgacctgccattcacaagagccatgagccttgttgggattattatgaggaacgccggcagcttcagactctaggggcgactgttaggtcaggccacaacagggaatccctcctgcaacaggcaccttgtcctttctt

SEQ ID NO: 176935 - DNA, 141 bp, Zea mays
  unsure (1)..(141): unsure at all n locations
  Clone ID: MRT4577_92956C.1
gcccgacccttcccgngcctcacacagcatcggcttgcttggtctcggttgccagcataagattcagcgcaggcttggattcgccgattccactgattgcttgcgccacgcgngtccgcgcgggggggtgttcggcccccg

SEQ ID NO: 176936 - DNA, 314 bp, Zea mays
  Clone ID: MRT4577_92957C.1
gcattttggggatcccctgggggtatgacgttttctcatcgtggaaatgaacgggtttaaggcggggcagcctgtttaactatacctggtcccgggggggatgggtttggccgcttttcccggcctggggtttggtgaagggaaactccttctggggtttgttttgtaaaaaactgttttgtgggagggcttttcttattaggactctgatgttgttagttccatgggcaccaaaatggttgttctcgcagagattttttttccgggggttttttgttcctggtattctctgttttttctgtaatttttgtttt

SEQ ID NO: 176937 - DNA, 147 bp, Zea mays
  Clone ID: MRT4577_92958C.1
aaaaacgccaagcggggggcacattaactaaaactggatcacgtttgggtccatgtccgaaacatgttacatgttggatattattgctaaaatctacccagggccctccaagggtaaaatctccaggttgcattaaacagttttaca

SEQ ID NO: 176938 - DNA, 453 bp, Zea mays
  Clone ID: MRT4577_92959C.1
agaccccaatcattcagcccctaaaccacataaggccactgggagcaatcgatgggggaaggggaaacacaaaggggaaatcggaagagcaacgggattacccgggccgggaaaagaaaagaaaagggaaggtaaattattaatcacccactccgacaggaggggatgacgtccaaaaccggagaacggggggttaactaaatataacccgaatccgagcccgggcgcaggggcgcgagcaagctgatcaagggggggggcagggctcgggcgcaaagcctacgcgtccggggggcacgtcgaaaaaacacgggggttctgctggtgcatgctggcgaagacgttgagcacggggttgaccccgtcgggcgccggggccatggccaggcagttgatgggcccgtacgggctggggatgaccacgttctcctccgggagggtcacctggatgcc

SEQ ID NO: 176939 - DNA, 274 bp, Zea mays
  Clone ID: MRT4577_9295C.1
gtagctagtaaaccacaagcagaactgatgatgaacaatcttgtgcttgaagtgcttttggcaaatctccatgtgactcaatcctctagagtaaaggaaatctgtcttggaatcctgggaaacctagcctgtcatgaatctctagtaaatgttatcagcctgcacaatggtttgactgctacggttatggatcagctatttctagacgactctgcttgcctttctgaagtattcaggtttttggctgctgttttacgtaccagtgtgtctgttt

SEQ ID NO: 176940 - DNA, 2443 bp, Zea mays
  Clone ID: MRT4577_92960C.1
tgcacgcgtcggaagctcggaattcggctcgaggttccaagcttccgagcaatttcttcccctgaaacgtagccaaacctgccttgccatctgcttgctagtccatctcttctctcttctccatccatgtagataaatagacgccagccgctctcggcaccggagcaggccggcgggttcagtggcccctgcaagtgcaagctaaggctcacagcatccgttcggttccggctccgagggactcgctcccgtcggggacggatatatatccatcatggaggcggcggcggcatcttctctgtggggcggcctcaactccggcatcatgctgagcctcctggccgtggtgtgggccatgctgtggcaggcgctgcagggcctccagctgcagcagtacttcgggcgccactcccgccgcctgtcgcgccgcctcgcgtccatcctggacccggacctcaccgtcaccgtcgccgagtacgacggcgggcgcatgcgccgcagcgacgcgttcaaggaggccaaggcgtacctggagcgcgccacgcgggaggcccgcggcggggtgcgccacctcaaggccgagcccgacaaggaccccgaccgcctcctgctcagcatggacgacgacgaggagatcaccgacgagttcaggggcgccaccgtcacgtggcgggcctgcacggcgccgccgcgcgaggacagcgcgccggcctacttctggggccgcgccccgcgcgccgaccgcaggttctaccgcctcttcttcgccgagcgccaccgggacctcgtcctgggagactacctcacccacgtccgccgcgaggggcgcgccgtcatggtcaagaaccgccagcgcaagctcttcaccaacatctccggcgacggctcctgggactcggacggcttgtggtccgacagtgtttggagccacgtggtgttcgagcaccccaagacgttcgcgacgctggccatggacccggacaagaagaaggaggtgatggacgacctggacgcgttccgcaacggcaaggactactacgcgcgcgtcggcaaggcgtggaagcgcggctacctcctgtacgggccgccggggaccggcaagtccaccatgatcgccgccatggccaaccacctcgactacgacgtgtacgacatcgagctcacgtccgtgcgcaccaacaccgaccttcgcaagctcttcatcgagaccaccagcaagtccatcatcgtcgtcgaggacatcgactgctcgctcgacctcactggcaagcgcaagaagaagaacaagaaggaggaggacggcgagaacaagaaggacggtactacgacgaagcagcaggaggaggacaaggagaaggaggacgagaaggcgggcggcagcaaggtgacgctctccggcgtgctcaacttcatcgacgggctgtggtccgcgtgcggcggcgagcgcatcatcgtgttcaccaccaaccacgtggagaagctggacccggcgctcatccggcggggccgcatggacaagcacatcgagatgtcctactgctgcgtccaggccttcaagttcctggccaaggtctacctcgacgtggacgaccacccgcgcttcgacgccgtggcggcgctcctgcgggaggtggacatgacgcctgcggacgtcgccgagaacttgacgcccaaggcacccggcgaggacgccgactcgtgcctcgccgcgcttgtcgaggcactggagaaggctaaggaggacgcgctggcgaagaaggccaaggggaaggaggaggccggctccgccgatgagctcgacgacgaggagtagctggtggctgctgttgacttcttgttagttgctagtgctacatatgtagggagcccctgatctggttgctggtctcatctcatgagcgaagaataatgctaactagacgacgatttgattaaaaaaaaaaaaaaaaaactgctcgctcgacctcactggcaagcgcaagaagaagaacaagaaggaggaggacggcgagaacaagaaggacggtactacgacgaagcagcaggaggaggacaaggagaaggaggacgagaaggcgggcggcagcaaggtgacgctctccggcgtgctcaacttcatcgacgggctgtggtccgcgtgcggcggtgagcgcatcatcgtgttcaccaccaaccacgtggagaagctggacccggcgctcatccggcggggccgcatggacaagcacatcgagatgtcctactgctgcgtccaggccttcaagttcctggccaaggtctacctcgacgtggacgaccacccgcgcttcgacgccgtggcggcgctcctgcgggaggtggacatgacgcctgcggacgtcgccgagaacttgacgcccaagcacccggcgaggacgccgactcgtgcctcgccgcgcttgtcgaggcactgaaagaggctaag

SEQ ID NO: 176941 - DNA, 225 bp, Zea mays
  Clone ID: MRT4577_92961C.1
ttttgactatcagcacactgaaacagccatgattattgtcaataacccgagagcattgcacgagaattaacaactttgacaacagcaggtgttgtaaaccacacagtattttagaacagacacacttaactcgatatcgggagcacttttgaggaaatcacgggataagggcaggacactggcctaatgctgcgtaataacaaaatttttttagtactggaaacc

SEQ ID NO: 176942 - DNA, 808 bp, Zea mays
  unsure (1)..(808): unsure at all n locations
  Clone ID: MRT4577_92962C.1
ggaccctcgaggccggccgggactcccacccctcaaaatttcctagccgccactctcttcctccttctccctcacgcagcagcagcctgctttcttctcctacgacagcagcacgccagcacgcaggggcctcccatggccgccaagctccctcaacgccagcgtcctcctctcctccccacggctgcagcagggcgttcttccccagccttccctgggcgcgcacccctcctcccccttcttcttcctccagccagcaggcgcccagaaattccagcgggagctccatggccgagctcgcccaggccccgacgcctctgctcggtcgcagctctgcaggctctctccaccgcgccccctccttcctcgccgcgctgaagctcctcagccatggcgcccaagcccttcttcttcctctgcccaacacccctcttctccactgcgttaagagcaggaagcctttttatcccctgcgcacagggagcagttcccttggccgacgccctctgtggcagccatggcacctccctccctctctactcgtgcgcaggaaacccctcaagcgcagggaagaacagcagcccacccttcaaaacaccaagcagcggctcccgtctcccagcaacctccatggacgccccctgttttcttcttcgcgcagcagcggggagcccctgctcggccagctgccatggcgtncaagttttctgcgcagcagtgccgattcaaaaaaaacgcagccatgagatcccgcccgtatcgcttgcattgacccgatttgcgcagcgcctgcgcgcccgtcgtcgaa

SEQ ID NO: 176943 - DNA, 269 bp, Zea mays
  Clone ID: MRT4577_92963C.1
ctgggtatcgcttcgcgcggtttacggcgcatcctctaccccgggatggagctgctggagctgtgcgagcaggtgtttagcaccgccgacctctaccaggtgctgggcgtgcggcgcgaggcttccgacggcgaagtccgacgcggctaccacaaggtgtccctgcaagtgcaccccgacagagtaaaggatgaccagaacgaggacgccacccgccgcttccagatcttggggatagtgtacgcggttctgagtcacaaggagcagaa

SEQ ID NO: 176944 - DNA, 445 bp, Zea mays
  unsure (1)..(445): unsure at all n locations
  Clone ID: MRT4577_92964C.1
gggtggtgtttttttttttttttttttttttggtttttttttttttttttttttttttaacccggaaaacaaatctttttcctaaacaaaagggggtcccagatttttctccctaccgccctgcccattgggggagaccccgctggccgccggggggggggtccctaccttttcagaccggtcccgcctggggccccccgggggggttacatgctttccggcggcaaattttcaaaaccattgcttgggttggggggttctccgggttcccaacgcccccccccgaattgggccggtgttgggtttnccccctgggggcgtttgggtccccgaggcccgggtttctcctcgggggcccccggctttttgtccgggggtgtcccgctttctccctcccacggccgtccacccccccctcctgtggtgggtggttttttgggggggg

SEQ ID NO: 176945 - DNA, 645 bp, Zea mays
  Clone ID: MRT4577_92965C.1
ccggccggaatgagattctccctcaacgtgtctctgagtgccaagatgctcgcacgctcttactgagcaatggcacctcattatgtcccgatgcacaggaatcttgctgcagctgtctgtcttgctccttcgtttgcttgcgagatgcatctatataagtgacatcctgtgcgatcttctggagacatgaaacgacccaggccaggagctcctgagctgaatatcctgcactattgcgcaatccctgcacctgtgtccttatcacttgccacatcaatttctgcgatattccagtacatttgagaaacgcgaagcctatcactgactcggcactcctgcagtagtatacactgctgaaccctcccttatatgatgctgcttcgcgaacactccgcacagagaccattacctgattccctgtccaattagccaaggcctgaaactgtgaatataccaaactatgatgtgatatgagcattcccatcctcgctcgcaaacatctattgattatcttcatagtgctagtggaaaacaatgaccgtccttatcgatctgaatctgaggcaaccttctctgatagctttgctagcgagtatgttgccccatcagatggactttttgctcgcctggagtacttggcatctc

SEQ ID NO: 176946 - DNA, 766 bp, Zea mays
  unsure (1)..(766): unsure at all n locations
  Clone ID: MRT4577_92966C.1
atgggcgaccgagctcttccatttatatctctaccactcctcatcggtgaccggacgaacgccgggagaaacaggccgatccgtagctgcctgcacacatcggtgatcgttcgatccatgtgcgattgattgatcagggaggagcgagtgatataatgccttgcttggcgcaagagttccacccgaagctgcccgcggcgaaccactactgcaagtccttgtcgtcgctcatccgggagacctacgcgcactgccatgtcccctgcgtcgggatcgccgggtggagctccggcggggacagcgacgacgacagcgtcctcgacgaagcgcgagataccaagcaggtgatcctcagcgagatgaggagccggcagatgaagaggcggtccaggtgcagcgtggactcgccgacgccgctgcccctgccgtcgtcgagctccgctttcgcctggtcgtactcgtacgctccgctcggtccgagaaccgttctcgacgagctgtcgagtcccaagacgtgcgtcgtggtggagggggcggccgtggccgacgacgacgatggggacgtctactgcgacgcggacgacgagagcgaggcgttcttctccgtgaagagctgcttcacgcgcagcacgagcccgagcccgagccgggcggcgaccgcggcgtcgtcgccgcgcatgatgacaggcccgtccccgccgatgctgcgccggtcgcccgaggcctgngagcgcttccgggactgcgacggntggccgttcgggct

SEQ ID NO: 176947 - DNA, 569 bp, Zea mays
  Clone ID: MRT4577_92967C.1
tcattcgggacatgtgtaccatgcgcgaagactcgcgcgcgccatgccgagcaggcactaccgaaatggcccgtatttcatggagaatgaaaccaaaactgttgactcggacgtagctcactgcctaggagcgcaaccttctcgtctgcagcatacacacaacatacttgcagcccgcctagcctgatggcgcatgcatgctgcctacatgagatcagcatagcatgacagttctaggcaatgaggacactgtcacactcataaacgactaccgtggcaagactgatactgaactcaccaagatctgtcacggcatgctgaagcttgtcgaatctcacctctgtgccggtcttccaccgctcccgagtccacggtcttatatctcaagatgaaaggcgactactacagataccttgctgagttcaagactggatctgatagaaaagacgctgatgataacaccatggttggcatacacggctgcccatgacattgctttggctgagcttgctccaactcaccctattaggcttgcactggcactcaacttctgaacgttctactatgag

SEQ ID NO: 176948 - DNA, 1432 bp, Zea mays
  Clone ID: MRT4577_92968C.1
gccatgtactaacaattttaacgaagctacttttggtaaactcaagttaccagaaaatttcaacagtggaaacattgatagcaataatgtcctgctaacaaaccaacatagccactattctcatggtttatggagcttgctgcacatagctcatagattgagtggatcgttggcatcatatcacccaagagcacttatccagtatctttattcaggtgaatggaaacgtgcggatgctgctctgcaccatcttgttcgatccatgaaagtgagtgaaacttcaaagggcatgtcaaattacagtacatgccatagtattccagaacttcctttgtctgaatactttgcggcaacagtgtccaacaacatttctaccaaggggtttatgtggggtgagaatagaagtaacacaacttttaatttgttgtcaccttcaacttcatttctttacgaggatggcaatttaggtattaatactacaactagtgcatctgaaaaaccagacattgttgagctccttgacaagagtttcagcaaatatggtataagtgactcagagaaaaatcagatacttgcaatttctgatcttatggctggaatcactgatcagagccattcctctccctacaaaaatcttgacgaagcaggaagaaggttctgggttgctgtgcagttcgaacaattccatgctcttagaagatctgcagattcatccagtaatgaagggtgccgtgttgattctgcttccatagcctgggccttccaatctgattgtcaggatgatctacttaattctgtgcttcctgcagagccaacctggccagagatgcgaaagcttggtataggattatggtatacaaatgtgtcccaactaaggacaaggatggagaagttggcaaggttgcaatatcttaaaagcaaggatcccaaggattgtgctttgctctacatagcattgaacagaataaaagtgttggttggtcttttcaagattagtagagatgaaaaggataaacgtctatatgagtttctgtccagaaacttccaggaagaaaggcacaaggctgctgctctaaaaaatgcttatgtactaatgggaaggcaccaatgggagcttgctatagcttttttcctccttggtgatgatacttcatcagcagtgaatgtttgtgcaaagaaccttcaagatgaacagcttgccattgtaatttgtcggcttattgaaggatctggagggcctctggagcgtaatctcatttctaatgtgctacttccagatgcagttgagagaggagataactggctgtcaagcctgcttgaggtgtgtcatatacgtggcttttgtctaattgcctttctatttttttatgttgagaatcaatataaattatcgtgtttccagagttacaatccttcaacttaactttatctc

SEQ ID NO: 176949 - DNA, 378 bp, Zea mays
  Clone ID: MRT4577_92969C.1
tttttctcttttttttttttttttttttttttttttttgggttttggttttttttctggaaacacaggggcccggcatttggactttgagggggggaacgaaaatgaagtttcaaatccaaaaggggggggggagccccaaacatggaaaagcttttgaatttaaggggtcggtttatgaacggggaagaggcgaaaacaacaggaaatggggaatggggggcttttccacctgacagtcttccttatgctcatgctcaagggggagtacctccccggggggtaaaaatgttttggaggcttttacctggtgcccggggaaccttcaactttgaccgggggctttgttttatcccttagggaaaatgggaaattgggg

SEQ ID NO: 176950 - DNA, 283 bp, Zea mays
  Clone ID: MRT4577_9296C.1
cccacgcgtccggttaattattgggtgttcttaatgcttacctgctgcaatggcccttttttgaaaaactacatcagttgatagcagcatggcaatacatgagattagctgttgacaaatgcatcatggtacatttggggtttctcaaattagtttttttccctactttccctgtaaactgaaaacaaattgacccttactgtactaaattgcatcctaccaaaaaaaagctattttttgccctcttttgcctaaccaatatagtggcaaaaatgtaatatgt

SEQ ID NO: 176951 - DNA, 704 bp, Zea mays
  Clone ID: MRT4577_92970C.1
cggttgctgtccacaccgcatcgcacggtgggggggtttcgcttgcattgggttcttgtggagacgaaatgggtcagaggctgctcgaccgcttggcgggcttccttcttgtcgtcgtcgtcgtcgttgtcctctatggcggaacagcagcggatagcagaggcggcggatggagcgaacccgcacaggctgctggccaccgtctcggtgtccaagccgtcgtaccccacggttgtcaccacgccgatgtcagcctacggcgccgacccggcctccaagccgtcctactccacgttcccgtcgctggcgaccgggaacggcggtgccggtgccggtgccggtgcaggcggtggtggtgcagctgcaggcagtggcgggggcggcgggacgtggtgcgtggccagccagagcgccagcccgaccgcgctgcaggtcgcgctggactacgcctgcggctacggcgcggactgctccgcgatccagcagggcgggagctgcttcaacccggacaccgtccacgaccacgcgtcctacgccttcaacagctactaccagaagaaccccgccccgaccagctgcgacttcggcggcacggccaccatcaccaacaccgatcccagttcagggtcgtgccagtacccatcatcaagcggcggcggcggcgctcagacatggtgccccgccatccccgagacgaccatgcc

SEQ ID NO: 176952 - DNA, 453 bp, Zea mays
  Clone ID: MRT4577_92971C.1
atggctgagaaggaggaaacaaagggccgctgccctgcctgccgcacacgctatgacaaggatatgatcgtcaagatggccgccacttgtgacagggttatccagagaaatctggtgtacataattgggctacctgcgcatttatgcaatgaaagcgtacttgagcgcaaggagtactttggtcagtatggggaagttttgaaggttttagtttcccgtctgactgggcctccctctcagcaggcatcagcaaacagcagtattagtgttttttcccttaaggacaggcctggtgcagtggtgagaggcctttccactgagccaaagggcctgggtttgacgcagcctctacgcaaaaatgtagggttaaggattgcctcggttattacttccccagacccgactcatgcgggagccgtcagcactgggtctgttcttttactgatttgttga

SEQ ID NO: 176953 - DNA, 314 bp, Zea mays
  Clone ID: MRT4577_92972C.1
cctggaccgtgcgaattttgggtgacccacgcgtcctttttgtgacgagctcagtcaataaaaatttgagatcagtatgttctaccacagtggggtttcgaagatgagacacccaagatgtgctgagttgcatgagaagatattccgggtctatacgatctgggcccagaggcacccaacaacactgatagcagagatcacgaggaggagatccacagcgagtttcttcgaagcattctggcacgggggccataagcacaccctctagagatgccctttccaaatgacatcaaatcaaatgtgttgaaaaaggc

SEQ ID NO: 176954 - DNA, 285 bp, Zea mays
  Clone ID: MRT4577_92973C.1
ttcaactctttccaccacgcgttctctaacgaccgggacctccaccaagcggtggggagtcactattgcacgagcagtttccacatctatacaccgtaccgccgcatcctataacacatgttcgactcgcttttacaaacgactcgaccaagcccatgacgcacaacatcatggacatcacctcgctcaagaagttcctacaggagcccatcaactacccctgcggaatgacatgatacatcaccgactctgtgaccatctcccgcctgaagaccatggtcaccg

SEQ ID NO: 176955 - DNA, 1205 bp, Zea mays
  Clone ID: MRT4577_92974C.1
tcagatttgtgtttcgtactggcaccacatcatatatatggctgagaaggaggaaacaaagggccgctgccctgcctgccacacacgttatgacaaggatatgatcgtcaagatggccgccacttgtgacaggacagtggcagataaaaatgcggagaagaagcaaaaggcccaaagggttaagccaaaggcagcaccaacagcaacaacaacatcaaccgtagaatctaagaagcatcttgctactatcagggttatccagagaaatctggtgtacataattgggctacctgcgcatttatgcaatgagagcgtacttgagcgtagggagtactttggtcattatgggaaagttttgaaggttttagtttcccgtccgactgggcctccctctcagcaggcatcagcaaacagcagtattatcgtgtatgtctctctgaattatacggtgtacatgcatgatctgttcatacttcatatgaatttagatttatactttcagtactggtcaattagcctgatggaatatcaaataactatctactgattctatgcaattgcatgtttcaagtttctaatgctgccttgtaatactggaacattggtattataagaaagtaaattcaaacttcaatattgttatgtggttttctattgaacctggtgaaaatgtgataattatgtccatatccttgcaagcagttcagtcatttaagtttaatctaggctacttagcagtgtgattttcctgtagcctcttgatttgcatagccgcacagcccgtgcttgaaagtaacatttttatcctcattgctgacattaggatatgtattgtattattggtgtgaaattcaaagaatcagatagatgcaagatatctgtttgtgggataggatcagaacccaatcctgtgtgtgcagatatagataaaaatcatcttttaatgaaatgtctatttttttctcggtttgagtactttatattgttctcctgggatgtgtttttttttctttatgggtgatttctcttggaaatcctaggatagtgtttcgatgtattctgaaactttggtgggccaaaaacatgcattgttttatcattaaccagaattgagttagggattatcattaaagcattaaccaaaatggagttaggatgtctttttttgtagtgtaaaaaaacgtgtgtatacttgaatgtgcatg

SEQ ID NO: 176956 - DNA, 286 bp, Zea mays
  Clone ID: MRT4577_92975C.1
actagttctagatcgcgagcagattttcgtccaaaaaaaataaaaaaaaaaaaaaaaaagggcaaacaatgtaaaaaagtccaaccttacatactcgatcatgcaacataatcacctccattatactgtaaactaaattcaatttactacccaaattcatacaacttcccgactgttaaaaccctggcgactcccaaatcaatggccttacccaacataatcgtttcgcaagatatcctaatttcgaaaagtcccgtaccaatcaacattcccaacactttcgcac

SEQ ID NO: 176957 - DNA, 417 bp, Zea mays
  Clone ID: MRT4577_92976C.1
gccccccctcgagtttttttttttcttctttttctttttttttttttttttttttttttttttttttttaaattttttttttttttcctttttcctttaaggggggacaacccgccggaaaaacccaattgggggggaaaaaaaaggccccccccaccttttccttaaaactttccactaaaaaaaagagggggggggggggctaaacccctttcccccttaaggggggggaaaatttgggggcctttgccatgagggaaccccttttggcgggaaggccccaaagtttgttgtcctaaaaaaccccaaaaaggaccccctccgggttttattacccccccgccccggcaaaggggggcacccgaaggccctttttaaacccccgaccaatcgggggtcaatcctgtttaaggggat

SEQ ID NO: 176958 - DNA, 653 bp, Zea mays
  Clone ID: MRT4577_92977C.1
ttgggaccctcgaggccggccgggaacacgattcagacatctctgtctttctcgtctctcctccacagaacgagagaaaggtgtttcctttctcggagaggtagaagccgaggaaggtaggatagcgccgcacccacccatcactcatggctgggttgcaaagataggcgaccacctcagactgtccggctcgtaccaccctgctctgagacgagcgtgtcctgactgactccgacaccaacgcgaaggcctctgccgctgaggatgccgagcacccggcagctccggcactctactgatgctcttatgctgcgaccagtgggcggggtgcacacagccgtagtaacaagggcaacgacagtacgcaaatagtcaggcggagtcagctcggcgcagcaaccaccacgtgttctcgatcaaggacgtggcctcgtacatgtatcccccctccgcgaggttgtccgactgcgtcttgtgcacctcctttcgcgagagctctgccgctactggccgcagggcacaggcacgccggcggtacaagcccaggaagaactgacagggtaacaacacatacgtacgtgcagaacattgttgtgtgtgtcatctgtatagtccgggccatagatgttcgtgacacacatgtttactatact

SEQ ID NO: 176959 - DNA, 829 bp, Zea mays
  Clone ID: MRT4577_92978C.1
cattgggtacctcgaggccggccgggcggcccgaggccggcccacaggtatcacgccaacaccgccaacatgcgtacctacgacgattccttcagcggtcaaaagatctacccgggcaagggcaagctttacatccgtggtgacagcaagatcttccgcttccagaacggcaagagcgagtcccttttcctccagcgcaagaaccctcgcaagattcactggaccactctctaccgaagggcgcacaagaagggtatctctgaggaagtcgccaagaagcgcacccgccgcacagtcaagcaccagcgtgccatcgtcggtgcctctctcgatgtgatcaaggagcgccgcagccaacgtcccgaggcccgtgccgctgctcgcagcgccgccgtcaaggagggcaaggagaagaaggccgccgccgagtcagcaaagaaggctgagaaggccaagaacgccgctgcgtccgcacgaggcaacgccgccaaggtcagcaagcagggtaccaagggtgccgcaccaaaggtgcaggcaaggactcgttaagctaaagcggggaaattggtacggcgtgcatagtctgggttatggctggtttttcggaatgactcggtgtttccctttactctctgaatctctgtttccgataaacctgcggaaaaatggaatgaatggaaatggcactcttcatggctgaccctgtttttttgcttctggaatcggtgtctactactaccagacactgtcccattcatatactgaagcgtctgggcgccgtagggcaaaatacaaataccatgtccttacgaaaaatacgaatgctgcc

SEQ ID NO: 176960 - DNA, 293 bp, Zea mays
  Clone ID: MRT4577_92979C.1
cgggggggggcatcacaaaacgaccttaaaattttctcaggccttaggaccagcttattgtaatgcactgtctaacatcacaagaccacctcaaaattttctcaggtgcaccggtgcaataggcgagttgtgttgtctccaggctttttgagctgcccgcaggctgccatctgatttgaaacttctcttttcatcacctctaatcaggagatcacattgttgttcgtagctccaccactagaattgagacatttgtcctcaaagttatcgtgaggggaggagtcatttctctg

SEQ ID NO: 176961 - DNA, 352 bp, Zea mays
  Clone ID: MRT4577_9297C.1
accgttctcagctgggtacaatgtcccagagcttcaccaagagacggaacgccattctggcgctcaacaacttggccatccatggctacggcctcgccgagcccccggccgttaaggctagcatcgcccgcaaccttggccttgaccgcatcaaggagttgaagatcgaggagggcggctcctttggccgccgcgccatcgacccctttgactcggggcgacgtggtcgcagcttcggggattctggctttggtgaccggagaagtcgtggccggtccagctacggtagatccgaccacggcgagtctcgttcctcaaaccgtggtggcggtctctacggtgcccgtcctcg

SEQ ID NO: 176962 - DNA, 1255 bp, Zea mays
  Clone ID: MRT4577_92980C.1
cattgacttccccagcagagcagggaaaccgctcccagtcccagtctctcacctgaggtgactggcgtctcttgtcgcgagccgccagaagcttcggcccctgacgcgtgggggccccgtccgcccccgcccccgtccccacgttgccggccatggcggggcagccaccgccgtccggggcctccgaggacgacttcctcgagcacttcttcgccttcccctccgcggcctccgccggcgctgccgggggccacgcgggcgccggtgttggcggggaccaccccttccccctcgccctcagcctcgacgccgccgccgaggccaagccggaccgtgatcccgtgcagctcgccggcctcttcccgccggtgttcgctggcgccggcggcgtgcaccagccgcacctccgcggcccaccgcctccgcagatgttccaggcgcagccgaagccgggcgagggaggcatggcgccgcagccgccagccccgcggcccaaggtgcgcgcgcggcgggggcaggccaccgatccccacagtattgcggagaggctaaggagagagagaattgcagaaaggatgagggcattgcaggaattagtccccaacacaaacaagacagatagggcagccatgctagatgagatccttgattatgtgaagtttcttaggcttcaagtaaaggttctgagtatgagcagactgggcggtgctggcgcggttgcgcagctggttgctgatattccactctcagtcaagggcgaggcaggcgacggcgggggcgcgccgcagcagcagcagcagcagcacgtgtgggagaagtggtcgacggacggcacggagaagcaggtggcgaagctgatggaggaggacatcggggcggcgatgcagttcctccagtccaaggcgctgtgcatgatgccggtctcgctcgcgatggcgatctacgacacccagcaccccctggacggccacggccactcgctgaagcccgagcccaacgcgtcatcctagtacagtaacgtcgtccttagcgtgccttccaattccaacacccaccccccttctccctaaaaagtactgttaggcgccgatattatccggaagaaaaaaagaagtgtatgatataccgagcgtgcgtttccagtgtgctgacccgtgggataggaaaggaccgaaaattgttggtatatgatgatgtagcctcctgtttgcctgttctgtttcaaatcaaagcaatgctcatgcatccaggttcc

SEQ ID NO: 176963 - DNA, 1482 bp, Zea mays
  Clone ID: MRT4577_92981C.1
gctgagatcagcggggatacgagagcatggaacagcttttatatgcgtcaagatactgttgttgaaaacattgcaaggaagaatggtatcagtaagagtgagttacttgatagagaagcagatgatcttgctgttcgtattgctcttggtgagacacacgtcattgcagagactaagaaatttctatcaaggtctggagttaatgttgctgcattggaagaacatgcttctaaacgaaatgagaagttcaaaagaagcaattatgtgatattagtaaagaacttgccatttaattctactgaggaagaactcgcgacactgtttcagaaacatggtagtttggataaaatcattctacctccaacgagagtgtttgccttggtagtctttgttgaagcaactgaagcccaatacgcattcaaaaaactactatatacacgatataaggatactcctctgtatttggagtgggcacctgaaaacatattgtctcctacctcagcaccggtggatgaggaagtaaaaaacgaagttggcgagcgtattcttactaaagctaatatagatcaaactgtagaaggagtaagcgctgaagagattgatccagatagagtggagtcacgatctgtgtttgtcaagaacttaaatttcaagacaacagatgaatcattgaagcagcatttcagtacaaagctaaagagtggcagtcttaaaagtgcaacggtgaagaagcatgttaagaagggcaagaatgtttcaatgggatttggttttgttgagtttgactctgttgaaactgctaccggtgtgtgcaaggatctacagggaacggttctggatggacatgctttgatcttgcaactgtgtcatgtgaagaaagatggtcaagcggcaaagaagaatggcaaggataaaagttcaacaaaactgcttgtgcgaaatgtagcatttgaagcaactgagaaggacttgaggcagttatttagtccgtttggccagatcaaaagcctcaggttgcctatgaagtttggtagccacagaggttttgcgtttgtggaatacgtcacaaaacaagaggcccagaacgctctacaagccctcgcaagcactcatctctatggtcgacacctggtgattgagcgagcaaaggaaggagagacactcgaagaactgcgggagagaactgccgcacagtttgtggacgaaagcagcggtttccagagcttgtccagtaagaggaaacggagcagtctcgtggacgaaggctccgttaaagtttcaagaatagcagagtgattatcttgagcgagcacctgaaatttttgaccatgttatgcaatttgtaccggttcgttagggaaaaaaatgggttatcttaggttgtttaatgtttgtgtgctgttttagagctgaggaaaagaaatgctgaaaaggatctcacatcttaatgcaagagctgtctaaatgcaagcatatttctac

SEQ ID NO: 176964 - DNA, 301 bp, Zea mays
  Clone ID: MRT4577_92982C.1
ggcaaaaacaaaaaaacttattgcaaaaaattgcccaaaacatgtccagatgtcctgttaccgccccccttataatttttaaccaaccccgggggttaaacaactgacctattgacccccccccccccctttaaaaacttttttgggtttccgttaaagccaaacataccatttgaaccaagggaacccccccggagtttagttaaaaatgggggtatccatgcccattacaaagtttgggaaaaacacaaatgtttgggaaaacaaaacccaagggaaagcttggccagctcaatttttg

SEQ ID NO: 176965 - DNA, 344 bp, Zea mays
  Clone ID: MRT4577_92983C.1
ttcctatttcgtccgcaggtagttacttctcaagtttggcttaactggaggaatttgctggtgaccatagtgaattggtgatgttctttcaggcaaatgtttcagtagaagaggcttgcaaaaagatctggctggttgattcaaagaccccacttatgtcggaggcttcggcattgggtctgtccttttgattgtaaagaagtctgttaacgttgcagggactaattgaggcctcacgtgaagagactctccatccatttaagaagcgaattgcacatgagcaatgaacctgtcaaagattttttaggtgctgttaaggctattagaccaactgcacttattgg

SEQ ID NO: 176966 - DNA, 656 bp, Zea mays
  unsure (1)..(656): unsure at all n locations
  Clone ID: MRT4577_92984C.1
cccacgcgtccgcccacgcgtccggggcacctgaaaacatattgtctcctacctcagcaccggtggatgaggaagtaaaaaacgaagttggcgagcgtattcttactaaagctaatatagatcaaactgtagaaggagtaagcgctgaagagattgacccagatagagtggaggtttgaagcttcaacttatttgcatgaatatcatttttatttgtatgcttggccctcatacctctttactacacgcatatggtagggtttcatatgacaaaaacttgtgttcccaagtatgcagctatttttgcatgtgaattgtagcattccaagattgcttaaaattatttagttgcttcacattggaaccaatttctattcttaaaatgtaccatcattcattgcagtcacgatctgtgtttgtcaagaacttaaatttcaagacaacagatgaatcattgaagcagcatttcagtacaaagctaaagagtggcagtcttaaaagtgcaacggtgaagaagcatgttaagaagggcaagaatgtttcaatgggatttggttntgttgagtttgactctgttgaaactgctaccggtgtgtgcaaggatctacagggaacggttctggatggacatgncttgatcttgcaactgtgtcatg

SEQ ID NO: 176967 - DNA, 347 bp, Zea mays
  Clone ID: MRT4577_92985C.1
cgagccaaacaaaagaatagagcggacaggcatcaggcatgcagagagagcacaaaccaaaactgaggaaacaaactcccagaaaaaggcataaagtatgtacaagccccctgaccaggacaaagacgcgaggcaagaggacgtgcataaaggctacagaacaataccaacgtaagtggaagaataaagcaggtgcactgcgtgatctaaaagacaaattgcagcctctgcaccacacgatttggacagaaaaaaggctttctcatccccaaatacaagcgaagacaggaatatatgacctgccgactcttgatctgaccaaaaggccagcagcaaatgatcggcgg

SEQ ID NO: 176968 - DNA, 436 bp, Zea mays
  unsure (1)..(436): unsure at all n locations
  Clone ID: MRT4577_92986C.1
agcgcaggaggaagncngnccgggggggcaacgngagccaagaccaaacagnancaacgnggaganagagaagaagggcgagaangancggccngggccgaccgacacngagaagccaaggaagaggggncccaagagggccgcggggggggaaagccgcncaaccncaacaaggangangangaacgcaagnacgngaacacanaccgcaggacaggcacnaccaagaacggcaagaaggncagcaaggcaccaaagagccaacggccngagacaccgcgngacccnccagaggaagcgcgcgagaagcgcngacaagaagaagagganaaccaagaagaagcccgaggcngcngagnaccagaagcnncgcgcccagaggcngaaggaacagagggaccgccggagcgagagcnnggccaagaggaggcccaag

SEQ ID NO: 176969 - DNA, 220 bp, Zea mays
  unsure (1)..(220): unsure at all n locations
  Clone ID: MRT4577_92987C.1
cccacgcgtacntcnanacnatcttattattttaaanaaaanaccaaaacgggcggggccacaaattatttttgtcggcacccanaccccnactgaaaccctcataaaaataactgctccccctaactcgccccgacaacagaacaactacttaatctagcatcatatgaaccaacactgacagcaacgcccttcctctaacaaccacctaattcccata

SEQ ID NO: 176970 - DNA, 345 bp, Zea mays
  Clone ID: MRT4577_92988C.1
tttttaaaaagtaccagtttaagaaccagatcctgtaccaggggtgactgaaagagagtgacctggtgccaaggcaacacggaccgaaggagcagacagactgggcttagatgatacaaaccctgatgatatcaactctagaggaaagcaatgctactgcatagactactgatccgacaaatagggcatgcacaacgggaaacactgaattccaagaaaaggggcttgatactacaggacgggaacatgcccttggtaatgcagaaaaccatacaacctccatcaacaacagacggtcaaatgcagtagcccacctagacaaggcgcactagggagagccctgaa

SEQ ID NO: 176971 - DNA, 401 bp, Zea mays
  Clone ID: MRT4577_92989C.1
tcgaacaaccccgattgacaaattatggccaccgcaagagacttaaatagggggatgtgcacgcaccgacatcagcaccgcgtacttcatgcccgtctacttccacctcacgtctaaattccttggctacacagactacaggctcctactaaggctggtcttccaagacaaagacaactccaatacatcgacatacagatttgttgaccgatttaccaacatggtcatcacagcactaatcatttatgatcgtataccatcacgatatgcatcttacttctgattactcccatcagttgccacgatatgctcttgaagttggtctgactaactattcagctgtctactggactgaccttttgttagctggtcatgttctcacaaaccgtaatttatattat

SEQ ID NO: 176972 - DNA, 1268 bp, Zea mays
  Clone ID: MRT4577_9298C.1
gcatgtttgtggttgtggccatcatgtactgattttcccttttcaacagttgtcgtgaggctgtatcgtctggagtaaaaaaaaaaaaaagctaaaagccggcactgaaaaaaaaaaaaaaaaaagcggccgctttttttttttttttttcaaaaaaagaaacatgtttgtcaccaattttatttatcaaactagcatctcagtgaaataaataaaaaaacattgcacggattagatatgggcatctcaccttctctcaaaacaaagcgtacttgtctccttggaggacaaataatatggttactacaacagggtataagatgcctttctacttgtattgctctgaaactatgcgagcgtacttgtccatgaattggcatttcttgtcaaaaccccagccaggattgttcttaagagagagtagagttttgtcagtaaaccgctttactgaagaagggatgctttctggaagagtgtttgcaactctttgcaactcctcttcttgttgttttgcagtcacaacatcaggtccactgtacatatctatgagctctttcatatggggggctctagccattacatctttcacagcttcctcccattcttcctggttctggatgccctcatatgcaactacaaatggcttcaccttctgaagcatctcctccaacgacattggtggtttctcatcaatatcaggattaccaaaattcacatggtactccggctcaaactcgatcatgttgtttgtgtgacaagcctcgaggtaagcatcttcccattgatgtggcaacgcattatctgctgcctccatgaacgcctgctccagaatcttcatcttgtcctcgccgagctgctgctctagcctatcgccatcagctttgtcccccaagtagctcgcttgccagacgtcttccacatcatcagagcggtcgccacgcccgggacgcctgccgcggcctgggccacggccacggccgacgggtgctgtggcagagaagggatccgcgtcatcgtcgttggaaatgggcctcccgggagcgcgcggctgcccggcggtcggcaggccgcgtccgcgcccgtgcccgaaaccgccatcaccgcccccgcttctagaagaggaggagaaggcgagagcgcgggaggagaggaatggagtgtgccgcctggcggcggcggcggcgccgatgcctcgcatggtgatggcctgacggtgatgggttcagcgcggggtgctgctagggttgggctccccggccggcctcgag

SEQ ID NO: 176973 - DNA, 364 bp, Zea mays
  Clone ID: MRT4577_92990C.1
ctgattccagggaagttagactgaaaggtggcctagatgatctccaaaagcggcatcaagcccggtatcttggctataatgaactggttacacaagtgcctgcgtctaccagaccgtttataagacagatcgaagccctgcatgagacaactgctcaaacggcagaggctagggctgatgcggagagaaccttagactgtagcctacacgaagcacaagctgaagctgctgcttcagaagaaggagcagactgtagatcagagagtgtcacagagattattacggataacagtcctggagaccgagattgcaactcttagaacagagcatacacagctgaaccgatctctggaaaaggagaggc

SEQ ID NO: 176974 - DNA, 492 bp, Zea mays
  Clone ID: MRT4577_92991C.1
gggaaaaaaggcccaaattaacccctttttttttaaacccctttaaggggaccgccaaccccgggggggtttcctgggcccccggttccccaacccccccagggggccagccctgggttttccccccttagggaaaaaaagggttttgggggtttaaaccaaccggaagggggaaccccagggggaagaaaattgggggaacccgttaaaaattggccaatggttttccttccaggggggggggggaaaccggccaccttttagggggcctggctgccattcccaaagcctgctttggggggacaccattcccttggccccgatttgggtttttaggaaccccccccccccctggttttgggaccttgggtggcccggcaaaataacccggtttgggcaacccggggggagaggagggttttttggggggggggggggccccctttgggggtaaggaaaccaacgggggggggggggccgtttttggggggg

SEQ ID NO: 176975 - DNA, 754 bp, Zea mays
  unsure (1)..(754): unsure at all n locations
  Clone ID: MRT4577_92992C.1
tcaccatccgctccttgacttcctcgctggcccataaatatatatctatctatcgccatcgagcaattataatctcacagaataataaaaatcatggggcaagcctcacggctcgtcctcctcgccgtcccggcgcaggtcgccggcatctgctctcgcaccccgttcccggaggtgtgcacgtccaccgccgggcggcacgcgtccaagtacccggtcatcgacaacctggccgtgctgaacatgcaagtggacgcgttcgccaagcgcaccgcgcaggcgcgcaagcacgtcgcgaagtcggcccgcaccatcccgccgcagcagacgcaggcgctcacgttctgcgacaccatgtacatgaacacgcaggacaccatcggcgcggcgcagcgggccatcacgttcaaggacaccggcaccgccaagatcatgctgcagctcgccgtccaggacttcgactcgtgcgaccgccccttcacccaggccggcgtccccaaccccatggggaagtttgacaaggagctcaaccagatggccaacaactgcatggctcttgcaaacatgatatgaaccacgcatgcaaccccagcgtgaggtgccatcgcatgcagggaatgcttgcattcatttttcatttaattaagaattcattgaaattatgagttatatatattgagtaactctatgtatttgttccaaaaaaaaaaaaaaaaaagactctatggaaaaaaaaaaaaaaaaatttgcggnc

SEQ ID NO: 176976 - DNA, 572 bp, Zea mays
  Clone ID: MRT4577_92993C.1
gcattacttctgcaataatgagcactttcataacatcagctttcaaagaaagaaagaaggaagacactgttcttctaattgttagtgaacaactttacatgttgtaacaggtcatagctaccaaaatactttcactgccattcttgttctagaaattgcagtatactactgctataataaacaagggttcatagtcactagctcgccataaaatggttgttatagtgtttggatacgattggagaggtacagtaggcagctaaatccagagtgatgtgtagcaactcatcagtgcaaggcttatattaagcctcgtgtgacaaattctagcattcttttagctcagatcctttcatctggatgaacaagttatatcaaggtgttaacaaaaccaggcatgcaccattatatttataaaagtaaggtcattctttcttgcctttgactacctctgtaaatgcacggcagaattctataaactgaattgcagccccagtatcctcgtcatcaagctctgcgcctgcaattttagtgactggggtacccctgggtcgcacagttttactattgag

SEQ ID NO: 176977 - DNA, 527 bp, Zea mays
  Clone ID: MRT4577_92994C.1
gtgctgaacatgcaagtggacgcgttcgccaagcgcaccgcgcaggcgcgcaagcacgtcgcgaagtcggcccgcaccatcccgccgcagcagacgcaggcgctcacgttctgcgacaccatgtacatgaacacgcaggacaccatcggcgcggcgcagcgggccatcacgttcaaggacaccggcaccgccaagatcatgctgcagctcgccgtccaggacttcgactcgtgcgaccgccccttcacccaggccggcgtccccaaccccatggggaagtttgacaaggagctcaaccagatggccaacaactgcatggctcttgcaaacatgatatgaaccacgcatgcaaccccagcgtgaggtgccatcgcatgcagggaatgcttgcattcatttttcatttaattaagaattcattgaaattatgagttatatatattgagtaactctatgtatttgttccaaaaaaaaaaaaaaaaaagggttagtatgtcacgaaaaaaaaaaaaaaaaaaggggcggcc

SEQ ID NO: 176978 - DNA, 825 bp, Zea mays
  Clone ID: MRT4577_92995C.1
tctatctatcgccatcgagcaattataatctcacagaataataaacatcatggggcaagcctcacggctcgtcctcctcgccgtcgtggcgctgctgtccgccggcctcctcccgcaggcgctggggaacggcaagggcaaggtgcatcacggtggcgccgtcaacccgcaggtcgccggcatctgctctcgcaccccgttcccggaggtgtgcacgtccaccgccgggcggcacgcgtccaagtacccggtcatcgacaacctggccgtgctgaacatgcaggtggacgcgttcgccaagcgcaccgcgcaggcgcgcaagcacgtcgcgaggtcggcccgcaccatcccgccgcagcagacgcaggcgctcacgttctgcgacaccatgtacatgaacacgcaggacaccatcggcgcggcgcagcgggccatcacgttcaaggacaccggcaccgccaagatcatgctgcaggctcgccgtccaggacttcgactcgtgcgaccgccccttcaccccggccggaagccggcgtccccaaccccatggggaagtttgacaaggagctcaaccagatggccaacaactgcatggctcttgcaaacatgatatgaaccacgcatgcaaccccagcgtgaggtgccatcgcatgcagggaatgcttgcattcatttttcatttaattaagaattcattgaaattatgagttatatatattgagtaactctatgtatttgttcctgacctgcaactatttattcattagtatgtcatgaaacgaggtagagcgcctttcattgccaaagaaaaaaaaaaaaaaaaaa

SEQ ID NO: 176979 - DNA, 1029 bp, Zea mays
  Clone ID: MRT4577_92996C.1
tcactcctttgggcgattgggtccctcgaggccggccccggccgggaccatccgctccttgacttcctcgctggcccataaatatatatctatctatcgccatcgagcaattataatctcacagaataataaaaatcatggggcaagcctcacggctcgtcctcctcgccgtcgtggcgctgctgtccgccggcctcctcccgcaggcgctgggtaagggtaggggaggcaggggacacggtggcgccgtcaacccgcaggtcgccggcatctgctctcgcaccccgttcccggaggtgtgcacgtccaccgccgggcggcacgcgtccaagtacccggtcatcgacaacctggccgtgctgaacatgcaagtggacgcgttcgccaagcgcaccgcgcaggcgcgcaagcacgtcgcgaagtcggcccgcaccatcccgccgcagcagacgcaggcgctcacgttctgcgacaccatgtacatgaacacgcaggacaccatcggcgcggcgcagcgggccatcacgttcaaggacaccggcaccgccaagatcatgctgcagctcgccgtccaggacttcgactcgtgcgaccgccccttcacccaggccggcgtccccaaccccatggggaagtttgacaaggagctcaaccagatggccaacaactgcatggctcttgcaaacatgatatgaaccacgcatgcaaccccagcgtgaggtgccatcgcatgcagggaatgcttgcattcatttttcatttaattaagaattcattgaaattatgagttatatatattgagtaactctatgtatttgttcctgacctgcaactatttattcattagtatgtcatgaaacgaggtagagcgcctttcattgcctttaaaaaaaaaaaaaaaaaaaaaaaaaaaaaaaaaaaaactcttagattaccatggcgttatgtgccgtgatgcgacgtattaagttgttatctagaaggctcccttagaaggtgcttgaaccaaagagcggccgctctagagga

SEQ ID NO: 176980 - DNA, 1230 bp, Zea mays
  Clone ID: MRT4577_92997C.1
tccacctcctgtagctacagttccgctggggactggaaataacttgccatattcttttggatggggaaagaaaaatcctggaacagattatgattcggtcatatcatttcttcagttggtaagagaatcaagagagatgaacattgacagctggcacattgtcatgagaatggagagcccaaaagattctccttgtgatccaattgcacctcctgacttgcctcattctttgcatgcatttcgacgtatgccaaagacagatccacaagatatggagtattcttatacatatcgtgggggattttggaattacttcagtatgggaatggatgcccaagtgtcttatgcatttcattctcagaggaaactgcatccagagaagttcaagaatcagttgtccaatcagaaaacatacttgaagctggcatgcacacaaggatggttttgtgcctctttgtttcatccaatgtcacggaacattgcttgccttgcgaaagtgaagataatgaaaaaatctggaaaatgggaaaccatggaaattccacaaagtattcggtccattgtttgtctcaatttgcccagcttctctggtggactaaacccttggggaacaccaagtaagaggaagcaaagaaaacgagacttggtgatgcctccacttgtggatgatggccttctggaggttgtgggtttcaaagatgcttggcatggccttgtcttgctatctccaaaaggccatggaactcgccttgctcaggctcaccgtgtccgattcgagttcctcagaggcgcaactgatcatgcttacatgagaatggatggggaaccctggaagcagcctcttcccacggatgatggcaaagtcgtggtagagatctcccatgctgggcaggtgaagatgctcgcgaccaaagactgcatagccaaaggggtccatgaccatgagtcgtgcccagctatttcaacggttcatccagagtccatctacaacgacatgaacgatgacttcgaggaggaacggaggaactttggtgccgccttgtcgtttcgatacttgagtgatgtgaacaaacaataagaactcatgtttttattgagccttgggacaggttgcttgcatagggcgtagcaaagtagtttgatgcactaacttatgtaagattgtaagttgcccatgtaagataacttttgctggcaatacaacggattctgggttgactgtttgtatcc

SEQ ID NO: 176981 - DNA, 406 bp, Zea mays
  Clone ID: MRT4577_92998C.1
gcagagagctatgttttccccattgtcgacccacactattgcatactgagccccagggtcgcccagcagccatggcgcccaaactctctgctcccatcgtactccttggcgcagtgggagaagctaccatgggcgccacccgacctgcagcttcgccttgccgacgcccagaaattgcagcatcagctcctaccctctctacatggccgacgctcatagctccagcagacgctcctccatacttcccatggcgtactgcatcagacgccttgaagcaaccacgccatggcttgcgactcggagtcctacctgcttgcatgctgatgctcagtgcccatggtgcttgataggtgctcgacgaaatgtgcggcaaccacgtcggcttcgtgcactgtcgactcgctgg

SEQ ID NO: 176982 - DNA, 372 bp, Zea mays
  Clone ID: MRT4577_92999C.1
ctccggcaaaaaagttgttgaagcaaccgtttttcaagcaagctcgttccactgatttcattgcacgaaagcttttggaaggattacctggccttggttttagatatcaagctttgaaggaaaaggatcaagatttaatggctcaaaagaaaatgtccgatggaaagaaagaagaaatctcgcaggatgaatacaaaaggggtatcagcagctggaactttgacatagatgacctgagatcccaagcttcactgggcacagaatgtgaagacaatatatcatgcaaagattcagatgtatctttctatgactcggacagcttacaggatcaagcaccagaagtgccacatttgtcgaaagatttctcaacga

SEQ ID NO: 176983 - DNA, 451 bp, Zea mays
  Clone ID: MRT4577_9299C.1
ggtaaccccattcgaaaacagaagactatttaaagtgtaaaaaattgagtttgcctgtatagtctaaaaaacctgtgtcatccactcccaaaacttgggggcgctgaagtatgtactttttttagatagaggggttggccaaagaagtccactccaggaggaggatccctctctgctgaactcttcacacggtgcatggaaaacgtgttgcgcctctccttacacagactcgcaaagccacctgatgtcctgctgccgtcttatccctatgaagctgacgtcccagaaacacatcccctcatatactgcgccaggggctgacttcagcatcggtgctcgctgtaggtgtacaccgaccacggcgatgaccaaatcgttgctaatactaggcagcgcggtcgggtcatacctgtcggcatgatggtcatctgcgcctgggctgaaccttatc

SEQ ID NO: 176984 - DNA, 131 bp, Zea mays
  Clone ID: MRT4577_929C.1
tcgtgtacgcgtgtcgtctattcgaactggcagctatggcttatgagaacgtccatatcaacataggcgatgtaggctacttgcgctacgatacgtatacaaccttatgacacctggtctacaaactggag

SEQ ID NO: 176985 - DNA, 1466 bp, Zea mays
  Clone ID: MRT4577_92C.1
cggacgcgtgggcggacgcgtgggcggacgcgtgggtgcaccgcaagtaacccaacactgtcttccaatgcaagtgactgcaagtgacggccccgacccatcatgcgccaggcgaatcaaaccactacctgatttgtttaccccccgaaaatttgccgtctcctcgtctcgctcctctccctgcgcagcccccagatccggcaccgcccgctcctcgatccccgcaccccacgcccgcaggccgggaccggcggggtcgcgcgccgggtaggaggaggagaagaggaagggcggtatggcggcgccgccggcgagggcccgggccgactacgactaccttatcaagctgctcctcattggagacagcggtgttggcaagagttgcctcctgttgcggttctctgatggttccttcactacaagctttattaccacaattggtattgactttaagatacgaacgatagaattggatggcaagcgtataaagctacagatttgggatacggcgggccaagaacgcttccggactattaccaccgcgtactaccgaggagctatgggcatcttgctggtttatgatgtcaccgatgaatcttcttttaacaacatccgaaactggattcggaacattgaacagcacgcctctgataacgtcaacaagattttggttggcaacaaggccgatatggacgaaagcaagagggctgtacctactgcaaaaggacaagcacttgctgatgagtacgggatcaagttttttgaaacgagtgccaagacaaacctgaatgtggagcaagtgtttttctccatcgcacgtgacatcaagcagaggcttgcggagactgattcaaagccagaggacaaggcaatcaaaattaacaagccagaccagggttccgaggcaccagctgcccagcgatctgcttgctgcggctcataagcagatgcacgatggccatagcctttggttatttgacattatttatttctcgcttggctgttataggaaggatttgaagaagccacttatgatataccgatgtggttgtactcgtggttgcttccattctttgaagcaaccacctcttgctgttgacgtagctattgctgttgctattgctgggagctattgcactcttgcattgggatccgttggaaaaactctcccctccctacagtgtgtaatgaatgaaatccatgtcgttgggtttgcatggaaaaaaaaaaaaaaaaaaaaaaaaaaaaaaaaaaaaaaaaaaaaaaaaaaaaaaaaaaaaaaaaaaaaaaaaaaaaaaaaaaaaaaaaaaaaaaaaaaaaaaaaaaaaaaaaaaaaaaaaaaaaaaaaaaaaaaaaaaaaaaaaaaaaaaaaaaaaaaaaaaaaaaaaaggggggcccgtttaaaaaaaaaaaaatttacttacggggggtgggaaaaaaaaatttttttttaggggcccccaaaa

SEQ ID NO: 176986 - DNA, 424 bp, Zea mays
  Clone ID: MRT4577_93000C.1
tgggtcgatccacgcgtccggggaagactatgcggtgggtatgggtccatggcaaattccaaattccacctttgtgacaccagttagggcttgtagagttggagctggaatattgctgtgtcaagtccgtgaaccgaaagaatgggaagacgatgctttggatttacctcatcaaagaataggattttgggaatattatgcgatcagatggtaccttttgatacttcttttcattggatactgtgagagaactctttcatgctgctgggctaatagagatggagctggaatattgctgtgtcaagttcgtgaaccgaatagaatgggaagactatgcggcgtgtatgggtacatggcaaatttcaaaaacccccttgggacacctgttagggctttgttcggcttcaatttaatccttatgggt

SEQ ID NO: 176987 - DNA, 381 bp, Zea mays
  Clone ID: MRT4577_93001C.1
ctagtgccaactgccaaccaccggcagccgtccgttttccgcaggcgcgaccttccggacagagccgccgcgtcgcgccgacgagcggtccttctgcctagtttctccgcccagcgagcggcgggttcctcggagattcccgctggccgcggggatccatttggtgagttgggagccggagctccgatttggcggtttccctttgggaggtcgtctgattgaccggcggcggcggtttgctttgtggatgcagtgactgctcgcgttgcgcctggatctggtttgggacggaggagtgaaacgcgacggtgatcgtgcgaggtggggacgccatcagtgctctgtctggggtcggtctgttctttggctgcagatctggaa

SEQ ID NO: 176988 - DNA, 864 bp, Zea mays
  unsure (1)..(864): unsure at all n locations
  Clone ID: MRT4577_93002C.1
cctcgaggccggccggngaacagctttctattatctattttctttctagttaaaaaaaaaaagtgaccctccaacaaaccaccccccgcatacccccaaccacgttccaatctagcagacatgggtcgcgagctccagaagaaaaagaataagtcttcaatccccaagaagcgccaaaagggaccgtccaagaagaagatcctgcagaatcccatcatagcgaagcactggaaccagaaagaaacactatcacagaattatcgccgtctaggccttacggcccgcctcaaccatgccactggcggcacagaaaagaccattgctctccttggccttaacgacgaaaaatcatcgcgcgccgacacagccgccggcagcactgccaatgctctgaatattgtctccaaagcgaagaaacctgagaacatcccaacagaagagattgaagtcgagcgcgatcccgagactggtgccattcttcgagtcgtcggtacgctcgagaacaagaacaacccactcaatgacccgctagtcgaaatcgaggatggcgaggaaatgcagtggaacggattcgcaatggtacctgaacacaaagcggatgagccggagaacccggtcatcaagcagctggaggaggcagccatgaatggcgcgagaaaagcacccagaggccagagccagcgagaacaagagtgggtcgaacgattggtcaacaagtacggcgacgactacgctaagatggcgagagacctcaaactcaatcccatgcaacagacagcagcagacatcaaagaaacgggttgtcaaatggcagaagtcacaagcaaaggcataagggatgcggtncagctttttactatgcat

SEQ ID NO: 176989 - DNA, 343 bp, Zea mays
  Clone ID: MRT4577_93003C.1
gttcttcgcgtgtctcgcgcatagatcatacttctggcatccacactcactgttgcttaaatggacccgtaactcgagcccgctcgttagtctctcatcgcaatccactgtggcgttcttctgacagagcagatgatctcctgaaaggcatattctttagaagaaaataatgaattagagacagctcttgatggatcttaaaaaggaaaacatctctattgacccacatgagccatggttaccctctcactatgcccacggcgtgaacactgcaaggtaacaggttgatcttgtctctgatgctcatgggatgaaatatacgcattgtgacctctcatcatgg

SEQ ID NO: 176990 - DNA, 326 bp, Zea mays
  Clone ID: MRT4577_93004C.1
gtccgacggcaaaaaacggggccccccggacaccgggcgccgaacgcaaagcaagacccggagcccccgacccaaagaaacaaagccgggagaaccaccgggggcatgggagcagccagcccatacaagacgacgggggcggggcggcagaccatctgatcagctgatcaattaagagcgcttgctattattcccttgccgtttctgcagtgggccgccccctcacggccgttcgcgggcctcctggtgcatgaggagcttgaacctgccgtccttctttgcagggctgcaacagcttccgggacggtagggccaattttccccat

SEQ ID NO: 176991 - DNA, 145 bp, Zea mays
  Clone ID: MRT4577_93005C.1
cacggcgaaatcgaaatcgaaatcatccggggtcttccagcgatggaagcccgacccagcaggatagagtgctcagaacccaacgagcagcccgagccgaaggaccccggccgggtgttccacacaacatacgagcatgcgaaag

SEQ ID NO: 176992 - DNA, 848 bp, Zea mays
  unsure (1)..(848): unsure at all n locations
  Clone ID: MRT4577_93006C.1
attgggtacctcgaggccggccgggagcgcgcaaatcgttcttttgagtgacccccaagagtcccaagataatcaataaccctttggttcgacatagtcaggaacgactccagatcttgtcgcatttgactatcctgccaaatttctgcttcaggattattcctttccccccttcacacacctcctgtggaaatggcaaacacaccccatggcggcgtcctcaaggacctgatcgcgcgcgatgcgcctaggcgcaaggagcttttcgacgaggctgagaagcttcccgcggttgttctgaccgagaggcaactttgcgacttggaactcatcctgaacggaggtttttctccattggagggtttcatgaaccagaaggactacgatggcgtcgtggccaacaaccgtctcgctgacggcaacctcttctccattcccatctgcctcgatgtttcaaaggagaccatcgatgaggtcggcctcaagcagggcgcccgcattgccctccgcgatttccgcgacgaccgcaaccttgccatcctcactgttgacgatgtataccagccagacaaggagaaaggaggctagggaggttttcgacaaggacaacgacgtagcccaccccgccatcaagtacctctacgagacagtcaaggagtactatgnttggtggtaaggtcgaggccatcgaccgcctggagcactacgactatgtcggtctccgctacacacctgcagagctgcgtctgcactttgacaagcttggatgggtccaaggttgttgctttccagacgnagaatcccatgcaccgcgctcaccgtgagctgactgtccgcgctgctcgtgc

SEQ ID NO: 176993 - DNA, 349 bp, Zea mays
  Clone ID: MRT4577_93007C.1
caccgcctgagccaaatctccgccccctccaccgtgctgtctccgtgcatcgcccgcagtcgcttgcatcgccgccttctccatctcctaccccgccatatagaccccatgccttcttcctgcctccacggaccgtcgtcacaccatgaatgcgaaggtctcttcgccatcgaggcctccgtcttcaagaaggaaaaggtctccctggccttgaggagaatggaggagacagaggcatcaagcagcagtacgacttccggccgattgggcccatcaagtttagtggcgctgttagagacgacgccgtcgtcgacatcccactcaagaacatggggagcaaggcggggga

SEQ ID NO: 176994 - DNA, 136 bp, Zea mays
  Clone ID: MRT4577_93008C.1
ctgacggcggacgttctcgcctctcctctcctcacgcttccggttcacctctccgcatgtggtgtgtgcacgccggaggagacgggttgcgtagataggtgtgaaaccagagctcctgatgggtgctctctccctc

SEQ ID NO: 176995 - DNA, 546 bp, Zea mays
  Clone ID: MRT4577_93009C.1
gacagaccaaacatacaagattaaaacatagtggtagttctgcaaaatacctccgagacccaattttaatcacacaacacagctgaaacaaaatagctccagactgagcaaaccacaaaggttatgttcaagagatggacacctgcagctgagagcagtagctccaaacctatcagaagtttttttatcttcaaagggggctacatagcacaaggagttgctggatcttctcaacggagggaacgaaatatgttaatgatttcccatgaaatacaattggtggagctatggcagcaattatgcaaaaacaaatgtgtatctgcaccattcttcagcgcctcttccctcctcttgatatcctacagccacaaaacagaaggcatgagaacaccaccgatcaagcacaaccacctaaaagttcgttaatgaactgaaggatcataagcaactgattgtaaaaactatgagtacgtggcataaaaacatacattataagaataaaagattctaaacattgtgaaagctcaattataaaaaacattctaa

SEQ ID NO: 176996 - DNA, 526 bp, Zea mays
  unsure (1)..(526): unsure at all n locations
  Clone ID: MRT4577_9300C.1
aaccgtcgacatgggttgcacccaatctgccctaacgggcgccccggtggcccccgggcttttttttttagcggcgcgcaccacctcagaggccgccatcaccttcgggcaggtgagattcgtcatcgcgccctttctcttctacgcccgcggtacaagggttcggcccctcctcctcctgctgtaaagggggcaggaacctcaaaagcgccgccagcacccccgccgacaggcgcgccgcctgcaactgtctctaaaacaccaccaggggcgttaggggactaaacaccggcaactccgacagcatcccctccaattgcggggtcagtatgccctacaccatcagcaccttcacccactgctcctgggtgagctaaaatctanaccacgcccgacgactgccgtctgatcgatcgaccaaccattccgtcgtcgtcgccggccggatcattgatcgttgtnatgaagatatctatcaatctacgcccgatgatcgatggctacttgtctactgctatgtactact

SEQ ID NO: 176997 - DNA, 788 bp, Zea mays
  Clone ID: MRT4577_93010C.1
ccggccggaaggctgtcggctttgcgttatgagcgccgggtcaggggaggggcggaggatcagatcagcagccgcacgagcattgagcgatatggcttctatgtaggatgcaactggacatcgccgtccactcgtctagctattgatgctgaagtcccgatgcttcatgccaccgcgatggtggctggttgatctccgatatcaagaggagggaagaggcactgaagaatggtgcagatccacatttgtttttgcataattgctgccttagctccaccaattgtatttcatgggaaatcattaacgcacaagcagcacctcgaccccctcctcgaccagatgactactgtctcgaggcgtacagtggccactcacctagcgggtgtgtctagctcgtcatcggtctccaatgccacgttcgcgctactactccaatcattgctgacccgtatgatctccactgacttccacaaggagtgcaggcaccttcggtcccatccgctgttaaggagaacacatggttatggtgttccacagactggcattttattcattcattgaaaggcttacctcgcttatggtgttccacagagtgacatgaaactattttcacttatgcaaaagatttgtgcattaagaatattttttatcagagttcactcgaggaatgcaagaattaggataggtagattagatcttttttattggtgtatcctgagtttcctctaataagaatcatgtgtcaccacctgagtcattttataaaaacaaaaaaaaaatttgcggcc

SEQ ID NO: 176998 - DNA, 479 bp, Zea mays
  Clone ID: MRT4577_93011C.1
gccccattgcggctttcaacctgggttaagccaaggggtttgtctcaaaacgttgcaacctttcaaaaggagtggcccagaaaaaatttcccctgaggaagaagccatggcaacagccaatgaatttgaatgggtttaatcgtttaattgggtgtaattacctgggtgatattttcttaagtgccgtaccgatcgcgcaagtcctggttgaggtgggagcgatcgcccatgacttcaatcagaggaccatgttcggacatggtgacaatactcaccgccgcaacaggcataccaatgcggtctcgaaaacggccaatgtcaatgcccagcaagctacagagcataatgcggatggtggacttgtgggacaccaccaacacattccccgtggtaaaagttggttcaatttcttctagcacctccgagctacggcgggcaatatcaatgcccttttctcccccagaaggagcattccaacc

SEQ ID NO: 176999 - DNA, 1849 bp, Zea mays
  Clone ID: MRT4577_93012C.1
atccaccaccacccctatccccatcaacaacgcaaatttctaaaccgctcgctctggtccatccagatccacagtcgccatcgcccccacctctcgtcgtcgtctccgtgcaccactcggcccccactgtcggccgcgcctcccagccacctcgtgccgctctgccaccccgcccgtcctccactgcccctatggctgccatgggcgagcgctgcccgagtagccgaccgccctttccccgccgtcttcagctgccgcgcgctgccccgcctccccgccaggcctccactgcccacttctccggcggctacagcggaaggcaaggagaaggacagcgggcagcggtagctggatctagcaagcacagggcgtcttctccatccgccacctctcggcgcatcatcagctgagagtttcaggcatttgctcaggtgttttcatttcataatatagctactactattttaatgatgggtaagagattaggtggttgtactgtacaaaatattcatgtgttttactggccatcaagtttcccttaaattaatgcctaattgcatttgttggggttacgtactaatgccttgaaaggactgtgtaatattccagaatattgtgttcattttcataagtaaaatttgtttgggtgaagttgatttttcacatatatttgagatctgtttagacaagccttgatgaacttggttgtttagcatagttcggctttcacaaatcacaatgtttagaatctttttatacgcatggggcttatatgatgaagcttcactgctccactactatttgacatacaatatgtttagaatgttttttataattgagctttcacaatgtttagaatcttttattcttataatgtatgtttttatgccacgtactcatagtttttacaatcagttgcttatgatccttcagttcattaacgaacttttaggtggttgtgcttgatcggtggtgttctcatgccttctgttttgtggctgtaggatatcaagaggagggaagaggcgctgaagaatggtgcagatacacatttgtttttgcataattgctgccatagctccaccaattgtatttcatgggaaatcattaacgtaagtttgccactccttttatctaaagtaatcaaagtcattagttattatgggcttggataatgtgagtaagcaccattacatagatagccagtgatgttgtctgctggaaaaggagaaatcaatgaattatagattgggatcacagaacttcagagaggaaactaggttgattgttcaatattttttaagaatacttagtatcctggataatatgtgaaacaaacaatatgtgattactgacaccttgtgcgagcagatatttcgttccctccgttgagaagatccagcaactccttgtgctatgtagccccctttgaagataaaaaaacttctgataggtttggagctactgctctcagctgcaggtgtccatctcttgaacataacctttgtggtttgctcagtctggagctattttgtttcagctgtgttgtgtgattaaaattgggtctcggaggtattttgcagaactaccactatgttttaatcttgtatgtttggtctgtcgatcttgttgtcattactgaaggagttttgatctgataccacatctctggtagctacaaacctacaagctttgactaggccgatgctaggtcgattatatcttttttactggtgtatactgagtttcctctaataagaaccctgtgtcaccacctgggtcaattttactaaacattttgtttgctacccactagccttaaatacatactacaaagtctgatttactc

SEQ ID NO: 177000 - DNA, 217 bp, Zea mays
  Clone ID: MRT4577_93013C.1
ttccggggtgggccaacccttccaaccaaccaaggcaagaggttttggagaatgggttttggattaaaatttgcacggggcggtctttgagaacggagttcaaggacacttttacacaagagttttacctccaatttggtggtgggttgtgaccattttttgttggggccccctgacaatttaaaaaatcgggtttgagaaagaattgccctttttt

SEQ ID NO: 177001 - DNA, 1852 bp, Zea mays
  Clone ID: MRT4577_93014C.1
agcagtggtaacaacgcagagtacgcgggggccggcgccctatcttccgctccttccgttccttgcgctcggcgcgcaggtggcggccccatctttcgcttcctcccttcctccgccaccactcaccccttgatccgttctgcctcctaaatttggcgtcaccaagcaaccccactcatgccgttctcaaaaccctacccgaccaatccgtccaattccaaggctgtcggctttgcgttatgagcgccgggtcaggggaggggcggaggatcagatcagcagccgcacgagcattgagcgatatggcttctatgtaggatgcaactggacatcgccgtccactcgtctagctattgatgctgaagtcccgatgcttcatgccaccgcgatggtggctggttgatctccgtgagtttcaggcatttgctcaggtgttttcatttcataatataactactactactttaatgatgggtaagagattaggtggttgtactgtacaaaagattcatgtgttttactggccgtcaagtttcccttaaattaatgcctaattgcattttttggagttacgtactaatgccttgaaaggattgtgtaatattccggaatattgtgttcattttcataagtaaaatttgtttgggtgaagttgattttcacatatatttgagatctgtttagacaagccttgatgaacttggttgtttagcatagttcggctttcacaaatcacaatgtttagaatctttttatacgcatggggcttatatgatgaagcttcactgctccactactatttgacatacaatatgtttataatgttttttataattgatttttcacaatgtttagaatcttttattcttataatgtatgtttttatgccacgtactcatagtttttaccatcagttgcttatgatccttcagttcattaacgaacttttaggtggttgtgcttgatcggtggtgttctcaggccttctgttttgtggttgtaggatatcaagaggagggaagaggcactgaagaatggtgcagatccacatttgtttttgcataattgctgccttagctccaccaattgtatttcatgggaaatcattaacgtaagtttgccactccttttatctaaagtaatcaaagtcattagttattatgggcttgggtaatgtgagtaagcaccattgcatagatagccagtgatgttggctgctggaaaaggagaaatcaatgaattatagattgggatcacagaacttcatagaggaaactaggttgattgttcaatatctttttaagaacacttagtatcctggataatatgtgaaacaaacaatatgtgaaacaaataagtatttaaccagccgcatagaagcatgtttgctttgtgaccctagaaaccagccaggcacaagcagcacctcgaccccctcctcgaccagatgactactgtctcgaggcgtacagtggccactcacctagcgggtgtgtctagctcgtcatcggtctccaatgccacgttcgcgctactactccaatcattgctgacccgtatgatctccactgacttccacaaggagtgcaggcaccttcggtcccatccgctgttaaggagaacacatggttatggtgttccacagactggcattttattcattcattgaaaggcttacctcgcttatggtgttccacagagtgacatgaaactattttcacttatgcaaaagatttgtgcattaagaatattttttatcagagttcactcgaggaatgcaagaattaggataggtagattagatcttttttattggtgtatcctgagtttcctctaataagaatcatgtgtc

SEQ ID NO: 177002 - DNA, 372 bp, Zea mays
  unsure (1)..(372): unsure at all n locations
  Clone ID: MRT4577_93015C.1
acttacctattcctattcttccccttntccccaagggtagaacacatcctttctgtgtagggatacacctcaanaacagccacatatccctagaaaggggatcaggagagaacaaaaaaaggccccaattgtcatccatcttcctccgccccaccccaaaagaaattgccgacccctaagcggttttaatttgccacccccaacaccttaaattccgggaccaaaaacataccatacgaccctctgagcatccaacccccaaaaggcctgttacaatttccccagaaaaacaaaacccaaaccctttcggggcgcaacacaaaaaccctcaaaaccctcccaatttttcaccaaaaattaaagccggacccc

SEQ ID NO: 177003 - DNA, 588 bp, Zea mays
  Clone ID: MRT4577_93016C.1
gccggccggtccgggctctttctttaatccatcccttataatcatgtccaagaaggccgctcccaaggttgttgaaaaagttactctcggtcctcaagtccgtgaaggtgaacttgttttcggtgttgctcacatctttgcttctttcaacgatacctttgttcatgtcaccgatctctctggtcgtgaaaccatctctcgtattactggtggtatgcaagttaaggccgatcgtgatgagtcatccccttatgctgccatgttggctgctcaacaagtagctgccaagtgtaaggaacttggtatcaatgctcttcacattaagcttagagctactggtggtacaggtactaagactcccggtcctggtggtcaagccgctctccgtgcccttgctcgtgctggtatgagaatcggccgtattgaagatgtcactcctattcccaccgactctactcgtagaaagggtggtcgtcgtggtcgtcgtttgtaagcgcattgcaaacttttgttttattatgtccatttcacatacacaaataaaaagtactcttcatatggcaaaaaaaaaaaaaaaaaaggccccta

SEQ ID NO: 177004 - DNA, 276 bp, Zea mays
  Clone ID: MRT4577_93017C.1
tgttggtctggaccaggtgatgtacatggatgggcaagaaggagaaggatagaagcaacattgcaactccaaacatagtgtgtgtctctacttatactatctgtaacgtttcgaagcgcgtcaatgtttattatcattcaatgcgcctactgaaaatttgacgtgcttggtgaggattgttagattgtatatgcctcctattagtattgtgatttttgtaacttggtgagtgtacataaagaagcatgatttttgagttgttttgaaaaaaggaag

SEQ ID NO: 177005 - DNA, 491 bp, Zea mays
  Clone ID: MRT4577_93018C.1
cctctcctctactctgcttcacgcctcgccggccgatctagctagctatcgcagaccccgccggcccggccctcatcgatctctcgtcgcggcaatggccatcacaccgcgcgctccccgatgattgatccactccggtcgccattcccgccgccatcatcagctcctactatatattagcccgacgaccccgttcatcttcctcttgtagttttgtccagcgcgctccgctgacgcaatgaccaacaacaacaacggcggcaatgacacgaacgccgcggcgagcggctggctaggcttctcgctgtctcctcacatggacgagcaccagctccagcagcatcagcagcagcagcatggcctcttcttcccttccgtcactgcggcctccgccgcctcgtacggcctcggtggcggcgtggccaccagcgcatcgccgtactacacgccgcagctggcgtccatgccgctcaagtccgacggctccctct

SEQ ID NO: 177006 - DNA, 211 bp, Zea mays
  Clone ID: MRT4577_93019C.1
gtttacgaactacaaagaagctaataaaaacacttgtattgaaagtgatgtgctccacctccaggtttgcattgtcgtattttgctacttttcaacagagaagccctggcttcattggctacagaagttattaccttttcttttcatgtgtaattgtctctcattggttgactatacctagtcgaatttgttgtgtaagaccttgatggcg

SEQ ID NO: 177007 - DNA, 1050 bp, Zea mays
  unsure (1)..(1050): unsure at all n locations
  Clone ID: MRT4577_9301C.1
atcgcaagggattactttgtggtaatgcaatgcagcataatacccgttacgccatatttgctttgtttgagctgaagatcttttcaggtgagcttatgcttctgcaccttttccttttataacaaaattttggaactagaaactggaaatgaacagtaaccactaaaccagaagttcttgcatcagctccaggctgtgtagttgttttgcgactattcttgtcttgatagaatctgcattcttgacttgctgcttgtctggcacacattcaacatcttatacatatcattattctttagttttgaagacatgaactgtcgtgtggatgaggtttcacgtgcttggccaacgtcagtaacaaaacggcagcaggtgggcatctttgaagcaagtattggttgatgagctatgaattctcagggaagacggcccgaatgaacttcaagaaacgctccgagtagaactgggggtccacaacagagatcgagtccgagtcatattgcatggaattcacgatcgattttctttgtcatattgtactattgcaaatatgtcaatgatgcccaggtagagaacatcgtacacctcacgaaatgtctcgacagttgacagataaggaaaaggccaatgcagctgatgaggagttgaaaaccttgatttgctagttgaacatgtagagtgatcttgtgatgcttctccaaccagtgagagtagtagctgatgatatgctagttgaacaaaaaaaaacaaaaaaacaaaattttgctttatgcggggggaagggtgacacggaacgacatgctttatatagtagagatggagtgttcttatcacttggagccttggggtgagacaaaaaaagaacaatggaacgctcgtgtcctggggcttgttgtggagcacaaaatattttattcttggtcttttttcaaacttaaatagatgcaaatgtgtagatgagggccttccctctgataaaaaaaaaaaaaaaaaaannaagggcggccgccgactagtgagctcgtcgacccgggaattaattccggaccg

SEQ ID NO: 177008 - DNA, 800 bp, Zea mays
  unsure (1)..(800): unsure at all n locations
  Clone ID: MRT4577_93020C.1
gaactcactcctgttgttgcttctgatgaactcctccttgccaagaaactactacactgaaaaggcatcggcacggcgggcggtgaggatagcgtagcatagcatagcataccgcaggcgctgctggttgacaaatggcaagcttattcccacagctcgcgcagacggagcacggcgtagccggcgcctcccatggcgcgccgagcttcctgttctgcaatggcgcaggtgcagccacggcagactcagcctcgctagagacctcgtccggtgttctcgacacctccccacgaggcggaggcgctgattctggcggtaggaaggcccggacgaagcccagggaagacagcgccagcgccagcgccagcttcagcttcagctctgcgcactccaaggactcgagctcgaagggaagcaccaagaataggggagggaaaagaggcagaagcagcaaggaggtagacgacgacgaggaggacccaaggggtacatacacgtcagggcaaggagagggcaagccacggacagccacagccttgcggagagggtgaggagggaaaaggatcagcgagaggatgaagggtgctgcaggccctggtcccttggctgtgataaggtcactggaaaagccctcgttntgaacgagatcatcaactacgtgcagtccttgcagaaccaaggtcgagttccttttcatggaagaatcgcttcactgagccctgtgctgtatggctttggcttggacactactgacgctntcagcactgatgaccatactactcaaaaatcgaaaggatgct

SEQ ID NO: 177009 - DNA, 589 bp, Zea mays
  Clone ID: MRT4577_93021C.1
ttccctctgctgcgtctagaaagggggatagagagagagtagagagtagaacactgagagtacagagagaaccacaggcgcgatagacccgcgagaggctgccgccatggcgacctgagacatagcgactgggaaagaacgatacggtgatggactccatcgaaccgatcaggcacgactgggacgcacgccatctactcggaagaaggcacccaccggcgcccgccgacggttgacacggccgacaacgccgagcgccgcgccggcgcggagatcgataccatgaagaagcacaacgctgatacgaacaatgctagcattcaggcggacatctcctcaacaccaagcgcctttacgactacaccaaaagacctacccatgagcgagatcaagagatctgaataagaatctcatgcatgcatggctaacataagaagctgacacaggcacaacttgttcacatgatcaatgataagccacaacagattcatgagtatgaatcatgcgaaggaattctcaaccaggagatcattagcaagcttaatagggccctgtgaaccaagttgcgtggcaagaaacatcttcccta

SEQ ID NO: 177010 - DNA, 1482 bp, Zea mays
  Clone ID: MRT4577_93022C.1
atggatcctaagggaaaggggatggtggtcaacgacaaggaaaatgagtccgtcctcaacgagccaagagacgacaagcctactgactcaggctcgagtcaaaagaagagacaagggaagaagaagagggatgaatataataaggtgagcggcttggacaatgccaagcaaatctgggacaccctcaagatatatcatgagggaaacgacgccaccatgatcaccaaaatggagttggtggaaggcgagctggggagatttgcgatgatcgggggagaggagccaacacaaacctacaacaggctcaagaccctggtcaacaaaatacgaagctacgaaagcacaagatggacgaatcatgatgtcgtccgactcatgctaaggtcatttactgtaattgacccctatcttgtcaatcttattcgtgaaaaccccaggtacacaaagatgacgcccgaggagatccttggaaagtttgtaagcgggcgcatgatggtgaaggaggctcgatacgtggacgatgtactcaacggtccactacccgtctatgagccacagcccgttgctcttaaagcaaccagcagcagggaggtgctaccaagcaaggtggcacaaatagaagctgctaggctaaatgaagatgaaatgacactcatcatcaaacgcttcaagaccacactcaaaggacgcaaagagtacccctccaagaacaaaacaaggggaaagcgctcctgcttcaaatgcgaaaagtacgggaagagggagaagaagaaggtttacaagaaggcgaagggcgaggcacaccttggaaaagaatgggattcagactgctcttcatccgactccgacgatgaaggactggcagcctcggccttcaacaagtcttcactcttccccaacgaacgccacacctgcctcatggctaaggagaagaaggtacatattcgagattcccctaagtactcttcttctagtgatgaggaatcttccgatgatgaagtagattactctagtttatttaaaggtttagatagagcaaaagtagagaaaatcaatgaattgattgatgctctaaatgaaaaagatagactgctagaaaagcaagaggatattttgtatgaagaacatgacaaatttgttagtgtacaaaaatctcttgctttagaaattaaaagaaatgaagtcctatcctctgagttgtctgcttgccatgaatctgtctctagtttaaggagtttaaatgctgaattaaatactaagctagaggaagttaataaatctagttcatgtgtagagcatgttgttatttgtaatagatgtaaggattttgatgttgatgcatgtgatgaacatcttatttctattaccaaattgaatgatgaagtggcaagtcttaatgctcaacttaagacttgcaaaagtgattttgataaaataaagtttgctagtgttggggacttgttctcaaatgctatgagttaa

SEQ ID NO: 177011 - DNA, 410 bp, Zea mays
  Clone ID: MRT4577_93023C.1
attgggtacctcgaggccggccgggcaaaaacatcccaaaagcgggcgcaaacaacgctcgtttgcaccgtgcaacccacccacatccaccacactgagcatcgtagccagccacccatccagccagctaaagccgcacatggtcgggatcacgttggtgatcaacttccaccgacgatcctcgacgtggacagccacgactggggggaggacagcctcagtctcaccgaactgttatagcgacttctccccaccacatccagaaacaagctcatggactaagatgtgctaggtgcacgcgcctggcatgacgctgtgcgaggtgaccgacttgctcatatattgctaccatccaccctgaagtgacatccgccggcacgtccgaggacgctctcgactgtctcctgatc

SEQ ID NO: 177012 - DNA, 387 bp, Zea mays
  Clone ID: MRT4577_93024C.1
tggtggctgatggatttgtatccggccggcagagcggataacggcaaggaacagcgttggattgagcggcgctcggatgacgacggtggacgcaaaaaatatgtccaccatgtggttccaatatcggtcctgctctgctacgattccttggtggccgatcatctgcgacgcgccgctgggtccggcttgagtccgacccctcgcgacgactcgccatgcttggttctacttcgttcagtcgctccgtagttgcacccgatttctcctgatcgcataagctcacacaagagaccacgactctccgggttcggctagctggcgatcgatgatggtccctcttgtgcgctctctggatggtcatggctgctcgtccgtgttcggctgtta

SEQ ID NO: 177013 - DNA, 884 bp, Zea mays
  Clone ID: MRT4577_93025C.1
gacggcgcgcgctggagggaggtcatggaggcctgcttcgcccgcgtggacggtgaggtcgccgtcgtcgagggcgaggtgaacaacgccggccacacggtgggctccaccgccgtcgtggccgtcgtggggccccgtcacatcgtggtcgcgaactgcggcgactcccgcgccgtgctctcccgcggcggcgtccccgtgccgctgtcttccgaccacaagccagataggcctgatgagttggaaagggtagaatcagcgggcggcagggtcatcaactggaaggggtaccgtgtcctgggggtgcttgcgacgtcaaggtcaattggcgactactacatgaagccattcatatcagctgaaccagaggtgaccgttacggagcgtacgcacaaagacgagttcatcatcctggggagcgacgggctgtgggacgtcatgtccaacgaggtggcttgcaaggtggcgaggaactgcttgtgcgggcgcgcggcttccaagtaccctgaaaccgtccacgggagctcggccagcgatgccgccgcggtgctggtggagttcgccatggcgcggggcagcaccgacaacatcagcgtcgtggtggtggagctgaaacgtctgaagtggaagggcggtagacagaatggtaggacgtagtctgtaggagcctccggctcgtcgcgaaatataagcgtgtcgacagagccagagaggcaaagggaagcagccgagcatatgacggaatgctgtaaaaaaaaaacagagagagggctctgactctttgagagctgcacttgtgttgtgaccgctgtattgcgttggttacttggttctttagttcaatactaacaaaatggcattccggccaatggaagtagcaggaa

SEQ ID NO: 177014 - DNA, 365 bp, Zea mays
  Clone ID: MRT4577_93026C.1
ggggcctctgagaacatccaatgcttgccagaagcctgtccccgccccgtacgatggcgaccgccgcaacgccaaataccggcagcgggtttcgcggctcctatcgtagtactagctagcatataccgccataccatatccattcgcctgattgccggtcgctttgcgcaggttcacccggcctgccggggcatgggtgcggatcctaccacgatccacacaattgtaggcggctaatcagtccttgaggacggacgtcaatggcaggccgatgagcggccgtctcgaaggggtcgaactgcacgccgatattggacttgcaggcggaccatctgtgcttggacgatatgggggggaagagcacg

SEQ ID NO: 177015 - DNA, 699 bp, Zea mays
  Clone ID: MRT4577_93027C.1
ctatagattcagctgccacagagcaggttctaacagcaacgagccaacgactcgcgcgcatgaagaatcgaatgttggcaagctaggctaccaagcactcgctgtcaagcctgcggcgccggcggcggactggctgtgaagcctgcgttgcgtggtatagtcgattagtctcctgatcattaagccctagctaccaaccacatcttggcaagcaactctaatcaggtgtgttcaggtgtcacgtcacgcacgctcatggaacaccgaacacgtttgataacagcaaatggccaaataatgctggaccgcgcgcgctgcattggcatgggaggtctgaggtcatgggctcatgggtaccgtgacgatcacaagcgtcacgcgtgccttagcgcccgctgctcgcgctgctgctgccatggtcttggcgaccgtccactggcggcaggcggttcatcagcggcaacccggccgcgacggcccgaacgtcggcgtcgctgctgctctggagtatgtgcatgtactgcccgaggtcggggaactcctcccccgccgtctccgactccgcggctgaccgcagcagctggtggggcgacgacagcgatgtcgtcgtcgtcgtagcagtagcagtagtcgtcggaaagtcgagcttggcgttggcgccattgaacctgcgagctgcgtagtcgtaggcgcgggatt

SEQ ID NO: 177016 - DNA, 290 bp, Zea mays
  unsure (1)..(290): unsure at all n locations
  Clone ID: MRT4577_93028C.1
acattctgataaaaagcttttgggggggggggggcctctctacacctttcattgncaaaaacaacaaccagagcagcaaatggtttaagcccaacccccaacccctatacaaaaaaaaagggtttcaaaccccgtttgaatccctaactnaaaccccaaaaaaaaacaaaccccttttctttcccttgaaaatatggaaaaaaaaaaagaacttcccatggaactatttttaagggaagtagctggccaaaatttaaatgaaatcctaacaaccagccacccttaagaaa

SEQ ID NO: 177017 - DNA, 375 bp, Zea mays
  Clone ID: MRT4577_93029C.1
gagatcaaaacatttttacatgcaagtgtgaacaggtcaacaatccatcgctgaccttaccaggctaaaaagatcatgctgtttaaaaacttggcacagtatggattcatacaagggtcacacagtggggcgaatcggacaaacgggatttttggtgggccccaaaaatttacgcctagcgtcttacgaaactaacctttgattgttatggccctgaactgtagcgcccgagcctaaattacatcgaggagggaatgaactagggcttgagctacttaatcacccttcgccaaggacagtccaggtagggatatccgacgatcctcacccttttatttgtgccctcactgcgtcctgtggtcattatgtgctacc

SEQ ID NO: 177018 - DNA, 327 bp, Zea mays
  Clone ID: MRT4577_9302C.1
ccggaacggaagggccgggccagagcgacgcgtccgctcatgcttctgcggattgggtttggataaaacaggggctcctacgattgggagggtgggtgagcggatccaaatgactcccatagatgttgagtactgatgattaatatagagcctcgcctggggcacagacgaccactccctccacatagccttttgtacctacagagaggttctcgaggccaagaacatcctcgatcggaaggacacagagggccctcggcttcgggtgtgctaccttatccacggaggaggcgatgcttgacgccatccatgacattgacgggatgg

SEQ ID NO: 177019 - DNA, 931 bp, Zea mays
  Clone ID: MRT4577_93030C.1
cacaaaaagaaaaatgaatcctgatactgggggggcaaatgcggattattgtgctgctgatccttccgctgatgatgaagtgcataatggtgatcaagataaagctagaaaaggaccttcatatgctggtggattagttttggagcctaagaagggtctatatgacaagtatgttctacttctcgacttcaacagcctttacccttcaataattcaggaattcaacatatgctttaccactgtcgagcgttcttctgatggcagtgtacctaatttgccagcatcaaaagttactggtgttttacctgagttgctgaggagtttggtggagaggagaaggatggttaaatcatggttgaagactgcttctggtcttaaaaagcagcagttcgatattcagcaacaagcattgaaacttactgcaaatagcatgtatggttgcttgggcttttccaactccaggttttatgcaaagccacttgctgagctgattacactccaaggtagagagatattgcaaaacactgtagatctggttcagaacaatttaaatttggaggttatctatggtgatacagattctatcatgatacatactggacttgatgacatctccagggcaaaagcaattgcaggaaaggttattcaggaggtgaacaaaaagtaccgttgtctggagattgatcttgatggcatatacaagagaatgttacttcttaaaaagaagaaatatgctgctattaaagtagcactggatggcagcttacgagagaacattgaacgcaaggggctcgatatggtcagacgtgattggagtttgctgtcaaaagacattggagatttttgtcttaaacaaattctgtctggagggacatgtgatgatgttgttgagtcaatacatagttcacttgtccaggtgcaaggagcaatg

SEQ ID NO: 177020 - DNA, 1227 bp, Zea mays
  Clone ID: MRT4577_93031C.1
cattgggtacctcgaggccggccggggttgggtacgatagccgtcagaagaagcaggaatagccggtggcatggcaatggcgggtcggcaacgtgcgcctgaagcagcttcttcatatttgccgccagtgacggcagcggctttgcttctatggaagaattgttgatttacgggacaagagtcgtgctgtgttactattattgtgttatgcaaaggtgcacatgtggaggcaagcgttgattttgccaacctgactgctcttcagaagcatgctgaattcttcgaccggaataaggatggtattattacagcctcagagctctttgaaggatacgttgcaattggatgcgatgccgaatatgccagggttacagccgcatccatcagtgctggtgttggtcctataacaagccctgctgatgcaccactgcctcacacatccatatacgtagaatatatccatagggcgatgcatggaagtgatacgggtgcatacgacgctgaaggaaggtttgttcctgcaaagtttgaagaaatattcacgaagcatgcgaaggtcaggccggatgcgttgacgtccgaggagattgaggagatgattctagcaaatagagacccattagaccctgaatcatgggctgcgcctgaaggagaatggggactaacatacaagcttgcaagtgataagcaaggctttcttcacaaggactctgcaagaggcatatatgatggcagtgtgttctacaagctggaggaacagaggacgtctgcagcaagcgaaaaatgtgatgggagttcagcattcagccagatgcaaccagcatatataataaacacgaaaatgtgttaggaaattactagactgttatgtgaatcgggttttattggttgctggctccgctcccgcccagattacgcagcctgggccggtatagatacatgcccgtctcacatccccacgtatgcaagtaaacagatgaaaaaacacctaggttgcacgaccgtatacaggctggactcacgccatgcaggtaaccattcataagccaaaatatagtcaatgtacgcgctggacctgaacgctgctgaccaggtaaccaatcaggcgaataatgtattgtgcagtataagttacggcttttatgttaagccttcgaaatttgaagtttataaagcacaccattggcatgcgactggacatatgaacataagttaccaagttcatca

SEQ ID NO: 177021 - DNA, 297 bp, Zea mays
  Clone ID: MRT4577_93032C.1
cttgtttatctgcttgtttatgtgcgtgtggatctcctcattcgccttattcattaccatcgcgtgagtccgatcgacctgagcatcgtcataagcgaattcctgtttatgatcgtccgaattctatgtataatccgatagactttaacccgatggctgagaccgttagaaatgtcagctcagaatttgaaattaaaagtacgtccacattctaggcagcgttttcctcgattcgttctgttcccatgaagtcgtagatgggagggttcctgactccgtgtaattcgtctacctaat

SEQ ID NO: 177022 - DNA, 1920 bp, Zea mays
  Clone ID: MRT4577_93033C.1
cagtggtatttaaggataaaaaattgctttctaatggcactgaagctcgagccgctttttgagtagttcgtctgcaattcagatcttttataatggcttcaaaggaattgtctgaaaaaatcgcaaatcccttccctccaccatcgatcgggcttccatggccgccaagcgccgcgcccggcagccaagaaccgaagattccaaggagttgggcctcaatgggggcaacgaaggttccgacgaggaggaggaggagagcagcaagtccgacgcgctgaagcgagccgagcaaccctcgccgccgtcgccggaggatgctgaggccgagagatccggcgaggcctctccgcagaggagcaagccgcgcggttgggttgctatgaagaccaagacgacgacctccaagcgggtcaagaaaccctctccggcgtcggagaaggaagatgaggcgggggactctggtgatttgtcaccggcgagcgacccgctacccgacaacatcgttgacgccgccgacaacaagaggcccgcgacgctgaagccgggcaagaagcgctccccgacgccgcagcaggaggaagagcgcccggagaagcgtgctgcgggatctgatggtgagaccgtggccacgtcgtccccgcagcgcaagaagaaaagtaagaggtccgtcgataaggacaggcgcaaaaagaacaggaatcagattagaaaggcgttgacccaagaagacgaggaccatgacacggtgatggcagagcaagagcagagcaacacctcactgccacaggacgagcacgccgcccgtgaagaggagcaagaggagaagatggcacagcaagagcatgccggtgacacttcacacccgcatgacaaggacatgcgcagcgcccatggagaggagcagcaggatgcaaatcaagagcatgcggatgacacctcacccgcagaagacaatcacagtgtggatgaagaggagcagcaagtggagccgatcccacagcaagagcaacctaatgacacctcacccccacaagagaagaaccgagcccaggaggatgaggagacaggagctcaagtgaatggcaaagccttggaggggaggaatgctccatcaaccaagttgcgcagttttgagtcagagaaaaagccagcggtcgagcgatcatggtcctacgatgacgagctcaagatcctcaatgccttggttgagcacgcccagtcccataacggttctttgccagactcgtcgcatgttttggccaatctcacctttgacaaaattgatgccaatgaggacaagctcactgacaagatccgcaagcttaggacacggtaccgcaggtggcttttacaaggctgcacaccttctgtttctggcagtcagttgtttaagctgtctgaaattctctggggccaagctgatgaagatgaacaggttgagccaacatctagggacttcagtgtagtatcaaaactgtatcctcacctggccaaagaagtcaaagcatatgccgaaacgcacagctcgggtgacttaatcatgggaatggtcatgaccatatgtgataagaaggcccgcgatcttgacgctaagtgcaagaagcaacagattgaaacattcaagctggagttgggccaagcaaacctaaccaacgaattgctctctgcactttcaagtcagacccatgtgaaattctagtaaaggtctctgctatcttttgttttagtgtaatgagtagacgtgctgtcattaggttaatgtgggaccaagaaccttcttttggggtactggaaaactcttatctgttaactagttagttgcttagctttgatgtctgtttctgcatatggaagtagctgttacagctcgatggtggaaaacagtactttaacatttaagtatcatgagcttagtgatct

SEQ ID NO: 177023 - DNA, 368 bp, Zea mays
  Clone ID: MRT4577_93034C.1
ccaagttttaggtttgtaaaatgcctgttaccagtcaggaatgagatattatcttcagatgataaataaaaaaactgggaactgggaattgtaccactatgttgtgtacttagttcttatctaattctaattccttggcttattcttcaataacaaatttctgggaggaggacaatgcactctttctacagtgatgttgtgcgcctacagggtctaagggaaaggttttcacattgcaactcaaacatggacgcggaccaggttagtacttaatcttcaataatatataaaaatggtacaggggcgtcgcgcgatcgggatcgcctcagcaagaagcagcagaaggactccaggaaggcggagaaggc

SEQ ID NO: 177024 - DNA, 330 bp, Zea mays
  Clone ID: MRT4577_93035C.1
aatccggccgtgcccggattttgaactaaaaatgcaacgcgcctaataaaagtagagggtgggtatgaactccattttttttcgaaccaacccctctttttactggatggggggcaagttcgcctcgggacaaaaccctatggggggcaagggtaaagacccatttggtcttcccagcttgaggagaaaatgccaagatatcccttgccgggtttggggttatttcgaaccggtgataccttgtaaaagggaatctggcttgatgggggatcccatgaccaaaaccggtttttttagcccaaagctaattcgtggacatgtcaattaaat

SEQ ID NO: 177025 - DNA, 447 bp, Zea mays
  Clone ID: MRT4577_93036C.1
aaccaataatataagggaattaattagcgggttcggttaacaatccactgtttacaaaaaaatcacaattcctatttttgcccacatatccttatgtccaactatcgcatcgtaaaaaagggctgcctttggccggagcaaacaacagcgtctcctcccggacgtggaaaaggatggccatgttctgctgctggaagttcccaaacgtgctaatcgccccgtccgtttggttccgaatggccaggccccacacgccggaccccgaaatcatgtacttgcccggggggagcaccttgtcggccccgtcaaaggggagcgtaatgctcggaagcacggccgggggccccaacttgggggccggaagcgcaaaccacaggtcgagccccggggagtccaacccgtcaaccgttggcagcgtcgtaaccagttggaactttaccggggggc

SEQ ID NO: 177026 - DNA, 430 bp, Zea mays
  Clone ID: MRT4577_93037C.1
aattatccaaaagactagtgcctgctatgctcgtctgcccgcctggtgccctgtctcgctcagtcgcgcagcccgtagcccaggcttggtctcctcgctcctcccctcatctagctcgaccactcgcgcccacctctctgcacagatggctgatgggaggagccgcccgtctctaggctgggactgtgctcctacaaggtgcaaatctaggtttgctggggatgatggcaagaaggcggaggtggcgtaagatcgccgaccgacccctgctcattggagaaatgggaaggatgctactgaactgtgccgtgttcgagtttgaccaccgctctctatcggtcctggtacgaatctggacgcgagtgccgaggatagtgcccatgaatgacgatgtgctgctagcaaaaatggacatcagatgctcaaaagc

SEQ ID NO: 177027 - DNA, 194 bp, Zea mays
  Clone ID: MRT4577_93038C.1
acgctcacatcttgccactcgctcgctcgatggtaacttaccttccacgaatcgcaacgcctatggtcatgtcgacgcatgcttccatctccacgcgctatctgctgtccgccgcatgtgcgcccggttcaacgactcagcagcttagcactgagttcgcgctgtccttgccgtccacccgattgtcggtcccg

SEQ ID NO: 177028 - DNA, 1013 bp, Zea mays
  Clone ID: MRT4577_93039C.1
agcgatcctaagcggagcgcacgagtggcagcgactggctgcgcggtgatgcctatagcctgctccacgcaccagcgtccagcggcaccacgcctccgatgctcgtgctccccctgcctccctgcgcgactggttgactgcgcgcctgagccgccccacacggcctggggcaccaacgtcttcagcggtccagccctaccccatcactcgctggagagagagggactagaacatgccgccgactgggggtgctgctgcagatgactcttccgttggctcgtcgtcatcggcatccaaggccaagcaccacagttcctatgagtaggaagtttgaaaagtactgaaagaaatcatccactgcactagttgcttgttttctagatcctagatataagagaatacttatagagttctacatgagaaagtttcacggcatctcctctcaagtttatgttgacgaacttcttgatatcatcaagaaactataccagtactatgttgttgctgcaccttcactatgaggcctacaagtgggtcaaatgatgataaggaaagtggattgctacagggagaagagataagaatgttggttcaattgttggtgatcttgaagttattgaggctattgtttcaaacctggagattgaggacgatgaagtcatagacagtgatgaaggagatatagatgggctaaatgcagatggtcagaactactttgacatgtagagtaaggttctagtgttggctgctagatagtggatacttttggacttgtcacttgtgaattttagctgctagtttactaagagtctaagagtggtagtgttgtagtagtactagtactaggctaccagcgtactagtactgctctctggctctctacttttgggcacttgggttgttccagacttctagtgttcctgttcggctgtgccttgtgagcctgtgtgaccagtcagacttctacattttggatgttccctaatccttattactattctataaaaaattat

SEQ ID NO: 177029 - DNA, 443 bp, Zea mays
  Clone ID: MRT4577_9303C.1
ggctcggaactaacatctgtatttatcaagagggcaacaccgaacacggtagacgtccacatgctgcacaagttatcaagctcgtaaaactatgctacgccagatgcattatactagtgccacaaaaaccatactgctaaccgcaaccaacagagaggcagaaggcctcactacgacgaacggctaaaatagctaatatgatcacgctacatcacctgggggattctattaacacagataccgggagaccagggcagtgaggctgctagtagccacaggcaaagccatctaacccaactcctgggctgctgataacgccgaaagggggcgagtctgcctcaaccttaagctcgacgtgggagctgctccctacaggagacatggatggcagggctcttttaccaaactgggggacatggacaacagacttgttagcgcgcact

SEQ ID NO: 177030 - DNA, 402 bp, Zea mays
  Clone ID: MRT4577_93040C.1
tgaattcggcacgagggtcaatctaagacgggaatcacgcgacacaaatgcctccatcgacagcatggcgtccactgtgtctacccggtcgagcgctccaaacagtcgctgccgtattcctaccctaccatgaccgtgaacgatgctgttggactgcaggatcaactacatcgcgggcgtggtgaaccatccttttatgctctgattgagacagtgcgtcaggagctctatgcccaaccggtcggggctctacctcgtggacattcctggacgggagctcttggtgacactcctagaggaccaaaacaagaagatcgggatctcgctcgggatgaagaaccttatttgatcgatcaactctccatcggcaccttaatggacaccaccaatgctatctgaaca

SEQ ID NO: 177031 - DNA, 749 bp, Zea mays
  Clone ID: MRT4577_93041C.1
gatccttcttcgagtggcaagtgctgacctcgcctcctattcctccggtagccctactggagcgccgggcgcacagatctgcccacccctggacgctaggcgctgcccagctcttccctgccagcccttgttgcacagcgagtcaatttggtgaatccccccttccctctcacgctccaccactgatcatggggctactcagcattatccgcaagatcaagcgcaaggggaaggagatgcgcatcctcatggttggcctggacaactcggggaagacaaccatcgttctcaagatcaatggggaggacaccagcgtcattagcccaacccttggattcaacatcaagaccatcaagtaccacaaatactctttgaacatatgggatgttggaggacagaagacaatcaggtcttactggagaaactactttgagcagactgatggattagtttgggttgttgatagttcagacataaggaggcttgatgattgccgtgctgaactccacaatctcttgaaagaagagagactagttggagcttcattgttggtttttgcaaataagcaagacatacagggagctctaaaaccagatgaaaattgcgaaggttctgaaatctgggaagtgatggacagaagcaggcactgggaagattgtgggctgcagcgcttaacacgggagaggggcttctcgagggcttcgactggctggtccagaacgcgcttctcggactacgtcctagactga

SEQ ID NO: 177032 - DNA, 785 bp, Zea mays
  Clone ID: MRT4577_93042C.1
gccgcgacatgtcttctattttggtgaagcccactctgcgggctttccataactgcaagaatctccccggacagagaagcgttcgcctgactcgcccccactcccgagtggccgaagccccgaccggcgaccccgcagatctgtcccattgttctccgtcctccccgtcgtgtcctccttgatccttcttcgagtggcaagtgctgacctcgcctcctattcctccggtagccctactggagcgccgggcgcgcagatctgcccacccctggacgctaggcgctgcccagctcttccctgccagccggtcgcggcggctgccagccagcacggcagggctgctgttgcctgctcttgtcctccggcacagcgcagggtgtcggggtcgctcccagctggccatcctctcggcccccttgttgcacagcgacaatttggtgaatccccccttccctctcacgctccaccactgatcatggggctactcagcattatccgcaagatcaagcgcaaggagaaggagatgcgcatcctcatggttggcctggacaactcggggaagacaaccatcgttctcaagatcaatggggaggacaccagcgtcattagcccaacccttggattcaacatcaagaccatcaagtaccacaaatactctttgaacatatgggatgttggaggacagaagacaatctcttgaaagaagagagactagttggagcttcattggtggtttttggcaataagcaagacatacagggagctctaaaaccagatgaaattgc

SEQ ID NO: 177033 - DNA, 460 bp, Zea mays
  unsure (1)..(460): unsure at all n locations
  Clone ID: MRT4577_93043C.1
cgcccacgccgtccggatttgtatttctatcacagctgacgcattttgaacccgtttcctttagatcgacgctgctgctatcttgggtcacatgctacatcaatntgggcaagnccgacctgagtattgtttcatttgaagtnaaaaaatcggaacgccaggtggtctgtattttggtcttaggttttcggtattgtacccgtcaacattgtaatctcttcttgaacttgcagntttcgctgtccctgaagccgagttttattatacacataatagacccgggatcgttgaccgtttttaaaataaaaaataatggtattcttaataaggtttatataagtgcaatagataatatcttacaaaagttttttttattaaatattaaaaaaggcgcggcccccctttttttttcaatatttttaattttttttatttttttccaaaaaaatggtcgttttat

SEQ ID NO: 177034 - DNA, 1387 bp, Zea mays
  Clone ID: MRT4577_93044C.1
tctggccgggagcgttcgcctgactcgcccccactcccgagtggccgaagccccgaccggcgaccccgcagatctgtccatgtctccccgcacgggggggcgttcgcctgactcgcccccactcccgagtggccgaagccccgaccggcgaccccgcagatctgtcccattgttctccgtcctccccgtcgtgtcctccttgatccttcttcgagtggcaagtgctgacctcgcctcctattcctccggtagccctactggggcgccgggcgcacagatctgcccacccctggacgctaggcgctgcccagctcttccctgccagccggtcgcggcggctgcaagccagcacggcagggctgctggtgcctgctcttgtcctccggcacagcgcagggtgtcggggtcgctcccagctggccatcctctcggcccccttgttgcacagcgagtcagtcggatacatcttttatcagatttggtgaatcccccctcccctctcacgctccaccactgatcatggggctactcagcattatccgcaagatcaagcgcaaggagaaggagatgcgcatcctcatggttggcctggacaactcggggaagacaaccatcgttctcaagatcaatggggaggacaccagcgtcattagcccaacccttggattcaacatcaagaccatcaagtaccacaaatactctttgaacatatgggatgttggaggacagaagacaatcaggtcttactggagaaactactttgagcagactgatggattagtttgggttgttgatagttcagacataaggaggcttgatgattgccgtgctgaactccacaatctcttgaaagaagagagactagttggagcttcattgttggtttttgcaaataagcaagacatacagggagctctaaaaccagatgaaattgcgaaggttctgaatctggaagtgatggacagaagcaggcactggaaaattgtgggctgcagcgcttacacgggagaggggcttctcgagggcttcgactggctggtccaggacgtcgcttctcggatctacgtcctagactgatgctatttgccgcgtcagtcatcctagactgatgctatttgtcgcgttggtgctacttgagcatcattagagtgtggtgcgtgcattaaagcctgtactaaggccctgtttgtttagggtttatggttttagggtttagggatttgtgttcactcttactcgcttcggatttgcggtggtatttgtttgcttgtgttacattgaggtaaatctaaacgttcatgagttcatttctctttatttacatgtcagattaagtttttcccaaaaaaaaaaaaaaagcggccctcgagagtcttctagaacgccc

SEQ ID NO: 177035 - DNA, 178 bp, Zea mays
  Clone ID: MRT4577_93045C.1
acttcatgatggaaaagcagttcttttgggagtctggattcttgagagctattgttataggacgacagtctgttaaagaacctactggttgaatagcaagcagttgtggtctgaggcaggtttttattgagcactggggccgggagctggaatggaccttgggagctttttgcgccct

SEQ ID NO: 177036 - DNA, 335 bp, Zea mays
  Clone ID: MRT4577_93046C.1
ggccgcctcgcccggcccggcccggccgtattcacgggccgacgcgctcactatttggtggccgcccgtgcctttgtttttttttttgaggcctctcttctaaaggctcatgttcgacttattgtttgttataagaaactacgtggcccccatttttcccgaggtgcgcccatgaggtacaaagttcttccgtgacctacccaggtgtcgggggcgatttattatttgacccgttcttggaagaaatcaatgacccccacgaggcttaagaaccccccccacctgctgtggttacttccagggccgtccgtgaataccgtgggcacccccacccc

SEQ ID NO: 177037 - DNA, 536 bp, Zea mays
  Clone ID: MRT4577_93047C.1
aagaaaaaacccccgggggggggcccacccctccatgggtaatttattccttttatttaagagattaggcaaagaaacccccagtttgttggaacggggggttttaaaaaaaaaaccaccccccccgcttttttgcaaaaaggccccccctccacccaaattatgggtggaaaacgggggttaaacccccgccaaaaacttcgccgctgaagaaaccttccccaccgaaaccccccaaaaaaccgcggaatttggggggccccccctgggggccttaaaggaccatgttgccattgccccatcccccacccaaggcaaagcccaaccccccgaatatgaactggccttggcccccccaaaccttggagataaaaagggggcccaaacccccacccgagaaaaagccctacaaaacaaatttgggggggggggccttaaaacctttaataggaaagccgttaccaaagccggcccggtggggacacccggagccgaacccgaggcccccaaaattggcccatttattgaaccccccc

SEQ ID NO: 177038 - DNA, 576 bp, Zea mays
  Clone ID: MRT4577_93048C.1
aattcggcacgaggtttacataagagaccttgcccttttgagaaaacaacccgcagtcctggcagaagcattctgagtcttggggaatcttgcactgaggccctgctcttccctgttttcatgtgcccagtccagagaattataaaatccagtaaaagtaattggaaaatgatttttaaatgtgaaaataaatgctagaatttgtataaatcatagaaaattcatatgaagtccaaattaatccatttcaattcctataattttgtgatgttattttttatcagttagtaccactgttttgacatgaaagtcacattaaaatttatatcctatttaatctgtacaaaacacatagaatctttagaaattcataacttaaaatctataactctgatttgatccattcaagttgtgttagtctcgtacaaacatttactatgcaataacaacatttattatatcatgtctcattattttatgattagatctttattcaacctatgttggttagtctcttaatgtgctcatcattatctaccaaaatataatttatggtaaatttataacttggattaa

SEQ ID NO: 177039 - DNA, 963 bp, Zea mays
  Clone ID: MRT4577_93049C.1
atgctcgaagaactccgctgcccacttcgtccacaaaggagtggacacggattacaagaaagagagaagcaagcattcctagaaaggggacggagccccactgagttatatttccggcaccttcgccctcaaaggaggactgaaagaagctcaccatcacagcaactcctttctaccctgacatcctcttcatcggagagagattggaatcgtctcccatctccgacgacgagccgaccgtgcaaggggaaaaacctccccagcgagaagcacaatgacgaaggaacatgcaccgaaatattcggcgacatcacgaggccggggagcgggacccagcgcagcccgtatctcgggatgaagtttcagaagttggagaaacccccgatgagcaagtatactgagaaaggcggaattctcgccaacatgatcgccgacaagctcaagaccgagatcgagaacaagccgagcagggcgcaagggacttcaagcactctgtcggacacgactgaccgttccagcctctaccacctcccccaccacgaggagggcccgacgagcccaggcagcctcagcaaccagaagggggaggggtggagcattccacgcattgacagggaggtcaacgtcatcttcagaggacacgggtcacaggagaatagaaggcagcagaagctcaatgaccaacaggtcctggtggcaaccaccagtgccccagctccttatcggtggtcagagcacgcgataacattcagccgggcggataagtggctcaacttcgaccaccccggcaaatacctgctcctcgttgattcggtgatccgagagagaagggtaaagaaagtactagtggaccggggaagtagcattaacgtcaccttcccctggacactcctatccttgggggttgcactcaaagacctcattgagtcagatacacccttcttcggaatcgttccgacctaa

SEQ ID NO: 177040 - DNA, 363 bp, Zea mays
  Clone ID: MRT4577_9304C.1
atggagagtgccggtaggcggggcggcgatgaacgggcacttcactggagttctggacagtggcaacctggtagtggtcgcttggtcggtggcggccacccgctgttggccgtgaggactgaggtgagtgattgcttgatggttgcctacttgcctctatttggagccaggttggtgtcacacccgattttggaaggattagaaactcacgtacacagcgattacataattggacatcatcacacaatgcttgaaataaatagcggaaaggtccttacgaagaggtactcaggaaaaaggcatgagccccctagagtatcaccagatcatcaacataatcaggataacagtatcgtatcataa

SEQ ID NO: 177041 - DNA, 819 bp, Zea mays
  unsure (1)..(819): unsure at all n locations
  Clone ID: MRT4577_93050C.1
tgtcgaaagcagagaggcaagaagcgcggatgaggataaggcaggaatctttcagacttgggaatgttggtgttatgaggtaattttccaatgtcccagtgcttgatccctgataacatcctgagtggccctttttttgagcggaaataatacccccgttgcaaagagcctcctaactgcagctctttatctagtttgccttctaaaatttacacctagttttttttatagcagatggtctttcttccctttttatttttttggtatgaattgtctattgcgacattgttttggtttattctaccctcgttcataactcagagctggaactatcatatctgaaatttgggaagacggacaggcaataaaagatcttaattctcacctggtgagttctgcaactccatagatatgtctacttgcatacacatattagaagataataatgatttgacctataggcagtaggacttgtatctgcatggtgattcattttttgatatgccatatgtggtagttgagaactgagcaatagcttggctggtaaggcctccagttgagagggcacccaactgggctcaggcccaggcttgcaggtcatgtgagtgcctccctaagggattgaggaggggggagtgaactaatcccccttcgatccctccaatccccatgggaattgattgatgtaaactagccttaaagggttttggtaatccctctcttgtgtcaagggcacggngcttcttgctccccgtggaggacttctttctttctttctttctcagacaactttctgttcagacttttgtttacaattct

SEQ ID NO: 177042 - DNA, 1168 bp, Zea mays
  Clone ID: MRT4577_93051C.1
cccgagctccgctaatagtgttggtgctggtggatgtggtaggaaaatacagtgaggaaataagcatggtacctagtcataccaagcaaaacaacaatgtcccagtaaagaaactgggttttggtttgattggcttgggcaaaaggacatctgttccatcagtttttgctgaagaggatgatgaaaataatgttgataaaagcataagacctctagtacctatcgactacaatgaagaattacaagccgtacaggctaattcttcgactggggcaaatgtcgcagcagctgctgagtttgccaagcgcatctcagtttctaactcaaaggaagagaaggttgacacagagaaggataggaataggagatccagtgaaggccgtcctagcgacgagcgaagagagaagctacatgatcgtgagaaggataagtccaagtcggagaacaagaagattctggatgcaaagcaattaattgatatgatcccaaggacaaaggaagaactttttgcctatgatataaactgggtgatatatgacaagaatgagttgcatgagagaatgaggccttggatttcaaaaaagattattgaatttcttggcgaggaggaatcaactttggtggactatattgtttcctgcaccaaagaccacgttcaggcagaaaagatgctagagctcctacagtcgattttggatgttgaggctgagatgtttgttctcaagatgtggcggatgctgatatttgagattaagaaagtcgaatctggactatcaggaagagcaaagtaatgaagctaagcctgttaccttgtatgacctttgatttacatcactcaactgtggtcatgcttgtaaggtcatactgtactaaacaagcatcagaaaccatttttaatgatgctgagtggacggttttgattctacacttcccttgtagaaatgtatacgagaattaatgagagactgcgtaattattttgatagattgttgattgcataatgtgtttggtgcagttcacatgcatcaacagcctactcttgttctctggtgaacgacgaagaatgtcgaaggctggcagtagtcgcaagtataaatccctaatcatgctcttcgtagttcctgctgtgcaataactctgcagttttatgaccatctaattatggctc

SEQ ID NO: 177043 - DNA, 324 bp, Zea mays
  Clone ID: MRT4577_93052C.1
atggcgcctcccaagctctatgacggcggcggctctcagctctcttacggaagcaggggactacaaggacaaggatggtgtcaagggcctgtgcgtcgtgggcgccatcaacaactgtacctcccagctccccacctatgggagatcttctcccccataatccacttcactccgacaaaggagggaacaccgtcgacttccactggtacgcaaggaagactgttttacactatatatgcgtctgagaacatcattgcatcatgccactgggcatacaagggtgttgaggaagactcaaccctagaagatccctatttcttataa

SEQ ID NO: 177044 - DNA, 3076 bp, Zea mays
  Clone ID: MRT4577_93053C.1
atggcgaagccaggcggcagcgatgagtcgtgggagtacagtctgcgcaagtatctcctgctgctggccacgctggtggccacggtgacgtacggtgcggggttcaaccccccaggcggcgtctggcagactgccgaccccgccgccgaccgcatcgccggcgaccccatcatccgcgacacgaactacgcccgctacctgtccttcttctacagcaacgccaccgccttcgcctcgtcgctcgtggtcatcgtcctcgtcctcatcctgtccgtgctgcacgacaacgggggaatcaccatgctcgcgccgctgctcggcgtcctccgggccgtcatggtgctggacctgctcagcctcatgggcgcctacgcggcggggacgttccgggacacgctcacggcggtctactccctggtgctgtcggccggtgtcgtcgcctacctcgtggcccacctggccctggcctcgagggcgccggcggccgaggacaagagggggcagagcgcgccggagcggctccgcaaggtgctcatgctcctcgccacgttcgccgcgagcgtcacgtacgtcgccggcctcagcgcgccgggcggcttctgggaccaccccgaggacggccaccgcccgggcgacgcgatcctcaagggagggccccacgacgcgcgcctcaaggccttcttcgtctgcaacaccacggcgttcgtcgcgtccctgctcatcctcgtcatgctcctggagaagaagctctgcttcagccagaaggtgcgctcctatgagatctacggcttcatcgccgtcacgctcatcagtctcctgggggcgtatgctgccggcagcagccgccagatcgacacgaccatctatgtgagcgctcttgttggtgctgttgccgtgtgcattctcatccaagtggttttcgttttgctcttccaagcaaattcgaccgaggggcaacaaacacgaactcaaggtcccctaacaaataatggcaatgccagtgatgagcgtcagcagactcaaggtccgcagacaagcatggacagtaatgacagtgatgagcagcagcaacaaacccacggtctgcaaaccagtgatgacaatgtcagtgaccaccaccaccagcagcaacaaattcagagtcctcaaactagcaatggcaatggcaatgccagcgatgagcatgagaagcaacaaaatccagcgctggagaaggctcgctctcttgtcctgctgctcgctactctcgcagcggcaatcacctaccaagcgggcctgaacccgccgggtggcctctggcagagcaacggccgcctctacaagatcggtgatccgatcctcttgaccacgaaccccagacggtacaaggcattctactactgcaactccgtcgccttcgtcgcctccttggtcgccgttatgctggttaggaagaagacactgcaccaccacaacgcgctggaggccgccatggtactggacctgttcggcctcatcggcgcttacgccgccgggagctgccgggacgtcagcacgtccatctacgccatggcccttgcaggcgccgtgctggtctacgtggtcatccatgtcgtcttcttgacgctggacgaaaaggacggcagcagcgcgagaaggaatgatgacgcttccttcgaggagagagagaaaaaggaggcgggcctggtggagaagaggcgcaaacgactgctcctattcgccatcttggccgcgaccatcacctaccaagccgggctgacaccgccgggcggctttctggtccaggacgataaccgtaccggccgccatgccggcgacgcggtcctgctcaacaactacccgcgccgttacacggctttcttctactgcaactcggtgagcttcatgctgtccatcgccctcatcatcctcctcgtgaaccccaacctgtaccgccctgccattcggagcaatgcgctgtctgtctgcacggcggccgggttgattggaatcatgggcggctacgcggccggctgcacgcagcatctgaagacatccatctatatcttcgtgttggcggccgtggttctgtccactgtggtctttctggctgcggtgttccttgtgatccatctgagaaaaaaagacgataatgctaacagcaccaacagagcagcagcaagagaggcacctggggaagaacaagaagccaatgctggtgctggggtgccaaatgccatggggggcgagcaaagaggtccccaaggagccaaagctcgccgaaaagaaaagagggcacacgccaagcgcaagtatctgatgctgcttggaatcctcgtggcgagcgtgacctaccaggccgggctggcgccgccgggcggggcgtggcagtccaacgacggcacccacaccgcgggcgaccctgtgatgcacgactaccggagggcccggtaccttgccttcttctacagcaactccacctccttcgtggcgtccgtggtcgtcgtcgtgcttctgctgccggagtcgctgcacaagaagtggtggtggctcggggtcatgaacgcgacgatcgtgctggacctgctgggcctcttgatcgcctatgccgccgggtccagcaggacgtggaagacttctgtggttgtttccgctctcgttctcgctgtgctcgcctatttcgccatacatgtgctgctgtcaagctgcgtcaggagagggaagaagacagcccccgactctccgtctccgccccaggaccaggagaacagagaggaaaacgaagcggcaacgaaagaggtcgagctccagggtccagcttgctgaaactggagtgtacagtgcggagctgaatgtgtgtgcagtccagtacttgtagatttttttttcacgaccgtgttgtcgcattttttttttgtcaagaggtgtagtgtttttgttgatccacgtagcgggcgggaacgattgatgtgcaatcaagtgttagatgtaagtgtacaaacaagtctgcgtgcaagcgaggcttctctgtctttttagatcatgtagtcttcgcgtgggtcataaatgacttcacgggtttggaacagtcttactg

SEQ ID NO: 177045 - DNA, 651 bp, Zea mays
  unsure (1)..(651): unsure at all n locations
  Clone ID: MRT4577_93054C.1
gggagtcggagctgattggtggctgtgacatcattcttgtgatggagaagagcggagagctgaagtcgaccttgtcaatgtagacacctaacctagcattcttgcctcgctggcgttcctatcatattgcctgcattggatcgttctactatgacgtttgtgccaatgtattcatagatccacgtttggtgcctgcagtgccacattgctagaatcgtgacatctgcagatggaataacttgagagcttgttcggtactgattgctcttttatcaccagtctatttagcggatgagagtttttttttaaaaaaaaaaaaaaaaaaaaaaaaaaaaaaaaaaaaaaaaaaaaaaaaaaaaaaaaaaaaaaaaaaaaaaaaaaaaaaaaaaaaaaaantcccctttttttttttggggctttaaaaacccccccaggggagcccctttgccaccaccttaccaccaggggttccaaaaattttacccctctttgcctttttgggctttttgggaagcccaaaaaaggggtttttttttccaaaaggctaattggcccaaagtccatttttaacaaagtttcctcccccaatttctttaatggggtttaaacccccaatttgggcagccttttaggttaaaaaaggaattgggg

SEQ ID NO: 177046 - DNA, 1242 bp, Zea mays
  Clone ID: MRT4577_93055C.1
ctctgctttgatgaatgttgccattttattgtttgttccaagttctcctctgcatttgtctacacagtgctggttaaccttgttttgactgtgagttctaacaatcaaagctctccagggctcaagaacagtaacctggacacatgtatacttggagtgattgcggcaagtacctaatgactagatagacctgatctagtctcccaatgttttttcattaatcttttgacaacattccatcaggttcttgccactgctgttacaaccaagttcttggacagggctggacggagaatcctccttattatttcttcttctgggatgaccctaagtcttcttgtagttgctattgtattttacatcaaggataatatttcacatgactctgacttgtatgacatcttaagtatggtgtccttggttggtgtcgtggcttatgtcattgccttctccttcggtatgggtgccattccttggatcataatgtctgagatcctcccagttagcatcaagagtcttgcaggaagcttcgcgacccttgccaactggttgacatcctttggaataacaatgacggcaaatttgctgatcagctggagtgctggaggtacgtttacctcctacatgattgtgagtgccttcactctcgtgttcgtaatcgtttgggtgccagagagcatcaagaagaaccctcgaagagatacaatggtcgttccgctgagcaccaacatcgtcaaaatgcgaaagcaaattttcttttgttgtggctctctgcagatctcaaatatcccgatgaaagccttgactctcgttttcgtcctcctttggggcccagagacgaagggaagaacccttgaagagatacagtggtccttccagtgagctccggcattcatatgtacatgcaaatagggtggcaaatcctccaggatcccaataaaagatatagtgaaatatagcagaagctatttcatttagcattttttatagtttaaatggaatttcgctcccgattttgcatgagcccccccaaataaggagatttcccgcacatgaaccctcaaatacatgtacaggcctgtaaaaaaagatgtctttagaccccttactttaatatttgtggaatcatacccagaagtataagctagtgaggggaattgtagattcatgggaaccccccgctattctgatacaagatttttttgaaaaaaaaaaaaaaaaaaaaaaaaaaggttttaaaac

SEQ ID NO: 177047 - DNA, 275 bp, Zea mays
  Clone ID: MRT4577_93056C.1
tcgggatcttaaactggggatttttgacatctgccttaggcacggggaccgggagcaggcattgatgcagctcgggttgcaactactcaacactggcgaaatacgagagccgcaagcgactggcgaacaggacgctgttgctctcgacgcggagccacatatcagtattgagctgattcatgctgagctgatcgcagatgatcagcagggtggcgcactacaacatgagattgatctcttgagtgtttacgcaagggatggaaaactggaacacg

SEQ ID NO: 177048 - DNA, 156 bp, Zea mays
  Clone ID: MRT4577_93057C.1
aggagaataaggataattaaaaacgaactgcccttgtcaatgcttataacaagaagaaagaatctgggaaatcgtcagttttactagatgtgaagccatttaacgattacactgttatgtacaagctcatacaagctgttaggagtgtatagatgg

SEQ ID NO: 177049 - DNA, 1585 bp, Zea mays
  Clone ID: MRT4577_93058C.1
ttttgtagacagggaactaaggcagataaggccccatctgtggacaggcactaacaggtgcagcacttgatatttcagaagggaatgagaccactatacctttttcgtcacccaagacttatctttattggtgcctagaaatgtaggacagcagggagaggagatttttttacaacccaaatcggtccaaacttggatactttcatcatggagtgagacctctagcaccttcaaatatgtactacaatcttatctccatcccttcacacaagtgcaaccagtagggatgaaaaaatcttcagtaaccccactaaacactgaatctgatctcatcagtcctgctgctccatccctctcctctttgttcaataccttttatctcacaaactcgcatgacaaaagaccccacttactgaaccaaatctattccctaagtattgctcttccactttggtataacactccaagactaaaaatacacagagcaatagctatgatgcactaaagtagaacaaaatctactgaaaagtccagtttcagcttaactaaaacaacaatatagcaagtctgacacagaattttacaataggttttcccccaatttcttcatagtaacaagcccaactattcacatgaaacttgtttgccttaccttggtatttcactttgttatagaactcctaacctaaaaacccatgatttggtcaccaaaaaaactccaaactgagcaccaacagtgaaattccagatttcagttaactgaatctagttcagagaaaataagtctgacagcacacatttaggcaccattactcccagtttgatgtagtttcaatggcatgacccctaccaagaattatccccctaacattgtctccaagtttgttatagaaacttcagtccaaaaccacatggtttgatgcctaaagggctctaaactgagcaccatgtgctgcaatacagatttcaggaactgaacaaactcaatcacagctaacttaacagcccaactttagccagcttttactccaaatttcatataacatccatcaaaactgtcttaaggagatttactcaccatcatatgagcctcactatcttatgcagagcacaaaacatgtacagctcggctaaggaaacccttgaagttacctggtcacggcgagggtggcatgccagctctaggcagaccaagcttgatgactggggagaggctacaccaactagaacacaagtagctccacaccctgcagtggtctgtaggtggaactcaaggcagggagggcgaccttcactgaattttgccttttaagcagctagaatggacagatgccccttaaacctgttcaacatgcagcaagggtgtattcccatggtgccagcaatacatatggactccaatacgtggctcttatgcaccagtccaacacaggctcatatggtttgaagttgatattttcaacaggggctagtgggacctctgaacatggcaaggaaaactgaacttggtcacttctagcagccaaaatatccactctctttgctcagcaaaacagataggggagggagcagatcgacagcaacg

SEQ ID NO: 177050 - DNA, 654 bp, Zea mays
  Clone ID: MRT4577_93059C.1
ctcaatttatctggaaatgacatcggggatgaaggagctaagatatattggttgaaaatgtgggtatccagaaactcctcctgaacagtatcaatattggggacgagggtgccaaggcactttcgaacatgctgaaaaagaataaatcaatacgtattctacagttcagcaataatgcaattgaatacagtggttttgcaagtattgcagaagcccttttagagaataatacgatacggagcttgtatctcaatggcaactatggtggtccccttggtgcatgcagcctagctcaaggaattctagggaataagtctttaagggtactacttaagacacttggttatatacttccagtcttccacatagttttaatgttttttttttttgtaaaattttaaatgtttgaaagtgaagcagattgaattccatctttgcttatgcatcaagttatggagaagtgtctgtttcagctttctgaaggggtagtagtattttgaaactttcaggtttggctatatgtccaaagcgtatggatcaatttgccttctcactactttatgctaaccgcacaatatggttggatttcaggatacatatctgtaaagcatggagtgtatagtaggacttgcacacaaagagcattttattaac

SEQ ID NO: 177051 - DNA, 273 bp, Zea mays
  Clone ID: MRT4577_9305C.1
ggccgctgctaatcagatgcgcaacttcctggttcgagcctcctgccgccttcgcttggaacctgggaaagaatatgtgatcatgggtctggatggggccacctatgacctcgagggacacccccagtacctgctggactcgaatagctggatcgaggagatgccctctgaacgcctgtgccggagcacccgccagcgggcagcctgtgcccagctcaacgacttcctccaggagtatggcactcaggggtgccaggtgtgagggctgccctc

SEQ ID NO: 177052 - DNA, 490 bp, Zea mays
  Clone ID: MRT4577_93060C.1
ggtcgcttgggtggccccgggtaatcccggcccggtcccggcaggggacccagcggccccaaaggggggccggataaaggccgggggaaaacaggggaaaagcgggtaccgggggaaaaaggggacccgccaaaaaagccaaaaaacaaacaacccggaagcaaaaagggaaaagccgggggccccaaaaaaaagagccaacccacaaaaaggggggagcccccacggccccggggcgaggcggaaaacctgaagggccggggggaaaaaggaaccgcccaacccccgaaaaaaggcggccggcggatgggaaacaaggggggcaaaccccgcaacaagggggaggggaaaaaggggagggcccggaaccgcctggccctgaaaaagaaggagaaagggggcaaagctggttacccccagccgggaaaaatcctgggagagggggaaaaacggggggataaaacaagagcggactccggtatgggggggt

SEQ ID NO: 177053 - DNA, 370 bp, Zea mays
  Clone ID: MRT4577_93061C.1
agagaactaaggatagagaaaaaagataactggcaattacatagtaagagcattgctaaaacgagccaaacaagaaaaatgtggctctctaactatgagcagtttcatggcacattggatgcggcgcacgcgtgtggattgatattggtacaatgacatacaaatcagttacaggttatatgtctaacgaacaggtggatcgatcgatcaatcgatggatgaccctctggtatatactcctacacttcgacgtctgccttggaggggctgccggcggcggataaagagcccccatcgttcttggagccggcgggaggacttcttgttggcgccggcgcgccatttcttgagcgccttggaggtctgctcc

SEQ ID NO: 177054 - DNA, 570 bp, Zea mays
  Clone ID: MRT4577_93062C.1
atgacgaactccaagcggcttgccggcgacctctgcagcagtagagacaacgacctccaccttgggcggctaaacaacagcagcgatgacctcaggacaaacactgctgtgaagaggccctcgcccacgtccccacacgaggggcgaggacaagccgttaaggccaaagagtcggagggcgccgaccgtgggtttgaacccactgacaccgcgccggcgaacagtggtcgccccaaagcgtaccagcaggtcctcactcccatcctcgccgaggccgccccagaacacgagcaccgccctcgcggcgtacgacgtgctgggcgacaccccggcgcgactgacgggaccgggaaaggggatgttgtggaaaggatccttctcggcgaaggaagcgggccccgagccctcctactgatcaggggttcgaaggctagcccctcggaagggtttcgacagcctccccagagcactcggacttcaagcccattactgatcaggggttcgaaggctggcccctcggaagggttcgacagccgccccagagcgctcgggctccgtgcccattactga

SEQ ID NO: 177055 - DNA, 1009 bp, Zea mays
  unsure (1)..(1009): unsure at all n locations
  Clone ID: MRT4577_93063C.1
tcgccccgcgtccgccccgcgtccgcagctttatagcagtttttattcttgcgggacagctcactttgacgggtcatattcttacagtagctggtgtcacagttgctatttgtgcatctccctttgttgctgcctcaaatttggttgcccttgctgtatggccaacttgggttgccgtggctgtcanctgaaacaattagaaaggtaacaacttatgttttgacaagacctggaagggagttattattcactgttgtctcacaggatgaaaaatacaaagcaaaggtctgtatagatgtgattgtccagaggcttggtgacgcaacagctgctggaatttacaggtggttgttcagtagccttgagaagaaaacatccaaggtcaccctgtttgcattgccgctctgcttcctgtggcttgtcattgcatttcacttgggccggctgcagactaatcttgccagggttcaggctgcttctgctccgtcctactcctgaacaggaagctgctgcgagtgtctttggagatgtgcttccagaatgtttgaacaggcatggcgagaagtggttgtcatcaatagttagttacttagtttacacgtcttgcaggaatttcaggttttattgatggagaaaccttcagaatacagtagcagccattactacactacagaagagtttagcatacacaaggggggagaaatagtacaccatagacatagactagcacactatatacaaattcaatatcccatttcgatgtgcactgcaggaaactgtagcatgcaatctgtgagtttattataaatgatgtagtagtagggccggatttgttgggcactgctctgcctttggaactactgctgtcctgacagacactgcatcattctgcatttcacctaccccagttcccagactaaatggctgtaaagacagattcataaaaatgtctgctttatggaacatgaacatttctttataaaaaaaaaaaaaaaaggcccctagggcc

SEQ ID NO: 177056 - DNA, 265 bp, Zea mays
  Clone ID: MRT4577_93064C.1
cttactttatctacaacattttattgacgcgcaagatgggatagtcacatgggatatgcgggccctttatcttcagagttattcttgtcgagcgactcttcacctatgtagtacgcccacgcagctgccttgtgctttggaacctaaaacaacagccactgaaggctccaacgctgctccaagacccattgtctcggactagacaaatatgtccaaggagcgccatgtttggaatcggtgcgactttcgacctgcctgcacccgc

SEQ ID NO: 177057 - DNA, 116 bp, Zea mays
  Clone ID: MRT4577_93065C.1
gatttgtcggcaaatatgcgctgcaagattgttgactggactgttgcaacgctaacagatgcgaacttatgggtcattgtgatttggctcccccagaacatgtctgtgaccgcgta

SEQ ID NO: 177058 - DNA, 321 bp, Zea mays
  Clone ID: MRT4577_93066C.1
tttttttttttttttttttgttcgaaaattccatttagcggcgtttttttttttttttttttgttcgaaaattccatttagcggcgagacaacagacacctgaagaggccgacgctgcgctacccaaacaaacaggagacaccgcagcaaacagtccacgcaataacagcaacaaccgcatacacaactttagtggcaagttatccaggcactgcaaaagcagacacgggatcgcaactttagtggcaagttatccaggcactgcaaaagcagacacgggatcgcatcttctccacactcttgatgactccaacagcaacc

SEQ ID NO: 177059 - DNA, 377 bp, Zea mays
  Clone ID: MRT4577_93067C.1
gtggcacgattgcaaccagacaggtagctagtctctgcatacctacgtgcagcaggtgcaacgccgctctgctgctcgttgcacttgtggctaaagtgtcagggctgccatgatgctccctgaccgtgtaccgagacttatgcatcgccaacctatccgccgtcgtcacgccgggcggctacaccatgcaagcccccgaatgacgtgatcgcagacgagttccactacgggggcctcgacacctgcagcacggtggtgaaacgcttcaagatctccttcgactcgggcgcacatacacacgttacccgggctgaacggtctgggcatctccgtcgcgcggatggtgatggttcctgtaggcgggacgccgctgctct

SEQ ID NO: 177060 - DNA, 239 bp, Zea mays
  Clone ID: MRT4577_93068C.1
gtcctgctacaccacatccacacgttcactgtagcgagagcttatcgtcctcggcggggaagatggtgtctatgaagctgcagaagcggatcgccgatagcgtcctcaagtgtgggaaaggcaaggtctggcttgaccccaatgaattcagacagacttccatgggttactaccgacagaacattcatactttagctaaagcttggttcatcatcaggaaacctcaattggatcagttt

SEQ ID NO: 177061 - DNA, 552 bp, Zea mays
  Clone ID: MRT4577_93069C.1
cagcggcaggcgatggtggtgtcccggaacctccgcctgctggtcaagggtgccccccgggaggagaagctgcaccggtacaagccgtccccgaggacgtccatgaccgtgacgctcggccagcgcgacgcgctggcggagctgccgttcatgacgctcatcgggcacatcccaggtgccgtcaagccacgggacctcttcatcacgaggacgcgcaggatgatggggatcaagagcaaaccctacggcacgatgccgcacgtcatgtgagggagatcccatcgacgatgacgtccccggccccggtccggcgatccttcaattccgatgaccaaacggagactagctagataggctctctgtctctggattttgccacgttctagttctagctgatcatttgatctggtcgtctgagatgtacgcttggtgttatgagtgaacccggaatatggaagcacgatcacttgctatatgtattatacaggtatactctggacaggcgttttaaaacaccgtttacctttttttacctaaaaaaaaaaaaaaaaa

SEQ ID NO: 177062 - DNA, 341 bp, Zea mays
  Clone ID: MRT4577_9306C.1
ccagcccaagacaacgggattatgaattatgatccaaacatttcaaccttcctcccctggggatgtccaataaaatttaccaaaaacaacgtttttttgaatttttattcaaaaaggaaactttgtagggcgcaagaaacgtttttatgccttcatattaccataatttgttcaaacccgggacttggacacactattttccaccacttctaaaccctttgcgggtgtttcctccaaactttaagggtcctttagcaagaaaggtttttttaagggtgaccctaaaggcttcttttgggggggttgacaaaccttggccagcccgcaaacattattttttt

SEQ ID NO: 177063 - DNA, 865 bp, Zea mays
  Clone ID: MRT4577_93070C.1
aggggaggcgattgggtacctcgaggccggccggggaaaaggaaaaaccccacagctcgagcgccgcgccggaagcctgcgcccccgaaaccacgagcgtaaaccctcctagtccggcggtgatggccggcgtcggtggcagcggcggtggaggtggggacgacgcggagatgggcggttggacggggcttctccactcctccacgaagctcctcgagcaggcggcgccaaccccgcacttccctccccttcagaggaatctggaccagctcgaggcgctctccaccaagctcaaggccaagaccatccgctctgaggctccgtcacagtcgctctccgccaccagattgttagcacgcgaggggatcaatgctgagcagctcgccagggacctcaagtcattcgaactcaagactacctttgaggatgtttttccatctgaagcaactactgttgaggagtacttgcagcagcttcatgaaatggccattgtttcatccatccaagaagctcagaaggacaatttgaagagttttaacaactatatgatgcaagttcttgaggatgactggcagaaagagaagagagacttcttgcagagtctaagccggctttctacattacccaagagaaacactaatctctcgaccagtgggttgggtcgccctgcttcaatgccaccatcaacttccagtcttcatgctccatcaggcctgccttctgctgaagtcatgcctataccgaacaagactattattgaaaaaaaatcttcagtttatgctggggttgtgagggacctcatgattctagagggcgcagtctaccttttaatcctgctacggcttttagggctgcttatgaatcc

SEQ ID NO: 177064 - DNA, 256 bp, Zea mays
  unsure (1)..(256): unsure at all n locations
  Clone ID: MRT4577_93071C.1
naagatcgaggccgttatctggcactcgcaatcattccatggggggacacccagatgtgctcagggccgaacaagagttcccttatattcctatgatacggtcacacgagctaccagacctctccaatggcgggtaagatctacgttgcgtactattacatgtatgggcatgttggcaaactttctgatgacaactacaaaggggccatatttttttaacgccttaacgctaaaatatagcacgtccctgaaattc

SEQ ID NO: 177065 - DNA, 1973 bp, Zea mays
  Clone ID: MRT4577_93072C.1
cggactcgtggggtcaaattgagagtaaaaaataaagagttttgtacatggtctaagatcttcatccgctagggaatttttggagatggtctaagatcttcatccgccagggaattgcccgctaattggagtctctcccgtagtcccgtgtttgagttgttctcctctcatctccatcttcgcaacgaccacgaattccacggccaaccaatctctggtctatcgctctcttctccttgtctttaaatctgagacttttttttgttcgcgtcctccgccctcaaccgtagccacctcgctgcccctgccgccgacacccctgctcgccgttgctgcagccgcacaggcgatggatcatgaagaagtgaccgaattcctgggccaggtgcccctcctgcagtgcctcccgggttcctctatccgcagaatcgcggaggccgtccaggtcaagaactacgaacctggtgactatgtcgctcgcgaaggtgaacctgtcaatggcctttacatcatagtggatggccaggctgaagtttctgcacctgcgaatgcagaagaagcaaatcgcccagactatgtgttaaataagtacgactactttggttatggaactaatagttctgttcatcaagtcaatgttgttgcactatcaaagctgacctgcttcatattgcccaatcaatatggacatttgttacaaccaaaaacaatatggaatgcagaggaaacacctgaacattctttgctggaacaaattttgcacttagaaccactagaggtcgatattttccgtgggtttactttgccggaagctccaacttttaggcaagtttttggaggacaattcattggacaggcactagcagcagcatccaagactgttgattgtctaaaaatggtgcatagtttgcatgcaatttttcttgttgctggagacaataacataccgataatatatcaagttcatcgggcacgtgatggatccagctttgccacaagaaaagtggaggcaaagcagaagggcctagttgtattcaccttgattgcttctttccagaaggaagaagtgggttttgagcatcaggctgcaatcatgcctgatgttcctccgccagaacagctccttaatctggaggagatacgtgaaagacggcttactgatccacgcttcccatcccaatataggaacttggcagctaaaaaaaagtttattccttggcccatagaaatgagattttgtgaaggttcagcgtctcaacataaaccaagcttaaactactggtttagagctcgaggggaactctcagacgaccaggctctacacagatgtgttgtagcatatgcttcggatctactattttctggggtgagccttaaccctcatcgggagaagggtttgaagacatactgcctcagtcttgaccattccatctggttccacaaacctgtgaaggctgacgaatggatgctgtatgtgatcgagagcccatctgcgcacggtggtcgcggtttcgtcaccggacgcatgttcaacaggcaaggagagcttatcatgtcgctgacccaagaggcattgattcgaagggagaagccgcgaggtccaaatccgagtccgaagctttgaggcacctgacagcctctgcagtcgactgtagaggatcccaaccgagctttgagaggcgcaccatcctttcttctaatttggtttagatatttatgaattcacaaacaaaaatatagaatatcaagcagtataaaagatctcaagtcaaacctaacattttttttcatttctccggatgatttctatttgttttggtgtgtgtggttggaggggtattggaagcggaagcggaggcggagggtttgatactttaggctatttcctgcagcttactaattctatacgaacaatttaaattttattatacgaactattcatatatatttaaacttcattctaaaaaaaaaaa

SEQ ID NO: 177066 - DNA, 294 bp, Zea mays
  Clone ID: MRT4577_93073C.1
ggagcctcatgcagcacattatcatttgttatttgggtttaataataattttgacatcttttcactcatacacaaaaaaagtcagaactggtgttatttactgttgatttcatcctcctgtgtatgaaataacaagcctagaggaatgaactagtgctactgaactgtttaaattattattgtgttaatagtacactttgagtatctttttccacattaaaaactttctgaattataaatgttttccttacattatttaacaatgtacactgttaaaaatagaaatagaaattc

SEQ ID NO: 177067 - DNA, 339 bp, Zea mays
  Clone ID: MRT4577_93074C.1
ggggcaagtaaccatctgtttccattctaagaattcattactatatccgggtagctccaccattgttaatgctgctgagaacaaaaacacacccaaattcttgccaactctcgggtcatgtcagatggactagccaagacaatacactcaagattcagaaagggttttttccaaacaatctatgatcagcagctaagcttaacttccgccagcattttttttttttggacgagcttttatttgatctaacgtcaaaacatcatcctcgtgggaatcagcctgacgaagaacatgcatacgggctgaccaaaggccttcttcccacaccttgaacgccct

SEQ ID NO: 177068 - DNA, 331 bp, Zea mays
  Clone ID: MRT4577_93075C.1
ccggccggggcaggtttggtacgatatgatagaaaacggtttccgttgggttgaggtcacaggtcaccacacccatcacaaacggttgggcgctcggtccatcggcccagcaatcaatgagccgtgtgttccaaagggtgtagcctgatgatgtggttgtgcttgctgcttctcgcagcctcggaacacgtacaggggaagaagagattgtgttttggttgcggaacagcaatgcatggatggatcagcagctgcagaccatgatgcagtactatatgtaatcatgccgattctgatgtgacgacgatgctggacgtgtgcacagtacact

SEQ ID NO: 177069 - DNA, 830 bp, Zea mays
  Clone ID: MRT4577_93076C.1
ggccgggtcaccaacgtcccgatctcgaatccgcagcgtgcttactataccatggcggcaccaagcgatggaagctcagacgtgccggctgcagcctcccaccatggcgccgttcgcgccactacctcatcagtacaacaacacctgcaagcacctaaacacgacgacgatggccgccacttccggcaacaacaacagcaacggcagcaccgctaccgcggctggcggtgcggcggccgacggcatggccgcctacctccagcacctgcagcaggcgggcgccgaggcggcggccaagagcggcggcggcggcggcgcggcgcgcggggagcagtgcccgcggtgcgcgtcgcgcgacaccaagttctgctactacaacaactacaacacgtcccagccgcgccacttctgccgcgcctgccgacgctactggacgctgggcgggtcccttccgcaacgtccccgtcggcgggtccacgcgcaagcgcccgcgcctggcgcaccaccaccagcacgccaggctcgctcctccggcgccgcacgtcttcggcctcacgccgatgatgcctcctcccttgcaaccgtcgtcgtcgacatcgtcgtcgcagggacagggacagggacagggacagagcggcggcctcctcggctcactgttcgcgctcggcgccgcgggcgcgtggccgccgctgctcgaaggccgcggcgcagggtcgtcgttcgacttcgacctcgggctcggactcccgacgggggccttacacctgggcgcggccggacaaatgcaaggcctcgggctcatggggggaggaggtcctccgcagccgggt

SEQ ID NO: 177070 - DNA, 395 bp, Zea mays
  unsure (1)..(395): unsure at all n locations
  Clone ID: MRT4577_93077C.1
acgcgtccacacgtctctcctctttttctcctctcctgcttcagttctacacggacnctgacccccacaagtgaagggtttaattgagcgccccctcctcgtcgacctcctcgacgaggagctcctgatcccgctcgcccgcgcggactcatcctaatccccgcccgacaccaccgcgtacgaagagctccgcctacgaggcttcccgcgcgggctgctcccgaccaacgagcgggcctacacgctcaactccagctccggggacttcgtcgtcgacctccgatccagctgccggatcgtgctgaccgcggcgagctacctcaccaccttcagtgaccgcctaaagggccggctcgacgaccgacggatctagggcctagacagcatacgcgtca

SEQ ID NO: 177071 - DNA, 913 bp, Zea mays
  Clone ID: MRT4577_93078C.1
tacgaaatcgtaagctctataatcaagtacaagatcttaaaggtagcattagagtttactgcagagtgaaacctttcccaaaggcacaatctgatcaaaggtctactgttgatcatattggggaaaacggagaaatcctgattgcgaatcctcaaaagcaagggaaggatggacggaaaatattcacattcaacaaaatatttggacctagtacttcacaatctgaagtttttgctgatacccaaccattaattagatctgtcatggatggatataatgtatgcatatttgcatatggtcaaacgggatctgggaaaacttacacaatgagtggtccagatgtaacagcagaggaaacctggggtgtaaactacaggtcgttgaatgatctgtttgaaatttctcaaacaagagcagattccattacatatgatgttaaagttcagatgattgaaatatacaatgagcaagtgagggatttattaatgactgatggtgcaaacaaaagattagagatacgcaataattctcatgtaaatggactcaacatcccagatgccaatattgtgccagtcaagtgcgcacaagatgttttggatctgatgaaagttggccagagaaaccgagcagttggatcaactgctcttaatgaacgaagtagccgctcacacagtgtgttgacagttcatgtacaaggaaaggaggtaatttcaggctcaactctaagagggtgtcttcatctagtggatctcgcgggaagtgagagggtagacaaatctgaagcgactggagaaagactaactgaagccaagcacataaacaaatctctgtcagcacttggtgatgttatatctgcacttgcccaaaagagttcccatgttccatatagaaatagcaagttaacacaagtgct

SEQ ID NO: 177072 - DNA, 347 bp, Zea mays
  Clone ID: MRT4577_93079C.1
cttacacgagcgcccacacctccgcgcactctactaagcgactgcactctcctagtacgcacggctgtacaacgactggggggtctccaactacatgcggacactgttctacaactcggtgatcttgttcactatcacactgatagtgctcaacgtcatcacgggcaaccctctgatcaagttcaacaccgaccagatccccatgaacatatagcatgtactgatgcaacacccttaaaagaacggtacctctgaattcgactaccgagcaacatctatactctgcagccccacatacgatccaggaccttacagaattcatatgacgcagatactaagccatacac

SEQ ID NO: 177073 - DNA, 504 bp, Zea mays
  Clone ID: MRT4577_9307C.1
ccaggattcgtccctcgctcggcttttgccctgtcgtatttcccgtttcgtattcagacggaatattggtgggttagattttatatcacgcgcgcgcccgcccgtaatcctcctgccggcttccgctcctgcggccggcgagcgcgccgtggccgcccccctcgccacgccgccccgccgcggctcggagtggacgattggtcagtcaccacccccacatccccacttgagctgctatactaggactaggaggatggctacagattcctagaattgaacggaatcggtcatatcaactcctgctcggctgctctagcgcgaaccggatttggatcggataaggaggggacgtcgccggctccaacttgcactctccagtctccacctgcgatgcgatctcctttttttcaatcagagagagagagagagagatcagaagattattgcagctggcagaaatggaaacatggaactgatgccgcttctgagatagagaaaaaaaaa

SEQ ID NO: 177074 - DNA, 492 bp, Zea mays
  Clone ID: MRT4577_93080C.1
ccccccgctccacatttaaggtttctaaaccatcccccgaacaaaaggggcggttcggtcccaaacactggggggcctcgtcatcgccgccgccgtggggggggctgaaaagggcagctccctcccccccagttcaagaggaaccaacccaaaaaggttggatccaatacaaaaaaacaaaagcgcgctttactgcccgagcagccttttgaccccggacttttggccccccgggagcctccccggaaacttgatgtcaaacttgacccggaggtggcccttcctggacgggcccttgggtatgggaatgccctcccctggcaccacctctttgtagcccggggggatcacggagctgaggggcaccgtaaggctgcccccgtccagggttgtcacgggcgcggggtcccccgtaggggcctccgccagggggatcttttgggtcaccaccaggtcgttgccgtcgggggtgaacaccgggggcggtttttc

SEQ ID NO: 177075 - DNA, 855 bp, Zea mays
  unsure (1)..(855): unsure at all n locations
  Clone ID: MRT4577_93081C.1
tgtcgttcgacttatcgttcatctcactgtacttctctatcgaaagataagggttcatcgaagaaagggaaggganctatccgctcttgtcttcaaatganagcaagccggatccgatgaaatcttcactcggtaatagtatagagtagagtgctccattgatagtggtggattggacttcttgaaatagatatatatatgtgaaagaaagagatggtttcttgctcggtgaaaggaatatcactatccctcgtcctagggttttcctgcttgattctcttttcagtgagggatgcccacttaatcttaataaagtaagtaaagaatgatcgattcgataggaagcactggttcaaggaataacccttggatgctgatctctggttaaaggattaaccgtcggatagcgagctggaatcgaaccagcaattgaatcttgtcgctactttggcggagtagaccgagggggaatgtagagtatagtttacgacaaaaggtgttctaggaccaaaggatcgaagagtgcggcctactgtacttgaggattaggaatatggaagatagggttctcctaagacctaagaatagtagagaagcaagggttaatagaagcaccgctgatgttggtccaatctagctgggctggataagaatcgggaagactcgggcaaactggcaaacatcggatgagattgcaccttacaacatagaaggaagaactaacataacaatcatctcaaaaatccagatgaaggagagaaggcagcatacaaataataaatagaatatctagggtggtaacacctgcaactcggcaaggagaaggaatccctgtagtagcgagcagtgtgatta

SEQ ID NO: 177076 - DNA, 718 bp, Zea mays
  unsure (1)..(718): unsure at all n locations
  Clone ID: MRT4577_93082C.1
cgggtcgtccgttcgctcgttcatttgaacggggttcgctctgcggtagctttcccttttctggtccggcgtggggcccccggtcgtctcgtcccggtttccttttccgcatgggcccctctcggcccgcctgcctttcgcttccgtggcggtgcgcggtacggacaccgcggttgttgttggttcgaacgtttcgggcgccaccgcaccgcaccgatcgtcgtcgaccgacccagcacctgctgctccccttcctttttccttcttcctgcctgctgtgctgctgcggtggtcgtcctctcctcctggcagtggcaggacagccagaggattttctctcttctttttttccccatttcctctcatttctcgccttcttttcctctgtacggtactggtggtttttaagatagaggaggattatggatgagccttgaggctttcatccgacgattggtcaatggaacccgataaatatagtgtggaacaagcaaatcgatatagaacccgattaagctgatgtagatactatttttcaccggtacagtctcaagcacctcacagaaaaagacccattggaagggacacttgagttgtcctaagactagtgaagntacccgagatgccgacaaatctcataggaagatttgacgaacantaagatagagagggggaaaagataaaagagatagtagacacatttatgatcgactcgatg

SEQ ID NO: 177077 - DNA, 503 bp, Zea mays
  Clone ID: MRT4577_93083C.1
acctccttctcccatcgcggtcgctgcacccaccgaactatcgtgcgctatacccaccgtagaccaggccgcaccggttacgtctcgagctcactatcgccagtgctcgtgaaagggctgggcaggacccccatcctgcggggattgtgcgcgggctgctaattggactcaaaaggtcagggttggcggcaatttctctccgtgaagctagcgccgtcgtctgtccgccaagtgacgagacgagcaagtcactgaggatcctggtgcccagctggttgagactgctaagcaggagcttgttgaaggagaagaacaggtggttcaagtggagctaagtatcgaggagttcgattcgatctaggtggcatctcccagttgactttctggcgccaaggatggattttagatcctgttatgtttatcttttattttgtaagacttttgctatgtaatatatactctgattatattgtgacatttatctctatacactctgttattat

SEQ ID NO: 177078 - DNA, 857 bp, Zea mays
  unsure (1)..(857): unsure at all n locations
  Clone ID: MRT4577_93084C.1
ccggccgggggatttgcgtcttgcttcactcttctacttgcttagaccagaagccttcttgacctcaaccggggtcgctgaaagctcaatggtagacaagaaacagtcatcgggtgccgccatggtggtactcgggagtgcaatgctcaggcttgcctctgctgccgttcttcctcgccaaagcccatcttcggatccgtttacgcctattgatcctcagaactgggtaaacccggataatatgacttgggatgactacgttgaaccaccgaaaactaattgggcagacccatcgcgcaagggtagggacaggaacttcaacatcgccatgataacagtcgactatccggattcgccttttgtggttactctccgggccaactctgatatcttcggtaacccacaaccgcttgctgctggcctgagtcgtgacgatgtacccaaattctaccacgatcttctcaacgttccaagcgagatcaaccagggtcatacgctgcacgagtactggatgggcgactcatttggaaaatatggagtcgacctgaccgtattcggcccgtatcgcatgccctcgcgtagctaccagtacggaatcgacgatgaggagggcggcttcaatgaaggtgcttgtccagaaggtcctccgtgttcagtcgacctgcgcactgatgctctcggggcatggcgagcggaagttggcaacgaaaccgcagacgcattcgaattggctttcatcctctctgcgggccaggatgagtcgtctacatggcaggaattcggtgaaatgaagttcctctcccaaagagacgtacccccccgagttgggcccccagncaactcttcactcccccact

SEQ ID NO: 177079 - DNA, 234 bp, Zea mays
  unsure (1)..(234): unsure at all n locations
  Clone ID: MRT4577_93085C.1
tataaagcaaaagcgccggagagcagcgtgcctcacatgcagaagaacttgagcgcgcctcccgtctcttaccgaacatgcgcgtagggccgcgtagacatagctgcttgccggcgacacccgtagccgcaatggccgtcgcccaggcggggccgagccggggcgtgctgcccctactgctggacgccgagttcgtaggaggaaagttgngaggctgttaccattattgaaacc

SEQ ID NO: 177080 - DNA, 1014 bp, Zea mays
  Clone ID: MRT4577_93086C.1
ttgggtacctcgaggccggccgggataaaacattgggcccctcgaggccggccggggcgcatcccccggtgaggtgagcagaccactcctccactagtcccctgtccggctgtcccctccttcgtgtcggagcctgcgcctcggcttgtccccaccaacccgcagctcgctcccaccaaacccacacccgaacaatggcgtcggcgtccaaggaggaggtgatcgggaagctcaacgtccgcgtggtgcggggcaacaacctggtcatcgccgacccgctcacccacaccagcgacccctacgtcgtcctccagtacggcgctcagaaggtgaagactagtgtccagaagaagaactccaatccagtgtggaacgaagtactgcagctctcagtaacacatcctacgaagccagtgcaccttgaagtttttgatgaagacaagttcacagcagacgacagcatgggtgttgctgagatcaacattactgacatctacgatgctgcgaagctggacctgaagcacgcctctgatgggacaaggatcaagacgatctaccctgtcggagtaaactaccttggcggcgagagccatgttcagtggaaggatggcaaggtggtccaggacttgattctgaagctgaggaaggtcgagagtggcctgattgtggtgcagctggagtgggttcatgttcctggcgtgaagctgtgaaggccctgtctgaatgagggctgatggagctgcagttgctgtgtccctggtttgattgttttggttgtaaacgatatcctgaacgtggtgatatgcggtgtatgagtgaggtttgagtgtgatgctttgtttggggtacttcctggtgacatgatgtgggtatgactgccaaaggttgtggcgcaccaataagaaacgccctgtcagcatgacagcatgttgtgagatgtaaactaagactttagaacctaaatatacaggtgattgggcgttaattgcttaaaaaaaaaaaaaaaaagcggcc

SEQ ID NO: 177081 - DNA, 631 bp, Zea mays
  Clone ID: MRT4577_93087C.1
atcaagacatagttctttgccagtactttctgtgccaggatttgggtttcatttaacaataaaaccaaagcatcagtgccaccttaggtttcttgatatcaaggacagtgtcatcaaagaacttccagatgacattagcgtcctttataatcttcagacacttttcgtcatctgtacacagatgggtgcacaaggttggagggcatgcctccagagcttggacaaatcgcctcacttcgaacaattacatggtttgtagtgggaagtggcttgagttgtagtagtcttggagagctgaaggatttaaatatcggtggttcgttaatgctaaagcagcttgaaaatgttcctgtagggaggaggagtgcaggagcagccaaccttgtcgagctgcgggtgcccagtcgtaagaataagaaggaactgagacaactgtcactagagtggacaagtggtaaggaggagggactacagtgtcatgaggtgctagagggccttgaagctcatgatggactcctggctctaggaatacattactaccaaggcaccagttttccatcttggatgggtatgttgaaaaacatactcgatcgaccttcggttgtccgattgtagtaaagtagaccggctt

SEQ ID NO: 177082 - DNA, 327 bp, Zea mays
  Clone ID: MRT4577_93088C.1
gggctccagccaaaccatcgggctgaaacggggttatgggagctgatctgctggcatgaaacgtaaggggacggtgcacctcgtgcctacattatttatggaatgggctaacaatacggaaggttcgaagcaaaaaccaagccagatccttggaattcccttcacctcaacccatattttgaatggaagaaaactaacctcagtttcatggcgtggactcccttagagggggcccgaaaaaaggcaacatctggatggtgatattagtaacatctgacccttaccgtgccagggatgctaaaatcagttgctgaatacttcaggaca

SEQ ID NO: 177083 - DNA, 309 bp, Zea mays
  Clone ID: MRT4577_93089C.1
tcgtttatggttgaggtctctgcggttcctgaggggattattaaaagtgtttgctgtaagacaaccacaaggactgatagccaggaaaggctcgtcatagttgatgatttagaaccctccccagagattgatggggaaacggcgaaagaaactgcaactgctgacaagagatgggacgatcttgcgtggaagaatgctgggaatggtatcactcttggattgctcattgcacttctaatgggacctaacatgtccagggctgcagtcactagacctcttgaccttatggcacttgattttacggacgca

SEQ ID NO: 177084 - DNA, 630 bp, Zea mays
  unsure (1)..(630): unsure at all n locations
  Clone ID: MRT4577_9308C.1
gacgcctgcggtaccggtccggaattcccgggtcgacccacgcgtccggcgaggggttaagccgacgcgcttgaggcgcggagggatccggaggcgagcggagctcggtgctgaggccgcctcagcggaaaaaaaaaaaaaatgtccgcctgaggagacccacaagttctatcggggggacagccagcccgcccggggagccacgggcggctaagcccgagagccgcccgagtcgcgccgactcaagcactcgcgggggcccgaggcaacgcagccgccggcggcgcgtggggagggggaaagcctgagcccgcgctcccggccaaagtgaactttaatcgggaaggttggatgcggagcccgggcggcaggacctgctagaagtggctgaagatgaatccccagcagcagcgcatggccgcgatagggaccgacaaggagctgagcgacctgctggacttcagtgcgatgttttctccacctgttaatagtgggaaaacgagaccaacaacactgggaagtagtcagttcagcggntcaggtatggatgagcgtggaggaacaacatcttggggaacaggtggtcaaccaagcccctcctatgattcatntagaggttgtacagacagc

SEQ ID NO: 177085 - DNA, 517 bp, Zea mays
  Clone ID: MRT4577_93090C.1
aattcggcacgaggccgaccccctcttctcttcagcgctgccctccaggagctccggctagacgcccccctccccgatcccgcaacggcgctggtgaggtggtccgtcgcagtgacgccccctccccgatcccgcaacggcgctggtgaggtggtccgtcgcagcgattgagacaaaagtaagagtatggcgtgtcggatgtgaaggcaaccgcgtcagccatggcggatgaggagcatccagagaggatagaggaggcctccgagggcggccgtgcggtggcccgtggtggcgagtcgcggtggctccaagggtcggcgccagctccgaatcagggcgtagggccaagcttttgcgcctagcgccatgccgcccctgtgcctccacccttccctctctgtgttgccgccggccccgacggagcggcgtcgggtgcctccgcctccttcctggccgccgggggccaagaccgcgacagcaccccacccgcctcacttccttggctcacagacggagc

SEQ ID NO: 177086 - DNA, 679 bp, Zea mays
  Clone ID: MRT4577_93091C.1
gccggccgggctccggaatcccaaccgaccccatacgatcctcatctcaccagaatccatccctcctcatgcacctccgcgatcccgtgcatccggagacgcatccccacacgatgaacaccgtccacccgcgctcgcgcttcttccgcccgcacgggaagcgcaactggacctttctcgcggctgtcgaacgtcaccgtgcttgatcatcaccaagatgactgccaacttcaacgatgaacagctccctaactcccaggacggacagcaacaccaaaaacactgaccagccgcagggagtcgaccgaaccacctgctacaagaacttcacccccctatcccccatgacgactgtctatacacaagctagcactctcatcgtaagtacacggaataaagaggcccttgaaatgatcatcttctatatcctatgggccccaacctccgccaagcggtctagaaatatgcttaccccggctcgcaccaaatctacatcaaggttatcaatgccgtccacctggaactgcaggccactgacgcaatcgacctatagcgagatgaaatacaggagctcactggccaggcatcatgaacgtgcagactggaatcaacctactactgagcaactgaatcgccttatagaccagccgccgttcaacactggttgaagaattgaaga

SEQ ID NO: 177087 - DNA, 359 bp, Zea mays
  unsure (1)..(359): unsure at all n locations
  Clone ID: MRT4577_93092C.1
cgatctaagatcaagaaaggccacagcnnccaagagaaaccacacagggccgagggggggggagcaaccgacccacatncgcaagcaaaaccacgcccaaggagccgaaaaagagggaaaggaagggaggacagacgacgacgacgacaacaccacgcggaggaggcaccccacgaacctacggccgaaggagacgaagcggacaggccgcacggcggagccacgcaaggccaggaaccgccagacgaagaccaagagacgaggcacactcggaccgaagaagcgcccgatagacacgagaaccggagggcaaaaggacgaaaagcccgaaacccgggacgaaaaaccggggggggacg

SEQ ID NO: 177088 - DNA, 253 bp, Zea mays
  Clone ID: MRT4577_93093C.1
cggttcggcgggggcgtacgcttgcgaagaagacaaagaactgtctcttgttccttcaatgcttgatccttgctattgtggtgcggttcctagctggggtgggtgatcagtttgggtttatctgcatatgatgggggtgacttgggtggcttcatcagcatggaaatagattattcgatggcgatgcatagttcccttttgctaacaactgcttaaaaacgctctgggggaaggctggattacgagaattctt

SEQ ID NO: 177089 - DNA, 198 bp, Zea mays
  Clone ID: MRT4577_93094C.1
tcggttcgttcctcaagtgatcataatcgtcgagaagttaccagctagcggagatcagcggcgttggcgaacatggggcaatccttccaggccgtcttggctcaggctccatggcgagtgccaagcggagtacgcagcgcatttcattagggacggcgccgtctccaccgtctgcgccgtgaccgacaccgcctgagc

SEQ ID NO: 177090 - DNA, 421 bp, Zea mays
  unsure (1)..(421): unsure at all n locations
  Clone ID: MRT4577_93095C.1
gacccacgcgtcagaggagggcgctcacgaggccaccggcgctgatctcaagcaaccactagtcctcgccgtagcggttggcgaatacaggcaggcgcgagccaggcacagcggcacgacgacggactaggagcacagctgcacacgggcacgacggctcctggggccaaggcacggtggcggttcgggcgacgatggggccaaggcatggcggaggggcagccggccgggcaaggtgctgcactgagggggtcgccggtgagaccacggacggagggacgcgtgggacgatgcggcatgatgagatgtgagagagaagcccgtgagaataaaaaatataacttcctatattaaaaccgtaggaagttacttaacttcctaaatgttgtacatgtactctagaaagttanggcctgtttgt

SEQ ID NO: 177091 - DNA, 944 bp, Zea mays
  Clone ID: MRT4577_93096C.1
tcggaattcggctcgaggcagcgaagatccaaagatagcacaatcgcatttcacacgccgagctatttctacttgagagaatcccccttctcccacaaggagcgagtaatttgaggcagagaccgacagagatggcagcagttatggtgtctcgccaaggccgggagctgcagcggtacagcgcgagcacgggcgggcgcgtggtggtgggctgcgtcccgtaccgcgtgcgcgggggcgacggcgaggtggaggtcctggtgatcagctcgcagaagaagggccccgcggggggcgtgctgatccccaagggcgggtgggagctgggccgctggtgctaccgcagccgcagctacgacgccacgtacgagggcttcgtgctcccgctgcgcgtcaccgcggagctggaccggtggcccgagatggccgcgcgccgcagggagtgggtctccgcagccgaggccatcgcgcgctgcccccacccctggatgcgcgaggcgctgcagcggttctccgacaccgtcgcggtcgcggcggagacgatgcacctcgcctccgccctctagctctaggcccggccggccgtcgatcgcttccctcttcccgccgcggtctcgtcggaccgcgggcggcctcgcgcgttttttcggccgccgcggacggacgcgcgtgcggggctgctgccgcctgctctgctcgctggattggacggaacacgccatcattcagtcagacaaatctggacgtcgtcgagctgtggcaccaggacgcggcctgtacattgttcttggggggatctcgttttgaaatacaaaacaaacttgtaaaaaaaaaaaaaaaaaaaaaaaaaaaaaaaaaaaaaaaaaaaaaaaaaaaaaaaaaaaaaaaaaaaaaaaaaaaaaaaaaaaaaaaaaaaaaaaaaaaaaaaaaaaaaaggggggggg

SEQ ID NO: 177092 - DNA, 347 bp, Zea mays
  Clone ID: MRT4577_93097C.1
acattgttcttggggggatctcgttttgaaatacaaaacaaacttgtaaaaaaaaaaaaaaaaaaaaaaaaaaaaaaaaaaaaaaaaaaaaaaaaaaaaaaaaaaaaaaaaaaaaaaaaaaaaaaaaaaaaaaaaaaaaaaatccaaaaaagtaggacaaacaataaaaacatacctctggcacgtcccaattaccacctataagggaagaactcttacaaattacatagccaattggattacaaattccacaactgtttaaaaaccgaaaaaaaacccaattaaataaccttttaaaaaatcaccttttcgccatttaaaacattacccaatagaaaacccccgat

SEQ ID NO: 177093 - DNA, 637 bp, Zea mays
  Clone ID: MRT4577_93098C.1
ccttcacttctctttgtggaaaagatgctgctcttgtgcaagagctccgtgctcgccgtcctgctcctccacgccctctctctgcccgcctcggcgctcgccgtcgggctcgggcggcgccaccgccgcgacgtcctgcccgggcccaagggctgcgacgtcttcagcggcagctgggtccgcgacgacggctccgccgaggctgcctacaccggctacaagtgcccggtcatcgacgcggagttcaactgccagctctacggccggccggactccgactacctccggtaccgctggaagccggccagctgcgagctacccaggtttgacggcgcagactttttgacgcggatgaaggggaagacggtgatgttcgtgggggattcgctgggccgtaaccagtgggagtcgctcgtctgcctgctgcacgccgccgcaccgcagtcgccgtcgcagctcgtctccgccgaccctctctatacctacaggttcatggagtacgagctggtggtgtctttctaccgcgcgccgtacctggtggacatcgacgtggtgcaggggaaacgggtcctcatgctcgacgacatcgcccgagaacgcccagtatggcgcggcgccgacgtggatctcctttcac

SEQ ID NO: 177094 - DNA, 1406 bp, Zea mays
  Clone ID: MRT4577_93099C.1
gaccgcccggggcagagacagcgctcctcctcctccttctcctggcactggcagcgaagatccaaagatagcacaatcgcatctcacacgccgagctatttctactttgagagaatccccttctcccacaaggagcgagtaatttgaggcagagaccgacacagatggcagcggttatggtgtctcgccaaggccgggagctgcagcggtacagcgcgagcacgggcgggcgcgtggtggtgggctgcgtcccgtaccgcgtgcgcgggggcgacggcgaggtggaggtcctggtgatcagctcgcagaagaagggccccgcggggggcgtgctgatccccaagggcgggtgggagctggacgagtccatggacgaggcggcccggcgcgaggccgcggaggaggccggcgtgctcggcgagacgggccccgcgctgggccgctggtgctaccgcagccgcagctacgacgccacgtacgagggcttcgtgctcccgctgcgcgtcaccgcggagctggaccggtggcccgagatggccgcgcgccgcagggagtgggtctccgcagccgaggccatcgcgcgctgcccccacccctggatgcgcgaggcgctgcagcggttctccgacaccgtcgcggtcgcggcggagacgatgcacctcgcctccgccctctagctctaggcccggccggccgtcgatcgcttccctcttcccgccgcggtttcgtcggaccgcgggcggcctcgcgcgttttttcggccgccgcgcacggacgcgcgtgcggggctgctgccgcctgctctgctcgctggattggacggaacacgccatcattcagtcagacaaatctggacgtcgtcgagctgtggcaccaggacgcggcctgtacattgttcttggggaggggatctcgttttgaaatacaaacttgtaaatgtcacggagtttaacgagatccactgtggtactctactagtatacaatacacgaagaagaaatgaaccatggtagaaaaaaaaaaaagaaaaaaaaaaaaaaaaaaaaaaaaggaaaaaaaaacaaaaatttttaaaaaaattaaaaaaatggaaaaaaaaaaaaataaaaaggcggcccggaagcccaagttttggtgccttttagggagggtaaatggccccctgggggaaaacagggcaaaagctgattccggtaaaaaatgggtgccggttgaaatttccaaccaacataaaagccggaaccaaaaatggaaaacctgggggggctaaaggagggaaccaccccacattaattgagttgcccaaacggcccgttttccaggagaaaaacttggcggcccgttcgctttattgattcctccatccctgggtaagaggggtttggcgattggggggcttttccgtt

SEQ ID NO: 177095 - DNA, 175 bp, Zea mays
  Clone ID: MRT4577_9309C.1
cgctcgggtcgttgtggtgcgctgtcttcccgcttgcgtcacggacctgcgcgactcagtggccgccatggcatcagatgaaggcaaacttttggtcggagggctgagtttcgacaccaatgaccagtcgctggaccaggtctcctcaaagtacggccagatctctgaagtggtg

SEQ ID NO: 177096 - DNA, 389 bp, Zea mays
  unsure (1)..(389): unsure at all n locations
  Clone ID: MRT4577_930C.1
gggaagagccgaaccccagcaaaaaacaaaaccaagtcctaaaggccagcggaaaaaaatggcccgcccaaaaaggaacatctaacccgaccaaaaaatcccaacagaaaagggggccccccaacaaaacaaaaaaaaaccaacgggccggggaaaaaaacaaaacttggaggggaaccaaaagaataacccaattcccctttcatccaacggtaaaagggggcaaacgggaccatttttcccccaaaaacaacagaaaaagggggcccatcacaagggccaacaggggcaaaaaagggggaaaccattggacccgggggacgggaccaaagcccctggaaccggggggacccgggggnccacccgcaaaccccgggccgggccccggg

SEQ ID NO: 177097 - DNA, 311 bp, Zea mays
  Clone ID: MRT4577_93100C.1
attcggctcgaggaccggacgacaatgtacacctgccggcaagggggcgacgccccgccaacagtctgccacgaccacaacgcctggaccggaaaccggcactgcggcaaccactccagcctgcctatgcgcagcataacggcaggcccgcgcgggataggggacaggcgctgaagcctgagggggacactggacccgggctcgcgatgaaggctgtgcagacgcggcaggaatcacacgatgaccgaagcgcaggcaacaaggaaacgtccgcgctgcatcggctggggccagcccgagaagactcgctt

SEQ ID NO: 177098 - DNA, 387 bp, Zea mays
  Clone ID: MRT4577_93101C.1
actttcttttttttttttttttgtttttaatcatgggggaaggggaattaaaatctgagttgaatcactacatcaactaatccttaagcctatacaaagtgcatggtatgtccaaccgtccatgggtccacagtccccacatgatacaagctcgctcacagggacatggggcagcaaacctcggggggctttgctatttgatctttaccatcaagcactgtgtgcccgagccatcggactccacctacccgagttgtagctgctgcaaacgcttatgcataactccctcattttcatctcatatataccactggggcagatgtgtgcaaacgctctcatgtacttcatgccgtactgagtaagtgaaccacactgggactcgaaaat

SEQ ID NO: 177099 - DNA, 303 bp, Zea mays
  Clone ID: MRT4577_93102C.1
cgtggtactatacacaaagagagggagctcgtacatgtccttctgattccttttgtggatcgagggagtggccaaccggagataatatagctagccaggctcgccatgcctcgacagaggacactaggctacgcggaagctggcggccggcttctgctcgaggaggtggccgtccttatgcgtctgttcgtgcctgccgggcgcgcggaaaccccaggtcgcgaggtcaccgagttgccttggttcacggacaaacttcactccaagcactactcacggtacttaacagttgtggacatgagc

SEQ ID NO: 177100 - DNA, 573 bp, Zea mays
  Clone ID: MRT4577_93103C.1
cggccgcgtgggcaacaaccgccctgcgacctaactcaaaaaaaacattaatctacggtgtgtgaacaaaatacctaagggggtgtttggttctgtggactaaagtttagtccgggtcacatcaagcgtttgactttcaaataggagtataaaatatagactcaaccaactgtactagattcgtctcactttttaatcttcggctgagaaattagttttataatccgactacatttaataccccgaacggaggttcaaacattcgatgtgataggggctaaattttagcaggggcaaaccaaacaccccctaaatgttactgcagctacactgattaattcataacaacatttgtaaattgaatcatcatatgtcagcaactgatatatatgaaatcgcaatccactttgatgaagtgacccgcaagtatcagtcgaggtgtcttacatgggttgcatgtcctgtcgtctgtaattgcagtggatcttctgggggggtccattcataggcgcgcgccatcgccgcggcgtaccaccagtacgtgctgtatagccagcgccgccaagctgggat

SEQ ID NO: 177101 - DNA, 436 bp, Zea mays
  Clone ID: MRT4577_93104C.1
gacccacgcatgcgtgcacacggtggtaatacaagaagatatccaccatagctggcacaactagatcctagggtgcgtccaactccgcatcaacctccgtcatcagctcaagctgcaagagcactaccaacaacacgtgacccgaactagacaagctccgccccctagcccaccacaccgctcagcatctcccgctgcaacaagcccgcacctgagcttcttcatccccttcctcattcccgtgacgccgccgacaggtccacctgcactgccacctgaagacgccaaacgtgatgcacctgatgatatggagacacaactgaagctatgagaggccaccataccgcctgcgttgctcgttgagctctgcctgcaatacgcccagcacggactgatctatactgtacctatacacctatttactacgacatgcaca

SEQ ID NO: 177102 - DNA, 383 bp, Zea mays
  Clone ID: MRT4577_93105C.1
cacagctagaaaaaacaagggaaataggtcagtcatcttaggttaacaagaaacaaggaagctaatattattgacaacgcttagctattttcatatctactgatatgacacataagccaaaagaaattataaagtatcatagaaccacccagagaaacccaaaccgaacatttgttgccaaagtcctctcatagtctcatgatccagaattgtctctggtgacttcttttcacctgctccatgaacatgagggaatctggtcttcctcaatatttacaatgcatctgcatttcgtctaagttgatctgttgaccgcttgagcttgcggcaccggtaggtagcgtcggagagacatgttgggcctaggagtgggagcctcgtgc

SEQ ID NO: 177103 - DNA, 276 bp, Zea mays
  Clone ID: MRT4577_93106C.1
gcaggccatacctctcagacttggaacatgcgcttgaaccaacgaccgcacgccgatgcgggggccatgatgagccaccagtgagctctccggggacactgcagcctctaccttctcaagatcggcaggagagagaaaaaaccattcgacagcacacaacagcagaaggaaggaatctgcgcgcgccgataggcggaaaaacgatgagcagaaactgactctcgtatgcttcggtaatgtgacgagccggcggcgcattgcaactagcttggacta

SEQ ID NO: 177104 - DNA, 1390 bp, Zea mays
  Clone ID: MRT4577_93107C.1
attttctaaagcttctacaaacttatccttggacaggagcttaatatatatgatatccagtcattagattctgaactggcctatgccttgtggagtttcaagcgcttgcttgtcagagaaaatatgcagagtccaatttgacaagggactgccagatatcagatttgacttatcggggttgtagaattgaggatcttgctattgagttcgctctcccaggatatccagaatatgtgctctcgccaggaagtcgctctgactgtttgaatgctgagaatttggaagaatatgttcgtcatgttgttgacgcaacggttaaaagtggaattgcaagacagatggaagcttttaagtcaggatttaatgaggtatttccgctaaaaaaactccaggttttttcagaggacgagctagagagattactttgtggtgaacaagatacatgggattttgcgaaacttgtggatcacatcaaatttgatcatggctacacttccagcagccctcctgtcattaatttgctggaaatcatacaagagtttggatccattcaacgtagagctttcttgcaatttataacgggttcacctcggcttccaccaggcggcttggctgcactaaatccaaagttcacagttgttcgaaagaataacagcaatgatgttgatcatgacctgccgagcgtgatgacttgtgccaactatcttaagttacctccatactcttcaaaggaaaagatgagagagaaactcctctatgcaattacagagggccagggatccttccacctatcttaaccaataagcgataatgatacttcgcatgcaacaggagtttctctttgtaagtatctcgtaggaaaggaaagcacggtgtaaatgtgggtggttcactgcttattttagctgacagcacgatctggtggagctgattttaggagagaaaaaaacggctaccgctctttgtacatactaggtttcaggtgtgatcaagcagatcactagtgtgcctagttcgctactcttttgttcaaactttcggtgtacatatgcgtgcctgcctgatagaaagtgccagtgctatctttcattgttcgttggtgtttgccttcttaagcgtcgttgtgtgacttatggcgaaatatgtgcaaattatttgtggatttcatatgaacaatgtctgatccgagcgtgaggaatttgtgcttttggaataggacagtgccttttccttcggttccgaaaaaaaaaaaaaaaaaatccaggatatccagaatatgtgctctcgccaggaagtgggtctgactgtttgaatgctgaagaatttggaagaatatgttcgtcatgtggttgacgcaacggttaaaagtggaattgcaggacagatggaa

SEQ ID NO: 177105 - DNA, 2813 bp, Zea mays
  Clone ID: MRT4577_93108C.1
aaggctggccgggatggcccaaagttagtatagatgtcaatagtcaaaaggctgaatcaccacctagtgacactgctttggaaatcaaatatgctgacgatgactctcaggaacaagattccacacctagtcagaaggctgattcaccatcagagggcctcacttgtggaagtcagaatctacctgcagaaacatgtccgaagcaaggaacttcatcttctggtcaagcagaaagaaacacaacaatcttgagtgattacaccatacaacaaaaattggtatttagcttaaatgggaaagagcttgaccggtctgttactctatatcagtcaatcctgcaggatcatatcaatgcagggtctgagataattctggacatgcagttttggcgcagtgtacatgacataactttcaaagctgctaatccagaagcaaatagaacagctgttaacccagaagcaaatgattctcctaggcattcctctactgcaatgtcatcaataaatgagaatacaactgggtttacatggcagatgctcccattcttttctagtatgttgcttggtaaacttccttgcaaacttgacagatcaggtgcttcgtatgacatattgtttatgttacacattttagagggattaaacaggtattcctttcacctcgtgtctgatgagagaaaccgttcttttgcccatggaaggataactaaccttgatgatctgaaggctgaagttttctcgattcctcagcaagagtttgtcagcgccaaattaacagataaattggagcaacaaatgcatgatccattagtttcaaggtcttgctgcctgcctttatggtgcattgaactgatgtctgcatgtcctttcttattttcatttgaggcgagatggaagtatttccagttgacggcatttggttctttgaaaaatcatcatggccacatgatggatgcaagtgttaacagtgttgcggaaagggggtcttcccactcacggaaaaagttcaaagttgatcgtgatgatatactggtttcagcagcaaaaatgatgaagtcccatgctaagagcaatgctctacttgaagtagaatataaagaggaagtgggcactggtttaggtcctacaatggaattctatacattgataagtcatgaatttcagaagtctggtctaggcatgtggagaggggaacttccttgtaaatctggtacccatgatactcatgtttctagatttgtggttgcctctaatggacttttccctagaccttggtctgcttctgaagatcctgcttcctttcaagaagtgagcgagcgattccacttacttggtctggttgttgcaaaagcaattaaagacaacagaattcttgacattccattttctaaagcattctacaaacttatccttggacaggagcttaatatatatgatatccagtcattagattctgaactggccatatgccttgtggagtttcaagcgcttgcttgtcagagaaaatatgcagagtccaatttgacaagggactgccagatatcagatttgacttatcggggttgtagaattgaggatcttgctattgagttcgctctcccaggatatccagaatatgtgctctcgccaggaagtcgctctgactgtttgaatgctgagaatttggaagaatatgttcgtcatgttgttgacgcaacggttaaaagtggaattgcaagacagatggaagcttttaagtcaggatttaatgaggtatttccgctaaaaaaactccaggttttttcagaggacgaactagagagattactttgtggtgaacaagatacatgggatgtatgcatctatcttctgttggcatctgttcatgttttgttattattttattctggttgctgatttcttggtctgaacagtttgcgaaacttgtggatcacatcaaatttgatcatggctacacttccagcagccctcctgtcattaatttgctggaaatcatacaagagtttggatccattcaacgtagagctttcttgcaatttataacgggttcacctcggcttccaccaggcggcttggctgcactaaatccaaagttcacagttgttcgaaagaataacagcaatgatgttgatcatgacctgccgagcgtgatgacttgtgccaactatcttaagttacctccatactcttcaaaggaaaagatgagagagaaactcctctatgcaattacagagggccagggatccttccacctatcttaaccaataagcgataatgatacttcgcatgcaacaggagtttctctttgtaagtatctcgtaggaaaggaaaacacggtgtaaatgtgggtggttcactgcttattttagctgacagcacgatctggtggagctgattttaggagagaaaaaaacggctaccgctctttgtacatactaggtttcaggtgtgatcaagcagatcactagtgtgcctagttcgctactcttttgttcaaactttcggtgtacatatgcgtgcctgcctgatagaaagtgccagtgctatctttcattgttaaaaaaaaaaaaaaaaaatcttaagttacctccatactcttcaaaggaaaagatgagagagaaactcctctatgcaattacagagggccaggggatccttccacctatcttaaccaataagcgataatgatacttcgcatgcaacaggagtttctctttgtaagtatctcgtaggaaaagaaagcacggtgtaaatgtgggtgggtcactgcttattttagctgacagcacgaactggtggggctgattttaggag

SEQ ID NO: 177106 - DNA, 590 bp, Zea mays
  unsure (1)..(590): unsure at all n locations
  Clone ID: MRT4577_93109C.1
gctgctnaggtaagtccacttccgattgtttatctacgaacttctcttcctgtttccgtaattccgtcacgctggattcaaacaagaacatgtattcaagcaccggcgacgcatcttgaggtatggggaaaggacgatgcatgacagcgtgaggatttgatatctcgtgatctggaatctctgttctttgtgttgggttgatctgcttcctgttcttgaaattcatagtggggacaaacaagggaagttgtttactgaacctttatttgattattaggagatttgggatctttgatttgatctcattagggtcttttgattgaactgaacagtcataatcctctcacgactcaactctttgatcgacctttgggttgcgtgtcttgaagttttcatccatccttctgtttgcctcaactagagttacatactcacccaatagaacaattctatgcccggtgattgtacctcctgaagtagaagagcatactgaagcagaactcgagtggtgttggatcgaaatggaaggcgggatgtcaagtttggaagccgccatgaaagcttcttcatcgatggcaagcagcatggca

SEQ ID NO: 177107 - DNA, 388 bp, Zea mays
  Clone ID: MRT4577_9310C.1
ctttgggctgatttatgtgcttgtggatgtgcgggctgattatgtgcttgttccacgtgctaaaggtatatgccgggctcatgagcatccttgtacgtgtcgaattgtgtcggcggtaaggtcggaaataagggcgtcgaagtcgtctccatcctttctataagatacgccctcaaattcggtataacgaacaaccgctattacgaggctacgaacaagtataatcgctatggtgcgcgtcggggtagcggggtcgctgttaaggatacgtagtccgcgaagtagcgtcggagttgcttctactgttgagtagtctgcgagggcaacctaagtatgtcaacgtagctcggcttcataacagtgacttccggctcctattcatactcct

SEQ ID NO: 177108 - DNA, 265 bp, Zea mays
  Clone ID: MRT4577_93110C.1
gacagaaaacgaaataggatgcgttgttgtctcggaaccagacagaggaaccggttatcacatggcggctgcaaaacaagcagagggatactaaagtgacacatcttaagaacgccccatgcaccatgcaagagaatttgaggaactgaagactgtccagccggcagcataaacatggacgacaaaccatgagtatactctctataactgatacacacccataccagcttaggtaaccatccaggcgtcaacgtaagaggtgcag

SEQ ID NO: 177109 - DNA, 148 bp, Zea mays
  Clone ID: MRT4577_93111C.1
agttattaaatttaccttttcagagggggaaaaaaacccctgttgaacaggcgatccgaggggcgctaggatcaccgatcagtagggatcatttacccctcccttgcgggcccatttatttactcgcaatataaaattaccgatcgga

SEQ ID NO: 177110 - DNA, 288 bp, Zea mays
  Clone ID: MRT4577_93112C.1
cccacgcgtacgcccacgcgtccgcggacgcgtggggtggagcgaagactcattgaacgtctgcggttgctgcttattaagcgtgcaaatggggccaggaacatgctggccgaaaaggaggaatacgtccaaacaactgtacacagagagaccatggacaatctatgtgagacccaggacatagtcagcgaacatggtgacatatgacaactgtgacgtgtgaaccgtatgcaacagcaaggggtagacggtctattttgactaggacctgacataagctgcatatct

SEQ ID NO: 177111 - DNA, 323 bp, Zea mays
  Clone ID: MRT4577_93113C.1
taataattctatttaatatatttatagacctagttcactggaatacgaattgacttacccttataacatccgacttgaaactacaaaattgacgacacctttcagctcagcatttcaccgaaaatagggtgagtgctgcgtcgaatcgcgcttcttctgtgtccacatcgagaattctttggccgtgtactgatttattttcctctgcgtttaatcttctcagagcttggcgtagacgagggtgacgatcgacgacttgttcaaacttttgtcgagcacttggtgaatatcacgctgctaactttgtcttctcctgattcttg

SEQ ID NO: 177112 - DNA, 872 bp, Zea mays
  Clone ID: MRT4577_93114C.1
ggtaccctcggagttggccgggaattccatcctgctgctaggtaagtccacttccgaattgtttatctacgaacttctcttcctgtttccgtcacgctggattcaaacaagaacatgtattcaagcaccggcgacgagttacatactcacccaatagaacaattctatgcccggtgattgtacctcctgaagtagaagagcatactgaagcagaactcgagtggtgttggatcgaaatggaaggcgggatgtcaagtttggaagccgccatgaaagcttcttcatcgatggcaagcagcatggcaaggaatgctgaccctaaccaacagactctccgccccaatttagtggagcagttctattttccaagacctggtcaatctttgccaggcattcctccattttttgggcctccctctagtttgtatcttcctaatgacaatgaagctaaatttggcaacaactttgaatcaaatccttcacagaatacagattggaacccacaggcaatagtgagcaacctaaccttccttgagcagaagatcaagcaggtaaaggatattgtgcagtccatgagtaaccgagagaaccaagtagctggtggttcctgtgaggtagctgcaaagcagcagctcataaccgctgacctcactagcattataatccagctcatatctactgcgggttcgctgctcccttcaatgaagaacccacttcttagcagcaatccagcagtcaggcagcttggcaacactctcggttctcctatgggctttggcatgaatgctaatcagcgaccaagcgtagacagcaagaccgatattccctgacacaggaaaacttctgattatgaggaactgatgaataccctt

SEQ ID NO: 177113 - DNA, 910 bp, Zea mays
  unsure (1)..(910): unsure at all n locations
  Clone ID: MRT4577_93115C.1
tgggtancccctcgaggggccggccggaaaaaaaaaaaaaaattttctcgcccgggagccgcaattccatcctgctgctcggacatgatgttatgatcctgacaagcttggctggctggtgaacctatgagttatatactcacccaatagaacaattctatgcccggtgattgtacttcctgaggtagaagagcatactgaagcagaactcgagcggtgttggatcgaaatggaaggcgggatgtcaagtttggaagccgccatgaaagcttcctcatcgatggcaagcagcatatcaaggaatgctgaccctaaccaacagactctacgccccaatttagtggagcagttttattttccaagacctggtcaatctttgccaggcattcctccattttttgggcctccctctagtttgtatcttcctaatgacaatgaagctaaatttggcaaccagtttgaatcaaatccttcacagaatacagattggaacccgcaggctatagtgagcaacctaaccttccttgagcagaagatcaagcaggtaaaggatattgtgcagtctatgagtaatcgagagaaccaagtagctggtggttcctgtgaggtagctgcaaagcagcagcttgtaactgctgatctcactagcattataatccagctcatatctactgcgggttccctgctcccttcaatgaagaatccacttcttagcagcaatccagcagtcaggcagcttggcaacactcttggttctcctacgggctttggcatgaatgctaatcagcgaccaagtgtagacagcaagactgatattcctgacacaggaaaaacttctgattatgatgagctgatgaatacccttatcctgctcaagctgaaagagatgagctgatcaatgcccaatccc

SEQ ID NO: 177114 - DNA, 1011 bp, Zea mays
  Clone ID: MRT4577_93116C.1
cccacgcgtccggcagtctcgctctcgcacaacggaaagtgaggagggggagagcgagagcgagagagagagagagagagaggagagagagagagagagaggagggagggagctcgagaggtcaacgagggggagctggcacgaaagctcagggctccttgctcctcctataaacccagcgcacccgccttccaggctcccattttctcgcccgggagccgcaattccatcctgctgctcgagttacatactcacccaatagaacaattctatgcctgatgattgtacttccggaggtagaagatcatactgaagcagaactcgagcagtgttgaatcgaaatggaaggcaggatgacaagtttggaagccaccatgaaagtttcctcattgatggcaagcagcatgtcaaggaatgctgaccctgaccaacagactctacgccccaattcggtggagcagttttattttccaagacctggtcaatctttgccaggcattcctccattctttgggcctccctcctccagtttgtatcttcctaatgacaatgaagctaaatttggcaatcagtttgaatcaaatccttcacagaatacagattgggatccgcaggctatagtgagcaacctaaccttccttgagcagaagatcaagcaggtaaaagatattgtgcagtctatgagtaatcgagagaaccaagtagctggcggttccagtgagctagccgcaaagcagcatctcgtaactgctgatctcactagcatcataatccagctcatatctactgctggttccctgctcccttcaatgaagaatccacttcttagcagcaatccagcagttaggcagcttggcaacactcttggttctcctatgggccttggcatgaatgctaatcagcgaccaagtgtagacagcaagactgatattcctgacacaggaaaaacttctgactatgatgaactgatgaatagccttaatcctacccaagatgaaagagatgagatgt

SEQ ID NO: 177115 - DNA, 2564 bp, Zea mays
  Clone ID: MRT4577_93117C.1
ctcgaggccggccgggccgggaatccatcctgctgctaggtaagtccacttccgaattgtttatctacgaacttctcttcctgtttccgtcacgctggattcaaacaagtacatgtattcaagcaccggcgacggtaatttgggttctgtattgctcgtcctccctgtgatgatttcctctactgttgcctgctttgtctgatctgggcccagggcatctgataaagataaacgataaaatatctccttttttggcggaatagcatcttgaggtatggggaaaggacgatgcatgacagcgtgaggaatttgatatctcgtgatctggaatctctgttctttgtgttgggttgatctgcttcctgttcttgaaattcatagtggggacaaacaagggaagttgtttactgaacctttatctgattattaggagatttgggatctttgatttgatctcattagggtcttttgattgaactgaacagtcataatcctctcacgactcaactctttgatcgacctttgggttgcgtgtcttgaagttttcatccatccttctgtttgcctcaactagagttacatactcacccaatagaacaattctatgcccggtgattgtacctcctgaagtagaagagcatactgaagcagaactcgagtggtgttggatcgaaatggaaggcgggatgtcaagtttggaagccgccatgaaagcttcttcatcgatggcaagcagcatggcaaggaatgctgaccctaaccaacagactctccgccccaatttagtggagcagttctattttccaagacctggtcaatctttgccaggcattcctccattttttgggcctccctctagtttgtatcttcctaatgacaatgaagctaaatttggcaacaactttgaatcaaatccttcacagaatacagattggaacccacaggcaatagtgagcaacctaaccttccttgagcagaagatcaagcaggtaaaggatattgtgcagtccatgagtaaccgagagaaccaagtagctggtggttcctgtgaggtagctgcaaagcagcagctcataaccgctgatctcactagcattataatccagctcatatctactgcgggttcgctgctcccttcaatgaagaatccacttcttagcagcaatccagcagtcaggcagcttggcaacactcttggttctcctacgggctttggcatgaatgctaatcagcgaccaagcgtagacagcaagactgatattcctgacacaggaaaaacttctgattatgatgaactgatgaatagccttaatcctacccaagctgaaagagatgagatgatcaaatgtccaaatccctgtggtggggaagggtctgaaccgactccgatggaggaccatgatgtgaaggaaagtgatgatggtggtgagggagagaatctcccccctggttcatatgtagtcttgcaattggaaaaggaggagattttagcaccacatactcatttctgcttgatctgtggtaagggtttcaagagagatgctaaccttaggatgcacatgaggggccatggagatgagtacaaaactccagctgctcttgccaaacccacaaaggattcaggtgcagatcatgcacctgttacaaggtactcatgcccatttgtgggttgcaaacggaacaaagagcacaagaagttccaacctctcaaaacaatcttgtgcgtgaagaaccactacaagcgaagccactgtgacaagagttacacctgcagccgttgcaacaccaagaagttctctgtcatcgcggacttgaagactcatgagaagcactgtggtcgtgataaatggctctgttcttgtggaacaaccttctccaggaaggacaagctttttgggcacgttgcccttttccaaggccacacacctgcgcttcccatggaagatgtgaaggtatcagaagcatcagagcaacctcaggacagtgagccgatgaatgaaatggcgaggagcaatgtgtatagcttcccctgtagttcgtctgatggtatatcgaacctcgacatgaaaatggctgatgatgtgcgtggttatttctcgccgctgaactttgatccttgctttggcgcgctcgacgatttcactcgccctgggtttgacatctctgagaaccccttctcattcctgccttcaggatcttgcagttatgggcagcagaacggagatagctgatggatgccgccatcgatgatgacgacaacagcactgccaacctttatttatgttgttgcatgatgctagcttggttcttcctctgttcaagagccatttgaggttatgcctttatattttccctaaatgtacttacgtttgtggtcattaataatgatcaaggacttctagcatttcttagacccagatagccccaattttcagtatacatacgcaagtattgcttgttcattttgtctgaatcggcgtgatgcttgtagcactgacaatttatcataacaagctgctcagctattaaaaaaaaaaaaaaaggggactagttctagatcgcga

SEQ ID NO: 177116 - DNA, 548 bp, Zea mays
  Clone ID: MRT4577_93118C.1
aagccacgtgtctcaaattaaatctaactttgtgctaacaaaacatcaggggttacaggaggttctacttctagcaccctaattttgatcctgtcagttgctcttgaagtagccgaacatggtgtagacggtctgcagcatcgacggcacgaagatgagcgcggcagcgacggcgagagagacggccacccatggcgacgggaagaagtgcagcacgaaccctccgcaccacccgttgacaagccggccccggtggcccgctacggcgtcaagcatctcgccgtagtcgtcaggaagccgcgccccgacggtctcctcacctagctcccggaacaaggccaccagctcggtgtccgtgcgccgtgtgctggcaaggacccctcgcttgcggagcatggccgcgtcctgtgggcaacgaatcaggcccttcatccgcgctacgtgcgccgtcacgcatgcgccgtgcgcccagtagaagtgtttctcgaaggccaggaggttgtggagcacagccgcgctgtacttgtggacgtggaagccgggacggt

SEQ ID NO: 177117 - DNA, 857 bp, Zea mays
  unsure (1)..(857): unsure at all n locations
  Clone ID: MRT4577_93119C.1
gatcgaaaccctcgccgttgccaccatgggcgacggcgccgccaccctcctctccaccgcggggtacgacggcgaggaccgcatcagcgccctccacgacgacctcctccgtcacatcatctcccgcctccccgtcacagacgccgcccgcaccgcctctctcggcccccgctggcgccacctgtggcgctccacccctcttgtcctcgacgacgcccacctccccgagccctcgcgcgccgcctccgttctccgagtcctcgccgaccacccgggccccttccgcgccgtcctcctcaccgactgcaggcccgcctccctgaaccgcgagctcgcccactggccgcgcctcctcgccgccaagggcacccaggagctcgccctctttaacaggcacgtctacccgcacctccccgccgacatcctccgctgctcctcgctccagcgcctctcactgtcctggtggaagttccccgtcgccctctcccgcagcgccgacgtctttcttccccacctccggaagctcgacatgataagtatcagcatgaccgaacatgacctggattacttgctcgctgctagccccgtcctgcagacccttacgctggcccgcaattcgcccaagcgcgtccatctccgcagccaaagcctccggtgtgtgcttcttgggctgccaccatggagaagttcgccgtgatggacgcgccactcttggagcgcctcatccttttggagccttctattgctgggtgcgatcgtgtgaggatcaagattgcttgtgcacccagcttgcgagtgctcgggtactggnagccaagagtcacaagctgcagatcggtacaatgtcatcgagcctg

SEQ ID NO: 177118 - DNA, 1011 bp, Zea mays
  Clone ID: MRT4577_9311C.1
atgaagcatttgagaacaagtccccaacattggcgcccacctctggtgaactctttcgaccaccttcggcaagcactgaccttcgtcatgccgccgaagaaagcttcagcgacaggggctgctgcactgcaaccactagacccaaaccaggaaactctttctctccgagaagcccgaagccagaagaggaaggccaccagttcgacactccaggaggaggaattggaccaagagatcagggacatggaaatcatccatcagcaagtacaaaggaagaaggagaagatggcgcggctggctgatcttcaaaggaagatcgacgaagctactgaaaaagtgcaccatcttattcaagatgaacaagaccgaaggccccaacacagggagcttcatcaagaaggcttattcaatgaagacggatggtatgatgattttaatcatgatacctttatttttgatgatgcttctcccttggcagcagaactgcaggctaccccatggcccccatcatacaagccacctcagcttcccatgtatgatgggcactcagacctaaagcagtttctgatgagctatgaagcaactatatcttcgtatgggggcaatactgcagtcatggcgaagtccttcgtcatggcagtccggaatgtagcccaaacatggtattcttctcttcggccagggactatcacgttgtggcagaagcttaaggacatgctggcgtatgtccgaaggttcttgcgattgagggcacaagcgcccacagtgcccaatgaaattgtcattcaggccatgattaagggccttcggccaggacctacggctcagtactttgccaggaagcccccacaaactctggagaagctgctccagaaaatggatgagtacatccgggccgacaacgactttcgccaaagaagggaggaagcttacagattctcggaaatgaccaggggcttcggaggaagaatccacccgaggcatgtcaggtcaatccataattccacttag

SEQ ID NO: 177119 - DNA, 355 bp, Zea mays
  Clone ID: MRT4577_93120C.1
gtctccgtcagccaacttaattccgtccttaattaaccggcaacatactgagcctaatgcggtgtcacacttcaagtgggctcccgtatttatctgctaggcgtagtatctatctgtgtatcaaaaggtagttgaagccgccaccacgtgaccacgcctcaaaaagaattgcgttttgatttgtatatccaagctgccacaccggcaggcagtcggtgccaaaaaaaaaaataatttgtttgcttctgcagcgatcgagacgacactgtggtcgatcgagtggggcatcgccgagctggtgaaccagcggcgatccagcacaagctccgggaggagtcgcctcaatgctgggcgc

SEQ ID NO: 177120 - DNA, 514 bp, Zea mays
  Clone ID: MRT4577_93121C.1
gctttatatgggtatgaacctgtcttttgctgttgcacctatggtttctatggataccgagtcttctatgaccgagtggatcgaggagaggcagaaacactcggaaattttgaaggagaaattggcagtagctcaaaacaggatgaaactgcaggcagataagaacatatctgagagggagtttcaagtgggggagatggttctgcttaaacttcaaccatatgtgcagacttctgtgctgaagccttttattccttcatatcatccagtttatgcagatttttctcaggtggcagacttgtctagtgtggaggtgtatcctatcaaaattgtggagagaagattggtgcagaaagaaagttatccagtggttcaagtgaaggtggcttgggcaaatctttcagaagctgctttgacttgggaggactttgaagttttgaagaaaaggtttccaaatgcccttgattggggtcaatcaagtcttggcccaggggaagatgttagcactatgtga

SEQ ID NO: 177121 - DNA, 266 bp, Zea mays
  unsure (1)..(266): unsure at all n locations
  Clone ID: MRT4577_93122C.1
ctcaggcggcggggtcgatcgaccgaccgaacgcgccaccgatccccccgcgtcctcggcctccctccctccggcgagcggcggcgcgggcggccatggaggtgtctactacgtcggttcgggcgctggcgcgtcgggcgggtcgagtcggcagagcggtaaggacgcgtcgncacacctccgctttcactcttcagaacactacgtcctcgtctactcctcatgatgtccgggactggctgcaggggccctacgtctactacctc

SEQ ID NO: 177122 - DNA, 263 bp, Zea mays
  Clone ID: MRT4577_93123C.1
gacccacgcgtccgggttcgaggatggcggcgccacggcctctcctagctatcgctgctggtcgccgagctagcggaggccgcggatgtcgccaacgccggccacgccaagcccctgacgccaggcgggcgcgtggtacaccacaaccacggcaagttcacagccgggccgaggaaacccgcccacgcgaccttctacagcgggcgggacgggtccggcaccacggcgggcgcgtgcgaggacaaggacacgcgcgcgcaggg

SEQ ID NO: 177123 - DNA, 353 bp, Zea mays
  Clone ID: MRT4577_93124C.1
cttcagagagctcacataaattgcctaggatagggaattagggggttagttccgtacaagcccagctgcaatctttggagccaaagcctgttccacaccaatatctaaccaaagtggtcaaaatgctgctcccgcacctggaatgcaagtctatggctctggaaatggcgatgctacatcaaattattcactcaattttgcaccatctacttctgcaccatcttcatatgtcgcaggtctacttgaaggctcaatgaattgcatacaagaccatccaacaagcacccgcgctggtctggataatggtggaaacagtggtcctgttgctaaggacaactcaacacactgcatgc

SEQ ID NO: 177124 - DNA, 391 bp, Zea mays
  Clone ID: MRT4577_93125C.1
taccacgcgttcggacccacacgtgcgcacaatgttgcgttgactcgtgggccgtcttaagaggggggtgttcaggtgctctgttgcgatgcagttacgggtggttgtgccgcgatgcaaatatttccgttatgaaaagtatacgagttgtatgacctttagattattaggaaatttaacagaataatagattgacatacttatgatcaaggttctgaaatgggatcttatatggtaaagagattaatatagcggatatttgcacattatgtataatctttcgtcgaggcttcctgtgcttcatattaaatttgtcctggaaaaaggtgtaccattctaactctacattaatctgacaaccctgttattcatttataaaatatataattta

SEQ ID NO: 177125 - DNA, 227 bp, Zea mays
  Clone ID: MRT4577_93126C.1
acgatgacgttctcaactccgggcggttggatgcgcggttcgtctctcgcctcggcactacgccgcggcgttcgacgccgtggatgcggctgtgctggcggacgtcactcctcgatggtcaatgcgtatgagatgttctcgcgggatattcgcaacgctgttgcgtgcgaggccgcgtaccgcttcgagcgtcacgagatcttcacctggtggcttcacgcatgtag

SEQ ID NO: 177126 - DNA, 210 bp, Zea mays
  Clone ID: MRT4577_93127C.1
ggtacacatgaggagctgcatcacgagtcttattgtctatacgatccacgcttacatgggcgggccatccatcttttagctgccgaatactgccacctctattcaatcaactgaggctcggttatattaacactaaccctgaaaaccctagagttaccacacataatcgtctagtaggtcatcccccattggccagctggagctatatct

SEQ ID NO: 177127 - DNA, 405 bp, Zea mays
  Clone ID: MRT4577_93128C.1
gcaactgcgccaggcttatctggccaatgcgcggaccaccctgattgccccggtcaccggctatgtcgccaagcgcaccgtgcaattgggccagcgggttcagccgggtaccgcgctgatggcggtgattcccctggatcagctgtggatcgacgccaacttcaaggaaacccagctgcgtgatatgcgcatcggtcagcccgtggacatcgaggccgacctgtatggcagttcggtgaaattcagcggcaccatcgacagcctcggcgccggcaccggcagtgcctttgccttgctaccggcgcagaacgccaccggcaactggatcaagattgtccagcgggtgccggtgcgcattcacatcaacgccgaagagctggccaagcacccgctgcgggtcggcct

SEQ ID NO: 177128 - DNA, 167 bp, Zea mays
  Clone ID: MRT4577_93129C.1
gggttccctctcccttttcaacaaaaccgggcaacccggggctggatctaaggggaccgggggcaaagggcccctcccccctttacaatgccccgggcggttttaaggcgccgcaaaagaatatagccccccccccctccgaaagggggagtcaaagcaccccgccc

SEQ ID NO: 177129 - DNA, 1008 bp, Zea mays
  Clone ID: MRT4577_9312C.1
atgccgccgaagaaagcttcagtgacaggggctacggcactgcagccactggacccaaaccaggaaactctttctctccgagaagctcggagccagaaaaggaaggccaccagtccaacactccaggaggaggagttggaccaagaaatcagggacatggagatcatccatcagcaagtacaacggaaggaggagaagatggcgcggttggctgatcttcaaaggaagatcgacgaagccactgaggaatttctgatgagctacgaagcaactatatcttcatatggaggcaacactgcagttatggcgaagtccttcgtcatggcagttcggaatgtagcccaaacatggtattcttctcttccgccagggactatcacgtcgtggcagaagcttaaggacatgttggttaccaacttccaaggctttcaaacgaagccggtcacagcacaggctctattccaatgcacgcaagaccacgaagaataccttcaggcatatgtacgaaggttcttgcggctgagggcacaagcgcctacagtgcccaatgagattgtcattgaggccatgattaagggccttcggcaaggacctacgactcagtacttcgctaggaagcccccgcaaactctggagaagctgcttcagaagatggatgagtacatccgagctgacaacgacttccgccaaagaagggaggaagcttacagattctccgaaatgaccagggcttcggaggaagaatccatccgaggcacgtcaggtcaatcaataactccactcagagtgacgacaaaggaagttagtgttagaggtcacaatatacctcacaatctttggggcaacagcaaagctctttcaggccaccagctccaaggggcagaggcgccaggggctttggaggaagatttggggatcagcctagagtctactgcttattctgtggtgaggacaagggccatactacaagaatgtgccacgtcaccattcagaagcaaaaggagatag

SEQ ID NO: 177130 - DNA, 1640 bp, Zea mays
  Clone ID: MRT4577_93130C.1
cattgggtacctcgaggccggccgggagcaataagcgcaaacgcacacaagcggaggacaaacaaacagcaagagagcggaacgccgaaaggcaaaggcaaaggcaacggcaacgcaagccagaggcagagcgcgccccgccacgatgaagaaggaggaggtggcctcgccggcggcggcgacggtggtcctgctgctcctgtcgtcgtcgttggcggccgtctccggccagccacagccgcagccgcagcccgggggcagcaagcagactgcggcgaacaacccgcggctgcagaaggcgtacgtggcgctgcaggctttgaagcgcgcggtgacggaggaccccaagaacctgacgcggagctggtgcgggccggacgtgtgcggctacttcggcgtgtactgcgcggcggcgccggacgagccgcgggcgcagacggtggccggggtggacctgaaccacggcgacctggcggggacgctcccggaggagctgggcctgctggcggacctagcgctgctgcacctcaactcgaaccggttcgcggggacgctcccggagtccctccccaagatgcggctcctgcacgagctggacgtgagcaacaaccgcctctcgggcgggttcccgcagcacatcctgtgcctgccaaatgtgaagtacgtggacctgcggttcaacgagctgcgcgggccggtgccgccggcgctcttcgacaagccgctcgacgccgtcttcctcaacgacaacgccttcgacttcgagctgccggacagcctgggcaactcgccggcgtccgtgctcgtgctggccaacctgcgcctgcgcgggtgcatcccgcgcagcgtgggccgcatggcgggcacgctggccgagctggtggcgctcaactcgggcctccgctcctgcctcccgcaggagctgggctggctgcgcgagctcaccgtgctggacctcagctccaaccagctgcaggggatgctgccggagtccatggccggcatgcacagcctgcagcagctccacgtggagcgcaaccagctgtggggccacgtccccgagggcgtctgcgcgctgcccgcgctccgcaacttcacctactcgtacaactacttctgctccgagccaagccgctgcctcgacgtccgccacgtcgacgaccgccagaactgcatcgccgcccgccccgaccagcgccccgcagaccagtgcctcgccttcctccaccgcccgcccgtgcgctgcgacgacagcggctgcttcgccccgccgccgccgcactactagagatccatgcgtactctggctctgccggcggtgggagagagacagaaggagagggagacagtcgccgccggctcgccgcgtcggggcttgtaaacttcgcttgtgtggacgtgtggtgagggatgtgagagtgagaccgagagggggggtaaatccgtaaacagaaaacgaccgtatatattatacagctgtaattctttttttcttcttcttttaccttactttccacaggagtggtgtcgattggagtatttggtgggatatattgtagacagaaactatagtgaattttacagcgttaattcaattacccactgaccagtgaccaacaaaaaaaaaaaaaaaaggctag

SEQ ID NO: 177131 - DNA, 328 bp, Zea mays
  Clone ID: MRT4577_93132C.1
gtgggctattcgttcagtgatctacatggaaatttgatggagagggatgttatgaaaataccatccgtatgctgcatttgtgtattcatctagtgcagtaggaaatccaaaatacattggacggttatgcattcgtatatatagtcaagcttgtcatcagtttaatgaaaatgtggattttgcattcgtccttggtacaagtaatctttgtagtgcagcgctgcagcagtaataccaaccaaaatacactggacggttgtgtacatgttttaagatttttatttttcaattgaataatcaagcttgttttatcaaactcgccgattgt

SEQ ID NO: 177132 - DNA, 223 bp, Zea mays
  Clone ID: MRT4577_93133C.1
attcggctcgagggatgcaagaggggtcttatcttagaacttaggtaatgcttctacaaagaatagatgcctggcgattgccttaccacttctttggcgaatggaaacgtatcaaaaagcaagcactggccccagtgcatcaccctggcaacagattatcctgtcatgctagccaatacaactgtagagatcaagacacacttagatgaagatgatgagccta

SEQ ID NO: 177133 - DNA, 515 bp, Zea mays
  Clone ID: MRT4577_93134C.1
gctctccccttcaccacagctgcccagagatgacagttcggaagaccgcgtgccaccacgtaacacgtaatccaatttcgcactcgcctgactcttcgacctcccaagacaccctgatatcctgctgcaccgccggagatctgcatggccatgcccaagcaagaacattgaacgatcacctgggttgactaagctagagtatgtgacgtagactcaagatcgacacacctcgggtaatcgtgctgcaccaagaactatcggcaccgctcatggctcggcctcatgttccatcagcctacgagcttcaattacgatggagtaccacgtccttcgtccatgagaaggctgccagtacgacaacatcacagcctgacccttgttctcaagcacattctcaagaacctgcgcatccgccaactcatattccccaacggggacctggtccacgccgtgagagccctcaagaggctgggcctggcagactgcttcgaggggaccacctgcttccagaccct

SEQ ID NO: 177134 - DNA, 255 bp, Zea mays
  Clone ID: MRT4577_93135C.1
aaatattttatgtttgtttgttccctaacgatgcctataactgggggacgtctcaatacggggggttggcaaggcatatggttgtgcgaacatctagaccatgccagtccttgtaaaattgtgattactcttaacggtggttaacttgtagatcttatatgctgtccataaatatggccaatgcattttgtacctgtatgtgttataaataccatgtactatttttagttgtaatgtatgctaataaattccaat

SEQ ID NO: 177135 - DNA, 472 bp, Zea mays
  Clone ID: MRT4577_93136C.1
gtgttttttttttttttttttttttttttttttttttttttttttttttttaaggacgaagaatgagggccagaaaaggttgatcaaggtgtccggagaaaccaagtactggttgaaacggcctttgcgttgactaggatgggacaagtaagggggggggctttatacatgtgccggcccattaattgggtggccgaggcctatgaagtttgctcaaatggggcatacataatggcaggaccggtgggaaagcttttggaggcaccaaaaagtcctatgaagaatgtagtaaatgtttttcccaagtttaaggctttggactggctggacaaggggggccaaaatagtttgtcagcagacccataaaaagaaacatgaaggccatagaaaggtggtttaaatcgttttcaaagttttttatgtttgccaacgactgggcgccgaagatgattgggatccacgagcacacctt

SEQ ID NO: 177136 - DNA, 246 bp, Zea mays
  unsure (1)..(246): unsure at all n locations
  Clone ID: MRT4577_93137C.1
cgctgatgctgttcgcgggggcttcgggctggcgcgtccnnnaaccnnaggcgacgnnnggctgaagctggagnngcgactcgcgctgcagacggtgaccccgccggttcactcgccgacacgctggcctgcnnccgtcgnncacatcctcggcgtcggcatcgtgctcgggctcaagaacaccggcnccctcgaccagatcatcggctagatccctacgtcgccgttgttaagatcagactcagc

SEQ ID NO: 177137 - DNA, 315 bp, Zea mays
  Clone ID: MRT4577_93138C.1
gagatcaatagatcatattgattaaatgataaagactgaatttattgttcctaaaacttaactcaagcattaccataagctccaacatataccatctctattattacaaaagatgtgtttatttatagtatatatatatcaacaaacatacaccggtacactactctcattccatcaagtatccctgaagctcatgtacctgggggagctagagaaagaatactgtcgtccttgctgctgctggttgatgcgcttacaacatcagccagatactcatcttgagtccaccttggggggacagtgacatttagcttg

SEQ ID NO: 177138 - DNA, 2600 bp, Zea mays
  Clone ID: MRT4577_93139C.1
aataaagctgcaaatttccatccaagatcaaagtggaggtggaggctgtatcagcgttgagggcttccaacaagtgctcagggatactgacataaaggttgcttcggataaactcgaggacctatgtaatgctgggattatagtatggagtgaattctggcaggcattgctacagttggataaaagggctggaggcatgaaggatccaactggtcttatgggcaagaagcaattcaccatcttccacttcaatggaattgccaagtctgtgctgaatgggaatgcaagtgcaggtggttcatgtcctatacagagacccaggttatgcaagctaaatgtcactgtccccccaatgtggactcgagatgagtatctggctgattgatgtgagcgcaggaaaagagctgttgtagcatctgttgcacgtgccaatcgtggaaaaattgatgcagctttggaagatctttctgtcgaatcagcagtggatctgcagaaagttcttaaaacaagtacatttacttcaaggaaggatgcattcaacacccttttggctaacattcatttgtttcaaagtcgactgggagccatgctatttcttatctctgctttgctttcacgaggattggaagatatccaagcagacagggatgatccaagccagccattggtcactgctccatttggtcatgcttcacaggaaattgtgaatttattactctgtggagaggctgttccaaatgtatttgatggcaagatggaccttggtggtggcatgtccttgaagggcataccaaacaatgttgaagttggttttcttaccctcctggaatcactaaatctctgcaaggttggtcagtacttgaagtgcccaaagtggccgatatgggttgtgggaagtgaaagtcactacacagtcctttttgccttgaaccccaacgttcaagaggagaatgagctggaagagcgcgaatcaaaaataaggagggcttttgatgcccaagatcaaagtggaggtggaggctttatcagcgttgagggcttccaacaagtcctcagggatactgacataaattttccttcggataaactcgaggacctatgtaatgctgggattatagtatggagtgaattctggcaggcattgctacagttggataaaagggctggaggcatgaaggatccaactggtcttatgggcaagaagcaattcaccatcttccacttcaatggaattgccaagtctgtgctgaatgggaatgcaagtgcaggtggttcatgtcctatacagagacccaggttatgcaagctaaatgtcactgtccccccaaggtggactcaagatgagtatctggctgatgttgtaagcgcatcaaccagcagcagcaaggacgatagtattctttctctagctcccccaggtcagactaatcagcacgcaccattggtggactgcattaggacacggtggccacgagctgtttgtagctgggttggagatgttccaagcattgtctgacacagtggatgtcgtgtgcgcactagtcgctctagctatgttgctcgtaacctcgttctgaagaatctgctcagagcaagccacttggagcttcctgattgttcatgccctgcaaaaaggaatcgcccaattacatggtttgtttcggttaaaatgagtgatgttttaatgcgtgttattaatcaagggcctggatattcttttttttttgcttttattgacattagatgtacacttgatttatggatatgttttgtgtcttgggttacattcttttctgtacacatatagtttcgtttgtgtttttcatttcatctgacacagtgagttgtctagccagaagccggttgagtaaacaaggatcaaacttcaacgatcatatcatgccgctgtactctttgattttatgtttgggttagtttgaatctgcttaggcactttccactgagacactatcttcttgggatgtgtgggtagaaataaagtcatgtattgaaacttatgaagtatttgatgttctattatcactgttcaaatttgttgattagttgaactgtagttcaaatagtttagttaaggtaagttgcttgccgaggtttaccataatgataaatttcgtgcacttgtttctaatctcaggtacatgagcttcagggatacttgatggactgagagtagtgtaccggtgtatgtttgttgatatatatatatcccataaataatttttcttttgtaataatagagatggtatatgttggagcttatggtaatgcttgagttaagttttaggaacaataaattcagtctttatcatttaatcaatatgatctgtattgttgttaaaaaaaaaaaaaaaaaaaaaaaaaaaaaaaataaaaaaaaaaaaaaaaaaaaaaaaaaaaaaatttaaaaagaaaaaaaaatagaaaaaaaaaaaaaaaaaaaaagataggagaaggcggcatctggatgttctccatgctctacacgcctcctgccttcgcttctccggcttcgtcgcttgcagtgtggaatccgtatcagcttcgtttccccttctttaggggctccgatttgggtgccc

SEQ ID NO: 177139 - DNA, 909 bp, Zea mays
  Clone ID: MRT4577_9313C.1
atggaaatcatccatcaacaaggacaaaggaagaaggagaatatggctcggctcgccgatcttcaaaggaagatcgacgaagctactgaagaagtgcgtcatcttgctcaagatgaacaagaccgaaggccccagcacagggagcttcgtcaggaaggcctattcaatgaagatggatggtatgatgattttaatcatgatacctttacttttgatgatgcttctcccttggcaggagaacgacaggctatcccatggccacaatcttacaagccacctcagctccctatgtatgatgggcactcagatccaaagcagtttctgatgagctacgaagcaactatatcttcgtacgggggcaatatcgcagtcatggcgaagtccttcgtcatggcagtccagaacgtagcccagacatggtattcttctcttcggccagggactatcacatcatggcagaagctcaaggacatgctggccatgattaagggccttcagccaggacctatggctcagtacttcaccaggaagcccccacaaactctggagaagctgcttcagaagatggatgagtatatccgggctgacaacgacttccgccaaagaagggaggaagcttacagattctcggaaatgaccaggggcttcggaggaagaatccacccgaggcatgtcaggtcaatccataactccactcagagtgacgataaaggaagtcagcctcagaggtcacaatacacctcacaatcttcggggcagcaacaaagctctttcaggccaccagctccaagggacagaggcgccaggggcttcagaggaagatttggggatcagcccaggaagatctactgcttattctgtggtgaggacaagggccatactacaagaatgtgccaaattactatttag

SEQ ID NO: 177140 - DNA, 888 bp, Zea mays
  Clone ID: MRT4577_93140C.1
ggatattgctctggaggaattggcccccacccatcctattaggctttggctggtgctgaacttctcaactcgcctgaccatgcgtccatgcttgcagtctcgccaaataggtttgatttttgcacccattacatggactgtgtagtgttattttcttctttttttgcaatccttatgatccgaatgtgagctctgtgaaaaatatgaactaaggttattatgcatttcacagttcagacagctgttatgaaataacctggctttagctataacttgtgactagtgcaacatattagtattttttatagactagtgtaagcaactaaaggtctgtttggttgggctgtggctgtggaaaaagttgctggggctgtgagctgtggaaaaagctgctgtaggctgtatgctgttaaaaagctaaaaaacaattggtggaaaccactaaaagtcgttaaaagttcttcgatatacgttttcacagttccatccaaaagccactaaaagcaggtccaggggtgctttcagttttgcactacgagaaagtcggcttttagaaaaagctgcttcttggatccaaccctttggttggcttttggcttttagggggcaaaagccaaagccaaaagccaaaccaaacacaccctaaaggtgagttgaatctaaactgcagatgaagaactgaagatagtggtaagttattatgatcaacctgggattgccctcaccaacgggcgtgaatcgctcaggagccatcgatcccgtgtatcttttaactagaagtaatttatgctgggacaaagtctaacaacatttttgagcaagttactaataacatcagtaacttggatggttctatcgctataaatgttgattgtgcttcaaaagttg

SEQ ID NO: 177141 - DNA, 1022 bp, Zea mays
  Clone ID: MRT4577_93141C.1
catgaggcaaacggtggctgtcggagtcatcaagagtgtggagaagaaggatccaactggagccaaggtgaccaaggctgccgcaaagaagaaatgatgtgtctggctggttctgtgtttccactaggtatccctcaagcaaacacagaaccagccagacacatcatttcacggataaaccctagctgcgcgagccccccggcgatgtcggtggccatccgctccggcgagctccttgcgtgccccgtcgcactccggcgggcgcccttggctgtgtctgtggtgtcggtgcggatgagggctaggggcgccgtggctgtgcgggcggaggcaacggccgagggggtagggaaagaggggaagaaggcggcggggaagaagaagccggcgagcgggatcaccaagccgaagcccatctctacagagctgcgggagttcgtcggcggcgcggcggagctgccccggactgaggccatcaagctggtatgggcgcacatcaagggcaacaacctccaggatccaaacaacaagaagataataatctgcgatgagaaactgaagaagatattcggagggcgtgaccgcgttgggtttctcgaaatatccgggctgctgaacccccacttccagaaatgatagggctttttgttttgttttgttttgttttgttttgtagatcactctcctctgttgtgctagctgtggctgatgtacgacgagcacatttagctgctaaacctgggctaaaagtggtctctgtctcttgacggcggtttaaggaaggcaaatgcgttccctgaagatgcatgtgcttgtgatattcgccgttaatggtgtactagcagttgcttaatcattcatgcttatatcctatccacacacctaccgtcgtagacctgagtggtggatcatcgcattcttcgactcaaaaaaaaaaaaaaaagcatgaacataagaaaaaaaaaaagctaaggcctcgctcctgcgaccttgtatagggcgattgccagcacatggcggcc

SEQ ID NO: 177142 - DNA, 394 bp, Zea mays
  Clone ID: MRT4577_93142C.1
aggaaacgggacacatagatatactattttgaagggacatatagtgtcacatgtgcagctttgctagatgcttgctatggcctacaatgaagtcaatgtgaacatgatatatccattaccaggatgtggactacgcatatgggactaaggactgaaagcgaatgatacttgaacacaatggagcgtacatgataaacatggcgtgaaggttgatacattgaaggaaatatggttgagaaccagaggcatgcataggaatgctgaacaagctggaccacatgatctacaatagcaggcttacttacatgaaagacttgtatgcaggctacaagtgtgtgatccgtacaaggaaaaacattagagccatctccaagtaccttagagcacataattc

SEQ ID NO: 177143 - DNA, 337 bp, Zea mays
  Clone ID: MRT4577_93143C.1
ccggccggggggtgatatagattctaccgcacaggagaacatgcaagataggctcagcccaagcacccgccgtttacaacaaacttaaaaacccatagcaggtttaactgttcgagagactataaaacaaatactcacatttacaacgacgactcagaaatgccgcggaagcggggtatgtcgacgcccaagagtcaaagtaacccagggcatcaagcaaaaggaaagactagagacagtggaccattcttttcgacatccctaactctaacaatcggagtcctagctataggagtcctggtcccactgagttatggattggtttggcgatacaaag

SEQ ID NO: 177144 - DNA, 306 bp, Zea mays
  Clone ID: MRT4577_93144C.1
ggacaacaccatggaggggctgcgggtcaatgtccagaggctcaagagatacaaggccaagctggttgtgttcacaaggcgtgctcgcaagggcaaggttggtcactctactatcgaggagcttaccactgctacccaggtacagggtgactacatgccaatcactagcggtgagaagcactttgtataggctgtgaatgtcacacatgagataaatgcggttatgtcctatcacaagctccgacttgagcgggttaacacaaagcaccttttggacccaccagaagaaggcagctgtggcacaga

SEQ ID NO: 177145 - DNA, 605 bp, Zea mays
  Clone ID: MRT4577_93145C.1
attgggacctcgagccggccgggaaagcacttccaacagcgccgttggccagtgcatcctttcacgtcttgttgcagtaccccggcaagctactaactatgcgtcgccggcaccgaaccccgccccgcatcgcggcccttgccccgacgtccgtatccgtcaagaagttcgccgtcttccttgcgcactctagctgcctcggcaggacccggtcacccaccaggcggagcctcaacgccgacgacaacggcgactgtgtcctcgaccttccctccccctcctacctagactggaacctgtagggtgacaacgcgtccgacccgtagggcctggtagagagaccccgacaaccagacgtggctcgtgcaggtgaacaatggagaactgccgctgcaccatgctgctgcggggccgggatgctcatcctggaggagctgaccaaagccgagttgaccaacgtcccgcagatctacaacgcaccgcagtagcagtacttcgcggcgccgcccacgatgatctagggccagctcatcctgttgcacgacgtagaaactcgcctggggctggacatcaagaaccccccgagcgaaaacgccagcctcatc

SEQ ID NO: 177146 - DNA, 382 bp, Zea mays
  Clone ID: MRT4577_93146C.1
agccttccgaagggttcaagttcccttcattcttgggccaaaaattctgcggcaagttccgatccggtccgactactaaccacgccgaaaaccggcgactgacgcccgggtcgagaagggaacgcgggccggttgctgcaccgtacgcgaggaaagagagagccctatcctccgccccgtgccgccgaccgagactcgagcactgatctcgccctgcccccgcgaagcgcttttacgcggcgcagctcgccacagcgatcggccgggatggacgagctggagatggacgaggaagtcaggcccgagttcccctggccctactgctacgaggaccacgacgtcggatccctctgcgcgcacctggaggaggagcacccgttcg

SEQ ID NO: 177147 - DNA, 717 bp, Zea mays
  unsure (1)..(717): unsure at all n locations
  Clone ID: MRT4577_93147C.1
agggcgattgggttcctcgaggccggccggggagtcttcaatctcatctttactcgaccatcattgacaccgacagccattcacataatgtttgctctacgaagactcattgcccgtcccgtggccatgcccattatgcgcgtagctacgtgccagatgcacgtgacgcctcgtcgcttcgcctcggctgaccagcctcccaacatggagtcaatgatgaatgaccctctcatccgcgacaccttcgagaagctgagccgtcaccctccggctattgcggctatgcaaagaatgggagaggttattaagagcaagggcctcgatgcatccaaacctcccagcaagatggatctcatgaagctcatgatggataaggagtttagagaagcatctacagagttgacaactgaaatgcagaatgctggtgttgagatcaaccctgatgtctttatgaagatggtacaaggtgaaaagtgaaatcgaagcatgagggaaaactgcatataccttgaatgacgacaagttgaagaaatgtgttggattggtatctataatgaagctatttctcttcttgtggatcattagagtaacatataagaataaggctgatgcgctcgaaccaaaacttcactttagacccgtgttgtacgagagctgaagtangaacagccccaaagagggatagaaccgagctggtgataatcaccgaaactaccc

SEQ ID NO: 177148 - DNA, 815 bp, Zea mays
  Clone ID: MRT4577_93148C.1
ccggccgggaccaacactgctcctctctccctcctctctacaactcgacgccaactccctctccatcttcctcacaccgccttccctattgctatgcccagccgattgcaactatggccgcccatctctctaccttggttgagcatggcttctggcgtcgcctctccctgctctagccctcatcccctcagccatggacacgatgacctgcagcccttccttggtggccggcgtgcttgccgtggacgatggccctgaccgcgtgtcctcttccctgcctaagcatccatggggccgtcggccatctccccctgcgtcgagcgccctctcctactcgagcatcgccgccatggtctctccctctcggcgctcttcttctgtgtgcctctgcagctcgccaacagccactcccagcccctctcctccctagcactcgcccctgccccagccatggacaccagcgcccctctcctcctttctttccatggctgcgcacctctctttagcagcccctcgccgccggacatcctcctgtagccccacgccatccgcacccgtatggtgtttgacaaaatgcccaagtggatagccgtgtcgtgaacggtcctattagcatcgtcggatgtttggtgttttgcgtagcccatccgcgacaccgtcgatcatcggtacgttaattgatcgcacgatgtggaggaaaagtgttggattaacctcaaagtgatgttgacgagtaaaccaaaggaatggatgatctgatcaagtaccaggatgagagatgctccccaagcggacgtcatctaacacactgactt

SEQ ID NO: 177149 - DNA, 215 bp, Zea mays
  Clone ID: MRT4577_93149C.1
gaaacaattggcttaaacttgggggtgttcaaaatattaacctgagatctgtattgaaccaggcttgtaccacacataaagagtgtttctccgaaagccgttccgggggtgcgcgcttcatggtactagaccatcggacacacataaacccactcgccgtcagatgtgttgcgcaaaacgcactctggtacaatgtgcattgcggttcacacact

SEQ ID NO: 177150 - DNA, 442 bp, Zea mays
  unsure (1)..(442): unsure at all n locations
  Clone ID: MRT4577_9314C.1
ccggccggacagccgcactaccacgcccaaactcctcttgcctttatactcgcatntccaattggacgacatagccgcacatcggacggcgcataacgcctcatgagaagcaagacgctgcccgagagcatcgcctacaccaacaaggcacctacaggcttccatgtgaccagccaacatgaacatcatgtacattccagcccaagagctgcatgcacacgtttatctaggacatctacggggtcgcaggacaagaacatgctgaggcccatcattctagagagccacatctacctaggccaacgacaccttaaacactacaggagcacggtgaactttattgctatgctgaagtaaaagacaggtgctacagatatatacctgaccctgtgcatcaacagaagctttgtaggcctctcgctgatgccagtggatgcttcga

SEQ ID NO: 177151 - DNA, 1266 bp, Zea mays
  Clone ID: MRT4577_93150C.1
atggagataatccaccagcaagtgcaaaggaagaaggagaagatggcccgactgactgatcttcagaggcagatcgacgaagccaccaaagaagtacgccatcttgttcaagacgaacaagatcgaaggccccaacacagggagcttcatcaagaaggcttgttcaacaacgatggatggtatgatgattttaatcatgatacctttacttttgatgatgcttctcccttggcagcagaactgcaggctatcccatggcccccatcatacaagccacctcagcttcccatgtatgatgggcattcagacccgaagcagtttttgatgagttatgaagcaattatatcttcatatggaggcaatgcagctgtcatggccatgtccttcgtcatggcagttcggaatgtggcccaaacatggtattcttctcttcggccagggaccattacttcatggcagaagctcaaggatatgctgtgcacgcaagatcatgaggagtacctccaagcatatgtccgaaggttcttgcgtctcagagcacaagcacctacagtgcctaatgaaattttcgttgaagccatgattaaagggcttcgtccaggacctactgctcagtatttcgctagaaagcccccacagactctggagaagctgcttcagaagatggatgagtacatccgggatgacaatgacttccgccaaagaagggaggaagcgtataggttctctgaaatgaccaggggcttcggaggaagaatccacccgaggcacgtcagaggaagtcaacagcagagaccgcagtattcttcgcaagcttcgggacagcaacaaagctccttccggccgccagctccaagaggcagaggtgtcagggcttcagaggaagatatggggaccaacccaggaagatctactgtctattttgtggtgaggacaagggccacaatacaagaacgtgtcaaatcaccgtccaaaagcaaaaagaaattgcagaagccgaagcccagaaaaatcagccgaagcaggtcctgcacactgcttcgtgtcattcatcctacataccagaatatgtgggtaatcatcccgcagcttctgttgcttcggctagtcagccgcaagtttcttggccacagcttccacctccgccgccactacaacctgtctactcacgagcttcgtttatgtcaaaatgaaatataccttcgtcacagactcacgaaaataccgaagctacaaagagatattccttcgggaatgcagtgctaa

SEQ ID NO: 177152 - DNA, 450 bp, Zea mays
  Clone ID: MRT4577_93151C.1
gggggtggggggggggtttaaaaaaattttttttttttttttttttttttttttttagcctcccaagccgattttttttcacccgccccaagcttttggaactttgaatacccccattgattttactgcctcatccaaagaaaaaaaaaaaaaggagggggacccaatgctaaagttgaccttttttccccactaaaaaaaaaactaccaccttaacttttagtgcaggagccaaacccacaccttccaggcttccaccttttttcccccccaacacgggtgcgggcccttgccccccccccaaaaccccaacccgtgaacccaacccactccaaggcattgcattcttgtggtcaccccccttcccaagctcaatcgtttcccttccacgggccaaaaaaaaacccccttccttccccttttttgagcccgggcccaaggcgcccccct

SEQ ID NO: 177153 - DNA, 1245 bp, Zea mays
  Clone ID: MRT4577_93152C.1
atgccaccgaagaaagcttcaacgacaggggctaccgctctgcagccactagacccaaatcaggagaccctttctcttcgagaggcccgaagccagaagaggaaggccactagtccaacattccaagaggaagagttggaccaagaaatcagaaacatggagataatccatcagcaagtgcaaaggaagaaggagaagatggcccgactggctaatcttcaaaggcaaatcgacgaagccactgaagaagtacgtcaccttgctcaagacgagcaagatcgaaggccccaacacagggagcttcatcaagagggtttgttcaacgacgatggatggtatgatgattttaatcatgatacctttacttttgatgatggttctcccttggcagcagaactgcaggctatcccatggcccccatcatacaagccacctcagctccccatgtatgatgggcattcagacccgaagcagtttttgatgagttatgaagcaactatatcttcatatggaggcaatgcagctatcatggccaagttcttgcgtctgagagcacaagcgcctacagtgcccaatgaaattttcattgaggccatgatcaaggggcttcgtctaggacctactgcccagtattttgctagaaagcctccacagactttggagaagctgctccagaagatggatgagtacatccgagctgacattgacttgcgccaaagaagggaggaagcatacaggttctctgaaatgaccaggggcttcggaggaagaatccacccgaggcacgtcaggtcaattcacaactctactcagagtgatgacagaggaagtcaacaacagaggccacagtattcctcgcaagcttcggggcagcaacaaagctctttccggccgccagctccaagaggcagaggcgccaggggctttggagaaaggtttggggatcagcctagaaaaatttattgcttattctgtggtgaggacaagttccatactacaaggatgtgccatgtcaccattcagaaacaaaaggaaatagcagaagccgcagctcagcagaaccagccaaagcatgtcatgcacactgcttcgtatcactcaccctacataccagagtatgtgggtaaccatccttcagcttctgttgcttcggctaaccagccacaggcatcttggccacagcctccacctccgccaccactacataccgcatattcacgaggccagcagccagaacggagctaa

SEQ ID NO: 177154 - DNA, 738 bp, Zea mays
  Clone ID: MRT4577_93153C.1
atggagatgcttcatcagcaagtgcaaaagaagaaggagaagatagcccgactagctgaccttcaaaggcagatttacgaagccactgaagaagtacgtcaccttgctcaagacgagcaagatcgaaggcctcaacacagggagcttcatcaagagggcttgttcaacgacgatggatggcaatgcagctgtcatggccaagtccttcatcatggcagtcaagaatgtggctcaaacatggcatacgtccgaaggttcttgcgtctgagagcacaagcgcctacagtgcccaatgaaattgtcattgagaccatgatcaaggggcttcgtccaggacctactgcccagtattttgctagaaagcctccacagactttggagaagctgcttcaaaagatggatgaatacatccacgctgacaatgactttcgtcaaagaagggagaaagcctacaggttctctgagatgaccaggggcttcagagggagaatccacccaaggcatgtcaggtcaatccactccacccagagtgacgacagaggaagtcaacaacagatgccacaatattcctcgcaagcttcgaggcagcaacaaagctatcttcggccgccagctccaagaggcagaggctccaggggcttcggaggaaggtttggggatcaacctaggaaaatttattgcttattctgtggtgaggacaagggccataatacaaggatgtgccatgtcaccatctag

SEQ ID NO: 177155 - DNA, 312 bp, Zea mays
  Clone ID: MRT4577_93154C.1
aatatttttttcttttttttttttttttttggggggttttttaaaccccaaccgggttttccctcctttccccaaattcaaaacagtccaccccatttttcctaaaaaccaaaccaaacacatacccccaaaaaacatttcccaaaggaaaaaaaaattttcaacaaaaaaaaaaatatttaaaccgggttcccccccaaataaagggttccctcacacatacaacctggaacagggggcaacccccaaattatttaaaaaaacttgtttattccgtcctatcaaaccaaggactttttaaacccccccttt

SEQ ID NO: 177156 - DNA, 1614 bp, Zea mays
  Clone ID: MRT4577_93155C.1
atgccaccgaagaaagtttcagcgccaggggctaccgttctgcagccactggacccaaatcaggagaccctttctcttcgagaggcccgaagccagaagaggaaggccactagtccaacaccccaggaggacgagttggaccaagaaatcagaaacatggagatgcttcatcagcaagtgcaaaagaagaaggagaagatggcccgactagctgaccttcaaaggcagatcgacgaagccaccgaagaagtacgttaccttgctcaagacgagcaagatcgaaggccccaacacagggagcttcatcaagagggcttgttcaacaacgatggatggtatgatgattttaatcatgatacctttacttttgatgatgcttctcccttggtagcagaactgcaggctatcccgtggcccccatcatacaagccgcctcagcttccaatgtatgatgggcattcagacccgaagcaatttttgatgagttatgaatcaactatatcttcatacggaggcaatgcagctgtcatggccaagtccttcgtcatgccagttaagaatgtggctcaaacgtggtattcttctcttcggccagggactatcacttcatggcagaagctcaaggacatgctggtgacaagtttccagggctttcagacgaagccagtcacagctcaggctctgtttcaatgcacgcaagatcatgaggagtatctccaggcatacgtccgaagaaaacctacacagactttggagaagctgcttcaaaagatggatgaatacatccaggctgacaatgactttcgccaaagaagggaggaagcctacatgttctctgagatgaccaggggcttcggaggaagaatccacccaaggcatgtcagatcaatccacttcacccagaatgacgacagagtaagtcagcagcacaagccacaatattcctcgcaagttttggggcaacaacaaagctattttcgggcgcgagctccaagaggcagaggcgtcaggggcttcggagcaaggtttggggatcaacctaggaaaatttattgcttattctgtggtgaggacaagggccatactacaaggatgtgtcatgtcaccattcaaaaacaaaagaaaatagcagaagccgcagctcagcagaaccagccgaagcaggtcatgcatactgcttcgtatcactcaccctacataccagattatgtaggtaaccatcctgcagcgtctgttgctttggctagtcagccacaggcatcctggccacaacctccacctccgccaccactacaacctgcatattcacgaggccagcagccagaaagggagccaacagacccatcaacagcgagatttcagggaggattccgaagctcgcacagtcaatagcccgcttagccgtcccgtggccggtcagtccagtagcttggaggggctgcaccaccgcctgcatgaggagcaggaacgtcgacgacaggagcagcagggctcttccttctcgctccagtaggagatagagtctgtgaggagctgctcccctgtgcttcccctggagaacaccctgcaccaaacgggcgccccagcctaagagtcgacctgcaggcgtgcaag

SEQ ID NO: 177157 - DNA, 293 bp, Zea mays
  Clone ID: MRT4577_93156C.1
ggcgaccctttcttcttccctccacctcccttgcaatttatgttccggcccccctggtaagacacttgggaagtgctcttgtatcttccctgctccaagagacggtttcctcagaacaggctcgaaatgcatggatattcgaagtggcacgctatccatcgttgtaccatcgaatgtttctccttcattacgagatcaggtcgtcatagttatggtcaccctgggggagcggtctatgtgctttacacgcgacttcaagtgcgtgaacgaggaggtcagctacctgagagttt

SEQ ID NO: 177158 - DNA, 200 bp, Zea mays
  unsure (1)..(200): unsure at all n locations
  Clone ID: MRT4577_93157C.1
cgcgacgagtcgcatcgctcatgcgtgcatcatcggcgcgcgnatctgacagcgcggaatccacgtcgagtcactcgtcgcgngacgatcgctctcgntcgcgtgccagcgagcgtcacgngatctacagcgctgactcgcgacgtacantgcgatacgctggnggcgtatcaactgtcgcacatcacgagtatcgcgct

SEQ ID NO: 177159 - DNA, 960 bp, Zea mays
  Clone ID: MRT4577_93158C.1
atggcccgactagccgatcttcaaaggcagattgacgaagccactgaagaagtacgccatcttgcccaagacgaacaagagcgaaggccccaacatagggagcttcaccaagaaggcttcttcaacgaggatggatggtatgatgattttaatcatgatacctttacctttgacgatgcttttcccttgacaacagaactgcaggctatcccatggcctccatcatacaagccacctcagctccccatgtatgatggacattcagatccaaagcagtttttgatgagttatgaagcaactatatcttcatacggaggcaatgcagctgtcatggccaagtcctttgtcatggcagttaagaatgtggcccaaacatggtattcttctcttcgaccaggaactcttacttcatggcaaaagctcaaggatatgctggtgacaaatcatgaggagtatctccaagcatacgtccgaaggttcttgcgcctgagagcacaagcgcctatagtgcccaatgaaattgtcattgaggccatgattaaggggcttcgtccaggacctactgcccagtattttgctagaaagcctccacagactttggagaagctgcttcaaaagatggatgaatacatccgggctgacaatgactttcgccaaagaagggaggaagcctacaggttctctgagatgaccaggggctttggaggaagaatccacccaaggcatgtcaggtcaattcactccacccagagtgacgacagaggaagtcaacaacagaggccacagtattcctcgcaagcttcggggcagcaacaaagctctttccagccgccagctccaagaggcagaggcgccaggagcttcggaggaaggtttgaggatcagcctagaaaaatttattgcttattctgtggtgaggacaagggccatactacaaggatgtgccatgtcaccatttag

SEQ ID NO: 177160 - DNA, 468 bp, Zea mays
  Clone ID: MRT4577_93159C.1
acatgagcccgaagccaaaggtaatccaatccgcacagaaatccccatctcaaaaccctagccctcatccccgatcccggcgagagagatggccaacccgagggtgttcttcgacatgaccgtcggcggcgcgccggcggggcgcatcgtgatggagctgtacaaggacgcggtgccgcggacggtggagaacttccgcgcgctctgcaccggcgagaagggcgtcggcaagagcggcaagccgctgcactacaagggcagcgccttccaccgcgtgatccccgacttcatgtgccagggcggcgacttcaccaggggcaacggcaccgacgagaagttcgtccacaagcacaccaagcccgggatcctctccatggccaacgccgggcccaacaccaacgggtcccagttcttcatctgcaccgtcccctgcaattggctcgacggcgagcacgtggtcttcggcga

SEQ ID NO: 177161 - DNA, 1921 bp, Zea mays
  Clone ID: MRT4577_9315C.1
gggcgggactctctcgttccacgagtatcagtctagccgagcactcatcagtcatcactcatcagccccctcctcctctaaagctgaaccgatcctccctctccctccctcgctctgtccatcttattattaattttttttttttgcttgaagcaagcaccttcccctttctctgtcttgcctccttatatacgccattgtggcgctgcgctagacgcgacgcccatgaggggcctgacctaatgtagcgttaggagaaagcctactgttccatctctttcttggagtacgagggcacgaaggcctaaccccctcgcccccaccagattcggggaattcgcgcctcatccgatcgtcaccggccgccgaagcgcaagaaacagcggccgggttaggactctggaggatacggcggctcggcggattcaggaagtgaggatattttcttggatttctgttcttgattgaggagaggatctcgtattagctactgcgttattcactggatgttggcaatggggtcagaagagtgggagctctatccttcttccgacataggttcgcaggtcatagaatacagacctgtgtctgaagacagcgatgacgatcagaatggggatgtggcagtgtcgctggatgttgttctccctgatgatcttctggagaaggttctttccttcttgcctgttgcaagtatcataagatctgggtctgtttgcaaaaggtggcatgagattgtgcatgcccggaggcacgcatggagcaaaatagtgcctcagaagccgtggtacttcatgtttacctgtagtgaggatgcagtttctggttttgcctatgacccgagcctccgcaaatggtatggatttgatttcccttgcattgagaagagcaactggtctacatcctcatctgctggcttggtgtgcctgatggacagtgagaccaggcgccgcattgtggtgtgcaaccccatcactaaggactggaagaggcttcttgatgctcctgggggcaaaacagctggttacagtgctctcgcgttttctgtggacataaggtctcaccattacactgtggctgttgcaagaagcaaccaggttccatcggagtattatcactgggagcttaccatccatttgtacgagtcagtctctggtagttggatgactcccttcactggagtattggttgggtggagaggtggcgacgagtgtgtcatctgtgatggagtcctctactatttgctgtacttcacaggaattctggtgaacaacaatgagcaccgccattgtctcgtaatgtatgatctcacagcaagacctaaccacacttctctgatcagcatggctattccagtgccatgtgttcttacatgtggcagattgatgaacctgagcaagaagcttgtgctggttggtggcattggcaagcaagataggcctgggatcatcaagggaatcggcatttgggagctccataacaaagagtggcgtgaggttgctcggatgccacacaagttttttcaaggatttggcgagtttgatgatgtttttgcaagctgtggggcagatgatcttatctatatccagagctatgggtcgccagctcttctcaccttcgaagtaaaccacaagtcatggaagtggtccgtgaagagccctgtttcgaagaggtttccgctgcagctattcactggattctctttcgagccaaggctggacgttgctctctagtttcttgactgtccacctccaccagaatttttgcattacattttgcctgattctggactggccagagtcaggaggtgcttgcactgcagccatttgaacacagaaaatgttcgtttttatagctctactcttttctttgttgggtctattgggtatattaattgaaatggtcagttaacttcccctcc

SEQ ID NO: 177162 - DNA, 1371 bp, Zea mays
  Clone ID: MRT4577_93160C.1
atggagatgcttcatcaacaagtacaaaggaagaaggagaagatggcccgactagctgaccttcagaggcagattgacgaagccactgaagaagtacgccatctcgctcaagacgagcaagagcgaaggccccaacatagggagcttcaccaagaaggcttcttcaacgaggatggatggtatgaggatttccatcatggtacctttgcctttgacgatgcttctcccctggcagcagaactgcaggctaccccttggcccccttcttacaagccaccccagctccccatgtatgatgggcactcagatccgaagcagtttctgatgagctacgaagcaaccatatcttcatacggaggcaatgccgctgtcatggccaagtccttcgtcatggcagtcaagaatgtggcccaaacctggtactcctctcttcggccaggaactatcacttcatggcagaagctcaaggacatgctggtcaccagtttccagggctttcagacgaagccagtcaccgctcaggctctgttccagtgcacgcaagatcacgaggagtacctccaggcgtacgtccgaaggttcttgcgcctgagggcacaagcgcccacagtgcccaatgaaattgtcattgaggccatgatcaaggggcttcggccaggacctacggcccagtacttcgccagtaagccccctcagactcgggagaagctgcttcaaaagatggatgaatacatccgcgctgacaatgactttcgccaaagaagggaggaagcctacaggttctctgagatgaccaggggcttcggaggaagaatccacccaaggcacgtcaggtcaatccactccacccagagtgacgacagaggaagtcagcaacagaggccacagtattcctcgcaagcttcgggtcagcaacaaagctatcttcggccgccagctccaaggggcagaggcgccaagggcttcggaggaaggtttggggatcagcctagaaaaatttattgcttattctgtggtgaggacaagggccatactacaaggatgtgccatgtcaccattcagaaacagaaggaaatagcagaatctgcagctcagcagaaccagccgaagcaggtcatgcatactgcttcatatcactcaccctacataccacagtatgtgggtaaccatcctgcagcgtctgttgcttcggctagtcagccacaggcatcctggccacagcctccacctccgccactactacaacctgcatattcacgcggccaacagccagaagcgagtcaacaggcccatcagcagagagacttcagggaggagtccgaagctcgcacagtcaacagtattgtgccagagtcgaagcatatctactaa

SEQ ID NO: 177163 - DNA, 791 bp, Zea mays
  unsure (1)..(791): unsure at all n locations
  Clone ID: MRT4577_93161C.1
aactgagcccgaagccaaaggtaatccaatccccacagaaatccccatctcaaaaccctagccctcatccccgatcccggcgagagagatggccaacccgagggtgttcttcgacatgaccgtcggcggcgcgccggccgggcgcatcgtgatggagctgtacaaggacgcggtgccgcggacggtggagaacttccgcgcgctctgcaccggcgagaagggcgtcggcaagagcggcaagccgctgcactacaagggcagcgccttccaccgcgtgatccccgacttcatgtgccagggcggcgacttcaccaggggcaacggcaccggcggcgagtccatctacggcgagaagttcgccgacgagaagttcgtccacaagcacaccaagcccgggatcctctccatggccaacgcggggcccaacaccaacggctcccagttcttcatctgcaccgtcccctgcaattggctcgacggcaagcacgtggtcttcggcgaggtcgtcgagggcatggacgtcgtcaagaacatcgagaaggtgggctcccgcagcggcacctgctccaagcaggtcgtcatcgccgactgcggccagctctagatccgcccgcccgccggtcgcctttcgccgtcgtcgtcgtcgccccgtgtgtcccgtgtcgtgtcgtcgatctaaataagagagtcgtgtgtcgtgtgtcgtgtcttcccctggtccgtccggtgagatctccgtggttggtttagnaggggtttaggtgggactctttggggcgctggatctgcgt

SEQ ID NO: 177164 - DNA, 293 bp, Zea mays
  Clone ID: MRT4577_93162C.1
gggcccgggacaaaaaaagctctggggcccgcaaaacccccccaaaatatagttcacccggccgccaacaaatttaaacagaacttcccccggccaagggcatgactgcataaacaatctaaggggccaacaaaaagcattttaagcccaaaaaaaagaaaaaaaccccctgacatttttaggccatttttaccccaacaaaaccttaaaggctgctggggaacaaaaacactttgaccttgccccccaaaaacccaggggggggggtcaacttgaacttggcccggacaacc

SEQ ID NO: 177165 - DNA, 268 bp, Zea mays
  Clone ID: MRT4577_93163C.1
gcgtcgctgtgtgtgtttcgagtcagtcagccagttagttgcgtgccatggctggcatgctctgagtctgagatgatgatgatgcctgacggcggcgtctggtactgtagtcctgccctgcccaatcgggcgcttctggcggcgagcagtgtgttgtgtcgtgtcgtgtggctgcagaacattaacacgctagccatgtaccatgctgtggagtgttaccatccatgtataataatcttatatgtataccccaaattacgaaaacaat

SEQ ID NO: 177166 - DNA, 244 bp, Zea mays
  Clone ID: MRT4577_93164C.1
gaaaggtccaagaagcaggaagccctttcgagatctgagctgtcaatagaatataatgatgctgatcaagtttctgccgcacatactggaactgaggatcaagtcggccctaacaactctgatagtgaagatgtggatgatgaagaagaggaagaggaattggagggttatgattcttcttctatggcagatgatattcatgagttcaccttaggtgattcctatgactagttctagatcgcga

SEQ ID NO: 177167 - DNA, 454 bp, Zea mays
  unsure (1)..(454): unsure at all n locations
  Clone ID: MRT4577_93165C.1
cggaaacccccgggtgcgnacccacgcgtttctttcagctggggcgttcacggaaagctggtgtgaggagtagtcgcccaactcccagcaaaggtgtagtgaccctgnattgtcatcgatccatcatatactgtcacaatacacggcaagggaattcctattgcaaattaccggtgttattgtcttaaggaatgagaacagttgtaccctactgcgtgcacaggggggggggggggcatgtgaaagttcatacgtctggtgccaggtttggttgtttggatttacagcggtgtgacctatcgggttaagtgttcgcctggaacagctgtggcgcttgactctgtcaggagtgcagttctttgaatggggactgcgttttgcatgttggcacactctcattcgctcgggccttcctggactgatcgcaggtggcgtgtttgccatggtatttttg

SEQ ID NO: 177168 - DNA, 559 bp, Zea mays
  Clone ID: MRT4577_93166C.1
ggggggggggggacaaaccgatacaaaaaaacgggccgggacatggccccgaccccgatacaaattaggggggtactggactggtgttttcatccaggaaaagaaagaaccaccctttgggactgggactttgttccacccccgtttattttggtcctgggaaaaaaaatgaaacccttaaaactggaactgcttttcctttgggtaaccaagggcgcccaggggcccggccatggtttttttcatgggaggaggcccacatcgcaatacctgaatgtcgggggcaggccctgggcaaagaatttggatcattttctttaaaacaaacccgacccccccgtcccaaattttagggggctgattcaaaacatagtaaatcttgaaacgatcgggatagtttttggccatgccgccaagtttttccttaaaaaaaatatcctcatacgggacatttgcataaataaaggggactttcggggggccctttgggttctaaaaaattgcccttgggacttggaacattggagaaatgcctgatcctccagctaccattccaaag

SEQ ID NO: 177169 - DNA, 324 bp, Zea mays
  Clone ID: MRT4577_93167C.1
aacacaccttcatctgcatctacgctggcacaactgcggatgaccctgatcaccgatgtaatggatcatgctggtcacagacgcccacgatatctccatcgtcaccggtaggacctccgaccaaaccgtcttcagtgcccaggactcgatcatgttccaagctatcaatgatggcaaagatctttacgccttcgatactattccatatattgacgatggcacacttcatcgacgcacgcacctggcctcacgatctaagtatttggaccctattgtcatataaagtgcttacacgtaatccgtcaggtccatcgctcatgtctt

SEQ ID NO: 177170 - DNA, 362 bp, Zea mays
  Clone ID: MRT4577_93168C.1
cctaagcattcaattcgagtcaatgaacactccaccactgatggatgcaagggcgggatcaaaatacaatgtgtggctaataaaccaatccaacctgtaaaatatcaaatgcttgacatcagatcactgcccaaggagcctacaactttacacaagatatgctatttaaatattaaacacgtgactaaccgacactgatgagtttacagatctctcttgagcatgctcgaagcgaacatgaaaggctagtccattaacaattgatattgtataatactgttcagatcgcgtaaaaactattgaaacagataccatcaaacgcaatacaacggacattttaaacatggtgtatgaaaacttat

SEQ ID NO: 177171 - DNA, 802 bp, Zea mays
  Clone ID: MRT4577_93169C.1
cggacgcgtgggcggacgcgtgggctagtgctgtgctggacgagtacgtggcggcggtgaggcgcatgacctgcacggtgctgcagctgatggcgcaggggctgggcctcgacgacagggacgtgttcagtcggctggtgctggaccgggacagcgactccatgctgagggtgaaccactacccgccagcggcggagacgaggcggctgacggggttcggtgagcacaccgacccgcagatcatctccgtcctccgctccaacgacgcgtccggcctcgagatcacgctgcgggacggcccctgggtgtccgtgccctccgacacggaatcctttttcgtcaatgtcggcgacgcgttgcaggtgctgaccaacgggcggttccggagcgtgcggccccgggtgatggtgaccagcgcccgcccccgggtgtcggtgatttttttcggcggcccccccccgcgggagcgcctggcgcccctgccgggtttggtggaccgggagggcggccgacccccctacagggagttcccgtggagggagtacaagaactcggcgtaccggaccaagctggcagacaacaggctttgctccttcgagaccatggcgacgagctagttaagcccccgcgctgacgccggacacggctcatcgccctcccttctcgatgtgtagtgtagcaaaagacgtttttttgtgccatatagttttctgtttatacccgataaggcgggtctcaacttcgtttcatggatttgtatctatcgtcgccccccatcagttattgatccttctcgctagct

SEQ ID NO: 177172 - DNA, 1461 bp, Zea mays
  Clone ID: MRT4577_9316C.1
atggcggaaaaaggaaccgacttaaaggggaaaatactatctagtcctcatcgaattgtctataagtcaataataaatgtgaagggcatgaatgtaatttctcacaggctgcgtcatgtgcctataaacgtactgttcacgctgactggtatttacttttgcgtcacgcttgtacttttaccttccatcaaaccgaagcatttgagaacaagtccccaacattggcgcccacctccggggaactctttcaaccaccttcggcaagcactgaccttcgtcatgccgccgaagaaagcttcagcaccagggaccgctgcactgcagccgctggatccaaaccaggaaactctttctcttcgagaggctcaaagccagaagaggaaagccaccagtccaacacttcaggaggaggagttggaccaagagatcaaggacatggaaataatccatcaacaagtacaaaggaagaaggagaagatggcgcggctggctgatcttcaaaggaagatcgacgaagccactgaggaacagaactgcaggctaccccatggcccccgtcatacaagccacctcagcttcccatgtatgatgggcattcagatcaaaacagtttctgatgagctacaaagcaactatatcttcgtatggaggcaataccgcagttatggcgaagtccttcgtcatggcagtccagaatgtagcccaaacatgattgtcattgaggccatgatcaagggtcttcgcccaggacctactgcccaatatttcgccaggaagcccccacaaactctagagaagctgcttcagaagatggatgagtacatccgagctgacaacgacttccgccaaagaagggagaaagcttacagattctcggaaatgaccaggggcttcggaggaagaatccacctgaggcacatcaggtcaatccataattccactcaaagtgacgacaaaggaagtcagcctcagaggtcacaatacacctcacaatcttcggggcaacagcagagctctttcagaccaccagctccaaggggcagaggcgccaggggtttcgagggaagatttggggatcagtctagaaagatctactgcttattctgtggtgaggacaagggccatactacaagaatgtgccaaatcaccattcagaagctaaaggagatagcagaagccgaagctcggcagaaccagccaaagcaggtcttgcacactgcttcgtgccactctccctacataccagagtatgtaggcaatcatcccacaacttttgtggcttcggctagtcactcacaggcttcctggccacaactcccaccccctccaccactacagccgacctattcacgaggccagccagaagggcgccagtaccctcagcagcaacgtgaagtcaggggggaatccgaagctcgcacagtcaatagtactgtgccagaatcaaagcacatttattga

SEQ ID NO: 177173 - DNA, 632 bp, Zea mays
  Clone ID: MRT4577_93170C.1
acacttgggcggacccttgggcaattgctttcctgaacaattacttgccggcggtaaggcccataacttgcacggtgctgcacctaatggcgcaggggctgggcctcgacgacagggacgtgttcagccggctggtgctggaccgggacagcgactccatgctgagggtgaaccactacccgccagcggcggagacgaggcggctgacggggttcggcgagcacaccgacccgcagatcatctccgtcctccgctccaacgacgcgtccggcctcgagatcacgctgcgggacggcacctgggtgtccgtgccctccgacacggaatccttcttcgtcaatgtcggcgacgcgttgcaggtactccatagtcccatctaacattacattgctactttattatacaatacacacatgacctggcacatcgagtcgttgctttttgcgaggcgaaaacagcttgcttcctttgtacgtactactcatcagtacggctccagtgtcaatccgtgttttgttgatccaacgcgttataaatataataatgataataatacaccaccacataataattcaggtgctgaccaacgggcggttccggagcgtgcggcaccgggtgatggtgagcagcgc

SEQ ID NO: 177174 - DNA, 1393 bp, Zea mays
  Clone ID: MRT4577_93171C.1
aatatccaacgcggcaacactacatttggctacagagttcaccaggaaatttgtgtaacaggactcagatgcggaaaacggcattgagaaaaatttgaaaagatcgattatgaacactctgaacagattatacggacacgtgcaggtgtgggccgcatcaggtctcgtctcagcctctcatcaggcgcgctctctcagctcgcatccctcttcgatccagcacgcgctgacgccccgtacggccgccatgcctccgccccgctccgctccacgcgctcgtggtagggccgtgcgaattccagcgcgcggcacggaaaaagacatgcagtctctcagtatcccagccggcagccggtcagtgtggtaggtcaccacgcgcgctgcagagcgcagatcccgcccatgcgcgcggcgaggaccacgacgacaccgcgcgcaggcgagaggcacccggcccggcgcaataatgcagcgccggccccagcggccggcgctctcgagagattcttcaccggctggccgcctccttgctcgctcatggtcatggcatgtagagccggttgccgcacttgcacctccacgcctccgggtagtattcggtggtgacaggcacgcccggcggcacggccacgtgcaccgggtagcacgggctgcagtcgccgcacttggacgtgcaccgtggcgggtatgaccccggaccgtccgccagcagccgccgccattgcccagtcgtgtagcacccaaccccgccagctttagcatggatctgccacaccacctccacctctgcatctgcctctgcctcccccgggagcactccatggtctgcagggaaactcctctttttcaagccgccgcagcaaaccagtaaatcagaaactacattggttggcaatttggcatcactcttgttagtcgtctttagatttgcttgcagcttattactggagtcttgagaaaaaactgacccaagattttgcgatgtgtgttgccgatttctgtgacggtatactgacccattgaccctagacttcctaaaaagaaccacacgttgaagccttccatgaacaaaagccaataaatagttgcaataagtgcaaagagtatcattaaaccttttatgtttctcatacttcatcttcatgtctctttctttgcatggtgaataacgtggaatgcttgatggttcataggcgtatggttctgtcctgaagaactgatacagcagttccagggcttccctacacttcagtggctggttctgattcatagatacacaacgatcacatagttccatctgaatataaagttgctcgttctcaaaccaagaggtgaaatatcgaattacattctcatgagaacaggtcatttgcatcaatatcggattgtccat

SEQ ID NO: 177175 - DNA, 693 bp, Zea mays
  unsure (1)..(693): unsure at all n locations
  Clone ID: MRT4577_93172C.1
tgggaccctcgaggccggccttgtgtttttttcgtctgcttttctcttgaatgaagatgtgatgaactcagctgaagatgtagtgtgtatgttgtcatggtttatttttctattttatttatctatctataatatctatcggagaaggtttgataaaaaaaaaaaaaaaaaaaaaaaaaaaaaaaaaaaaaaaaaaaaaaaaaaaaaaaaaaaaaaaaaaaaaaaaaaaaaaaaaaaaaaaaaaaaaaaaaaaaaaaaaaaaaaaaaaaaaggcaaaaaagccccttttttttttttttttttaaaaaaaaaaagttttttttccaccaaaagggaaaaaaatttttgaaattggaaaaaaaatggggggtggggctaaaagaaaaaagggggaaaaaaaacccccaacccggaaaaaaaaaaaaacccccggaaaccccccttttttcttgggggggccccaaaaaaaaaagccccccccaaattttcaaaagcccgggaaaaatccggaaaagcccccccccgtttgaattggaaaaaaggttgaaagggaaccccctgaactgggtgacaccttnaacacccacccgggaaaattatatattcctcccccgctggggggggggggaaaaaaaaaaaaaaaggggcgcagatggggtgccaaaaaaaaagaatttgggggggggggggggg

SEQ ID NO: 177176 - DNA, 348 bp, Zea mays
  Clone ID: MRT4577_93173C.1
gcggaaaacagcattgagaaaaatttgaaaagatcgattacgaacactctgaacagattatacggacacgtgcaggtgtgggccgcatcaggtctcgtctcagcctctcatcaggcgcgctctctcagctcgcatccctcttcgatccagcacgcgctgacgccccgtacggcacgtgctcgtggtagggccgtgcgaattccagcgcgcggcacggaaaaagacatgcagtctctcagtatcccagccggcagccggtcagtgtgcctgtggtaggtcaccacgcgcgctgcagagcgcagatcccgcccatgcgcgcggcgaggaccacgacgacaccgccggacg

SEQ ID NO: 177177 - DNA, 371 bp, Zea mays
  Clone ID: MRT4577_93174C.1
tcggttatgaatgcgctcagaaggtcgatctaccggtcggtgcacgagagatctgtactggtagggaagacgagcatatcaggaaggtggacacctgaccatggaagtaactaaggaggctgaccagacctgggctgacagaaggatgccaaaccacaagacatcagttctatcggtctgatagacaataaagccgatggcgaccagtgtgtgttagtggacagagataaaagcatatcattcgggcgtcatgcgacggagaacaatgctggtgatcttactgatgggctgacacatttatatgcctacatgaggaaattcgtggatggtagcgcatgtgattcatgtgatcgacgagagaagcttgatgg

SEQ ID NO: 177178 - DNA, 446 bp, Zea mays
  Clone ID: MRT4577_93175C.1
aaaatataagggcataaatataattaacccttatttgtttcactgaaaaatacaccaaggcccctcctttgggggtaattcacacttaaaggccacgaccgggtccgggaaaacaccgggtgaccaaaaaaagctcacccacagttcccccgaaccaaggggaacaccaacaagggcccaaacggttcaaaaaggcttgaaagctatactgttgacgggaacgggggacaccaaaatcccacaagcccgttcccggggactcaacgtcataaaacctaaacgtaagggatggggagcattagcgactcacccaacacttgatgctcacacaaacacaaacagggaaagcgtaaaacggacggtcaacattgggcggggttaaaaaatgcacaccggggggaaaacggggtcccaataaaaacccaacggtaaagctaaaacggtca

SEQ ID NO: 177179 - DNA, 127 bp, Zea mays
  Clone ID: MRT4577_93176C.1
cccacgcgtccgggttgggtgcatgatccaatagtgctgatctttcagttgtatcaaacaaagttgactgggctgccatgtcttcagagccatccggtggaggagaatctattcgcacagcaattct

SEQ ID NO: 177180 - DNA, 270 bp, Zea mays
  Clone ID: MRT4577_93178C.1
catcttattattatgaagcctaagccaactaacgcaaatggggcagattttgagtttttggaaaacaccacagcttcggtacacgaactcacagagggcccgacaagcccaagatagcgctgcacacaccccacccagccctaaagcaggaatcagtacattacgaccgctaaaccaagcctgagcaaacaacaacacattatggtgaagacgccctgactgtggacagacaactaatgggacttccacagcatcttactaccaactgtt

SEQ ID NO: 177181 - DNA, 247 bp, Zea mays
  Clone ID: MRT4577_93179C.1
ggcactaccccatccccggtgcggggccaccttcccgggtttccctttcgaactcccccctgtcgtcaattatggggcccaggccttcgttgtgcaactactgaaacaccgttcccttatagacatgggcagggagtcattcgcccccgccctatgtctccacatgctcctcctctttctcgagggtggatccgggcgccgcaaaacagagaaaagagacctgtaaacattgaaagagatcaaaaat

SEQ ID NO: 177182 - DNA, 582 bp, Zea mays
  Clone ID: MRT4577_9317C.1
tacgtggtccggccgagtacaaaggaagaaggagaagatggcgcgattggctgatcttcaaaagaagatcgatgaagccactgaagaagtgcgtcatcttgtccaagatgaacaagatcgaaggccccaacacagggagcttcgacaagaaggcctattcaacgaggatgcatggtatgatgattttaatcatgatgcctttacttttgatgatgcttctcctttggcagcagaactgtaggctaccccatgtcccccatcatacaagccacctcagctccccatgtatgatggacactcagatccaaagcagtttctgatgagctatgaagcaactatatcttcctatgggggcaacactgcagtcatggcgaagtccttcgtcatggcagtccggaatgtagcccaaacatggtattcttctcttcggccagggaccatcacgtcatggccgaagcttaaggacatgttggttaccagcttccaaggttttcaaacgaagccggtcacagctcatgctctgttccaatgtatgcaagaccacgaagaataccttcaggcctatgtacgaaggttcttgcg

SEQ ID NO: 177183 - DNA, 194 bp, Zea mays
  Clone ID: MRT4577_93180C.1
gaaacacgcgtccgcccacgcgtccgcccagtcttacgcccattcactctgctgtctccttgtgataagttctaaaaattacttgcacttttgtgggtggacgatcaagagggtcaaggattatcatacactatcattcaacctcagagtacttctatactgtcacatattttcatttcactggccattgtttt

SEQ ID NO: 177184 - DNA, 226 bp, Zea mays
  Clone ID: MRT4577_93181C.1
tcttactctttttcttactcgtatacgaggttctgctttatggacccgtccttccatctgggggcggcttctatgatgctagggccagttctttatctgcactgtgtcctccatccttgtgtcacaacattttacatcgttcctaataatatcactccttcatgtttctatttttcaaaaattcttattctaataatttatgtcttaattattggtttctttttca

SEQ ID NO: 177185 - DNA, 1958 bp, Zea mays
  Clone ID: MRT4577_93182C.1
cttttgatgagaacactcctccattaagtgacccgaattatatatcttcgttgggtgctgcaacgttcaggggtatgcagagtggtgacaacgatgctatttggttgatgcaaggttggctgtttacctatgatcctttctgggaacctccacaaatgaaggcactactgcattctgttcctgttggcaaaatgattgttctcgatctttacgctgaagttaaaccagtgtggataaaatgtgatcagttaaatggtgttctctacttacagaaaggtctcttttctctttctgccaactccatgcactattaccctccttttattttccttcataaaaaaactcgtgtgaccctttttcaggtgcatgctccacaatttcgctgcagattttgaaatgtatggtgttttagatgctttggcttctgggcctattgatgctcgattaagtgataactccacaatggttggagttggtatgtctatggaaggtattgagcaaaatcctattgtttatgaccttatgtcagaaatggccttccatcacagacaagttgatcttcaggtttgggtcgagacatatccaacaagaagatatggaaaaccagtgaagggactgcaagatgcttggtggattttgtatcgaactttatataactgcacagatggtaaaaatgacaaaaatcgggatgtgatagtggccttcccagatgtcgaaccttttgttattgcgacaccagggttgcatgtgaatactagacaaatgtattctacagtgtcatcgaagaattacatacggaaggacgtttctagtgatgcatatgaacatcctcatctatggtatgatactaatgctgttattcatgccctggaactttttcttcaacatggagatgaagtatctgacagcaacaccttcaggtatgaccttgtggatttgactcgtcaagttctggctaaatatgctaatgacgtttttctaaagatcatcgagagctacaaatcaaacaacatgaatcaagtcaccatcctctgccagcactttctcggccttgtaaatgaccttgacacattactatcctctcatgagggttttctgcttggcccttggttggaaagtgccaagggccttgcacgaaacagtgagcaagaaatacagtatgaatggaatgctagaacacaaattacaatgtggtttgacaacactgagacaaaagcaagtttattgcgcgactatgcaaacaagtactggagcggcctgctgcaagattactatgggccaagggccgccatctacttcaagcacttgttattaagcatggagaacaatgcacctttcgccctcaaggaatggaggagggaatggatcagtctcaccaacaactggcagagcgataggaaggtgttttcaaccacggctacaggagaccctctgaacatatcgcagtcgctttacacgaagtacttgagcaacgctgatctacttgggctagtagaaggtacaggctctccttggaagtctgcaaacttataagtaggtgatgcgtgcaatcatgggtcatttcagattcacagttactttttttctctctcatgtttttcctcgtactcataactatcgtttggctgcgacatggttgctacgaatcagttgtgtgtgaactgtgaagtactgaagtctttctgtatagcagtagaaggacgggtttcttttctttttccagtgttccttgccgtaaaattttcagttctgtatctatcccaaaaaaaaaaaaaaaaatttttccatgaccatgcacagtaaagtagcccttaggagaatggtcatggaaaaattcggcctagttcagggtgtcggaactttactgtgcgtctgtacctgagaatcgtgctgctttctgtgaaatccatgtctttcaaacacgacctcggtcataatgactcaaaccgcttatgcgt

SEQ ID NO: 177186 - DNA, 716 bp, Zea mays
  Clone ID: MRT4577_93183C.1
gtgcgcggctcggccggccgggcctgcatccccctttctgctcctgtgctgcgtccaccagcctcgtcgttaggacgtaaggtaagacacccaggggcgagccagtgagtacagagagtagccttacgtagcgaagctcagagcaagcgagggtacggtcaaggggggtgatggcgctgtctcgacgcatggcggctcccgtcctcgtcctcatgctcctcctcgtcgccacagagctggggacgaccaaggtggcggaggcgaggcactgcctgtcgcagagccaccggttcaagggcctgtgcatgagcagcaacaactgcgccaacgtgtgccagaccgagaacttccccggcggcgagtgtaaggcggagggcgccacgcgcaagtgcttctgcaagaagatatgctagtagtagcctcggctttgctggcacaagcaggtcgtcggcacgcaacgcaattcaagcatcatatcggtcctcctcccgcgttgctgtctactcgaccccgttttctctttcgatcgatttcgttgtttcctgttgctctcttcttttcccgcgaataatatgctccatgggatctcactgttgtactttctgcatccgttggtagtcaggacgatccttcttcccgctgtcacgtgtgattcaaaatggatgtactaatgcaactgttcgttcttccaaaaaaaaaaaaaaaaaaggccccta

SEQ ID NO: 177187 - DNA, 318 bp, Zea mays
  Clone ID: MRT4577_93184C.1
ttttttttttttttttttccaaacgaacgaacgaacgaccaatccgatccccgaatcactggttccgaccggctactactcgatcgcaggcgggagccaaccatgatccttcgatcatcgatcggtcgaccgaacgatccttcttgctgcgcgcagtctgctctcgatcgtcgacttgcgtccgccgaccagccgttcgctcgtcgcaccggccgggaggcaacgacgagcggcggggtacggtgggtggttatggcgtcttgctggcctgtgctggggaggggagcgaggcgaggtgcccgcctcgtgccgaattct

SEQ ID NO: 177188 - DNA, 715 bp, Zea mays
  Clone ID: MRT4577_93185C.1
tgcgtccaccagcctcgtcgttaggacgtaaggtaagacacccaggggcgagccagtgagtacagagagtagccttacgtagcgaagctcagagcaagcgagggtacggtcaaggggggtgatggcgctgtctcgacgtatggcggctcccgtcctcgtcctcatgctcctcctcgtcgccacagagctggggacgaccaaggtggcggaggcgaggcactgcctgtcgcagagccaccggttcaagggcctgtgcatgagcagcaacaactgcgccaacgtgtgccagaccgagaacttccccggcggcgagtgcaaggcggagggcgccacgcgcaagtgcttttgcaagaagatatgctagtagtagcctcggctttgctggcgttgggcggcacaggcaggtcgtcggcacgaaacgcaattcaagcatatatatcggtcctcctcctgcgttgcgctgtctaactcgatcccgttttctctttcgatcgatttcattgtttcccgtttgctttcttctgttcccgcgaataataagctcccgcgcgcctatgggccggatctcactgttgtaccctctgcatccgttggtagccaggacgatccttcccgctgtcacgtgtaatctcgtttcaaaatgggtgtaatgcaactgttcgtccttccaaaaaaaaaaaaaaaaaaaaaaaaactcgagagaggcgccggtacc

SEQ ID NO: 177189 - DNA, 747 bp, Zea mays
  Clone ID: MRT4577_93186C.1
cctcgaggcttgccgggacacgcgctctatataaaccgtggctctggttcccattcattgcatccccctttctgctcctgtgctgcgtccaccagcctcgtcgttaggacgtaaggtaagacacccaggggcgagccagtgagtactgagagtagccttacgtagcgaagctcagagcaagcgagggtacggtcaaggggggtgatggcgctgtctcgacgtatggcggctcccgtcctcgtcctcatgctcctcctcgtcgccacagagctggggacgaccaaggtggcggaggcgaggcactgcctgtcgcagagccaccggttcaagggcctgtgcatgagcagcaacaactgcgccaacgtgtgccagaccgagaacttccccggcggcgagtgcaaggcggagggcgccacgcgcaagtgcttctgcaagaagatatgctagtagtagcctaggctttgcttgctggcacaagcaggtcgtcggcacgcaacgcaattcaagcatatcggtcctcctcccgcgttgctgtctactcgatcccgttttctctttcgatcgatttcgttgtttcatgttgctttcttctgttcccgccaataataagctccatgggatctcaaaaaaaaaaaaaaaaaaaaaaaaaaaaaaaaaaaaaaaaaaaaaaaaaaaaaaaaaaaaaaaaaaaaaaaaaaaaaaaaaaaaaaaaaaaaaaaaaaaaaaaaaaaaaaaaaaaaagggggg

SEQ ID NO: 177190 - DNA, 246 bp, Zea mays
  Clone ID: MRT4577_93187C.1
taggctcggatcctgaataccggccgccctctatttttccgttttttccaaccttcggacaatccatggaacggaaacaaactgatcaggttggttaataatgccatactgctggggaccaacaaataggttccctaatcaacttgctagaacaagccaacctgctcttaaatattgctattttatctcaaagggtaaaggtctaatgaacctatgattcccaagaatgccatggtacacaaacgc

SEQ ID NO: 177191 - DNA, 132 bp, Zea mays
  Clone ID: MRT4577_93188C.1
atggatgaaccgccgtcactgttcattgacgttaccacgcagctacgaacaggcagacagatgagctatgcaaagaacgtcatcaaggaatatctctatcgtgttcatagctcgtcttctattgatggataa

SEQ ID NO: 177192 - DNA, 301 bp, Zea mays
  Clone ID: MRT4577_93189C.1
ctggagtacaacatctcgcaagctatctactgtgatgaactgaaagaacttacagtatggtggaaggatttccaatcacatatagatatgcgcttcacgcgggacagattggtggagcttcatttctggatgctcggagtcatacatgagccatattactcgtattcgcggatcatgatgaccaagttcttcatattcgcaaactttttcgatgacctttacgacaactatggcaccacagaggagagcgatgtcttcaccgcagccatggaaaggtgggatgaacagatcgctcatcaac

SEQ ID NO: 177193 - DNA, 493 bp, Zea mays
  Clone ID: MRT4577_9318C.1
tacaaagaagaagagaagaggtgcggctggctaatcttcacaggaagatcgacgaagctactgaagaagtgcgtcatcttgctcaagatgaacaagatcgaaggccccatcacagagagcttcgccaagaaggcttattcaacgaagatggatggtatgatgattttaatcatgatacctttacttttgatgatgcttctcccttggcagcataactgtaggctaccccatggcccccgtcatacaagccacctcagcttcccatgtatgatgggaactcagatccaaagcagtttctgatgagctacgaagcaactatatcttcgtatggaggcaataccgcagtcatggcgaagtccttcgtcatggcagtccggaatgtagcccaaacatggtattcttctcttcagccagggactatcacgttgtggcagaagcttaaggacatgctggttaccagtttctaagtctttcaaacgaagccagtcatagc

SEQ ID NO: 177194 - DNA, 258 bp, Zea mays
  Clone ID: MRT4577_93190C.1
aagagcatttggggtaatacttccagaagtgcggggtaggggaagaagagctatcatggaacagcttgggtctgtgaacaagcttcagtaagttatctttgaatatgtagtatctatatgactatgcgtggctggaaccacattgaagaatgttagagtaatgaaatggaggatctctaaagagcatctgattcttgttgctgtaccaaagcaatggttgatgatacttcccacaccacaaatgggacacatggtctg

SEQ ID NO: 177195 - DNA, 733 bp, Zea mays
  Clone ID: MRT4577_93191C.1
gccggccgtgccggggctcacttcggcttggcgcaaataattccggcacacaaaaaaaaaacgcaaggatttctcggttcctcttcctcctcgcgcagtcgcgctccccacttcaccgagcatcccgaaaaaaagctcggccactgcgccatctcgcccaccaagcaccagccaccagcagcggcgccatggccaccgcgccctacgcctcctccctcttcctggcttcctcccccatctcaactgcgccacgagccagcgccgggtccttccctccctccgcgcagccgttctccatgcgcctccggcctaggccgcgacgccgaagccgcccgcgctaccgttccgcgtgggccacggcttcgacctccaccgcctggagcccaacctcccgctcatcatcggcggcatcgacatcccccacgaccgcggctgcgaggctcactctgacggagacgtgctgctgcactgcgtggtggacgcgattctcggcgcgctggggctgccggacatcgggcagattttcccggattccgacccccgttggaagggcgccgattcttcggtgttcatgagggaagctgtgaaattgatgcatgaagcaggctacgagctgggcaaccttgatgctacgctgatcttgcaaaaaccaaaaattagcccgttcaaggagacaatcagattgaatctgtgcaacctacttggggcagatccatctgtggtcaatctcaag

SEQ ID NO: 177196 - DNA, 209 bp, Zea mays
  Clone ID: MRT4577_93192C.1
tcgcggacgcgtgggcggacgcgtgggcggctgtgctcggcggcccctgtgttgatgtgcgctgctcaactgctgtgcccagcggccgacacctatgcggctctcctttgctcgacgtcgagttcgtccctgatctggctcaacgatttactggtttttatgccgatgctaaatagttggcgagggagaatttctcaacaatgcttgaa

SEQ ID NO: 177197 - DNA, 1046 bp, Zea mays
  Clone ID: MRT4577_93193C.1
ccgcgatctccagttgcagatgctcacttcggcttggcgcaaataattccggcacattaaaaacgcaaggatttctcggttcctcctcctcctcgcgctctcgcgctctcccctcccccgagcatcccgaaaaaaaactcggccactgcgctatctcgcccaccaagccagcaccagcagcggcgcgcgatggccaccgcgccctacgcctcctccctcttcctggcttcctcccccatctccaccgcgccacgaatccgcgccgggccctgccctccgtccgcccagccatccctgcggctccggccgaggccgtccccggcagccgcggccgccgtccaggcggagcaccagcccgcgttgaccgcggcgccgaagccacccgcgctaccgttccgcgtgggccacggcttcgacctccaccgcctggagcccgacctcccgctcatcatcggcggcatcaacatcccccacgaccgcggctgcgaggctcactctgacggcgacgtgctgctgcactgcgtggtggacgcgattctcggcgcgctggggctgccagacatcggccagattttcccggactccgacccccgttggaagggcgccgattcttcggtgttcatgagggaagctgtgaaattgatgcatgaagcaggctacgagctgggcaaccttgatgctacgctgatcttgcaaaaaccaaaaattagcccattcaaggagacaatccgatcgaatttgtgcgacctacttggggcagatccatctgtggtcaatctcaaggccaagacgcacgagaaagttgacagtctaggggagaacaggagcatagctgctcatactgtagttctcctgatgcgaaagtagaaagaacaaatggcagctaattgtatcatgctacacggaaaaggttgttatcttatacttgtgattgttgagtgatctagccagtatggaaaatcttcatgtggtagaaacaataaagctgattgcaatgagaatttttctgtatttccaaatctaaaatcttcatgtggtagaaacaa

SEQ ID NO: 177198 - DNA, 134 bp, Zea mays
  unsure (1)..(134): unsure at all n locations
  Clone ID: MRT4577_93194C.1
agcacactnnggcggnnccgttacttaggtggatccnnngagcgtcggtaccccaagcttttggcgtaagtcacttggtcatttagcttttgtttcctttgtgtnngaaattgtnntatccgctttcacaatnn

SEQ ID NO: 177199 - DNA, 412 bp, Zea mays
  Clone ID: MRT4577_93195C.1
ttttttttttttttttttttttttttttggtgtgggctttatttttctttctttttttttttttttttttcttttttttttttttttaacccacaaaaccccaaatccccactttaaaatattaaaagcggaaaaagaagaacattccccgggacacgttcaaaacatttactattacccccctggccctccttggcctccataaatgatgaaccaatgaaacacttttttttacaccctcatattatttatttttttccccctttcgaccctaaccccttgaactccccgggaattccccacctttactcttagacagccctattttcattttagcaatacgtaatacagttggagagacccagccggacacgttgttcctcctggaaatttttaaccggtcccaattgcc

SEQ ID NO: 177200 - DNA, 250 bp, Zea mays
  Clone ID: MRT4577_93196C.1
cacaaccccaccacaccgaccctctgcctaacgggctggccaccgacacggtgttcacgaacaccaccaactcctccgccagagagcgcagacttctgccgccccccggagcgcagtcctttcggaccaccaagctatgcgagggggcaagacatggctgcgcaggagactcgttctcaagcaactgcccccctaacggttcaacaaatcgacctctacgcgcacatccgtgcccagcgggctgatccct

SEQ ID NO: 177201 - DNA, 398 bp, Zea mays
  Clone ID: MRT4577_93197C.1
gggttgatgtaagaccgcaatccacctggatttatagcactggtgaaatgattatcagtattcacaaccgtattactactcgcgtccgacctttcaaatcaaagccttataaagcccagtgccgatttcggacaactaaaacccaagcaaactcacaccatagaagaaccctaacgggagttgtcagactgactacgaacggcagatgctcctagaaagtacgtcattcacaagctactgcctggatcttcggatgtccaaagaactagaagaactagccaaccccttacaaggaacaacaagttacttcagaactcgaatttatgcccgacttaagtactttagaccgaacttcaccttggcctcctcatgagcaacctttatacttcgatactcct

SEQ ID NO: 177202 - DNA, 1958 bp, Zea mays
  unsure (1)..(1958): unsure at all n locations
  Clone ID: MRT4577_93198C.1
ggatgaagtatcacctaaaaataagtaagattatacttacgaaacacatagtagcttcatttattgtgttgacattccaaatatcagtaatgaaaaaaaaaaactaaacttgcatacaaccttcactactgtcctgtcgaaagcacacagtgacatagctcaatgcaatcccatagtactgctaccaaccccagcggcgcgtcactgcatatgaagttcttcaccgagaccgtcaaacgcgcgatgtacaatgggatcaaaccgaagatattgatgcggagggcggagggttcaccactggtacttggccttgacaaggacgtcctcgtagagctcagccgcgtggtcccagctgaggtcctgcgacatgccgcgcgcctggagactcttccagctctccccgtacttccggtacgtgtcgaggcagtgcctgagcgcctcgatcagcttgttggcctcggcgcggtcaaaagtccacccgagcccggcgtcgccgaacgggtcgaacggcgccacggtgtccctgagcccgcccacggcgtgcaccacagggacggtgccgtacgccatcgcgtagagctggttcagcccgcagggctcgaagcgggaaggcatcaccagcacgtcggcgcccgccgtgatgcgatgcgccataggcaccgagaacccgacccacccgcgcaccttgttgggatgctcccgctccaagtgctgcagcattcgttccaggtcggcgcgcccggtgcccagcatcaccagctgcacgtcctgccccgcgatccacggcatcgcgtccccgatgatgtccacgcccttctgtccatccagacgcccgatgaagccgagcagcggcacgtcgtcgcgcacttccaggcccagctcccgctgcagggccgccttgcactgccgctttccagcgtcgagtgtctcgagggagtagttggtgtagccgtccgaccgcaggtgcacgtccaccttggggttccactcctggtggtcgatgccgttcacgatgccattgatcttccagtcgttagaacggatgatgtcgtggaggccccagccgccttccactgtcttcagctcccacaggtagccgcggctgacagtcaccacccggtctgccatcttcagacccgcggcaaagatgttggcggtagtgttcaggcaagtccatgtacgggaattcatctacaggaccacggccctggtgggcgatgttatgtatgacgaggacggagcgagtgtactgcattaacccatggtctctgtaatatgccttcagataaacaggcaggagtgcagtgtgccaatcattggcaatgaacaccaaatttccatctccgtagcacacaccaccgcatggaacgtgccaaggaacctcaacagcaaccttgcagaacaaaatcatgcgcttcatgatttcctgtctgctgcccccataaatgtcatcttgacggtgtcggaagataggagcgtcaatgaacacaaaatcaactccatcgatataagcatggaaataattcacttccatatcctgtccagcagccttgtagtattttcggactccgacatcgtaggcttcctcatagtccccataccttggtaccacaaccataacacgatgtcctctctttgccaaagccttgggcagagcacccgcaacatctccaagaccacctgttttgcaccagggagaacattcagcagccacgacgaccacgttcatgacgttctcccctgccaaaggtccggaatcatggttctggtgatgttcaaaggagcccgcatcatcttcaccagcccaggaatcatccttggcctccacgggctcctcgaagccgatgtatttcttgaagtcccaaaggtcttcctgtacagcgggctctgcaggcggcgaaagagcctttgggtttggagcttcttcgacgnatgaccgccacccttcttcagtacag

SEQ ID NO: 177203 - DNA, 2540 bp, Zea mays
  Clone ID: MRT4577_93199C.1
ccggaattccgggtcgacctacgcgtccgcccacgcgtccgcccacgcgtccacctactcgtgcttttttttttttgttaattttaatttttttagtgcccttttgatagacatcccagaattactattaaacttgacaaaatgttgacattccaaatatcagtaatgaaaaaaactaaacttgcatacaaccttcactgctgtaatttgatctaacaataaaaaaatctctgtttttgaatgaagtatcacctaaataagtaacattatacttacgaaacacatagtagcttcatttattgtgttgacattccaaatatcagtaatgaaaaaaaaaactaaacttgcatacaaccttcactactgtcctgtcgaaagcacatagtgacacagctcaatgcaatcccatagtactgctaccgaccccagcggcgcgtcactgcatatgaagttcttcaccgagaccgtcaaacgcgcgatgtacaatgggatcaaaccgaagatattgatgcggagggcggagggttcaccactggtacttggccttgacaaggacgtcctcgtagagctcagccgcgtggtcccagctgaggtcctgcgacatgccgcgcgcctggagactcttccagctctcctcgtagttccggtacgtgtcgaggcagtgcctgagcgcctcgatcagcttgttggcctcggcgcggtcaaaagtccacccgagcccggcgtcgctgaacgggtcgaacggcgccacggtgtccctgagcccgcccacggcgtgcaccacagggacggtgccgtatgccatcgcgtagagctggttcagcccgcagggctcgaagcgggagggcatcaccagcacgtcggcgcccgccgtgatgcgatgcgccataggcaccgagaacccgacccacccgcgcaccttgttgggatgctcccgctccaagtgctgcagcattcgttccaggtcggcgcgcccggtgcccagcatcaccagctgcacgtcctgccccgcgatccacggcatcgcgtccccgatgatgtccacgcccttctgtccatccagacgcccgatgaagccgagcagcggcacgtcgtcgcgcacttccaggcccagctcccgctgcagggccgccttgcactgccgctttccagcgtcgagtgtctcgagggagtagttggtgtagccgtccgaccgcaggtgcacgtccaccttggggttccactcctggtggtcgatgccgttcacgatgccattgatcttccagtcgttagaacggatgatgtcgtggaggccccagccgccttccacagctcacgttcatcatctcggctcattgtccatgtcaaaagaaccagcatcagcaccctggaatcatcgcttcgtcaggctcgtcaaaactgtatcttgaaatcccaagtggcctcctgtactaatggctcaactgtaggtgcaattccatttgaatctccgtcaaccgcaggcgattcatgcagtggcttcggggctgggaggacagtctccggcgctatgtccccagagggaaggatcatcctgtagcccggcgctgggaacttcactatgctcgggcgcggcgacgacttgatctcaacaatgcggcgttgcggcgtggccgtcagagatccgtttccgccccaaccgggcccggcgccttcggcctcacgccaccgtcggcagtgccgcgcgggaccgcagcgcacgcgatatcttttagtaacctttcaataggcgtcccccaagaactagtaaacatggcaaaactgttgagcctgttcttagccctctcctttgtagcagctatgtttgccataggctctcatgctgatggagactgtgagaatgacctccaaagcctgataagtgactgcaagacatacgtgatgttcccagctaatccaaaggtccctccttcggatgcttgctgtggtgtcatcaagaaggcaaacgtttcttgcttgtgctccaaggtcaccaaagaaactgagaaggttgtgtgcatggagaaggttgtgtatgttgctgagcagtgtaagaggccatttgagcatggcttccagtgcggaagctacaaggttccagcaaactgatgatatcacaagagggaagcgcttgacgtagtctttagatttcaattgttgcagccgatcaaccttcttagggttgtataatatgaagtcaatgttgagactaatgtgaggtgggagaggcctattgatgcatcaaaagtattatgagctaataataaagccttctccacagattttaaaaaaaaaaaaaaaaaaaaaaaaaaaaaaaaaaaaaaaaaaaaaaaaaaaaaaaaaaaaataaaaaaaaaaaaaaaacagcaaaaaaaaaaaaaaggcccctattttggtacccattatgggggggggggccccccctctaaagattccaagtgcccggcccctaatgaaacaatggataacttttttctaaaggtaaccaaaaaaccattctagtcaccaagcgttacataatggtataataatgaaaaccctgt

SEQ ID NO: 177204 - DNA, 526 bp, Zea mays
  Clone ID: MRT4577_9319C.1
gggggggggtttttttttttttttttttttttttttttttttttttttttttttttttttttttttttttttttttttttttttttttttttttttttttttggggcccaaaaattggctgtttttttaggggcccttttttccaaggggggggggggggcaacatgccccaaagcttaacaaacgacccaacgaacccatacatagccgacgggggggggggcccctttcccagggggggggatggggcaattggccctttgtcccaggccccctgtttttttgtccggagcaaaggccaactttttttgggtgtttgctcaacccctcctggtgaacaaaccggcccgggcatgggaacgttttttcagttttttggcaaaccggtttgggggtttgtcaccccccccgccccccctttttgggtgggcaccacgtccgcctccacctttttcctcccccctccggcggtttttttccttttcccttttttttttttcccccccccggtgcctttccccctcgg

SEQ ID NO: 177205 - DNA, 315 bp, Zea mays
  Clone ID: MRT4577_931C.1
tcgcttttatgtgatgagaaacatgtacgacggggaggggatgatgccacgaatgatcccattgttattgacacaatatctaaagactaaacggacatccatcgtcagtgacttgtccgtggactctgttttgtgccattcgaatacatgatctccgacctggcgggactgatagcgtctattgctactacaagtgcttacctgcaggagctgctcgaccaatatgcaggatttgcacacctgatgccacgtattgagccatcatatggtccatgcaacacgactcctggcggagtgactctggcattatttcta

SEQ ID NO: 177206 - DNA, 337 bp, Zea mays
  Clone ID: MRT4577_93200C.1
gccgagccgagaagagacccttctacaaaggctgttgccgctcgtctgactctggctgtgtctctgacttgaagtacgggtctggagacgcggatgggcttacatgaaagcgcatttttcagagagctgctcttgagcgcctaacagtaggtgagctcaggacacacgtcgtaggaaaactgatacataatactaacacgaactacatgctagaagagggaccgaccgttaagggtcatgtacggatgagatatcagactgcaaaaaaggcatagccgatagcgcacttccgttgaaacttaacggaggtttagcgaagggcaaagatctgaaattt

SEQ ID NO: 177207 - DNA, 232 bp, Zea mays
  unsure (1)..(232): unsure at all n locations
  Clone ID: MRT4577_93201C.1
ctgtcgtccctctnncccaccccatgtcacggccaccgcgccgtctccgtccccgtccccttctccctcgtctgggactcgccctctgctccggatcggcgcggcccgtcgtttcgccatggcatttccgccatgggcggctctgctctttgcgggggttctggtggtggtgttggnggngctggaagcggaacncggaggagggagcgtctgctaggaccggaaggtcagc

SEQ ID NO: 177208 - DNA, 351 bp, Zea mays
  Clone ID: MRT4577_93202C.1
gagcctactagtcggcggccgccctttattcttggggtttttttttgaacattcggtttttatcaccggcccggctccgatggacgcggccaaaaaaaaaaccgatctccaacaccaatttttagaggggaggggccgcattggtttttgggttccctgtttaaactttcttacactttgcaagggcggagaatccaacacaggacaggggggaacctcttttaaataacaaagaaggccatggctttctttcctcgggggagggcccttaatcacggtgcgggggcgaaatttatttgatgcgcaccaagccgaagccgagccgaaaccggatgcatggaacaattatac

SEQ ID NO: 177209 - DNA, 622 bp, Zea mays
  Clone ID: MRT4577_93203C.1
attcggctcgagccgtgccggcccaagcccgtcccatttatgcgtgccgtgctgggggcccgaggggtgggaatttgaggcccggcccaggcccgccttcgggccgtgctagcccggcccatattatttcgtgccgggccgtgctttgggctcttattttcgggccgtgctcgtgctggcccgaaaagcccgacccagattcccagcactacttaacacatccctaggtttgcctcccctccccttgtttccaaattttagtattggagcaaaacaagggtaaaaggaacttctcttccataatgactagtgaggagttatacctgtagataggggtggaaacgagccgaggctcggctcgctgtggctcgctcgtgcaacgagccgggctctgctcggctcgcccatctggcgagctcgagaaatcggctcggctcgcgagacggctcgccgagccaacgagcctatcaataaacataaatatgctctcgaaattataatataaaatcttaaaaatatttttaataacatattttaccataggtaatagatatatcactaatatattatagaaaatagattattttatagtaatctcaaaaacataaattaattgtctact

SEQ ID NO: 177210 - DNA, 481 bp, Zea mays
  Clone ID: MRT4577_93204C.1
ggaaacaacccttaaaaaggactttttttgtttttgtaaaaaaaccaggacccaggggggggggggacggtggttgcctttttacaaggggcaaggctgcagggaaaaggggggggggtccttaaaacccccgggccccatgaactacaggaattccattgggtccccaaaaattacaggatccggggggggatctttttgggatttgaaccacagggccccatgaaccggtaaatcaacaggggaatttacatgctcgttcccccctggagttccaataggtgcttccaaggtttataaggcccaggccacaaacgggttaggaaccaaacttgggttaaaaaaaaatttatggggaaggaaacctaagggggggccccggtttcccctccaaaaacagaaaccccaacattggtttgggagttccaaaacaagcttagggcatccccaaaaagctcgcttaaaaagctccttacttttt

SEQ ID NO: 177211 - DNA, 424 bp, Zea mays
  unsure (1)..(424): unsure at all n locations
  Clone ID: MRT4577_93205C.1
ggccgggacgagaangacggcacggacaacaacgccaatttacagcattctnaagaagacgacgaacggcgggcgcaccgaggcgaacgaagacgccgcccccgcgcacaccgacaccaagagccaccacgagaacaacaagacggaggacacagacaaccccagcggcaacgacacgaagaacagccccaacaagacgagaacagccaacggcgccgacaagggcaccgccaaggacgacaccgccaagaacaacaccggcaccaccaccaccccggaggccgaaagccggcaccgcacagccaaggccccaagcaccggcgacaccaaggaagacggcaacgcagcgganagcggcacccacaacaagaccaaggccaaaagcacgaacgccaaggggcagaccaaggggcgccacaaggag

SEQ ID NO: 177212 - DNA, 754 bp, Zea mays
  Clone ID: MRT4577_93206C.1
accatcctcccatgggcttctccccgcgctcgctgtggtcgcgctccaaaaagcccgacatctactccaccgttgtggtccacgacgacgaggacgacgcccgcggcggcggcgccgcccgcgcggaggatgacgacgacgacgacccctccgcgctgcccccgctcctccagcgcctccccaaggacttcggcggcgcgtccttcgacgacgacgacgacccttactcctcggacctcgacgacgcctcgctctccgccaccgtcgtcatcaagcgcggcgcccccgcctccacatcgtcctcctcccgatccccgttcctggatctgcgccgctccagcccccgcgccgccgaggccgacccgttctccaccttcgtcgtccacggcaccgcgcgctccggcggcgcctccagcccccgcgagtccgtctccggcacgtttatacgccactcgggtggcccccccagcccccgcgagtccgtctccggcacattcatccgccacacccgtggctcctccagcccccacgagtcgttctccggcacgttcattcaccacaccagcagcgcctccagtccacgcgactccgcctccggtgccggtgctgggtttgggtcctcattcataactccttcgtccgggcaggcggaggaggaccggcagccatcacttctgatgcagcagcagcaatcaaggcggaaggcatcgatgagctctctcccagatagcgttactaggggagatccttcacc

SEQ ID NO: 177213 - DNA, 345 bp, Zea mays
  Clone ID: MRT4577_93207C.1
ggatctcgtgggtcccttcgccttttatcaatcttgccgagcccaaataaagagtatcagcccaagaggtcgcattatcgatatgaaggcaatgtcggccgaaagcttccttttgacctctaaatccgtgaacgacgggcaccccgacgagctgtgccaccagttgtataacgccaaaatagactcatgcctagtgcaagaccccgacggcaaggtgtccttctagacccataccatcaccaaaatgagtgatggtgttcggcgagatcaccaccaatgcgaccgggcactacaagtaaaaccgttgcgcgaaacctgccgccagattgacttcacttttgacca

SEQ ID NO: 177214 - DNA, 194 bp, Zea mays
  Clone ID: MRT4577_93208C.1
gggggcccggcactagtaacatttaggggcaaatcaagggtgttgggccttggtccattgaacaccacattttttatatgcttttacaggtcaaagggtaccaaaaaaatttaaaaactgggcccttttttaaaccctttcctggtctttaaaggggaacttttaccccatcacagggttttttgccccacaaa

SEQ ID NO: 177215 - DNA, 221 bp, Zea mays
  Clone ID: MRT4577_93209C.1
tctgcgaacctgccgttaccgtacgcccgcagtcgccgcaaaatccggcggcacgaaccggccgtacgccaggctaccaccttcctacgcccgcctgcccgcccggaatcctgcccccgccgggatctggctgcttgcccgccacaatccaaccaccccgccgggaccgttccgggcatgccgaaaccgttgggatccgcccgccctcctaaatccgcccg

SEQ ID NO: 177216 - DNA, 455 bp, Zea mays
  Clone ID: MRT4577_9320C.1
ccgaaacgaggggggggcataaaaaccgacaggaaacaaaaactcgggccatccaacagcaaaacccaacacagttaagcccatggggggctccgggggcataaggacaaatccgaggatcacagaccagggccccttttatttaacaaggtctcccaaggttaaggctcgtttgctggcaacgggaggaaacggacctttaaggccccccaaagtccgggaatggttttaagccctggagtccaaggatcccacaagcaacacggccaccggggtttccagggcttttgctaagttggggcccaccctttcaaaaaaataaggatcagggggaacaacaacagctttgccaatgattgagtttggcccaaccagggggatctggctgtcagggacattgatattagcaacaccatttgctccagctgtcacgtttccaaaaaaccagcaggggg

SEQ ID NO: 177217 - DNA, 422 bp, Zea mays
  Clone ID: MRT4577_93210C.1
accggatgtaaaaaaaaacacgaagcagagagcattatactgcttgcttctattgagagcgatgcaatatgttgttacaataaatgttcttcatgacgccttctcatcttttggatttgtacaaaacattgctatttttgagaagaatggcttttaagcattgatccaatgtccatacattcaaactgcgtatgcagcaaaagaagcactataagggcacaccatctatgaaggtggctactgctaaccgaacctcacattttcactccatactgaacttaatgtataggttaacaatgagcgatgtagagattattccaatgggaatgccactccaagcagtgatcaacctttctttcttggggcctaaccaataccaagcgttggtgctgctatttcaccaccacatggtagatttcttc

SEQ ID NO: 177218 - DNA, 133 bp, Zea mays
  Clone ID: MRT4577_93211C.1
ctcgagccggcggaaaccctcgccgcagaagaaaggcaatcaatcaaccaactccgaccccaggcagtattcatgggggacacgagacatggacggaccgggacgggaccgcggtgcgagtacgatcgctctg

SEQ ID NO: 177219 - DNA, 248 bp, Zea mays
  Clone ID: MRT4577_93212C.1
aaccacagtacgcgacgcaccatgcgaacagccttacaacaatgcttacaacgatggttgccatgattgagctcctcgtcgtgctagtggccgtttcagagggggcaataattgcacagagttttctagagcgtagagttgtttttagagagtttttccaacagtttcttccacgggtttttaaaagggctttggaacaagcatccgggcaacattaagggttacagtgggctttttcaacgcctttt

SEQ ID NO: 177220 - DNA, 548 bp, Zea mays
  Clone ID: MRT4577_93213C.1
tcgagcggccgcccgggcaggtaaaaaaaaaaaaaaaaaaaaaaaaaaaaaaaaaaaaaaaaaaaaaaaaaaaaaaaaaaaaaaaaaaaaaaaaaaaaaaaaaaaataaaaaaataaagtttttttcaaaaaaaattttgatcctttgtttgttgcccatcttaagtggcatttttggggggggtgccttcccctttgggggccttctggaccttccttttggggggccggttttccccttttttggtttgcgttttccatttccttgcccggttttttccatttccagttcttggaaaactcccttggtttccccttttttttcgctttcctgaacatccccctttttccacctgggggatttgctaaatggcccattcccttcccttttcccaatattttcccccctttattggttattgttccccccttttggggggttttttttggcggcgggtttgggggttatccttaggttgcccgttttttttgcctcccccttttccccggtttttttggtttccttccattcctttccccccctttcg

SEQ ID NO: 177221 - DNA, 251 bp, Zea mays
  Clone ID: MRT4577_93214C.1
gggcaaaggtttttactgacatttactagttttagggggaccgcattaccaaatccacatgtgacagggacatattgaacccaagggggggagcttgaaaaccttacatgaagagggcttcaacacttaaaaccggcgaacccaaaacctgggggtgaccctcctcaccttgggggccatggaaacgggcccggacccgggggaagcctttttcatttccttactggtcctgagggaggacctcggcccca

SEQ ID NO: 177222 - DNA, 1018 bp, Zea mays
  Clone ID: MRT4577_93215C.1
ggccgcaaattttttttttttttttttggaaaaaaacgggcaaccggcagccaatcgcgggcatgtcaggctggaacgaaagcgaagtccgtatagcgtcacgacgtaacagcccaacaggggttctgaatctgttctgagtgcggctgctacagtaacgagcgttgttataaaccagttggtgtaggaagattagtggcaccacgtagtcccacccgtcaacggtgtaccactgggaaattgttctctctgggatctgtaattttttcccccttcctgtgcgcgcatgtcatgtgcagggctggtgcagacctgggcggcggtgatcatgggcgtgttcgcgggcagcgtgccgtggttcaccatgatgatcctgcacaagaaggtggcgctgctgacgagggtggacgacacgctgggcgtcttccacacgcacgccgtcgcgggcctgctgggcggcgtcctcacggggctgctggccacgccggagctgctggagatcgagtcccccgtgccgggcctccgcggcgcgttctacggcggagggatccgccaggtcggcaagcagctggcgggggccgccttcgtggtggcgtggaacgtcgtggtcacgtcgctcatcctgctggccatcggcctgctggtgcccctgcggatgcccgaggaccagctcatgatcggcgacgacgccgcgcacggggaggaggcctacgcgctctggggcgacggggagaagttcgatgccaccaggcacgacgcggtcagggtcgccggcgtcatggatagagaagggtccgcggagcagcggctatcagggggcgtcaccattcagctgtaggcgcacgcccgacggtccataagacacgactttttagcggacatttttttttcatgggagaagagcagtgttttaggctttttattattagcatgaaaggttgtccatgtatcatatttggcccagagcacgtagtctctgctagtttataaagaaattaggtcatgtatttttcctctt

SEQ ID NO: 177223 - DNA, 1920 bp, Zea mays
  Clone ID: MRT4577_93216C.1
cattgggtacctcgaggccggccggggtgtgccattcgtgacagcgacagactttcgtgtttgtgtgtctcttgggctcgcaatcccattggtcgcttcatgccgctcacgaactcccctccgagcccggccgtccaattatgatccacttggttaagtaggataattaatcgcagtcgcagatgaagcagcagttcatgaaggcaggaagcagctaaatcacccatataactggtcgcgcgcgctagcataagcatagcatagtagcgatagccaccaccgatcgaagcatgatggcggcatcgggcgcgtacgcggcgcaactcccggcggtgccggagtggctaaacaagggcgacaacgcgtggcagctgacggcggcgacgctggtgggcatccagtcgatgccggggctggtggtgctgtacggcagcatcgtgaagaagaagtgggcggtgaactcggcgttcatggcgctgtacgcctacgcgtcgtcgctgctggtgtgggtgctggcggggttccgcatggcgttcggggagcggctgctcccgttctggggcaaggccggggtggcgctctcccagggctacctggtccggcgcgcatcgctctcggcgaccgcgcacggggccacgccccgcaccgagcccctgtacccggaggcgacgcttgtgctgttccagttcgagttcgccgccatcacgctggtgctcctggccggctccgtgctgggccgcatgaacatcaaggcctggatggccttcaccccgctctggctcctcttctcctacaccgtcggcgccttcagcatctggggcggcggcttcctctaccactggggcgtcatcgactactccggcggatacgtcatccacctctcctccggcatcgccggcttcaccgccgcatactgggtgggcccgaggctgaagagcgaccgggagcgcttctccccgaacaacatcctgctgatgatcgcgggcggcgggctgctgtggatgggctgggccgggttcaacggcggcgcgccctacgccgccaacatcgcggcgtccgtggccgtgctcaacaccaacgtctccgccgccaccagcctcctcacctggacctgcctcgacgtcatcttcttcggcaagccgtccgtgatcggcgccgtgcagggcatgatgacggggctcgtctgcatcacccccggagcagggctggtgcagacctgggcggcggtgatcatgggcgtgttcgcgggcagcgtgccgtggttcaccatgatgatcctgcacaagaaggtggcgctgctgacgagggtggacgacacgctgggcgtcttccacacgcacgccgtcgcaggcctgctgggcggcgtcctcacggggctgcttgccacgccggagctgctggagatcgagtcccccgtgccgggcctccgcggcgcgttctacggcggagggatccgccagctcgggaagcagctggcgggggccgccttcgtggtggcgtggaacgtcgtcgccacgtcgctcatcctgctggccatcggcctgctggtgcccctgcggatgcccgaggaccagctcatgatcggcgacgacgccgcgcacggggaggaggcctacgcgctctggggcgacggggagaagttcgatgccaccaggcacgacgcggtcagggtcgccggcggcatggatagggaagggtccgcggagcagcggctatcaggcatgggagctaggggcgtcaccattcagctgtaggcgcacgcccgagtcccgactgtccacacgacacgactttttagtggactttttttttcatgggagaagagcagtgttttaggcttttgtccatgtatcatatttggcacagagcacgtagtctctgctcgtttaaaaagaaattaggtcatgtatttttcctctt

SEQ ID NO: 177224 - DNA, 146 bp, Zea mays
  Clone ID: MRT4577_93217C.1
cactcgggcccggacagtcggaccagcgggtcgggccgacgctagggccggcagcaccggacataaccgcgctcaccttcataggaggaccgtgaccgtggaaggctcggaagctcacgggagcaccgggaccgggacacccttga

SEQ ID NO: 177225 - DNA, 3215 bp, Zea mays
  unsure (1)..(3215): unsure at all n locations
  Clone ID: MRT4577_93218C.1
acgagcgccgcgtgcagacggagtggtagaaaaagaattcggtttatttttctggatgtccatcgccttgcttttacgttttctccaaccatgtcgcacaacacactgatctagtactaggactactactagatcgatcctgcctgcctgcctgcttgtaacagcaacagcagcagaagtggcgcactgtgctttgcggtggcggaggctgcgagagaggaggaacttgcaagccgacttccatggctgccgccttctccgccgctatcctcttccacctgctgctgctcctcttctcgccttccgctgcgcagcctggtttcattagcttggactgcgggggagctcgtgatcacacggatgccattgggatccagtggacctctgatgccagcttcgtctctggcggccaggccgcgcagctgctggtccagaatggcctgcagcagacccagcagcagctgaccaccgtgcgctacttccccgcggacaacaggaagcactgctacaccatgaacgtcaggaacaggacgcgctaccttgtcagggccactttcctctacggcaacttcgataacagcaacgtctacccgaagttcgatatctccctcggagcgtctccctggtccaccatcgtcgtcgacgacgccaccacccccgtcgttgaggaagccatcatcttggctgctgctcccacgctcagtgtatgtctctccaatgccagcacgggacagcccttcatctctactctggagcttcgacagtttaacggttcgctctactacaccactgacgagacacgcttctttcttggactgtctgcgaggataaattttggcgcaggaagcaatgattcagtgagatatcctgatgatccatttgatagaatctgggaatctgattctgtgaggagagcaaattaccttgttgatgttgctccagggactgaaagaatatcaactacaaaacccatatttgtcggtaccaacgaagaaccacctgaaaaggtcatgcaaacagcagtagttggccaggatgggtcattgaactaccgccttgatttggaaggtttcccagcaaatgcttggggagtctcgtattttgcagaaattgaagatttggcaccaaatgaaacgaggaaatttaagttagaggtccctggcatgccagcactcagtaaaccaactgttgatgtggaggagaatgctcaagggaaataccgtttgtatgaaccaggctacacgaatttgtcacttccgtttgttttctcctttgggttcaggaagacgaatgattcttcaaaggggcctattttgaatgccctggagatttacaaatatgtccaaattactatgggatcacaggatgcaaatatcatggccagcatggtatcacgatatccacaggaaagttgggcacaagagggtggtgatccgtgcttaccagcatcatggtcctgggtgcaatgcagttcagaaacttctccaaggatattctcaatcacattgtctgggaagaacattaccggaagtatcccggtggaactgacaaagctatcagggctggttgagctaaggcttgatggtaattcattttctggccaaattcctgatttcagagaatgtgggaatttgcagtatattcaccttgagaacaatcagttaactggtgaattgccatcttctttgggtgacctacctaacctgaaagagttgtatgttcaaaataacaagctgtctgggcaggttccaaaagcacttttcaagagaagcattattttgaacttctcaggcaacagtggccttcacatagtaagcaatggcattagccacaccataattattatatgtgtggtgattggagccgttgtcttactgggtgttgctattgggtgctatttcattacatgtaggagaaagaataaatctcatgaagacactgttgtcattgcagcagcaccagctaaaaaacttggttcatattttagtgaagtggctacagaatcagcacacagattttctttatctgaaattgaaaatgctactgacaaatttgagagaagaattgggtctggaggctttggcatagtatactatggaaagttggctgatgggagagagattgcagtcaaacttctcacgaatgactcgtatcagggaatcagagaattcttgaatgaggtgacattgctttccagaatacatcatagacacctggttacattccttggttacagtcagcaagatggcaaaaacatactagtgtatgagttcatgcataatgggacactaaaagagcaccttcgtggagctgataatgaaaagataactagctggctgaagcgtctcgagattgcagaagattctgcgaaaggtatagagtatctccacacgggatgctccccaacaatcatccatagagacctgaagagcagtaacattctcctagacaagaacatgagagcaaaagtggcagactttgggctttcgaaacctgcagtggatgggtctcatgtgtcaagtatagttcgagggacagttggatacctggacccagagtactacatctcgcagcagctgacggagaagagcgacatctacagcttcggcgtgattttgctggagctcatctctgggcatgaacccatctcgaatgacaactttgggctcaactgccggaacattgttgcgtgggcccgatcgcacatcgagagcgggaacatccacgccatcattgatgagtcgttggacagaggctgctatgacctgcagtcggtgtggaagatcgcggaggtggccataatgtgtgtgaagcccaagggcgcccagaggcctcccatctcggaagtgctcaaggagatccaggacgccattgccatggagcgggtgctcgtgtccaattgcagcaacaggatgggttcaggtagcgtggagcagaatggaggagcatctttcgacgagctgctcatgcagccgggtctcagatgagatgagaacctactcgtaccttgagtccattgtatgtagtaattaatgtgtttactacattttttttgagaaacaaattaagtaatgctagcaaaagaaccagtatattattattattattattattattattattattattattattattattaaaaaaatatttcgagggtggncccggnnnnnnnnnnnnnnnnnnnnnnnnnnnnnnnnnnnnnnnnnnnnnnn

SEQ ID NO: 177226 - DNA, 3559 bp, Zea mays
  Clone ID: MRT4577_93219C.1
atcgccttgcttccaggttttctccaaccatgtccaccaacacactgatctagtactaggactagtactagatcgatcctgcctgcctgcctgcttgtaacagcaacagcagcagaagtggcgcactgtgctttgcggtggcggaggctgcgagagaggaggaacttgcaagccgacttccatggctgccgccttctccgccgctatcctcttccacctgctgctgctcctcttctcgccgtccgctgcgcagcctggtttcattagcttggactgcgggggagctcgtgatcacacggatgccattgggatccagtggacctctgatgccagcttcgtctctggcggccaggccgcgcagctgctggtccagaatggcctgcagcagacccagcagcagctgaccaccgtgcgctacttccccgcggacaacaggaagcactgctacaccatgaacgtcaggaacaggacgcgctaccttgtcagggccactttcctctacggcaacttcgataacagcaacgtctacccgaagttcgatatctccctcggagcgtctccctggtccaccatcgtcgtcgacgacgccaccacccccgtcgttgaggaagccatcatcttggctgctgctcccacgctcagtgtatgtctctccaatgccagcacgggacagcccttcatctctactctggagcttcgacagtttaacggttcgctctactacaccactgacgagacacgcttctttcttggactgtctgcgaggataaattttggcgcaggaagcaatgattcagtgagatatcctgatgatccatttgatagaatctgggaatctgattctgtgaggagagcaaattaccttgttgatgttgctccagggactgaaagaatatcaactacaaaacccatatttgtcggtaccaacgaagaaccacctgaaaaggtcatgcaaacagcagtagttggccaggatgggtcattgaactaccgccttgatttggaaggtttcccagcaaatgcttggggagtctcgtattttgcagaaattgaagatttggcaccaaatgaaacgaggaaatttaagttagaggtccctggcatgccagcactcagtaaaccaactgttgatgtggaggagaatgctcaagggaaataccgtttgtatgaaccaggctacacgaatttgtcacttccgtttgttttctcctttgggttcaggaagacgaatgattcttcaaaggggcctattttgaatgccctggagatttacaaatatgtccaaattactatgggatcacaggatgcaaatatcatggccagcatggtatcacgatatccacaggaaggttgggcacaagagggtggtgatccgtgcttaccagcatcatggtcctgggtgcaatgcagttcagaaacttctccaaggatattctcaatcacattgtctgggaagaacattaccggaagtatcccggtggaactgacaaagctatcagggctggttgagctaaggcttgatggtaattcattttctggccaaattcctgatttcagagaatgtgggaatttgcagtatatgtgagtttccagttattttgataatattttattcttaaatgattctactaatatactgtgctttgattctgaaatgattctactaatatatggtgcatttattcattctagtcaccttgagaacaatcagttaactggtgaattgccatcttctttgggtgacctacctaacctgaaagagttgtaagttaaacatccacgtgtacaccttgtcttaatctccacattttggaggccatagtataatattccttcaatttatttttcttcctgactttttttatttgtattcatttctttttttttctgctcaagaaaccaaaaggcaaattgatgtcagtgatttaggctttttcatatgattacatctatgtgaggatctttatggaaaaaagacctctcttattatgaatgaaaaaatttgcaggtatgttcaaaataacaagctgtctgggcaggttccaaaagcacttttcaagagaagcattattttgaacttctcaggtaacagtggccttcacatagtaagcaatggcattagccacaccataattgttatatgtctggtgattggagccgttgtcttactgggtgttgctattgggtgctatttcattacatgtaggagaaagaagaaatctcatgaagacactgttgtcattgcagcagcaccagctaaaaaacttggttcatattttagtgaagtggctacagaatcagcacacagattttctttatctgaaattgaaaatgctactggcaaatttgagagaagaattgggtctggaggctttggcatagtatactatggaaagttggctgatgggagagagattgcagtcaaacttctcacgaatgactcgtatcagggaatcagagaattcttgaatgaggtgacattgctttccagaatacatcatagacacctggttacattccttggttacagtcagcaagatggcaaaaacatactagtgtatgagttcatgcataatgggacactaaaagagcaccttcgtggagctgataatgaaaagataactagctggctgaagcgtcttgagattgcagaagattctgcgaaaggtatagagtatctccacacgggatgctccccaacaatcatccatagagacctgaagagcagtaacattctcctagacaagaacatgagagcaaaagtggcagacttcggtctttcgaaacctgcagtggatgggtctcatgtgtcaagtatagttcgagggacagttggatacctggacccagagtactacatctcgcagcagctgacggagaagagcgacatctacagcttcggcgtgattttgctggagctcatctctgggcatgaacccatctcgaatgacaactttgggctcaactgccggaacattgttgcgtgggtaagaaagaagagtattcctgttggttctgctgaagcaaaagcgttaaataaataaataaataaatgcaggcccgatcgcacatcgagagcgggaacatccacgccatcattgatgagtcgttggacagaggctgctatgacctgcagtcggtgtggaagatcgcggaggtggccataatgtgtgtgaagcccaagggcgcccagaggcctcccatctcggaagtgctcaaggagatccaggacgccattgccatggagcgggtgctcgtgtccaattgcagcaacaggatgggttcaggtagcgtggagcagaatggaggagcatctttcgacgagctgctcatgcagccgggtctcagatgagatgagaacaacctactcgtaccttgagtccattgtatgtagtaattaatgtgtttactacattttttttgagaaacaaattaagtaatgctagcaaaggaaccagtatattattattattattattattattattattattattattattattattattattattattattattattattattattattattattattattatttt

SEQ ID NO: 177227 - DNA, 103 bp, Zea mays
  Clone ID: MRT4577_9321C.1
gtctcctctccgcatcttctctcctggaagccgactcggtcggtaccggacaagattgccgccttcttcggtgctgcaccgccgacggctctcgcttcattcc

SEQ ID NO: 177228 - DNA, 598 bp, Zea mays
  Clone ID: MRT4577_93220C.1
gtgtgattttattttattttcggttgatatctatcaagcaagtttatggttagcccttaggtatcgagtacattgggcgtggagtacattcagaatggagcgactgtttcaggatccaatttttttggattctggaggttgaacattgatacttctatatctctaaagctgaatagtgtgctgcttattgcatttgtctcacgtgctgttattatcaagctttattttttaggctattagttcacaatcttagttttaaagcttttttgtgcttcaataaacctatttgtgctgtatgtgcgatcaattagtctagttttgatgttgggtgaatgttctctttattgtattagttgtctggtatcgataatcactaattttcagtggttgttccaattactatcatattttgcgctgtgtaattccttaagtatactctgtcttctctgttagatggagcttcctgagtgggttgatattgtgaagactgcgaggttcaaggagctccctccttatgaccctgactggtactacatcagggctgcatctgtagcaaggaagatctacttgagacaaggcattggtgttggtggcttcc

SEQ ID NO: 177229 - DNA, 303 bp, Zea mays
  Clone ID: MRT4577_93221C.1
ccaagagatgcatgctgatctcgacctccatgccaacgccctcatcaagatccacaacgacatcaccaaaaaccaccatttcctcacgcactacaccatctagatccgctacaacaagctcatcctcacggatctttaactgatcagcgctaactccaacgtgtacaaactcatcgtacccttgctggtgaaccatgacctctagcaagccactgccaacgtcattaaacgcatctcgtacatctgctcaaagctgaaacgaatacatcacgctctcaaatacttgcaggacaagcactacac

SEQ ID NO: 177230 - DNA, 219 bp, Zea mays
  Clone ID: MRT4577_93222C.1
gtcactgtactagtgtcatttatactcgcttcttacatttgaggtgacatatctccattcctccctgtttctaagcacgtgatagctagtgccagaattggcttagtgaaaggttaaatagatagtttagatggctaacttcaacaagtatcccacaatcgacttaataatactttcagggttgaaacttgcagtgttattaagtcattcaattaatca

SEQ ID NO: 177231 - DNA, 655 bp, Zea mays
  unsure (1)..(655): unsure at all n locations
  Clone ID: MRT4577_93223C.1
ctgtccccgtctctctctaacccgcttctccacctccctcacatcggctactctccgcgcgcctaccgttccgcgccgcatcggggaggaatggccgtgcgtttctgttctctcatgccatgaacgtagttgtgggggcgaaggaggatagacacctcatgacagggctacacacagttgctgatatctactgtaatgactgccgtgaggtgttaggctggaagtatgtgagagcatacgaagagacgcagaaatacaaggaaggaaaattcatattcgagaagtcaaagattgtgaaggaaaactggtagtgcccccaagttgccaatcaccaaatgttccggtgaagatgaaatggccatttagtgtgcttttggatgtttgtgtccttgtaaatagcttttcctccgtggattgcagtgctaaggtgccccatgttcacgcctcagtgacaattgtanaaaaaaaaaaaaaaaaaaaaaaaaaaaaaaaaaaaaaaaaaaaaaaaaaaaaacaaaaaaaaacaaaataataatccctttaaagaaaaaataattaaaaaaagggaccttttccgggcaccccccggaagccgaaaaagcttttccggtggggtcccgttcctccgcccgcccgaggggacccttaagacttg

SEQ ID NO: 177232 - DNA, 205 bp, Zea mays
  Clone ID: MRT4577_93224C.1
ctattaatagttccttctagtacttaaaaaaacatatagcgaagcaccaatttaaggttgagcttattaaaccccaaaaatataaataaaaattagaaggaggaaacgaaaacatcaaacaaaaggaatacaaaggactgccattatcatacccaaactgagctaaccgaccaactcatcggaaatgggcggaagaaaaaaaaca

SEQ ID NO: 177233 - DNA, 796 bp, Zea mays
  Clone ID: MRT4577_93225C.1
gggaccctcgaggccggccgggacagcatcttactcctgattccgacgccaaccccctgccctgccgccgtctctctctaacccgcttctccacctccctcacatcggctactctccgcgcgcctaccgttccgcgccgcatcggattgggtggtcggggcctagtcgaggttgcgcgggacagcgtcagtccatggcggagcttgtgggaccgcgcgtctacagttgctgcacttgccggaaccacgtttgccttcacgacgacatcatctccaaggcctttcaggggaggaatggccgtgcgtttctgttctctcatgccatgaacgtagttgtgggggcgaaggaggatagacacctcatgacagggctacacacagttgctgatatctactgtaatgactgccgtgaggtgttaggctggaagtatgtgagagcatacgaagagacgcagaaatacaaggaaggaaaattcatattcgagaagtcaaagattgtgaaggaaaactggtagtgcccccaagttgccaatcaccaaatgttctggtgaagatgaaatggccatttagtgtgcttttggatgtttgtgtccttgtaaatagcttttcctccgtggattgcagtgctaaggtgccccatgttcacgcctcagtgacaattgtaaagcacacttgttcctgttcatttgtgtgaataaggtacttcatttggttatttggtatggaatggcctctaatgtgcataacatggtgggccctcaaaaaaataaaacaaaaaaaaaaaaaaaaaagcggcc

SEQ ID NO: 177234 - DNA, 293 bp, Zea mays
  Clone ID: MRT4577_93226C.1
tcctccctttatacagagcaaaaacattgatcatgagttttttttacaggtatagcgcagatgcacccaaaacaaaaaaaagaggaccggcaccacttgcaatggttgaactggcccaccggcatgggccagagtagatgggaacagcatactagcgatacacaagcaaatttttcccaaggcagcactgcgccagcacatgtatacctacagccggcctgggcgacaacaaacacggcacgagcaacctaaaaaaccgggggggtgccagaatggcggcaaacaacccgcct

SEQ ID NO: 177235 - DNA, 372 bp, Zea mays
  unsure (1)..(372): unsure at all n locations
  Clone ID: MRT4577_93227C.1
gggacctggatctccgtccggtcagaccganaacaaagtttcgcgagcacgagcatgcagcngttgccgtgcttccccatcgcgtgccctcgcgcgcagccatcttccatggcggaccagctcacggacgagcagatcgcggagttcaaggaggccttcagcctcttcgataaggatggcgacggctgcatcactaccaaggagcttgtaactgttatagggctgcttggccagaaatcaacataagcagagctgcaggacangancaacgaggntgatgctganggcaangggaccatngactncccagagnnccngaaccnganggcaaggaagangaaggacaccgacnccgaggaggagcnnaaggag

SEQ ID NO: 177236 - DNA, 555 bp, Zea mays
  Clone ID: MRT4577_93228C.1
tctcgagttttttttttttttttttttttttttttacaatagagcaggtgtatcactttatactgagaatcaaaactaagtgggccctattacagccagttggcgccatagtacttgggattcagcttccttggccgatcacccctcctcagcttcttgttatcagatgttccagcttcagcttcatcaatcttgttccctgcgatctgctctgcatccgcttccaacctctccttgtgcaacccattagtgcagttgttgacaagcggcgtggggcagcgttgccggcaattgattgggggtctgcacaaaacgtaaacttgggttattgttggcactaaaacaaatacctgcccatgctttcctcgtgcaggttggcccaaggttgagactcactggagtaaccaaatgtgccacaaactcgcaaagtcgcaaccactggaaggctcaaacctgcaaagcatccttcagttggcattcggattcgttagtatgcttttaaaagctaccctccggcagggctgggtccacaaaccccaacaagcacaattgaaa

SEQ ID NO: 177237 - DNA, 353 bp, Zea mays
  Clone ID: MRT4577_93229C.1
cggccctttttttttgttgttgctattgtgatctgttggaatggactcattgctactggggagttcttccggcgtgaaggactagtggaggaggagcctatggctgggaagcagctgcgccacgccacacccgggctcggtatcgccatcgtctgcttcgggatctagctcgtcggctaggccgcctagaaacgccgtgtaccgcgcctccggcgacgtccaggcactagatcgccggcaggatccgtgactcggtcaagaatctggcgccaactttacgatgcactggtgctgttgatgtttttagagttttgagctcatatcgtcacccatgacgatattgtaatccgtga

SEQ ID NO: 177238 - DNA, 466 bp, Zea mays
  unsure (1)..(466): unsure at all n locations
  Clone ID: MRT4577_9322C.1
gtgttttttttttttttttttttttttttnnnnnntttttttttttttttttttttttttttttttttgttttggggcataaacaatgggggcttggtttttcgttttgtggggggcttcaaacaaaaaaaaaaaaaattttttttggccgggtaactggaaaatgaatttttttagtttcttccccctgaatttaaaccattcaggggggccggctaaaacaaaccccccaacagggagtttttaacaaaatttcagatcttcttttttttttttgaggtggccaggtttaaccacccccatttttccaccccggggattttcttcatggtttcccggaagactttaaaaacttgggcgaatttttttttaagcccacccttccgtttttttatgtagccggaggggaaccaaccagtttttcccctgtttttacctttgggccattcattttttgacacctttt

SEQ ID NO: 177239 - DNA, 392 bp, Zea mays
  Clone ID: MRT4577_93230C.1
cacccgtccgacaacagatgcaaacgaagcaaaccacaacaagaagatgcgtttttgacaccaaagggaaaggggcggggcagggtggcataacaagcgcaccaccgctagcacccgaagagcgagagctagagacagcattatatggacgccgacatcgtctgccacagaagacagcggatgggcagcagggccgagagcttccccacgacaaagcctggggaggcagcgcggaagcataaaagactgggataaacctaacactgttgccccaacagatacacccgatgcaggtgcaaagaacaccctgcaccagggcgaaccagaaggggtcatccgaggcaagaagggcaacgtgcgcactactatcatgaaaaccgggatgcccatga

SEQ ID NO: 177240 - DNA, 861 bp, Zea mays
  unsure (1)..(861): unsure at all n locations
  Clone ID: MRT4577_93231C.1
gatttgctgctcctcataaaaatccagttgtaaagcgccaagatcagatnaaggaggcggtggcgacgctgaaatatttgcattaatttatcctattcagctccgcacgcctggaacctcctctacatcctaggttcccgaaacataaaatatgtgtttgcaggggacgccaacaaggttactgtcatgtacatacatattgattaacgagcatgacctgaacctctttgctgaatgtgattttgagactgaaagttactgcccgtatgatggtatatgtgggatttgcttgtcagtattttccttttgaggttgcgggggctgctatctcagggtattttgtgatgctcgagctcgagtggagtgcctttctaacctatggtttatttgctttcctatcggtcgtttaaggagatcacaacttttgacattggagaactttaggaaaaatgagcagctttctaagtatggtgtgcaagagcaataatgcttgttgagccgaagaagcttattgaagctaaccccttgttgcgtgataagctacaatttcccagcccgaagaattctaggtgggtttggattgtggaaatgaattgctataaggatattgacatgaaacaaatagcaagtgactgatgtaagatattgacgtactctcaattgtgtatttaggtattaaaaagtagctatctcaaatatctgtgaactcaagcgactgtccagtttgatagctattactgattcttttgatgtgttgtttgtttgatagctagattaaaataacaaaatttttgtatggctaggttcacaaatggattacgaaatcttttgtcataacaatataacacacatttgtacatt

SEQ ID NO: 177241 - DNA, 552 bp, Zea mays
  Clone ID: MRT4577_93232C.1
tcgagcggccgcccgggcaggtaaaaaataaaaaaaaaaaaaaaaaaaaaaaaaaaaaaaaaaaaaaaaaaaaaaaaaaaaaaaaaaaaaaaaaaaaaaaaaaaaaaaaaaaaaaaaaaaaaaaaaaaaaaaaataaaactttaaaccgtgtttccccttgggccgaatcccccttttggggatttcttttaaatttcctccccctgggtctcttgggcccattctttccttaggcccaatttgccccctatttaaaatggcctttaaatttaacttggccagactttttaaaacccataaattgggaaaaccttagctttccccatttttatccctttcccaaatttcccttttttgcaattgggcctaaaccgaaaccgttccccccttttaccctttcccaaatgttgaggggcctcactcggaattggcccctccttttacggggcctttaagcccccggtttttgggttttttccctttgtaaccccctaaccttcccagccttttaattccgttttttttttttttttccctttccttttttcccc

SEQ ID NO: 177242 - DNA, 273 bp, Zea mays
  unsure (1)..(273): unsure at all n locations
  Clone ID: MRT4577_93233C.1
actattcacgcccccggtaagccacccgcgaaggaaccaccaaggggggacagtgagcgggaagaccagctattccccgaccagacagnaaacccaacggagcaaaacgcaaaggccgaaggcgacgccgacagcgaagaggaggaagacacaggaaagggggacgccgacagcacaaacgcaggcgccacagcccacaaaggccacacgggacgagcaggaggagccacgcggcacagcaccagctaaggacaaagccgcacaggaaggaag

SEQ ID NO: 177243 - DNA, 1231 bp, Zea mays
  Clone ID: MRT4577_93234C.1
cttttgtgcaaaagttcaaattgtggtttgttagattatttagtgtttacatgttgaggagctgcctgcggtggcatcaattatctctgatttgctccctagaggccttaaaggtaaaaaccattagatctaaggaattatctctagcatatgaaccatatcaagctgacattcctttttcctaatttgcttgttattaatatgcctggttgcctgcacaattcagttgaactggatattcaagttcacatatttccaacgatttgttgtgctattggtcttgtcatggagctcaaatttggtccaatatgaattattatatgtgttgcatattcaattccagcgccaagatcagataaggaggcggtggcgacgctgaaattttgcattaatttatcctattcagctccttgtgcctggatacgagagatggttaactaaaactagatattttatcctgttcaactcctgatgcttggatacaaggtggttaactgaaacaagatggtatgtgtttgcaggggacgccaacaaggttactgtcatgtacatacatattgattaacgagcatgacctgaacctctttgctgaatgtgattttgaggtaagaacttttagtacatgtagtttcaaaccatggtttgtgaagaatccaacacaacaatgtttgtgctcgtctcccacgtttatttgtagcattcacgttgtaagattggtatattttgaactgactgaaagttactgcccgtatgatggtatatgtgggatttgcttgtcagtattttacttttgaggttgcgggggctgctatctcaggtgcttctctataagattcacaaaaccctccccgatcatcctcgataagattcacattttccctgtgcagggtattttgtgatgctcgagctcgagtggagtgcctttctaacctatggtttatttgctttcctatcggtcgtttaaggagatcacaacttttgacattggagaactttaggaaaaatgagcagctttctaagtatggtgtgcaagagcaataatgcttgttgagccgaagaagcttattgaagctaaccccttgttgcgtgataagctacaatttcccagcccgaagaattctaggtgggtttggattgtggaaatgaattgctataaggatattgacatgaaacaaatagcaagtgactgatgtaagatattgacgtactctcaattgtgtatttaggtatt

SEQ ID NO: 177244 - DNA, 323 bp, Zea mays
  Clone ID: MRT4577_93235C.1
cttgcgccggcactgacttacaggtcaggccgacgtgatctccggttcgtgcgtgtgcgcgaagcgcatcgtggtggacgcgcgccaccacatgccgggccgtctgtgctagatcatagccaacgagcttctaaatgggcagaaggcagtcgccgttcgctggctggagatctagatgagaggcgggcacggactggacaagacgaagtaccttcgcttctctacggaagcggatgaacaccaatgcagcccacattacaatgcagttgccgtgccgggtacagacactgtggcccaccatccggggaatgatctcgcacaag

SEQ ID NO: 177245 - DNA, 175 bp, Zea mays
  Clone ID: MRT4577_93236C.1
ataaaaaacaggagccgtttgaataggcaagagatctaatgaaagcacggcttatttgcctgccgcacgtagcgagacagagacggaacagcgggcggataccatgtgaatgccacctgcatacaaccgggattttcccaggggcgggtaatcacagccgaagccttgaactcaa

SEQ ID NO: 177246 - DNA, 553 bp, Zea mays
  unsure (1)..(553): unsure at all n locations
  Clone ID: MRT4577_93237C.1
cgggagtgaggatagcgatgagancaggaaaaatgatggcaaggttggtaaaacgaataaaaatactgatgaaagttgggatagtgactgagataaagtaatgatgatatgtgatgcatgaaggtcagcatcaatggttgtcaagtccaagttctttcattggtggtgttgctcatgtactgtccaatggaaatctcgaggagctagaagaataagcatggtttccataggaacaactgtttgaacttttactgcaagttttcggacgtcttctattccagttgtgttatagtaacctgaaaagctgttggagggcaagttgtcaagggtgtgctagcctcatcaaagccagaatgctgcatgacttgcacaagccgaggacaaagtaacagattacagatgtggtcagagttcactatcgaggtttctgaaggtctcagaaatgtgaaatcgtcactctgcgatcacatttatttctcatcttattcttttagttttgatgtgaagagaacatgcacatagatttatctcaaggccatgtgtaccttgtctt

SEQ ID NO: 177247 - DNA, 293 bp, Zea mays
  Clone ID: MRT4577_93238C.1
cctaagcctccgcctatccattacggggctcttgaaccattgactgagaagaaactatagctggaagggaggatagaacgggtatcggcatcaatctgggcagaacatactttagcaacggcgtgtggaaggacgagaaggtacggatcattgtcaactgcgagcggaaccgaaccatgctctggaacggctccttcacctactcgcgttgcctaatagcacatgcctacaatagccacgtctctgatgaaccctagcaatagacagtcttggatgccaaacgtcttcattgc

SEQ ID NO: 177248 - DNA, 547 bp, Zea mays
  Clone ID: MRT4577_93239C.1
gccagcctttcggcttgaataggaccttactgaggggcaaccacatcacgtgctggctgtgcaaaacataactacgccgaggacgaaaataagaatcattcaccactacatgaatcttagtacgacactatttcaggagacaccatccctggtgcagcatgccgcgcgcgctacgagcgtgatgtgttggctggaaacttcaatgctataaggaggaagcttgagccgatgagaagaaaggcatgtgcggatagggacagaagagctatagaagtgaaatgaggcatgatgacatactacatgcgggacataggactagaggccctaaggagaccctgacaagactggatcatggatagtgcggatgatacaaacttagagattgttttcgtgacaccgaactatcacccagtagcctccatatgtcagagtccactctaggatcagcatgacatgcgagagtcaccagacaggtatggacgatctcaggaagaatgttttgctagcacactgacagtgggactacacgatggagaacatcctcacc

SEQ ID NO: 177249 - DNA, 455 bp, Zea mays
  Clone ID: MRT4577_9323C.1
ttttttttttttttttttttttttttgggggcttttaaaatttttgggggtttttttctttttttttttttttttaagaagaaacccccccctcttttttctggaaaaaccaaccccccattttcaaaaaaaataaagggaatttctaccgaaaccaccaattcaattgcaaaaaaacctcccccctttaaaaaaccccccgaaattaaggctactctttttaaaccggaacgacccgggaacaattttaatacccccaaaagtgactttcccctaaggaccaaaaactttaaccccccggagaaccggtatttgaaaccatttcctttctcggtgccccttaaaaaatttcccctcacctaataaattttaaaggcttaaaacccatttgaaaaaaacacaaaacttctaaaaaaatcatccccccggctaaaaaaaaacccttattatttttt

SEQ ID NO: 177250 - DNA, 338 bp, Zea mays
  Clone ID: MRT4577_93240C.1
cctgcgcgtacgcacacgcttgcgtcaaagatactgccttgcttgagcaggtccgaactaaggctaacagcccaactgcgactggttgatgatggcacacgtagccaggtcgagggaccctgctactttgatacccggatctatggtaaggctaagccgaccactaaactaggactcccagaaggtgctcctgaatcagataacaggctggcgcctgctctgattgtcagatccggtgcataatgaccacttgacgaatggcactgccgatgaggcagcgacccagaatgctgctatcggtgatatcatctatctatggcaggatctgcatcttccac

SEQ ID NO: 177251 - DNA, 350 bp, Zea mays
  Clone ID: MRT4577_93241C.1
tttttgttgttttttttatattttgttttggcagaaaacagcacttgattgaaacagccacattgagcgaccatagtgaaaaagccatgctagccgtatcagattgaccagctgatagggagcgatacaggggccttagctgactcaatcaacgagaaggtcataaaagaggtatctagtctgccacatggatcctattggtggtgggaaaccgggaccgatctctatgccttctgccatggggggaactgtcccttcggaccctagagcgagagccctcacttctgcggtcccttgagcgtgagcgttccccccgggggttccttgagcgaggccatcacctgcggttc

SEQ ID NO: 177252 - DNA, 599 bp, Zea mays
  Clone ID: MRT4577_93242C.1
ggggggggttttttttttttttttctttttttttttttttttttttttttttttttttttttttttttttttttttttttttttttttttttttttttttttttttaaaacagggcaaacaagtcccctccctcattcaattaaataccaaaaggggggggggggggcaaaaaacaggtttttaaaaaacggcccccaataaccctaaaacttgcaaacaactgttttgccttaacgggggtcccccggagagggcaaatacaaaaacagccctcaagcccacccttaaaaaaaaaaaaggggcatttctgtcttgggccaaaaaacctttggaaacatccctcaattgcaaactgaaaatagtttgttatggctttaaagtaaaaaaaaaatgccttcggttagggaaaatgcaacaagcttactgggcggggggtttgctttttgctgaggggccacattggggaaaacatccattgcctaaaaaacctttgacttgggggcataaggggacccaagcgggggggggacctcagtttgatccatttccaaaacattccagggacctttgccgcttggttggggcccagttgccaaac

SEQ ID NO: 177253 - DNA, 496 bp, Zea mays
  Clone ID: MRT4577_93243C.1
acgcagcagcattgaattgtgcgtagatccaggaaccacctagcagtcaaggagctagcacaggtagctaggacaggatggtgaacctggtggaggcgcagaagccgctgctgcacttcctaatcaagtgggccggcctccggcagcacaccgtcgacgtcgacggcgccggcaccgtgctcaccttctgggtgcccaaggacaaggtgcccgggaacaactccaccgtcgcccccgaagagaagcagagcgagacgtccaaagccaaaggagtgcgccggccatccgtggtgctcgtgcacggcttcgcggccgaaggcatcgtcacctggcagttccaggttggtgcgctggcgaagcactacgacgtgtacatcccggacctgctctacttcggcggctccacgtcgccgtcgacggacaggtcgccggcgttccaggcggagtgcctggccgcggcgctcgggaagctgggcgtggacgagtgcacggtggt

SEQ ID NO: 177254 - DNA, 669 bp, Zea mays
  Clone ID: MRT4577_93244C.1
cactcgcgccgctgccgtagctagaatccctgcgaagaggagcacctcgggcatcagcagcaatcatggcggacgcgaagacggcgcctgcggtgactctccgcacccgtaagttcatgacgaaccgtctcctctcacgcaagcaattcgtgctcgaggtgatccaccccggccgcgccaacgtgtccaagtcggatctcaaggagcgtctggccaagatttatgaggtgaaggactcgaactgcatctttgtgttcaagttccgcacccactttggaggcggcaagtccaccggcttcggcctcatctacgataacctcgaggctgccaagaagttcgagcccaagtacaggctgatcagaaacgggctagccaccaaggtagagaagtcacgcaagcagatcaaggagaggaagaacaggacgaagaagatccgtggagtcaagaagacaaaggccggggatgccaagaagaaataaggaaatattattctcgaatgttggctgccttcagttctatctgttcacaatcagtgtctgtaccctttaggaaatcttgttgtggcaatgtcgcagtatgcttaatctagtagaaagagaattttgagctttcacatcgaatttcgtacctggtatgctgggtagtattactcacttgattttttctgct

SEQ ID NO: 177255 - DNA, 512 bp, Zea mays
  Clone ID: MRT4577_93245C.1
aattcggcacgaggctggcccgaggcactcgaggccaacaggggggaagaggaggacctggtggactggcatgccgtcggtaccctcctccctagacgaccggactgagctttcatccgtgcctcactaatggtacacgtgggcatcgtccacggtacggttgagtcctacaatcaagggggacctcgtaccttacgcgaggccggcgacccttttaccttccgtgtaggctcctctggggacgcagcgcgatcgctctgacggattccaatgcaccacgaggctatctgacccactcatgcagaggcggggagccagacagagtcgccggatgccatcgcaagcccgtggaaccttatctacaatgactgtctgcaaaggcttgaactgctggacggcatctatggatgacagcacggtacgagatacctgggctagagccatgctgcctatgcatatgcgcagacatgagacactgcacctggcagaggacagatgtgcccaacagacat

SEQ ID NO: 177256 - DNA, 422 bp, Zea mays
  Clone ID: MRT4577_93246C.1
gggcggacccaggcgtccgagaccaattggcaccatagaaggcacaatagtgttttaccatgggcggccaaaatatttgggttcgttaggctcttgggctttttggaaggggctgttaccgaaaccattttccaacaaggttaacaggttcttatggtttctttttttccccaatacttttaaccaggggggttttaagtttgggaaaacccaatttttaaaccttccaggatccaacaggcaatggcagaaggcatttaactttaataaccttggttcttccaacaacggtaagccttattacagaagttactttgggggcattggtgggaccaaaccataagggcccaccacttccaacaacttgggctaggaaacctggttgcttactttaagaaccagaggttttttccattaaacca

SEQ ID NO: 177257 - DNA, 496 bp, Zea mays
  Clone ID: MRT4577_93247C.1
gggggggggggggtgtttttttttttttttttttttttttttttttttttttttttttttttttttttttttttttttatgggttccctcaaaacagcccggggtgggaattaaaccggtcaatgaccccccatccaaaatttttcccgggggcggcggggcggtttttattcaacattgtaccaacgggttcccctcccaccttttttataacccccaacctttaagggccaaagatccgagagagaaaaagggccctgaatgacccattttattggttccctgatccccaacccactgaaccgcaaatcaggcctgtaaaccaaatgccgatcattggcgatgaccccctggcttgcatgtcccacatccccttcatataactggcccactagggaggaaagcatccctgaacactgggaccattccacctttgatgaaatacccctctggcccccttgcagcttcttgaacattggcagcccccacccctccc

SEQ ID NO: 177258 - DNA, 1682 bp, Zea mays
  Clone ID: MRT4577_93248C.1
atcggcccacccagccgcggccggcggcccacgccacgactcggcctcgtacggtcggggccacgaccccgacccgagctgctctggcgccgtcttcctgttcccccgttacctttcctcccccggcgaccgaagccgccgcccagccacgccatggactctctcctcgccagctacgcctcttccgacgacgacgctgatgaggccccacctgctcctcctcctgctcattcccccgccgtcgccacttcctccggtggcggcgcaggcgggtttttctcctcgctcccgcaacccaagtccgcccccgcaccgctcttctcctccctcccggcgcccaaatccacccccacgccgctcttctcctctctctcggcgcccaaatcctcccccgcccctaaccccaccttctcctctatcccgccgcccaagtcttccggaggaaaccctaagcgcgtcgtccagtatcgcccgcagccgatccggcagcccacaggcgacagctccgacgacgacgaggacgatcccaagaagcgccgcgcgagcaacagcgaggcgcgcttgccgcccgtgtctgctggctcgggtcccgtgtcctcgttcctcccgcctccgaagcactcgctcgggctcggcgccggctctggcgcgggagcgaggaggtcggcaatcgatacggctgcgccggagaagccaaatctcggcaccgctctgccttcaagctcggttgccaacacaggagccccggaaaggcctgacaccggcgcaaccgacgaggacgattcggaggatagtggcagtgagggtgacatgcctgcgccggagctggaggatgagcatgaaaaccagcaggcttttaatgccgcaaccggggagcagcagcaaagctatgatgctggagccgggagcactagtggatatgaaacatatgcgtgggatccaaaccactatgcacaatatgatgcttatggttgggatcctagtgccagtgcgaattatgaggatggaacacagtatgccgcatatgaaagagggcaaagtgcagggtatgttcatgcgcatggaggggagcatgccagtggatatgaccatgttgcggcagtgccatatggagtagattatactgctggaatggatggtcatggagtagcagcgacattgaaaccggtgcatgaaccgattttagaagtaaatcaagcagagctgatgaagaacagcccaaagcaggataagtctaagctcacggggttggccttcggtcctagttatcagcctgccccttcagcaaaaggaaagccatccaagttgcataaaaggaaacatcagattggttctctgtactttgacatgaagtcaaaggagatggagcttgcggagaggcgttctaagggcattcttacgaaagcagaaactcaagcaaaatatggctggtgaggagggatgtaaaagaactcaggatacatgtgtgggagctgtagaattgagatgcgtgaatttttgttgcacattttgttgtaagagttacggactttgtaagttcaatcctgaacaaatagttcaataatgagtcaatatttttaaacttgtgttacccattaagaatcacgctcacattcaattgatgtgatctctgcaagtgtatgtgagtagagaggtctaaaatcaagcacaacactttgaat

SEQ ID NO: 177259 - DNA, 361 bp, Zea mays
  Clone ID: MRT4577_93249C.1
tccctcaaacatacttggtttccttgccatccatattcgatcagttatgtgcctacttcgagtactcattggaccacctttttgaattgtaacgacaggtacaaatgttcagccactagtacctgctttctgggttaagtgaaaaatgaacaacactcattgaatatgtgtataggtgatgataaggtgccttgcacggttgaaatacagtttacctttaatagatacaaagcatctaatttcattttgtgttataaacctttcaatccaactaaaatgtcaccaaacaacaagcattaaagaaaacccacaaagcctttcagtctagcacgttggggtctgagagcaaaaaaaaaaaata

SEQ ID NO: 177260 - DNA, 301 bp, Zea mays
  unsure (1)..(301): unsure at all n locations
  Clone ID: MRT4577_9324C.1
ttaacttactcgccnccgggaacctccgaatcacgatacgccgccaccaactcctgcttctcacctcctaagctgcttcgcgcgacatacctccgcgaggagcaccacgagcggcggcggcggcatggagcgccacggcggtgcccatgtcgccgacggaatgtctgaatcactgatgctaaaggagctcctctcctacttctacgtcgagctgtggatcttcctctacttctccgtcatcgtctacaaaacgtaaatcctccaccccatgatgtacaactgcctacttccctacctcgtt

SEQ ID NO: 177261 - DNA, 832 bp, Zea mays
  Clone ID: MRT4577_93250C.1
ccggggagcagcagcaaagctatgatgctgagccgggagcactagtggatatgaaacatatgcgtgggatccaaaccactatgcacaatatgatgcttatgtgtgggatcctagtgcgcagtgcgaattatgaggatggaacacagtatgccgcatatgaaagagggcaaagtgcagggtatgttcatgcgcatggaggggagcatgccagtggatatgaccatgtcgcggcagtgccatatggagtagattatactgctggaggttatggtcatgaggtagcagcgacattgccaccggtgcatgaaccgatactgccaccagagatgggtaggagtggagggaagagaggtagaaatgatacgccggtccagattttagaagtaaatcaagcagagctgatgaagaacagaccaaagcaggataagtctaagctcacggggttggccttcggtcctagttatcagcctgccccttcagcaaaaggaaagccatccaagttgcataaaaggaaacatcagattggttctctgtactttgacatgaagtcaaaggagatggagcttgcggagaggcgttctaagggcattcttacgaaagcagaaactcaagcaaaatatggctggtgaggagggatgtaaaagaactcaagatacctgtgtgggaggctgggagctgtagaattgagatgcgtgaatttttgttgcacattttgttgtaagagttacggactttgtaagttcaatcctgaacaaatagagaacaaatagttcaataacgagtcaatatttttaaacttgtgttacccaaaaaaaaaaaaaaaaaagcggcc

SEQ ID NO: 177262 - DNA, 1048 bp, Zea mays
  unsure (1)..(1048): unsure at all n locations
  Clone ID: MRT4577_93251C.1
gcagtgtggaaaccgtgtgattcagcgtggtataacatgcaaactacaggtgttctttacacgtgagggtaaaggctggggagtacgcacagtggaagatctcccaagaggtgcctttgtctgtgaatatgttggagagatactaacaagtgctgaattgcacgaaagagcaattgagaatgcaagaaatggtaagcatatgcatcaagtgctcctggacgctggttggggttcaggtgtagtattgagggatgaggacgcttgtagccttgatggttcattttatgggaacgtcgggcggtttatcaaccaccggtatgtaggatacttgctcgtttttttttgctgtaaatatcttgccatagtttgtgtattacagtcttttgtctgctactccgctatgtttttggtaacgaacatatgctatgactagatgctacaatgcaaatttagttcagatccctgtagaagttgagacgcccgatcatcattatcaccatctggcatttttcacgaacaagaaagtggaggcatttgaagagttaacttgggattatggcatcgattttgatgacatggaagggcccagtaaaccgttcagatgcatgtgtgggtgtagatactgccgcgatccgaacaatccaaggaggatgggtagagcagctgctaagcgaaagtaggcagggagcgcggacttggttggagttgagcacaccaacttttgctgtgggggggtctggtttcgtgtttgatgtggagtaatgcagtaccatcacctcagctagtattaagtgtagataggtgtggatgattttggtgaatggtgttatggacggaaatgctgcaggctgagcgacctagtaacctatgccatgtagtggcatctaaattagcctgggattgtgtatgcgtaaaaagaacgcctaagacttaaccatgttattatgtcagcttggtacatggtgataaaaagaatctgaccatttcatgtcatgncttttgtcaaaaaacatgaagtactctgcgcttgttccactgcttatgggcg

SEQ ID NO: 177263 - DNA, 329 bp, Zea mays
  Clone ID: MRT4577_93252C.1
taattaaaacctgatacagttagcatttacatgaaacaccttaacaaaacattaatttaacatacaaatagtttagttatttcaataataacactttagcgttaacaatgttgtgcaacttcagagtccagaggtaattaacttttttataaacaacacctgcatgggtattttaacatgctcctgcacatttatggtaaacaatgacttccacgcatggaggtggccaagctctgtataaaggggataattagctctagattttacactattaaaattaatgattgaatccgattagtatccagccctattcctatatcattttaaag

SEQ ID NO: 177264 - DNA, 582 bp, Zea mays
  Clone ID: MRT4577_93253C.1
cattgggtacctcgaggccggccgggactaccttcgccattatcaagctctgcgaccaaaccctactcgtacgccgacgtcgatgctgcctggagcgcagacacacgatcaagcaaaactaacagccctgacgtccaaattgggcccctctcgggggagaactcttcccaagggtgacgaggaagtctgctccgacgaccgtcgtcgttaagccgctacaccggcccgtgctgtctctcctcgatctgcatcgagatacgacatcaccaaagagaacccccagatgctgatagggactccgcgctaccagcgacttcaccgtgtagaaccgtcaagaccttggtgtccgatctgcccctccgacgccacgctcgtcatgaagctcgctcaaggaacccgagagctacatgaacatactgtagaacgtcaagtacctctgcaacatcaacctcgactacgtcatcatcatgtccaagaacatgcagatcgtgtgcatgatcaaggagttagtcgcgtacgtctatgtcatcctggggacctgagtcatcgtcgggatcaccgacgatgattagtacccttatg

SEQ ID NO: 177265 - DNA, 637 bp, Zea mays
  Clone ID: MRT4577_93254C.1
tgcagcctgataaaacgtggtgaggggcggcgattctggtcatggattgtgacagagccctccatgctgggtgacgtcagtgaagaacaaaagctggttctacaagctcctcgtggccccctgatcatccccagattactgtctggtcgtggaatatggactgcacaatagcaaattaccaggcaccatgtgtcatgggatcagctgtgtactccctctgacctatgtgtatttgcttgcacattacatcacgaagacgtttgtggtgcttgatgttgctttgtatatgatgatccgcagaagcccgcatccccttttcttctgtataaggttgtgctaatgaggtcacaatgtggttctgtggactctataaggctatcactgctcacaacccaaatgctgaagtcatgtggtgtcctcgcagcatgagataggatgctagcacagacaacattgcccatcactaatgaagttcctgcttcgtatactattcaggcgaatatgacatgcttggattctatcagtatcggattatacctcaccgagaagaccatgcagccatggctagatgccagtaatagaagtatgagatctgctgaaattgaacgtgtcacttccaacgctgacgatgctaaac

SEQ ID NO: 177266 - DNA, 457 bp, Zea mays
  unsure (1)..(457): unsure at all n locations
  Clone ID: MRT4577_93255C.1
acgggaccanacaanacaagaagaagcaaccccaaaggactattcgatgaaaaagcagaganaaggcaaccggggaggagacnaagcataaggggaacaaccacacaaaaccaccggaaaacaaaaacaaaggcaaaacgaaaaagccacaaaaaaaaagggacccccgaaaggccgacaccacaagacggccacaacaccaccgagacaacaaacagacaaccgcaaaaaaacaagggaccacaacggagcaaagcagnacaagaagaagcaagaaaggccgcaacaagaggcaaagaaaccagaaacagccgaaacaancaccgacaaagccgacccgacaacacccaggaggacccgaaagaccgaaaaaacaaaaaaacaaggcccaacaaaaaggaccaaggcagcacaaacagaaagcaaagccccagcaaaaacagcgccaaaaacaaca

SEQ ID NO: 177267 - DNA, 498 bp, Zea mays
  Clone ID: MRT4577_93256C.1
atcttccagttttaaccctagccgccaaggccaagctccctcccaaatcccaatctgctcgtctgcggtgcagggctgcaggcatccacctccaccaggcgctggcccagttttcgccatccaccaggcgtccttagaatatggtgcagggctaccgagcagcgagcaacaagctgccgagcacagggcgccgaccgtcgagcagcgagcaccgaggaccgccgagtagtcgagcaccgagcagctagcaccgagcagccgagcagcaagcagagggctgcgaccaccgagcagccgagccgcctcgtcttctctcgtcttctctagtaaattaaacaggcttggatgaattagttttttgatttagagttttggagagattatttgtacggatttgaaaagattacttgtatggaacgttgaaattattgtttggtgctaaaaaatattattggaatgttgttgggaaaaaaaaaaaaaaaaaaggcccctagggcc

SEQ ID NO: 177268 - DNA, 226 bp, Zea mays
  Clone ID: MRT4577_93257C.1
ctcctgtttctttttttttttgggggctcccatggcccaccttataattgagaggcttaagtttccataccttgaattgaaatagttaaaaacttaaaattaacccctttttcccatcccttcatttgttccttttggacacattattaccttataccttctttttttttgtgggggtgggggcttaaacacatgggaaaaatcttttataagagatacctaaatt

SEQ ID NO: 177269 - DNA, 262 bp, Zea mays
  Clone ID: MRT4577_93258C.1
gagaaacctccttggcgtatgcatgggctgactgtgtgggttggcggtcgcgggactggctggtggcgagtgaattgattccgatgtcaggacctcgccatagatccgccgtgcgtcgtgggcagccgcgattttcgcctcaaatgctgtgaggtgtcgtgtcacctgaggatcatcctggtacctggaatctcaagtcccaggagatgaacaggtggttcatgtggagccacacatcgtggagttcgacttgatctaggtg

SEQ ID NO: 177270 - DNA, 2674 bp, Zea mays
  Clone ID: MRT4577_93259C.1
tgtaagaagaaagagaagcagatctattctatactcgataagtgccaatatgcaatgggtagcttgggctatttggaaaaacgaagaatagatccttcatccctctttgtttatcattcaaatcacggattcttttttctttattcaatctgttttaccttccttatatgtagaatatttcaatctatgtattaatagaatctatagtattcttatagaataagaaaaaaaaaatgaagataataaactgcggattctttctttctcttccattcttacgtttccatattaaagtgtagttttttttacttaaatttaataatattaatctaatatgcccattggtgttccaaaagtaccttaccggattcccggagatgaagaagcgacttgggttgacttatacaatgttatgtatcgagaaaggacactttttttaggtcaagagattcgttgcgagatcacaaatcatattacaggtctgatggtatatctcagtatagaagatggaaatagcgatatttttttgtttataaactcccctggcgggtggctaatctcaggaatggcgatttttgatacgatgcaaacggtgacacctgatatatatacaatatgcctcggaatagccgcgtccatggcctccttcattctgcttggaggagaacccaccaagcgtatagcattccctcacgctaggattatgcttcaccaacctgctagtgcttattatcgggcaaggacaccagaatttttactagaagtggaagagttacacaaagttcgcgaaatgatcacaagggtttatgcactaagaacaggcaagcctttttgggttgtatccgaagacatggaaagggatgtttttatgtcagcagacgaagccaaagcttatggacttgtcgatattgtaggggatgaaatgattgacgagcactgcgatactgatccagtgtggtttccagaaatgtttaaggattggtagtgggtggatttcttgtaaatttatctcaaacctaaattcgggttttatgctatagaaaatagaaatacttcatgatgatgaatcatcaggttaagatcgatctaaaccaatccattttatatatacatacgacatgccaacggttaaacaacttattagaaatgcaagacagccaatacgcaaatgctagaaaatcggccgcgcttaagggatgtcctcagcgtcgaggaacatgtgctagggtgtatactatcaaccccaaaaaacccaactctgccttacgtaaagttgccagagtacgattaacctctggatttgaaatcactgcttatatacctggtattggccataatttacaagaacattctgtagtattagtaagaggaggaagggttaaggatttacccggtgtgagatatcgcattattcgaggaaccctagatgctgtcgcagtaaagaatcgtcaacaagggcgttctagtgcgttgtagattcttatccaagacttgtatcatttgatgatgccatgtgaatcgctagaaacatgtgaagtgtatggctaacccaataacgaaagtttcgtaaggggactggagcaggctaccatgagacaaaagatcttctttctaaagagattcgattcggaactcttatatgtccaaggttaatatggaaattctttcagaggttttcccttactttgtccgtgtcaacaaacaattcgaaatacctcgactttttcagaacaggtccgagtcaaatagcaatgattcgaagcacttctttttccattacactatttcggaaacctaaggacttgatcgtatggatatggaaaatacaggatttccggtcctagcgggaaaaggagggaaacggatactcaatttaaagtgagtaaacagaattccatactcgatctcatagatccctatagaactctgtggaaagccgtattcgatgaaagtcgtatgtacggcttggagggagatctttcctatctttcgagatccaccctacaatatggggccaaaaagccaaaaaaaataagtgattcgtttttagcccttataaaaagaaaacggattcttgaacctctttcacgctcatgtcacgtcgaggtactgcagaaaaaagaaccgcaaaatccgatccaatttttcgtaatcgattagttaacatggtggttaaccgtattatgaaagacggaaaaaaatcattggcttatcaaattctctatcgagccgtgaaaaagattcaacaaaagacagaaacaaatccactattggttttacgtcaagcaatacgtagagtaactcccaatataggagtaaaaacaagacgtaataaaaaaggatcgacgcggaaagttccgattgaaataggatctaaacaaggaagagcacttgccattcgttggttattagaagcatcccaaaagcgtccgggtcgaaatatggctttcaaattaagttccgaattagtagatgctgccaaagggagtgggggtgccatacgcaaaaaggaagcgactcatagaatggcagaggcaaatagagctcttgcacatttttcgttaatccatgaacatcaatagaaggagaatcggacgatatctttttcgaaacaaataaaaaggatcaatagaaggagaatcggacgatatctttttcgaaacaaataaaaagg

SEQ ID NO: 177271 - DNA, 864 bp, Zea mays
  unsure (1)..(864): unsure at all n locations
  Clone ID: MRT4577_9325C.1
cctgtgaggcctttggatgaacaatcttcagatcacaaacctggatttacttccaacataacgaaaacaagtaatgttgaatcagtgttgccaaatagcccccaaaacagacctttggtcatattgggtctacagttatcaaagctttctgtgaaaaagactggctacttcagtgacaagacagaggttcagaaatcttcgactgttcttggatatgctgctcatgcagtctccctcattgcatcctatctcaatgttcctcttcggtatcctttgcgctttggaggttcacggtcatatgttctcgaccctgcgccttcagttgagccatcatctataacctcagtaggaacgtctgtccctcccagcacaagcatgaggacaacggagttccctctgtttcttgacagccaggagacaacaaggtcatcatatgcgatattcttgttgaacaaggatatcgagcaacttctgaattacattggcgctgaaagcctcgggccaagacatgtcctagcaaacctgaagcagctgacaacgatcatccagtcacaaggatacatttctgatggttagtttaacccagatacagttttggtgctgtgagtttagtccagaagacacaggcacccttttttttaacccccctttgagtcttgagtcttgacacacaagagttggtcgctgtctctgtgctgacacgctcattgtaaatgagcaaaatggagtcactaccaggttgtacaggaaagatgtggatcatactactgtactgtgctatatacgcagcaaccggaggcgcttgttcatgggaaaaaaaaaaaaaaaaaanaaannnccccccnaaaaaaaaaaaaaaaanaa

SEQ ID NO: 177272 - DNA, 265 bp, Zea mays
  Clone ID: MRT4577_93260C.1
ctcttttttttttctttttattttttttttttttttttcttttttaaaattgccagaagacacgcggtttcctccgagcattaacagtttctctgtctgtccatatacgcaacttatcccagtctcacgggattctcatactcctctcagtctcccaacaaaaggaacgatcagcaacagaaccgcctctttgctacatcactctaagagcatttgtcaaaagtgtcggcaggaggggggggaaaaggccctaactcttggccct

SEQ ID NO: 177273 - DNA, 242 bp, Zea mays
  Clone ID: MRT4577_93261C.1
cccacgcgtacggccaagcgtactcccatgcgtgcggaccacgaaaggaggggccaagtgcacctgagaagatgtcggcccaatacgcgggtttcccgccggctacacggtgcgtgccgccgtgcaaacgtaacctaccacactagacgcaagcgtggtaggttatgtctaggaataacatgttctcttttcttgttctttccttgggtgggggctcggatgggccgcgccgtggtgctggt

SEQ ID NO: 177274 - DNA, 439 bp, Zea mays
  Clone ID: MRT4577_93263C.1
atcaggctctcttattacagtctaaatagttttcatactggactgcatgtgctaatgggctgatccatttttcgtacagaaacatatctctacttcccggcaaagatcaaacaaacgacatagaaaggtacaacaccaaattataccaattgatcgaccaatttaacatgcagacggccctatattcttgcctaattctagacgacttcatctaattcactaccaaccaggactacatcagtaacaacctcttgttatccgtatactcttcttccgtcaacaccgatgtcaatatcaatgacgtcatcaagctcaagctacacgacagaagatccagactaatccgctacgttaagcttgactttgcttgcgccgaaagcagcagcaccaacaatgacgaccgctacaacaacaacaacctacacaacaacgacaacaa

SEQ ID NO: 177275 - DNA, 383 bp, Zea mays
  Clone ID: MRT4577_93264C.1
cgtgcaaggatctgctgacagaaagcagttggcgatggagcaactgctgtaagagagaagtgatcaggatccatatggccggccttggattgtccagccgtcttccatgtcgccccgcacaccatctttagattgttttgccagtgctggtgcgcagggagccgtaactgcaggtcatttcggaagatgccattctttggacattgaaaagaagcatgttaatttgatagatgagtagtcacaaaagctaatatccagtgggtagtttgatggaaaggaactagacaggtaaccctatttttccaaccagtggtgcgctttcgtttccatataaccgttgtgcgttaatatgttatcaaataatttatataccgtcgcaacgc

SEQ ID NO: 177276 - DNA, 328 bp, Zea mays
  Clone ID: MRT4577_93265C.1
actccggaatgggcatcactgtataacgtggaaactttttaagggcggaacaaacagcatcaggcacctttttttcctgctccaggggcttgcagatcaatatcaatccctgcctgccttgccaccaccaccaccaaccagtagcaggggcatcagacatggactgtcttcggttcaaaaaaaacgcagagatgccattgacacatcaaaaatgccggggacatgtggtttctttctaccggaaagaattccaacaccacccacaaaaaaatcaggcgttattcgcccgtgacagaacctttagggacagggggcccccactttagtt

SEQ ID NO: 177277 - DNA, 1266 bp, Zea mays
  Clone ID: MRT4577_93266C.1
gccggccggtccgggaaaacgttatgtttattcgattcgtgtcccgtccgtttgacgaccgagccctccccccccccccttttccagtttccttctcccttcctgccgctacggcggtggcggcaacgactcgcgcgggccggtcctaggttctcccggatcggttcggcgggcggtcccgcgggatgggcacgccggagttccccaacctgggaaagcactgcagcgtcggcgactgcaaccagatcgacttcctccccttcacctgcgaccgctgcgaccatgtcttttgccttgatcaccgaagttatacatcacaccaatgcccaaatgcaaacatgaaagacgtcactgtcctcatctgcccactctgtgctaaaggtgttcgcctcaatccaagtgaagacccaaatatcacctgggatactcatgttaacactgattgtgatccatcaaattaccaaaaagtgatgaagaaaaagaaatgccctgttcctgggtgcagagagacactgacattttccaacaccatcagatgcaaagattgcaccagagaacactgcctaaagcacagatttgggcctgatcataagtgcccaggaccaagaaaagtggattctggctttccctttgtaagcatgctaaggagaagtcagaaagcggagacacgctcaaatagcagtaacaacaatggttcttcgtggtggagctccagtcttgtgaatgcagcaacgaatttcaaatcatcagccgaagctggaatgcagaagctgagcaccgtgactagccaagccttccagaaggctaaggatgggatcgccccaaatagcagcagcagcagtggtgaccttgtggagcaatgtgttcactgcccagcaagattttccaccgtgggggccttaattgaacatgttgagaaatcccaccatcaactcacaaccaagtcatggccgagtgacgattaatgtttgcccaaaatgcagcaaggcgttccgggatcctgtgttgcttgtggagcatgttagaaggagcatggaggaacgtcaagagtgtagtgtaaagcttcgtgtgtgctcttaacctttgtaatgtgtaacttttcgttaccttttctcatttcatcaatttgattatactctacacttttgggctcaacatttgcccacaggacaagtatattacgctggattgaaggcaaagcagccattgtccatcattatagaaactgaagtaagatttgttaagaaaatgttaatatctgtcgcc

SEQ ID NO: 177278 - DNA, 166 bp, Zea mays
  Clone ID: MRT4577_93267C.1
tattgccctccctgttcttgttgttgctttcattgataaaagacatataagaggcagataatatagaaagtgggtgcttattatattgtcgatctgtgttctcaattaccatttatcacttctaggattgcttcttcaactttactgtccacactctctccctcat

SEQ ID NO: 177279 - DNA, 839 bp, Zea mays
  unsure (1)..(839): unsure at all n locations
  Clone ID: MRT4577_93268C.1
ggggccccccggggctcaacgagccccggcccgaagaaaaggaaaaagtgccccaagtggttcttcccggttttcccgggaaagaaacccttacccggcggtgttccctaagtttgggcccggtttgaaaagatttccccccaaaagggggccccccccaatcccatttttttttcccagggatccagccccagggcaaacggggccccggggcggcggttttccgggggcggaaaaaaggacaaggggggggcggggctaagggttttgagtttttggaaaaaaaccaaatgggtttttttttttttttttttttttttttttttttttttttttttttttttttttttttttttttttttttttttcctttttttttttttttttttttttttttttttttttggcaagcacaagcaatggaattccttatatatataatatgcatcttgatgaccatatagcagtaatggatgtaacagcagtggcagcatcaccagcaacagcacctcttctggcgcctagaggaggaaggagacagaccagaggtgctctggctctaatcgtggctgctgtctgtcgctgcctactcgtactccgcgctgtggaggtccgtcatggagaaggacctcggggaccgaaacgacccggccctcgccatctggccggcggtggcgtgcgcgctcagccgcggggacgggaacgtgggcggcctcctgcccctgagcccgccgcgcccgtgctggccctcgtcctcgtcctcgtcgnccgcgccctcctcgtcgtcctcctccaccaccgcgtggcccgggaatncggaccgtaccgcaggcgtacca

SEQ ID NO: 177280 - DNA, 449 bp, Zea mays
  unsure (1)..(449): unsure at all n locations
  Clone ID: MRT4577_93269C.1
agatcgaacgattccgccccacctaccgcaaacccccaaagccacagcgaactcgagctccccccaatggcagctccgcccatctccggccacccccattcctccgtcgactcgccgctccccaccgacgccctcctcgcgcacccccaactcccctccgnccccgcgccccaggcccccnccgcctcccgcttccccttccncctcnccgccgcccncgccgccgccgcccccgaccggctcctcctccgcccggccttctccgccgtgctcgttgttttttttttttttccttcgcncggcttctagtcgtgctgccgtgttcgttgtgtctcctgttatcctccgttggtttgcgcttggtctctgctgctggttccctgcctgtgccgtggtcgtcttttcgtttgtgtttctgctttgcgcctgtcttctccccggttgttctg

SEQ ID NO: 177281 - DNA, 126 bp, Zea mays
  Clone ID: MRT4577_9326C.1
gttaatccttttttgcgaattttatcgaggagaacagcacttttctgctctgaagggctccttaccctctaacggggcccaacagtgtcacatgcattatccactacccagcaacaacaataatac

SEQ ID NO: 177282 - DNA, 125 bp, Zea mays
  unsure (1)..(125): unsure at all n locations
  Clone ID: MRT4577_93270C.1
cggggcaacacattctnattggattgnagggatgacctaagcatcagaaggaaggcaaatcatgctttatacagcaacaaaggaaacggcctggttgcagaacaaaaatttcaggggggggctat

SEQ ID NO: 177283 - DNA, 850 bp, Zea mays
  Clone ID: MRT4577_93271C.1
ctcgaggccggccgggacggtcattcgctctctcaaccatacttccacccaacatcgcccttcgtttctaaaccaaccttacaaacaagacattcaaaatggtctctttcaccactgtcatcaccgccgctgttgcggccaccggtgctctggccgccccggttgctgacgccagcaccgactttgctgagcgctccctcagtgtattgactgcacgtgccggtacccccagctcccagggcacccacaacggctgcttctactcctggtggaccgacggtggcgcccaggctacctacaccaacgaggccggcggcaagtacagcgtcaactggaagaccggtggtaacatggttggtggaaagggctggaaccctggtgcggcccgcaccatcacctactccggtacctacagcccccagggtaactcctaccttgccatctacggctggacccgcaacccccttgtcgagtactacgttgttgagaactttggtacctacgacccgtcctctgcggccagcgtcaagggctccgtcaccgcagacggctcgtcctacaagattgcgcagactcagcgtgtcaaccagccctccatcgacggcaccaagaccttcaaccagtactggtccgtccgccagaacaagcgcagctccggctccgtcaacatgaagacccacttcgacgcctgggcctccaagggcatgcagctcggtcagcacaactaccagatcgtcgccaccgagggttacttctcctccggcagctcgtcgatcaccgttactgcgctaataagcgcttgataggtatcttggagcaacggtcacggctgcagtcctgacctgagttt

SEQ ID NO: 177284 - DNA, 527 bp, Zea mays
  Clone ID: MRT4577_93272C.1
tcgaggcctggccgggaaaaaaaaaaaaaaaaaaaaaaaaaaaaaaaaaaaaaaaaaaaaaaaaaaaaaaaaaaaaaaaaaaaaaaaaaaaaaaaaaaaaaaaaaaaaaaaaaaaaaaaaaaaaaaaaaaacccttcctggccccgggaaccttggaaaatcaaaagctttgggcccaaaatggggggggttttgaccagggcccggactggtttgccaaaaaaattgggaggaagggttgaaatttaaaaggcaaccggcttgggaccccgggttttttatggaaacttaagaaaaaaaccccttttaaaccctgtagggggtttttacccgcaaaaatatttttttggttggaaaaatgaaaggaggtaccggtaaaacgttattttacccttattatctggggggagggaaaaaaaaaaaaaaaaaaggggcccctggaccccaatttttggtccctttaagggggggtaaatggccccctgggggaaacaagggcaaaagtggttcccggggaaaaatggttt

SEQ ID NO: 177285 - DNA, 142 bp, Zea mays
  Clone ID: MRT4577_93273C.1
tgcggaattacagtggtgcaaggaacatatgttgagctttttccgggaatatgggttggaacaaagtggagttgggagtgggcatgcttaccgggctttgaggggaaacctgcagcaagcttgggggggggggggtgggtga

SEQ ID NO: 177286 - DNA, 418 bp, Zea mays
  Clone ID: MRT4577_93274C.1
cgggaaagctaggccgagcggacggacagggggaaaagcgggagccggggggcggggggaaaggggagggcctaggggcggggggacggggggaaccacaggaacggggagaggggggggaccaggaaaacggggaaggggggccaggcggacaaggggcacacgccaacgagccacaaaacggacaagaacacgcgccccaccccccgccggaagggcggcggggaaggcgagacggccagaaagggggcgaacgcgaagagggacgggcgcgtgggcccgcaccacagaaaccgcggaccgacagggacgacaaacccaggggaccggcaccgcggaccaaggggcccctgtcgccccgtgggcacgtgcgaacgcgacctccgcccggacggagacatcgcgaccgtcagccggg

SEQ ID NO: 177287 - DNA, 535 bp, Zea mays
  Clone ID: MRT4577_93275C.1
aataaaaaacctgacaaagcaggtgtttattgatatttatacaccctggaacctcaaaattgtcacttccacttattcatttgagccgtgtaacaacacaaaaaactggagtggtgtccattaaaatgaagccacaggagccagtaacattttactattcaagtacaaggtcaagttgcttcacaaaccacaaatcagatcatgcaagaggacccgagtgggggctagatcaataaaagacagacctaaccacaggccgatcacaacagaacggggggcacaacaggggagccctgttaatggtgaacaaaacggcttccaccacgccctcctcggaaacgaaaaaggcaaaaaaaagcgctcacttctccctaggtagctgggtaccaatgaccttatgatcagacaccatgttgatcaaggacaggacttgacctccttttacttgcgactatttacgccataagcactgtaaacctatacaatgttgatgtccaacacggacaccatcttggcaatgcctctggtgatatgc

SEQ ID NO: 177288 - DNA, 368 bp, Zea mays
  unsure (1)..(368): unsure at all n locations
  Clone ID: MRT4577_93276C.1
caaacaatgcctagaagatttattatccaatcaaaaaaccgtgcttgcttgtctttctttatgttatttcccgccccgaattcagttcggggggggggggnggggtggnnnnnnnnnnnnngngnnctgactggactgnccnnnctgctttggtttccgtgctccgtggtgcttccctgtctcggcccctggttgggggcccggggcgtttctcctgtggccttcgtgggcgttttgcctgctctggcttctgcggtggccgcttcttttgggcccgttgggtgggcgctgttccgggggtcctcgctgctttccctcttttgtgtgggtccttgtgccctttcccttcccggggcgggccctcttgg

SEQ ID NO: 177289 - DNA, 179 bp, Zea mays
  Clone ID: MRT4577_93277C.1
cttctatgatctttttggattatatttttttcgatcatcgaaataacttttacacacattctgctgtacatgaaaggtagcgtgacacaaatggagtcgttcctggcgaagttcttcccggaagtgtcgagcgggacaaaggacgtgaagcacgacgcgtactgcaaatacgacgacca

SEQ ID NO: 177290 - DNA, 425 bp, Zea mays
  Clone ID: MRT4577_93278C.1
ggaaaaaattttttaattgctaaaacgggttaaaaatttttttgctccaacggggctaattgttctccgggggggggggtaggataatctggcaaaaggggtgttttaaacctcggttaacgggaatggggtccaccatggggaaagaattcccttttttttttttcactggacggggggggcgaacttttaacacaacggggggcgacattttaggggttaaaaaacttggggaacggcccatccttggaatttttgggggcctttgtaaatgcaaggaaccttttgaaacccgggggggtttttccccccccaagggggggagtttgggcgaggacctccttttggttccccagggctcccttaaagggggccattcttggtgtaatcaaaaagctggagttgccaccgggggcacaatttgg

SEQ ID NO: 177291 - DNA, 1023 bp, Zea mays
  Clone ID: MRT4577_93279C.1
gctggctgcacgcccggacggtgctgcacctcgccgtgttcgtgctgtcaacgcgtccgaggtaccctccgagggtagctagcttggagaaggatgtcattgcgccctacaagcacatggctaagacgtacgccaatgactcggccgggttcgatgaccggccgaccctgttatacttccggggagcaatttacaggaaggagggagggagcattcgacaggagctatattatatgctcaaagaagaaaaggatgtttacttttcctttggaagtgtccaggaccatggggccagcaaagctagccaaggaatgcactcatcaaaattttgcctaaatattgctggggacaccccttcttccaatcgtctgtttgatgcgatagttacccactgtgtccctgttatcatcagtgacgacattgagctaccttatgaggatgtgttggattattcaaaattctccatctttgtccgttcgtctgatgctgttaaaaaaggttacctgatgagactgctcagtggtgtaagcaagcaacaatggacaaagatgtgggataggctcaaagaggtggataaacattttgagtatcagtatccatcacagaaggatgatgcagtccagatgatctggcaagcattgtctagaaaggtgccatcaattaagctgaaggttcacagatctagtagattttcaagatctaacagaggaaaataaacagaaaggggtgtgtctatcttgtctctgttggctaatctaatgtaacacatttcactgacacaggctctcagcctttcccagttgcacaaaatagatagattgtaatactcaggttatctttaggaaaggtttgtaccttaagatttgttggttcagttgaagcatatactgtcaagtcaaaggtttgtgttttgtaaggtatgttaaatgtaatcatgaaagaaagacttggttttgctgtttctggaacattgtgggatggaaccatatttttctgccatgtagcagattttattttgccttt

SEQ ID NO: 177292 - DNA, 1302 bp, Zea mays
  unsure (1)..(1302): unsure at all n locations
  Clone ID: MRT4577_9327C.1
ggccgcttttttttttttttttttctttttttttttttttttttttttttttttttttttttttttttttttttttatatatttttttttttattgttaatgcaccgggcccccccgnctagcataaatgagtacgaattttgaagacaaccaagataaattttagcgtaaattgtcaaaaatttagcataaaatatgaatccgttacgtgtttcttaacgactaatttggcctgatttacagcgtgttctccacctgtttagtatgcataggatagcaacaaaaaataacaaaaaatgcaagcacagtgtaactaactgtaaattcaaaatactatgttgatatgaccattctggaccctggatggctatgtaactaactcttgttttggtaagttgtaagcatggcatggagtagaagccaatctcccaaaatgtagaagctggtccctaggctacgtcttcatcctccactatgcaggtgacaatatcgaggctgccacaatcacacaaccataataatgttcagttggacatagacacacaacgagtgtgtcatgtttcatgcccattaatggtgttccgttaggaatgaaaacaattagtcatcatcttaaaataacttgaaagatcctagacaatattttcaacctccgtcctgtttgaaatcaagttgtagtaatcagcaggctggagctcataaaagttgtcatctttcacatgatctgcactaggcaacttgctggattgtagagcaaagttcttacttgaaaaaaacccgaatctcatgtccaagttcattgacactgctttcagcttgtcctgctcataccaaccaattcctcaaatgactgggccattgctcctcctcgccagcttggtccatttcgtgtgcaatgaacctggacactggactcgacacgtcgttggaatctcggggagcagacttggtggcagggtgttcgtcttctccaacgttgcactgccaccgatttgtcgtcgcctcgttcgagttcgtccggctcggtatacgaggatgtactccgtcgatggcggttgacatagccggcgtccttcccgacaaatctagcgggtgaggagtcgatgggtcacgaatccaggactctgtgtcgtcctctgctgcccgaagaagagctccaaactagagaggtgggagagagcagaagagatggcaacgcgggctgaggcgacaggagatgggggtgaatccgccatggcaggggcgcacctattgcaagggcgaggcgcagggcacagctgctacacgcgcaacaacggaggc

SEQ ID NO: 177293 - DNA, 1375 bp, Zea mays
  Clone ID: MRT4577_93280C.1
ccacgcgtccattcacacccacacacacagaccgagctgccgtccgctgctctctccacccctcctctcctcgcggaacaggcaggcaggcaggctgggattccccgtccgcggggggaggtggcattcgccgctagggcaggacggggaaggctggcgtccggcatggcgaccgaggaggtactccataaggtccagagtcttatattgcgctgccttcagatgtacatggaccagaaagaagtggtcgatgccctctcccaccactcgaagatagagccctgcattactgaacttgtttggcgacaacttgagcatcaaaatcctctgtttttcaaggcgtactatatgagactaatgcttaagaatcaaataatggtcttcaacaagcttcttcaggatcagtttgaggttatcaataaagaattttcttcagggatcccttctatgtcgcttcctaatggctctaactccaacctattgaagcaaaatccatgctttttgccagagactgctcctggatctgcaatgccagatggtataatgcacaatggaagttcgcgtggtataataaatggcacaccatctggcgatcaattgctcaatgctagtaaagacttgcatggccttcataatggaatagatgcttcgactagtctgcagtcagaccagaacgcagctgctgtgctgtatggtgtagacaacgagacaagtgcaacgataaagaccgagtcttgctattcgagcaatgctgattttgctttctgtgggaatactttcctggaatcgtgccagtcaataggcgatgcatctggtggtggatccttcagtagctcagagctgaacgggcaaccactaaacgattcaattctggatatggaatcatcgtcatttagcttcttgaaccaaatgccccaaagcttcatctttccggacttgggagacgatttcaaccaaagtgcagagataacacaatttctcaccccggaaacaaatttctccgattcgacagggggagaccatacaggttgagcggggtcatgcacagcgcaccaaccatttgtacatacgctcatgggcagtcaaacctgcactgatgaagagcttgaggaccttttgatctagctgtttcttttttctactcttctcgtcttatattgtggtagtttatgggttggtcttctggtatgccctgcgatggcgtcgttatcgtgccttgtacattgccgtgcttgtgtaagaaacattaggagcggcgttgttcgcgtcagcattgatttggctaattcctccgcttggcttggcttgtacaacgaattttatcaaaatattaactggattctgaaatcgagattttcgcccaccaaaaaaaaaa

SEQ ID NO: 177294 - DNA, 710 bp, Zea mays
  Clone ID: MRT4577_93281C.1
cttccgggaaatcacaatcccacaacccaagaagccacaagaaagcagcagcagcaccgcacggacctgacctccaactacaagcgacgatccaggctccagagccccacgcaaggccggaaggagacaggcagcagcccggcagagcagctaagccatggcggtggacctcatgtcctgcggcggcggggcgtacgagcaactggcgttccaggaggcagccgcggcggggctccgcagcctggagttgctcgcttcctcgctctccccgtgcggcgcggggcgggcggagtcgccgccgctcgggcagatcgccgaccaggcggtgtcccggttccggcgcgtcatcaacctgctggaccgcacggggcacgcccgcttccgccgcgcgcccgccgtcgccgcggtggagcccatagagacggagacgccagcgtcacagcaggcggcggcggagccgcctcatcaggctcagaacaaagccccgacgctggacttcgccaagtctgtcccgccggcagcgaacaagaaggccccgccggcgccggccgtgtccgcgacttcgacctcgttcctgtcgtccgtgaccgcgggcggcgaagggagcgtgtccaaggggtgcagcttcgccgccgtgtcctcgggcaagccgcctctcccgaaacgcacgttcgcgtgccccgtcgctgctccgccgggggcgcaccacg

SEQ ID NO: 177295 - DNA, 493 bp, Zea mays
  Clone ID: MRT4577_93282C.1
aatctagctgcctactatgaaggaccacactatcttgcatcaaagcatgtatctacactggctcctggtgatcaaccagcaggatcatgtataaccattcagcctgtttgatactgactactctcatcaataacacctactatcatcaaagcaacctgccgctctgaaccccgatcgatctatttaccagtaaaacatgttactaccagtcaactatcttgatgaacaacgcctgtgcattcctatctagacgagcacgaactgaagctggctgcttaccagcagctggcggttaacctacgcatccatcctactagtacaacaatggctggccttcgtccagacagatttgccaaagctgcctttctactaccaacaacgcagcatagccggtgaccctcttacagatagatcattagttgcccttcagtcatctagcttttgggatgctgccagcctcctaccaacaacacatcattggtggtgccctctg

SEQ ID NO: 177296 - DNA, 732 bp, Zea mays
  unsure (1)..(732): unsure at all n locations
  Clone ID: MRT4577_93283C.1
attgggtacctcgaggccggccggggcctctctccttcccgagcaggaggcggacaaggtaagcagcaatcgcaggaaccctagcgccgccgcacccgcaggaatgggtatcgacctcgtcgccggtgggaggaataagaagaccaagcgcactgcgcccaagtctgacgatgtctacctcaagctcctcgtcaagctctaccgtttcttggtcaggaggaccaagagcaatttcaacgctgtcattctcaagaggcttttcatgagtaaaaccaaccgaccaccaatctccatgcgccgccttgtcaagtttatggaaggaaaggagaagaacattgctgtcattgttggcacagtcacagatgacaaaaggatccaggaggttccagcaatgaaggttactgccctgagtttcacggagacagcaagggccaggattgtcaatgctggtggcactttggcaaggctcctggagtgccgcacagccacaccaagccgtatgtgcgctccaagggaaggaagttcgagaaggctcgtggcaggaggaacagccgtggattcaaggtttaaaacaaattgtggccctccgtgttgccatcagcatagtgcaaccgttgtgtttgatcagtcgacagtaattaagcatcactctgtaccgagattantagcacaatttgttgtcctggtttgatttttgaagatatttgatgtcgtctccttattatcgactcg

SEQ ID NO: 177297 - DNA, 1007 bp, Zea mays
  Clone ID: MRT4577_93284C.1
ttgggaccctcgaggccggccgggttcaccctcattataaagatcctccacttcgcactttcgccgccgcctctctccttcccgagcaggaggcggacaaggtaagcagcaatcgcaggaaccctagcgccgccgcacccgcaggaatgggtatcgacctcgtcgccggtgggaggaataagaagaccaagcgcactgcgcccaagtctgacgatgtctacctcaagctcctcgtcaagctctaccgtttcttggtcaggaggaccaagagcaatttcaacgctgtcattctcaagaggcttttcatgagtaaaaccaaccgaccaccaatctccatgcgccgccttgtcaagtttatggaaggaaaggagaagaacattgctgtcattgttggcacagtcacagatgacaaaaggatccaggaggttccagcaatgaaggttactgccctgaggttcacggagacagcaagggccaggattgtcaatgctggtggcgagtgcctcacatttgaccagcttgctcttcgtgctccacttggcgagaacacggtcctcttgaggggccccaagaatgcccgtgaggcagtgaggcactttggcaaggctcctggagtgccgcacagccacaccaagccgtatgtgcgctccaagggaaggaagttcgagaaggctcgtggcaggaggaacagccgtggattcaaggtttaaaacaaattgtggccctccgtgttgccatcagcatagtgcaaccgttgtgtttgatcagtcgacagtaattagtcatcactctgtaccgagattagtagcacaatttgttgtcctggtttgaattttggaagatatttgatgtcgtctccttattatctactcgttactggttgagcacgaagattgttttgtgatactcctacatgatttaagacggttcccgacgttccatgaaaaaaaaaaaaaaaaaaaaaaaaaaaaaaaaaaaaaaaaaaaaaaaaaacccccccccccccc

SEQ ID NO: 177298 - DNA, 374 bp, Zea mays
  Clone ID: MRT4577_93285C.1
cagaatttttctgattcagaaattacttttgactgcagttattggaatttatcagttcgggtattgattatacctctagtggccaagaacacaagatagtagttgggatactatgccttgttttacatcattcgtcaagcaactttcttattgagcctgcaaaagccataatattgaacagttctttggtttctttaacagatgttgtagtaaacaacgcttgtgttaaaggcccatctttatttcaacacaatcaggagacaacctttggagaattcctgattcttgtacttctattggtgttcttctctctaagaaggtatggggctgttgcttgcatgcttcattttatttgcttgggtctgcactaattg

SEQ ID NO: 177299 - DNA, 649 bp, Zea mays
  Clone ID: MRT4577_93286C.1
atcgaaggaagaaaagaaaaaaagccgcccgccgctcacctgccctccggccgcataaatacaaggcgcccgtggcggagatgggcaccgctttttcctcctcctcttccaccccagagtccagagctatggcgctcgccaaggccaaggagatcgtcgcctccgctcccgtcgtcgtcttcagtaagtcttactgccctttctgtgtacaagtgaagaagttgttcacgcagctgggagcaagtttcaaggccattgagttggacactgaaagcgatggacctgagattcagtcagctcttgctgaatggactgggcagaggactgttcccaatgtcttcatcaatggaaaacacatcggtggctgtgacgatactgttgcactgaacaagggagggaagctgattgctctgctgacagaggctggagcgatctccggttctccttcgaagaccaccgtcactccttagctctgtttgcgagttgtcgtggtcgacatgttagtgtgttacatgatttacatcgttcccgtgtcatgaaataacgaaggtggatgtttagcaagttcagggcttgttgcccgcagcgactgttaaatctcagtgtaaaactcgttagaaataaagcaaattatcttggtgatatcatc

SEQ ID NO: 177300 - DNA, 497 bp, Zea mays
  unsure (1)..(497): unsure at all n locations
  Clone ID: MRT4577_93287C.1
ctggtacgcctgcaggtaccggtccggaattcccgggtcgacccacgcgtccggtggcgcgggacagagcgagtgggacgtccacgctggaaaccggaggcccggggaaacgacgcgctttccacctgttctttagcgcttttttatttttattattattactattattagcctatctgagaacgggacttaagggagcgctaaagtgcctcgcttctccaagggaagaaggtggtggggctggttcggctggaaccgagtaggatggaggggtnagagtgtggcgggaagggtggagtanggggggaggcaccantcagcagnctagcgggaagagcaatttcccccaccccagggaacggacacgtgcagccgccctggaggagactggctttgagccctctgactgccctcgccggagcggagcgcggctgctgcgggcgcgagtgctcacaatgtggctgggaggctgggggatggggaagagcctggagact

SEQ ID NO: 177301 - DNA, 320 bp, Zea mays
  Clone ID: MRT4577_93288C.1
attatctgtttcacagatgtgcagagcatggagtaaatgctccatgtgctgctcgtggagacaataaaaaagtaatctcagcaaataataatgaataaggaggatgcaatgacgactagctgaacaggactaaaagccaagcaactcatcttgtaaacattaactaagctaccccaactacaaacatcttccattcatagatgccgacaagactatacttagagtattgtgtaccttgataataccatgagaaaggttaacattactgagctgaagaaattgctacgagcttagtcatgtgtatagatcgatgtatactc

SEQ ID NO: 177302 - DNA, 477 bp, Zea mays
  Clone ID: MRT4577_93289C.1
cccacaacagggccataaaatctaaagaggcccattacaacccggccccccggattaatagagcaggcaacctacctcctaggcgggtagggggggggactgggaaaaggacccaaaaaaaaacccttttaaaaaaccccgggaccccccaacccccccagttgctgggaaacttggggacggccttggttccctcgaaaacggggtgcttggcaagccctccggggaggacaaggcccccggaggtctgaatcccccggaacggaagggggggctttttgttgaacccccccagtttgggggcctccccggccagtttttaaaaaatgcctttgataaaggagttcataagggacatggccttggagaatatccccatgtgggggggccccttcttaaacaccttaaaaaaggaaatcttgaaggcctccaccctttttttggccttttttttcccctttttttcccccccctcct

SEQ ID NO: 177303 - DNA, 341 bp, Zea mays
  Clone ID: MRT4577_9328C.1
ggaacaaaggaaaagaaacatgccgctttggccaaaattttctgggatctccatgcgggcgctaaaacaaagcccaaagttgccgggggcctttgtcacggggatggccccgggtccccccccaagcgggcatttgggcgggctaatgctagtcaactaaacgggttttaaaaattatagcaggccaggggggccccacaatcaacatccacagggggcgatgccctttaaagaactcagatggccccccatatccccttgggaggtcttcagacccattagccagagagaacagggctaaaaataccagcaaccagcaacatgttcgagcattgggggga

SEQ ID NO: 177304 - DNA, 799 bp, Zea mays
  Clone ID: MRT4577_93290C.1
gggataattcagcttggaatcagagatactttgttataacaagatcaccatttcttggtggccttgcggcaatgcgtgattcagaagtagactacacaattgaagctattctagcaaacgctcagaatgaaagcccctggaggtacctcaagggtctatacaagggtgagaataacctgctaatagaggacgagcgcatctctggtgtttgtttcaaggtcctgaagaatgattggacttgtgtatttgctttgagtttgctgctcgatcttctctgcactggtttgcagccttcagatgaacttaggtccactcttgaaacaataaggagctcccatcctgaaaccacggatgctgatcctgcagccgctgtttgctgtatcctgcagaaatgtgatcccctgcgggtaaattattggtcttggttcaaggacactctttctcagatctcatgacttcacatgggttcaccccttgtctgcgctggtccggactctgtgagatagacatgttttagatagtttcattggacacccaaacagagcggacagagtgtatggctgctaccttcaccatgactgaaagcagtacttgtaacgattttgtttagtaaaatttgtgagtgttactgctccaaacaacaccttatgcaaccatatttgaatatttcacatgtaagcttgaatacaggtgtgtttgttaatgtattacaattgccatgggagcctaaatgagacccataatcacttccccttggaagcgaaggaccgtgtcgagcacttcactcatatggtcactt

SEQ ID NO: 177305 - DNA, 292 bp, Zea mays
  Clone ID: MRT4577_93291C.1
gtggaagcagacgtgcggctgtacgttatctcgtgcaagcccgatgcgggggaaaggaatacttacgacgcgctggaagtgttagtcctccttgagacggatcgcaaatggcacgttcttacaggtttcgtgcatcgctcgattaattagcacatagagtgcttgcaattacagccagtacgaggtcatgagcttcaagctggtccaacatcacagcacgacacgcttacttactacatgaaggggataaccatatatagcgtgcctgcattaacatgcttaagaatgacaa

SEQ ID NO: 177306 - DNA, 323 bp, Zea mays
  Clone ID: MRT4577_93292C.1
cacaaatctgcgctgcgcgcaagaagggatgggtaaaagcagttaagcttgcgcgcgcgggacagattccagtcttggtgcttagaatctacgtagaatgtagttccgcagggctccgccactaccgctgtgtccaaccactgctggtgttacttcgctgcttctactcgacgatgtactggatcgacggccggcagcgatgttccgacaccttcaatgcgtttgcgcaagtgctacggatctgtacatgcacgcgtttttgttcgatcgctacggtcacgaagtactgtctttttccgagacatactgtgcgtattgagctc

SEQ ID NO: 177307 - DNA, 2056 bp, Zea mays
  Clone ID: MRT4577_93293C.1
ttccctggatttacctccacacgcctctccagttgaagtaactagatacctaggatgtatacagtcaactgagctgagcagtttaccagccttttctgttaacatttctttaatgatgaaagtacctctgtggaaggaagcatagactgtgtaagcaatggctgcttagaatctcaggatgatattttagggagcagagatgaacgtttgcaagttcaacaatatcaagagaagatggggcttcgcaataaccccaatatgaagtcagttgattcacacctgatagaaggtttggctgtatcagaaggaaagcatggggtatccgtggcagcattccttgaaaacaaggagcgttgtgctaagacatcctactgttctaacactgaaacaaaaactactaaatctgcaatagacaatcgattggagactcatgatctgggtactggtccagtgaaactaaattcaagctttaatgagatgcacagtgctgatagacaatgcagtttagtctttggctgccttgactcagctgatgttcctgcttcaactcaggctctgtcagtttcacctgttttgatgagtgacgagcagcaggtcgatgacgcccattctgctgtcaaggccattgagcacctgggcaataatctggctaacataaagcacaaatccctgcatatggatgtcctcatgttagaggacgcccaagttgcttccatggctgcagtccctgggcatgagggagaatctgtcgaggctggatcaaattcttttgatattttacttggagctctggctgaagagtccaaggcagcagatgctcctgggaaagatgaagttggcaaagcttccttgacattaataacactggctagcaacgagccctctgttacagaaggcagagttgtagacgtggtggaaacagacacaattttgggagcaggaaaagatgataaacaagttgatcaggcacatgacttccatttgtcagatctggtgtctagatgcatcgggagctcaaatagatccgatatcatatgctatgtcagacgcaaacacaaaaggaagagggattactcgtgtttcgtccgctctccctgtgagcgcttgaggccaaggtccaagcctgcagtagtcgaggagtcggaatggagcagaacagccgaggcttcttttgctaaaaggggtaagaggacacaagcagtgggatcatttcagtgtgatattgatctgtgtggcatggcatttgagactagggccgaactcaatgcccacaagcgcaatatttgcactgacgagtcatgtggcaagcgtttcagctcacacaaatacttgaagcgacatcagtgtgtccacagcgagatgaggccatttaaatgcccctgggaaggttgtaaaatgaccttcaagtggttgtgggctcagactgaacatgtcagagtgcacactggagagcggccatacaagtgctcggctcctgactgcgggcagacattcagatatgtatcggattacagccgccacagaaagaaatttaaccattactgacagcttctagttttccgagttattggccgcagctcggggcaaatctccagctgcttgtgtcggtgggccttgtttgttgtagtagctcagctcacgtatttattaacaacctgacagctgataggcctagtgaatgttccccgttaacaatgggctagtaatttagtcggtgtaggagttagaaattgttggggggtgaagtgcaacccccttctgttggtgtaggtttgcataagctgatcaccccccactgacacgtggccattcattatttgtttctcagatcagtgatgatgtatttaatccctgatgacaaacttcatgaacactgaaaccatatgatgtcggatgtcaaaatgatcaggggttgccaccgtcctcatgtaattcctgtctttgacgcattgtccaggtcctcattattctgtcatactgtttcagcggattacttgtatgcctttgtctacgcgaaatctaatcatttttaaattcagaaataaaaaaaaaaaaa

SEQ ID NO: 177308 - DNA, 230 bp, Zea mays
  Clone ID: MRT4577_93294C.1
attatttttatggtgctttttacattcgttggggtttaaataaaaccaaggctttacagtaaatgttgctatggctaacatctagcagcctagcactaacaccttaccatcaaaccatgtactactacaattccttggccctttcattttacgcgtcagctagtttactttctgccatatattaaccccaacatataggcttcgtttcagtggcaactctgtgtttttac

SEQ ID NO: 177309 - DNA, 264 bp, Zea mays
  Clone ID: MRT4577_93295C.1
ggacagaaaccaacactttttaatttagaggaaaaggggcccaaaggcaaaagcttaaaaaaacactatgcggaaaaaagggctaaaacctaactaggtagggggtgccctaaaagaacttctaaaaaaaaaaaaaaaggaaaaaaggtttttaaggacaccaccccaaaaaaaaaaaacactacttttattgggaaaaaaaaaaaaaaggggggggccccccccagggcaaaggggggaagttgccacccccctaaattttgg

SEQ ID NO: 177310 - DNA, 156 bp, Zea mays
  Clone ID: MRT4577_93296C.1
actcactggacgccggcggcgacgacactggcctgccgttccacgaccgccgagccctgcgcccgcgctgcccaccgagcgtcgcgtttgcacacccgtagtacagtacccgtggcattatgaacgccgatgaagccaacggcaactgaaactggt

SEQ ID NO: 177311 - DNA, 989 bp, Zea mays
  Clone ID: MRT4577_93297C.1
gccggccggttcgggctttctcgccttctcggcgcgctacgcctacgactgagctgaaagaagcggtagatcggcgttagcggcgagctagggttccggcgagtgcacccaatggcatcggaggcggcgcggcggcggcaggagatggcagaggaggggcaacggcacctggaggagactatcgcagcctcgttccagatcctcgtatccatgaacgacgagctctgcaacgccggcctttggtcctcctcatccgtctcggccaccgctgcggctggctaccagcaccatcactctgctactcttccgaccccacactctgtagattccgacgctgccgacgcagggggcgcgcccagccccggcgggtcgctcgacgaggcgaggcaccgctacaagtcagccgtggcggcgctgcgggcatctatctctgccgtgtcgtcctgcgctcaggacattggatcaacagaatctgaagctgaccatgcagagattgagagattggaagagcatgctgctgctttgagaaaggaaattgaaagcaaaaacaagcaagtaaaactcctcattgatcagctccgtgacctaatagctgacatagcaatgtggcagagcccttgctcagtgtgaagtgtcgaagttagagacagtagcctggacgtctggtataggcatattgtgcatgttggttaactgaccacttggaagggagcaatagatggaatatgactgggctgcacgggaaaagaaaatgaagatgccctctataataccaactaaacgtgtgttgggacatcgatgcaaatgcagatagggatgtaatatgttggacatgaatgttattttggacacgactgtagatacacgtatctttttgaaacgtgtggattttcgctgtgacgaaagtcctgtaatgttttctcttgagaaaaacaatctagaatgatatttggattctcacatgcaatgcacattatttctgttaactg

SEQ ID NO: 177312 - DNA, 256 bp, Zea mays
  Clone ID: MRT4577_93298C.1
caggacaacaaatacctggcgaatcactgactaaatcaccctttaagtcccgccaaaaatcatgccagaaaaaaaaaaaaaaaaaaagcggccatctaaagatccaacaactcccatcatccacctctagcctctgtttgccctaaataaccaccccccgcttttacactcgtcctgggaaaacccgcaaccccactaatgccttccaacatcctactccccagcgcctatagctaaagtcctgacccaaccccac

SEQ ID NO: 177313 - DNA, 369 bp, Zea mays
  Clone ID: MRT4577_93299C.1
cttaatcataaacttcactatcaaccagatactcacacgacatactatgaatacacttactgatgccacatctattggctcattgccatgaattcatgcatctatacatccatatataacaccttatacacaatttgtatcgaaaagctatatgtttcaccatatgctgcactactagcgtattccctaatttttaccatcaatgattcatcatactgtaacttgtactaacacttgaaccaactataggcataacaccaatcgtatctccaattcagctcttgatgccactatacaagacgtttatcaaaaagaatctcttcaaggatcacttgaagagcaaattggagatcctatattatgtacttt

SEQ ID NO: 177314 - DNA, 375 bp, Zea mays
  Clone ID: MRT4577_9329C.1
attccgtatactgactctgaatctggaaagggctgagattgagtgtgagccatgctctgcggaggaagttgatcatacagacaatgaccccaacgtggtctactactggggccttatccctaaaagaatcattcatgtcgacactatctacctgaacggagatttcatggtagacctcaccaatgatgtgtacggcacggtcaactgcgcccattcagatgtcacattatctgtggctgggctgacacagctgcctaagagcatgtgcaggcaggtctatctaccggcagtacatgcaccactgtatgatgggctacgagggctcacatcaacgccatatcgagcgcacgatcgttagatcatactaccacgacc

SEQ ID NO: 177315 - DNA, 614 bp, Zea mays
  Clone ID: MRT4577_932C.1
cctcgaggccggccgggatcgccatggctctagcctccgtctcctcggcctcagcagccatctacgccatcaccgtccccgccgtcctcaccccgaacacaactttccccctcaccttcaactccaacctcgacgcgacaaactctctcgacgtcgccgtcgcctacggctttggcgcaccacccccctacgccggcgccctcggcttcaacttcaagaccatctacctcgcgggtgaggagtctggctacaaaatgggcaccaactacaccgtcgacgtggtggcgcctgctgccattgcaggatacaatggatccgttgttgttaccgcggctgtgtaccagattttcggctactcgggtacttactttttgaagacgttcaatgttactgttgacgttggtgatgcgtcgccggatgatggtgtggttttcaatggcgatggggacaataaggctacttgtaacctttaggtcacgtgtgcgtggtagtgggttataaatgagaatggaagtcaccgacgtgggaatgatggtagactgtgtttagtaatgttagaataatgtctgcaatagaaagatatttatgttaaaaaaaaaaaaaaaaaagcggcc

SEQ ID NO: 177316 - DNA, 291 bp, Zea mays
  Clone ID: MRT4577_93300C.1
gtttttgaacggaaaactcgcacccataaccattcatgttcctactgaggggagggggtatatttttgatgcggacatgagatacaaatctgatggtcatgctactataatcctcgactggcgctgagcatggaagcgagcaggctcgcgattgggctgatgaggcaccgatgctcatgtgagttaaagttgtcattgccaagagctcggagcgtatccacagaagcaactaggtggggatgggaattattcctctgtgctggaaagctgtaggggatgttgattgatttg

SEQ ID NO: 177317 - DNA, 180 bp, Zea mays
  Clone ID: MRT4577_93301C.1
gcgacccacgcgccgcgccttagcgcatggttgcttactgcactgtactaatcactatagcgggtgggactgccctaaactcggggaggaagcccggctatactggcagaactgcaaagcctgactgccagaaactgggccaactcgcgacgggagctatttccgtctcagtgccggcga

SEQ ID NO: 177318 - DNA, 324 bp, Zea mays
  Clone ID: MRT4577_93302C.1
cacacctttcccatcccactgtaacatttctttatcgacgccctcaacctcacgcgggggtgtcatagtatttggttgtggtcaaccataaaccattacacggaggctcgtctttaggatgcacgcctttccattattatgaaggcataccagattcagctgtcatctacagctgacatgaataaaccccgcatctcccccaaaacgatagcttcagctcatgatgaacatgaagtatgatggacatgctcaccgaatgataaaaaaaactctttacctcttaataaattgtgttctgatcataacgaaatattgcagatataa

SEQ ID NO: 177319 - DNA, 317 bp, Zea mays
  Clone ID: MRT4577_93303C.1
atcaaattaggaagtatgtatatatataacacatacactaagtcttatatgaatacacgggaaaccactacgtactagaacatgtgacacatggagcgcatgacattggtataagggcaggggcaacaggtaaatgccttatatacatatagccagaccgaaaatgaaaatgtggcgccggcgcactgaaaagggcagacaagaaggggctaggctgcaacgctcatgaacaacggttatgggcccgcctattgacgatcgagcacggagaatgacgctgatggatacgcccttaactctgcagaaaacgccacata

SEQ ID NO: 177320 - DNA, 257 bp, Zea mays
  Clone ID: MRT4577_93304C.1
ggggtaggtcaactgttgtgtagagaattattaaacatgccatcattatattgtttcatcaggtgtggggttctcattgtgcaagaactattcttatgtatggtcacttgtttattgttaaaactttggaccacacaaatatcattagatgtatttctaatgatacgtacataggtggtagagaaaggagtagcacaatttaatttgatggcatatatatagaatgaaatagtagtactatcagctataactattga

SEQ ID NO: 177321 - DNA, 418 bp, Zea mays
  Clone ID: MRT4577_93305C.1
cgggccgggatttccgggcctacaactccagggaaataagccatgagggcgtggtcggcaaagccagccaccggcggaaggacttcttggccggagggggtcggcctgaccgtcaaggaagccaaaaaggtgtttttggcggccaggccgaacgccgccttcggggtgctgccaacaaccacccaggcggggccctccgactttgggttcgaccgtgtccggtttttcgtgggacccgtcgcccaaacccccaatgtgggttgggctggagcctaagcctagaggtggtgggaaccgccggccttgaccacctgttttttgtaactcctggtattaaggtttaaataccaggggggaggcttgctaatcctgggaatcgtgccgctggtgggactactactgggctacttgaaacgaa

SEQ ID NO: 177322 - DNA, 320 bp, Zea mays
  Clone ID: MRT4577_93306C.1
ttttttttttttttttttgaagcactcatgctttggataaacattaatgccttggaataggatgaccaactgaccgtaatttggatagaaattaacgcttcagtatctgaatctgcatgccttcaatggttcacgctttacatgaggggaacaccaaacgcagtagtttgctgggagcctgggagcacttgcaaaggcgcgatttttagctaccagtaaatgaggcaatagcatgtgatgtgagaggtaactgactacaggagatccctgagagttgtggttgtcctggcagccttcttttttcccttggtttcgtgtct

SEQ ID NO: 177323 - DNA, 589 bp, Zea mays
  Clone ID: MRT4577_93307C.1
attgggtacctcgaagccggccgggacagattcaccaacaagcagatcattcgtcccttctgatcatggcgaggacctactaccgacactgcacgatcatcaatgaagattgtcggtacgagtatgcctctcttggtggctggttgcagacgctcatgacgacttcgtctcatcagatgcccttgctgctgctgcgactagctcctgcatggtatccatgctccttcgcactcattcatcttgtgacataagctgaacatcactgattgcgactatctctgcaaagtccttgacaacgggcaattgctgacgctgtatctgcaacccacatccggctcctggatccagacccgggacgagtacctgtatctgcaatatctgacatgcgactgcgatctgacgccgtgcaactcctcctgcaccagtcaccatctactaccatggcggcaaagacattctcctacgaccagatcaacttacaggtactgggcaacacctacggcaagatccagacctcgatcaccaacgcgatacccaacacagatgactcacgggatgaacaggtccgcctctgtacctacctcaccac

SEQ ID NO: 177324 - DNA, 656 bp, Zea mays
  Clone ID: MRT4577_93308C.1
tcggaaccaaatacccagcaattacaaaatcattttcccattgagaacacacaacataatggctgattataggtttcttgttcaagaaactctaatagcattgtgccttctcctctcttttccaccgggcatagcctccatccattcatccacactgaacaggagttgcatcttagaggagagggctgcgcttctatcaatcaaggcaagcctcctggatcctaacaactacttgtcatcatggcaaggtcaagactgttgcagctggaagggaatcaggtgcagccaaaaaactggcaacgtcgtcaagctcgatcttaggcgcataaatccaggaaactttggaggtgagataagctactctttagttaatttacgacggctgagatatctagacttgagttacaacaacttctctggggtacaaataccggagtttcttggttccatgtcaagacttaggcatctcgacctttcatacacctacctccatggaaggatacccccgcaacttgggaacctcaccaaacttgtctaccttgatctcagatgctgggacttttacaaccctacttactactatcccttctcagccaaccttgcatggctgtcacaactatcctcattgaagcacctagacatgagctttgttaatc

SEQ ID NO: 177325 - DNA, 657 bp, Zea mays
  unsure (1)..(657): unsure at all n locations
  Clone ID: MRT4577_93309C.1
gtcgccgccgccgtactcgccgagaacccgccccaaatccatagggcccatccccccttacccattaacccccaatgcctccgaagaagcgcgccgccgccgccgcctcttcaaagaagccgcagccatcgcagccatcgcagcccgccaaattcggtatcctccacttcttcgagcgccagacccaggcctcccagaacgccaagcgccagaagcccgacccccctgcgcctccccctcctcctccgccgccgcccgagaaggagccctcggaggtctcgccggaggttaccaagacgctggcgccgaagcgtgtcagattttctcccggaatgttgattaagcagagccaggacgatggggtcgcggaggtggtgacttggaagatctcgccggtgaaccatcgccttggtacgacgaagtcgaagcaatttctggggatggcgccccatccgtactcaagcgagaaaaattcctcccttgaggctatgaagaagtggcattcatctccattgggcttgtcaaggtgtactactttgggaagtaattcaggagttcttggatctgctatagttggttgtgatggtgtgggggatactcagagtccatntcggaccccaccatcgctntcctatggctgncatgagcaagtgagca

SEQ ID NO: 177326 - DNA, 221 bp, Zea mays
  unsure (1)..(221): unsure at all n locations
  Clone ID: MRT4577_9330C.1
cgagtacgagagaacggtgaataggagtatgactagacagaagatagtagggatganctgtttttatgggcacagtctaagttggtctggtgtctggaatgaagctggnngctaatagaaaggagcgtctatactggagcttagatgggctgtaccccgtagcatgctaaggacaggcctgaattctgagantgganagtggtagaagtattgtccagtcc

SEQ ID NO: 177327 - DNA, 357 bp, Zea mays
  Clone ID: MRT4577_93310C.1
acatagtgccattcagaactctgtatgattagcaaaactccacatgaaccagttatatacatcgcaaatctacaacaagcaaacaatcatattcttcttacctagcactgcctacaggtatatatatatatgtattgatccatccaaatggtccagtgcaccctgcagctctacactacagtctacctttactccatcaacaactcatgcacgacagttatatgtttatcagaatgtacatggctaatatagtattaagcatacaaattagtgattatatcatcagttctgaaatctctagtcctttgtttctatcacctattgctccataaaacagcatcacatggcaagcattca

SEQ ID NO: 177328 - DNA, 258 bp, Zea mays
  Clone ID: MRT4577_93311C.1
catgtggcaaacattgtcgccttcttacaacaacagcaattgctgccatttagccaactcgctttgacgaatcctaccaccttattgcatcagcccaccattggtggtgggaaacattaacgccttcttgcaacaacaacaattgctgccattctacccacaggatgtggcaaacattgtcgccttcttacaacaacagcaattgctgccatttagccaactcgctttgacgaatcctaccaccttattgcatcagcc

SEQ ID NO: 177329 - DNA, 637 bp, Zea mays
  Clone ID: MRT4577_93312C.1
gtcttgaaatagctgagcacttgagaccttattatctgcaactatagctaatagaatatacaataacatttgaattgttagagtgttatgatagtttaagttgagattgcagaggtgaattccagagtaatggcctattttaagagtagtatgtttgctgctctttaactaggcttctcaagcatggatggagtgggtgatgaagaagcagaaatcttttgaccaacgtggtgacatgattatggcttcttgggctaagcagcagcaacgtaaaatgacactacgggcacaacgattctcacgctcaaagatctaggttgatcccaaggaagaaaggaagctatttgccaaagaaaagaaggcatccatggaattttatggagcaactctgaagacacatacccttgtgatacgtaagagggatattatgcgcgaaaaggcagaggacgagaaggatattatttcgattaatagtgtgacattgagccaaattttgcttgttcgaaatggtagaattcaatatttgttgtaattgttgagttgattcttgatagcatcactaaacaatgacctatgctaaaatagttgcacatttgactaaggttcacatggttgcatctgcttgcaacttttttgt

SEQ ID NO: 177330 - DNA, 448 bp, Zea mays
  Clone ID: MRT4577_93313C.1
acggtctggtaacttggaaacatgcttctatatagaacgagtgcatttaactactgcaaactgtccgatcgttccgcggcccctacccagaaacaccaaaccaaccggggctaacgaaagccagccacaaccacattcaaacacaagtattttccagactggacattcactcaaaggaaatactctggcatacagacttataaataccacactctaacaagtaagctaatattgcttggattacagtcatggaacaacagcaaacactcctgatgccaatagagctaaaatcgagtttaacttattgctatgcatagagcctaaatcatatgcttacttgaacttattaacaaacaccacattgagagctttatctccaataaacacatacctatctggtttgaagttcaaggctccttcaatgaccttgcactatgagaaccagatt

SEQ ID NO: 177331 - DNA, 198 bp, Zea mays
  Clone ID: MRT4577_93314C.1
tgcactcgtacgtgagctcggatcctataaactctacccatgcaggcgaactggttctgatacattattatcatgaagattatgctcgatggcaattggtacagatacgtggctgatcactttgaatttcatatagcctttgtgggattgttggttgcaagacaacatatggtcggacatatgtgactggggtactat

SEQ ID NO: 177332 - DNA, 763 bp, Zea mays
  unsure (1)..(763): unsure at all n locations
  Clone ID: MRT4577_93315C.1
ccggccgggtcgtaccctgccgagtctcctgagaagcgtcgtgagtgtgagcgcgctgcccaggttatccgaactaccgtggagaaggaccttcgtcctcgcgatatcatgacccgtgcctctttcgagaacgctcttgtcctgaccatgattctcggtggttcaacaaacggtgttcttcacttcctcgccatggccaacaccgccgatgttcccctgaccattgacgacatccagcgtgccagtgaccgcacccccttcctcgctgatctcgcccccagtggaaagtactacatggaggatctctacaaggtcggcggtacaccctccgtcatcaagatgctcgtcgcccgtggtcttctcgacggtagcatcatgaccattaccggcaagactctcgccgagaacgtcgcggactggcctagtctggaccccggccaggacatcatccgtcctcttgagaaccccatcaaggactctggccacatccgcatcctaaagggtaactttgcccccggcggcgccgtcgctaagatcactggaaaggagggtctgtccttcaccggcaaggcccgtgtcttcaacaccgaggaggagctcaacggcgcactgaaccgaagcgagatcaagcagtccgatggtaacctcgtcgtcatcgtccgatacgagggccccaagggcggtccccggtatgcctgaacagctcagggcttctgcagccatcatgggtgccggnctctttcacctggcacttgtcaccgac

SEQ ID NO: 177333 - DNA, 927 bp, Zea mays
  Clone ID: MRT4577_93316C.1
gcccggccgggaaaaaaaaaaaaaaaaaaaaaaaaaaaaaaaaaaaaaaaaaaaaaaaaaaaaaaaaaacccctgccccccgcacgcgcagacgacgtgctggctaccctcccccaacttaggcctctagcgacgaagcaggcgggatatttggtgcgcgcgggcggtgtgaacaatcagcctgcagcgatcgagcaaaagccagcatcagcgagcaactcggcgacgtcggcgtcgccaggggagcccgggcagagaagcacctgccctctgcatctggaaccccgcgcgggctccgccggccgcggcccgtgccgcgacgactcggcacgcgctagccagctataggtagctgtttcccttcccgccactatcctgccgcccgggctcgcgtggcggatgatgattcctagagagccacggcggccggagcacccttcctcctcctgaccccgagctgccccgcccatcgcagcgggcggctctgccctccgccgcagcgtctgtgtccagactggaggatggagactccgcaagtcgagatgggcggtttcaaggtcaacagcccgcaagtgcccaacggtggcttgcggcccaccgtgtcttcgtcctggaactcccaagggacggtcgagagggcgctcaggagcatcaggatcgtcattttcacttccaagctcaacttgctcatgccgttcggacctgcctccatcattctccacttcacgactaggagacatggattggtttttcttttcagcatgctaggaataatgcctttagctgagcgattgggatatgcaactgagcagcttgctgtatacactggtccaacagttggtggccttctgaatgctacatttggaaatgcactgaatgatcattgcatatatgctttggaaaatggaatgatccgagtcgtgcagc

SEQ ID NO: 177334 - DNA, 2151 bp, Zea mays
  Clone ID: MRT4577_93317C.1
cattgggtacctcgaggccggccgggaaatgttgctgtcggtgctcgctaccctcccccaactcgcaagtcgcctgccagcccggttagcaaggaagcacgcaggatatttggtgcgcgcgggcggtgtgagcggtgagcctgcaaaagccagcagcagcgagcgtcggtaggggagcccgggcagcggagcacacttgccctctccacctggaaccccgagcaggctccgccggccacggccggtgccgcgacgactcggcacgcgctagctagctagctgttcctcttcccgagggccccaccactaccaccatcctgccgcccggcctcgtgtggcggatgatgattcctagggagccgtggcggccggagcacccttccaactcctgatcccgagctgacccccgccatcgcagcggcggctctgccgcagcgtctgtgtccaggtgaggttggtgccccacggatttggagacttatgatgatggagacccctcaaatcgagatgggcggtttcaaggtcaacagcccgcaagtgcccaacggcgtgttgcggcccaccgtgtcttcctcctggaactcgcgagggacggtcgagagggcgctcaagagcatcaggatcgtcattttcacttccaagctcaacttgctcatgccgttcgggcctgcgtccatcattctccacttcacgactaggaggcatggattgattttccttttcagcatgctaggaataacacctttagctgagcgtttaggatatgcaactgagcagcttgcaatatacactggtccaacagttggtggccttctgaatgctacatttggaaatgcaaccgaaatgatcattgcagtatatgctttgaaaaatggaatgatccgagtagtgcagcagtcactattgggttccatattgtcaaatatgctgttggttatgggttgtgctttctttgctggtggtgttgttcaccgcaacaaagaccaaatcttcagtaaggcaactgcagttgtcaactcaggtttactgttgatggctgtcatgggattgatgtttcctgccgttcttcatttcactcattcagaagtgcgtcaaggggcatcagaggttgcactttcaaggttcagtagttgtattatgcttgtggcgtatgccagctatctctatttccaattaagtggacggagcaacatttacagtccaataggcagtgaagaggcgcctattgaggatattgcagaggaagatgaagaagctgagattggcatgtgggaggcagtaacatggcttgcggttttaacactctgggtgtcttttctttctgagtacctagttaacgccattgagggagcatctgattcattgaacctaccggtggcttttatcagtgttattttgcttcctattgtgggcaatgcagctgaacatgcaagtgcaataatgtttgccatgaaagataagcttgacataacactgggtgttgcaattggttcatcaacacagatatcaatgtttgtgattccattttgtgttgttattggttggatgatgggacaaaggatggacttgaattttcagctatttgagacagcaactctcttcataacagtgcttgtggtagcatttatgctacaggatgggactgcgaactacttgaaaggacttatgctgatcctatgttatctaatagttgctgccagtttctttgttcatgttgatccacaatcaagtgatggttgatgccgtagatgctgtaagtaatgcgtcaaataccttttgaaacttgttaatcctttcttgtggaggtgctactccatagcaacgttccacctgtttcaagcagcatgctggcaaaaaaaggcgggaagatcacacattgtcggttccttcatgaaccgcaaaaggaattcttgtattgtgtggatactgaggtgtactaggggtagtctcaatgtatacagaaacaagaagtgccagcatgttacattcgattaattggatgggtgagtctccctttgagttttgggtatattatttgatttccttgaaatttaactattgggctgaatgtaaatttgggtatatgatttgatgatggccctcttttttttctagtccaaaaaaaaaaaaaaaaaacccgcggccaggtgc

SEQ ID NO: 177335 - DNA, 407 bp, Zea mays
  Clone ID: MRT4577_93318C.1
agacctctgcacctgagcatagaaaggtatgatgagaagcgatgggtctacgtccatgtcgttactagttattggacgagtaaacttgacaatgaactttggagatgcggtattgaatctgaacatattcctgcctaccttgatgcctattgtgacggacaatcctactgtcaaccttgttgtgctctgcgacgatcactactatgatgacgactcttgtgatggcatttgtgactgcatgtgaaactaactgttggtgcatcatatgcacgatcgtataaacacgcgtatcaacctgtctagcatgctctatagagtgctcgacagattcctggctacatccacgattgcttgagacatctgtgacaacatgtccatcatcatagcgctgatcataaaacctgtca

SEQ ID NO: 177336 - DNA, 222 bp, Zea mays
  Clone ID: MRT4577_93319C.1
gcgcgagggctcgtgcgacgcccgagggaggttcgttccggagaagttcgaggagatattcgccaggcgcgcgagggcggcccccgacgccctgacctcggacgagatcggccggctgctccgagcgggcggagagcccggggactgcagcggctgggctggcgcggaagcggagtggaagatcctgtgcagtctcggcgaggacggggacggcctcctccg

SEQ ID NO: 177337 - DNA, 332 bp, Zea mays
  Clone ID: MRT4577_9331C.1
aaaaaccaagggtttggttgttccgttctccaatgtacaaacctaaaatttcttgcctagtatttactgcggggttttaacaaaaatggtgtcctatattttgggggaaaggtaaaaaaacttgcttttaacaaaacagatgtccctacccttgtggcaaaatggcaaacaacagggtttctccaaaaatggggtacccccctcaccggacgtgctgttagaaccacaatttttacagcttttctaccggaggggctttcttgggcaaaaacaacaacgggggttctaacccaactgggggcctaaattatggaactgtttaaaagaccaac

SEQ ID NO: 177338 - DNA, 789 bp, Zea mays
  Clone ID: MRT4577_93320C.1
ttttttttttttttttttttaggatccgaaaaacatccttgcacgcggacacctggtgacacactacaaaaaagggtcactataacgtggcaaataaaacaatacatggctttctcgtattgaattgatcagtgacatgatctgaaaataacatcgctgactcctactaacaccatccatcatcagatgtaacagcgtcatgcggcagtgtgattgaagctccgagagtactgttcattatgcagcagagagatacacaaacacacatacactaagaaaacacctgtaaatcaggttcactgggttctgcttcccccactatttccaaccactgatcgaggtgatccggcattggcattggcgttgctgagacacgatcagtgagcctgacatcagctcaacccctccagccagggcactagtcgatcagccgtgtgttcttcaacccggccttgatcagacacggcgcgtacaccggcggcaccatgcagttgtgcatcaggcagagcagggccgtggaggggagcgacgacaacggtgatatccgtgcgaggattagaaatgcggcagcattcgctagggttcacgaaggcaatgggaagcagggatgggtcatcggcacagtggagcagacgcgacactgctcaccgagtgtgaatcgtggcaatgtccgcaagaagcaagcaagcaaaaaaaacccctcagatctagagcatgaggatggctcatacctgttcgaagttaagtagcgcctcgaaaggaagaagcgagaggagaaatcccggcagg

SEQ ID NO: 177339 - DNA, 776 bp, Zea mays
  Clone ID: MRT4577_93321C.1
gcccccaatttaaaacctgtccgggaaaatcgttaaacgccccaaaaaagaagggaaaaaaatcaaaagaacgggccctaaggcccttgccaatgaaaaggtcaccttgcgctgtacccccacccccccccgctttaatgcgacctaacaaggggggtccccttcaccaatcagattgcgcaaatatttggaaaggccaaccagtgagggcccctttcctaataccccacccggcaaaaaagggattttcttcaaagccattaaatttggtaaacccaaggtttttccaatcacgaagttttaaaaccacggccaatttatttaaattaagggaccctaaaaaaaaactaatacgttgcaagcccccggacgtaaactttgatcccttaaaaccccccccccttttttttttttttttttttttttttttttttttttttttttttttttttttttttttttttttttttttttttttttttttttttttttttttttttttttttttttttttttttggtttacgaatgctcaaactggaactgacagagtaaaacatctctcctgtactacgctacgacatgcgtgctgcttctgctgctacgagacctgcgagtgctgcctcgactgcctctgctgctgctgcaactagccggggctagctccggaggacggtcgagacgcagcagatggaggtcgcctccgtctcttctacctacctaccaatctacctagtgatgatgattcagttcccgtttagtctggccacgcgtccg

SEQ ID NO: 177340 - DNA, 726 bp, Zea mays
  Clone ID: MRT4577_93322C.1
cttcggcacaccgcagcattcaaaatgggtcgtcttcactccaagggaaagggtatcgcctcctcggccattccttactccagaactcctccagcatggctcaagaccactcccgaccaggtcactgaccagatctgcaagctcgccaagaagggtgccacccccagtcagattggtgttgtcctccgtgacagccacggtatcgcccaggtccgcaacgtcactggtaacaagatcctccgtatcttgaagtctaacggcctcgcccctgagatccctgaggacctttacttcctcatcaagaaggccgtctccgtccgcaagcaccttgagcgcaaccgcaaggacaaggatggcaagttccgtctcattctcatcgagtcccgtatccaccgtctctctcgttactacaagaccgttggtgtcctccctcctacctggagatacgagagcgccactgccagcaccttggttgcttagataaccaaagtgcgacggtattcttcgttatgttgtacgagacaaatttgggatcaaattcgggtccagaatcgctagtgaaacgatatatgtttctgtcaatatttcaaagagaggcaatccacaaccgagctcttcgatcttggtcgggttctctgtacaagctatgaagttcacgattactatgtagccactcaatacatttctgggtcggagaatcaaaaaagttctaatggtcttttcatt

SEQ ID NO: 177341 - DNA, 495 bp, Zea mays
  Clone ID: MRT4577_93323C.1
aatgtattcttttttaagccaccaaaaaaaccaaaagaaaaccaccggagacgaaaacgggacgagaggcgccacacagggaacccaaaaggcaccacacacacgggcaccgaacggcaaaggaacacaagaggtaacccgaaacaacaatgggacgaaaggaggagggggggaccacggggcgacaagggaacgggaaaagaaggggaaaagcgggcacagcggacaaaaacgaaaaacggggcaaagaaggccaaaaggggaaaaaaaaccacaaaacgggccagaagccccgaagaagaaaacccggcgggaacaggagcaaaaccaagcgaaaacggggcacgagcagaaaaacccaaacggggggccaaaacaccgtaaaaacacccttggcccaccgaacggaaaccaaacccgaacccaagaggaaagggcacaggcccccccgagggccaaaaggtcccggacagaccaagagccctcccgaaaccg

SEQ ID NO: 177342 - DNA, 411 bp, Zea mays
  Clone ID: MRT4577_93324C.1
aaatatcctctgtttaaacttccatagagaacattcccacaaacacacaacctcaaaattgatcggggaaaccgcccttgggccccatttaggaaccccggccctgagccgggggggaaccatgggcccaacccaaacactaggggaaggggggcaaaagggccccttccgggctcagggtgggcccgggaaatcccaaggtttaaaaaacatggccctgaaccaaaaggccgacgccttaaggggggggtcccccggggggaagcccccggttacgaagccaaacttggacgagaacccggcgccccacccaaaggggcccaggaaaaaccgggggaaaaaacccgccacgaaccccccctggacaagggcctttttgagggggccccgggaccccctgtaaaaccgccc

SEQ ID NO: 177343 - DNA, 501 bp, Zea mays
  Clone ID: MRT4577_93325C.1
ccggccgggacccgcatcagtgcgcccagccagcctatctaccccccacccctcgaattgttcccatggccgccgccattcgcggaagccctacccgcgccgccgcgccgacccagccgcgcgcggtgctgcgggtggcgtcgtccgccgcgccagcctcctcctcctccgcccgcccgcgcaagggcgccgtggcagaggccgcaatgcagccggccaaggaggtcgacgtggaggcggactcccccgctgtcgcgctgcagatgagcaacgtcgccgcgttctccgagcactaccgacccatcctcctcgtcgagctcctcaccgacgatattgtctgcgaggatgacatcttcaagtaccgccccgcacgacgcgaagaagaaggtcctctatgtcatcgacatcgacctccacgacacgagtgcgctcgctggtcttcaaggtgctccccgacatcgaccatgacatcctcctcaacttaagggttgcccaacctgc

SEQ ID NO: 177344 - DNA, 218 bp, Zea mays
  Clone ID: MRT4577_93326C.1
gactcctaacacactcatgggatgcatgcccactgcacacatatcactaatggctcacctgtcataattctgatgcatttttaacctgggctactgctcctattactcaactttctatcatcctcctaccctgtatactcgctctctcgatcctacccttattagcataaattccaaaccccccaatgaattccatactatttcaatatctctacttt

SEQ ID NO: 177345 - DNA, 1027 bp, Zea mays
  Clone ID: MRT4577_93327C.1
aaattaaccagctcgttattaattatatgtatatatattcatttacacttcgaagtttcaccgatcaccatatatgtcttatcgcctaggagtagtaataatcaatagtacaaaatccaattaaccagacagctgatgaagtatcacctccaaataaaagccaccctacactgacaacgtacagtgatcgaaacggcggcgaccgggtcagtccgatcgatcccggccggcccatgcatcggcctcagcccgcgccccgcggcgtcatgcatggtcgtgccagcacaggagcatggagacgcacctgccgaggatgtacagcctcgtcttgtgctccttcagcacggcgttgcagcggccagcgaggccgcccacgggcttctgccgccgcccgtacgccgagcgcacggcggagccagtgacgacagaggccgagatcgactccacggacgacacccttgccatctagttgacgatgatcgatggccaagcaagctgtggccaagcaataagagagatcgatgcgcggcggcagaatggttttgcggcaatttgcaggtgcagaggaggagggtgtgaaatgacgttgtgcagatcggctgagcgtcggactaagcgtgttggtacgatgccggtggttaaatagctcaagtaggtccgagcgactgcggtgacatgtgcatcagcggtcctgccagcgagcgcccggcgtacaatgcctttcggaaggtagggcagggatgccaattgagtcgtgagatgccgcggggcagatcggtcaaacatgcatgcatgcatccgagagcccacgcgcgcccactggacaagccagccagccaccgcacgacacgacgcgtgcaatgcatggccgcccggccccatcggcgctcgctccgtcaccgtctcgtcgcccacgccagcccgcgcgctgcgctctctccagcctccaggtccaggccaccgccaccgccgccgccgcgccagcatggtattgatgcatgtgttgcgtgcccggtgacgactgacc

SEQ ID NO: 177346 - DNA, 517 bp, Zea mays
  unsure (1)..(517): unsure at all n locations
  Clone ID: MRT4577_93328C.1
ctcgaggccnnggccgggccagggaatatcatactgcaacatatcgcaccgagagaatgagagcatatccacatctggatggagcccctacggaactgccccgaagcacagggtgccgcctactgctagcgctggcacatcatggaacgtccagcgaccaccatggcggcgcgctcgacgcacgatagccgttgcccgatgtgtccctcgccacgattcctcaggagactcatctgcctccccatcatgagctacatcgtcgagacatgctagtacttatgggtgtcccactcctgtatgatgctacaactagtaatactcttcgaagctacatcatatctacacccgtggcttgagaacattactggaaatcacatctctcacatcggtgcgcctctcatgtactactctgactgacgagagcttctgtataccggatgcatggtacacctctatccattgtatggatggatggacattctacgcaaaggtattattcaaccaagtcaagaaaccg

SEQ ID NO: 177347 - DNA, 502 bp, Zea mays
  Clone ID: MRT4577_93329C.1
agctccccgctatcccctcttcctccctccctccctccctcttcgtcactgctccactccacacccagacgcaaccaccggcgacgacgaccgacgatgcttcgcgccgtcctcctccgctcagcctccggcctccgccggtcaccgatggccgccccgctatccaccgccgccgcctcgtggctcgccgaggggacctcgccgtcgccgcccagggtgcgcctcctcatcggcggcgacttcgtcgagtcgagggccaccgagcacgtcgacgtcaccaatcccgcgacgcaggaggtggtgtcccggatcccgctcaccaccgccgacgagttcagcgccgcggtggacgctgccaggaccgccttccctggctggcggaacacgccggtcacggcgcggcagcgcatcatgttcaaataccaggagctcatccgggccaacatggataagctggcacacaacattacaaccgacccgcgaaagactcttgactgatgct

SEQ ID NO: 177348 - DNA, 486 bp, Zea mays
  Clone ID: MRT4577_9332C.1
ccggccggggaaccattatgcctgttttcatcatgtccgatccacaacctatcctgcagacgctgctggttatacaatgactgacgaagaacgtggatgcctcccaagccggcctcttcgagctatcacctgctgatagttggtgtcctaatgacaacaaaggcaaagaataggacagtcggccccgcagccgccaaggagaaaacggcgaaggagaacttatgatcgacgttgtgtgaggattcgaagggcatcgacctgccggagcgcaacgacatctgcgacatctccagggactcaatgctgagctgtgcggaggcctccagtgctagtgcaagtgcaccaagcataaggccatctacgacgccgaagatgacggtgtcacaagaggagtgacgaaacgatcacgtggtccatgcgcatgaggttagccaaagaatgtagccccacatgccccaaagaaaagctccctcagcacagcctgaa

SEQ ID NO: 177349 - DNA, 300 bp, Zea mays
  Clone ID: MRT4577_93330C.1
aattttccgtgttgacgagcttactagacggcggccgccctccttttttttttggggtttttgtgagaggattttgtcaccattcccaaagagggctgggaacatgcgtcaacagacaaccataccgggttcagaaattttgtatacacagatctagatgacagcacagatacgtcaaggcgcaaacaaatatcacataaaagttcatgttctttcaactaatcactagatcgcagacgtttacataagaacggtactttcttctacccacgccagggatctgggccaaagaggacttga

SEQ ID NO: 177350 - DNA, 1777 bp, Zea mays
  Clone ID: MRT4577_93331C.1
gttgaggcgcaaatggaagaggggcgtgttcgtcttgtgcagctgcttcagagaacaatgatcagtgcaagaaaagcggatctgaaaaatattcctccttgcataaagaagataaccttcctagacttcaatgaggggcatgcaaaaagttacaatgaactggtggttactatacgccgaaatatactgatggcggattggaatgacccttctcatgtagaatcccttcttaaccccaagcagtggaaatttcgtgctgctactttgaagaatgtccgtttgtcttgctgtgttgccgggcatatcaaagtagctgaggcaggtcaggatatacaggaaacaatggatgaattggtgcaacagggccttgatccttcttcagatgaatatcagttgataagatattctcttttaaacggtgccagttgtttcaggtgtagcgtttggtgtcgcttgcctgtgatcacaccctgtcgacatcttttgtgccttgactgtgtagctcttgatagtgaaaaatgcacattaccaggttgtggatatcattatgagatgcagtctcctgagactcgtgcaaggccagaaaatccaaacccaaagtggccagtgcctaaggatctaattgaattgcaaccttcgtataagcaggatgattgggatcccgattggcaatcaacatctagcagcaaagttgcttacatgattgagaagctaagaagtctgcgagaagcacacatgaatcatgggaataacataaccaacagtgttggtcattctaatacactatcttatcaaccacaggcaatgctggacaaagttataattttttctcagtttctagagcatattcacgtgattgaacagcagctgactattgctggaataatatattcgggaatgtatagtccaatgcctctagctagtaaggttaccgtcctagtgaatgagcataaatgtgcttcaagcagccggataagttatgggaatgccaatcaagcatgggtagcacagaaggccttgcctttactaagaaatgagccttgtatagtccaatgcctctagctagtaagagaagtgcacttacgaagtttcaagaggacccaacgtgtatggctttagtcatggatgggactgctgcactggggcttgatttgagttttgtgactcgtgtttttctcatggaaccaatatgggataggagtatggaggaacaggttattagtcgggcacatcgaatgggggctacgcgtccaatacatgtagaaactttggctatgcgtggtaccattgaagagcaaatgcttaagcttttgcaggattctaacgcctgcagaaaaatagtggataaaggaacaggcagcactgacaatgaaggagggcggtcccatcggagcctccatgattttgctgaaagcagctatctggcgcaactcagctctgtgtagacaggatctaaagcaacaattcacattggttgttggtagcactaactggattcgtgatttcggttccttccttctgatcattcctttgcaatagtgatagtatttgcttcgaagccagttgttgttctcgattccaaaccagtgttgatcggggttcttttgtgtaaataactgcgttccttttgttaaacgcggtattcccagttgaagaagccttatactgggcaatatcaggattctaccgtagatttgtgcttttactaataaccttatgaactttgaacagtttaagttgaagctaacgtttatactccctctgttaagaaaaaaaa

SEQ ID NO: 177351 - DNA, 667 bp, Zea mays
  Clone ID: MRT4577_93332C.1
tcgaggccggccgggccgggtattctagcatctggctggctgcactgcactcactaacatagcctagccgaattatcctgctgatgtcatcattcacgtgctgagtcagtgtgttgagaatgcatcctacccctccctccaggctgacgtcgacaccttcacaaacctacatgtctacgcggaacttcagaatgcctccataaagtatgctctaccccaaggatgacagctaactccggctcctgttaggtggcttcatatccctcgtctccacattcaagggcgcacggtcgaccatgctcaaccagttctaccctctcaccagacgcattgtgactacctgaatgtccagggtctccaaaatccgctcgacaaaccaaagcttgttaacacgtttggcaagaagtaccatgctttctgggcatccaggacatcatctcgccaatcaccgcctgcttaggactggacgccgcaccctgaggacttcccgatcctggtgactctgcaggaattcctcgaggccgaggtctccgacactagggccacagacaagctcctcatcaagaaggacctttgcatgatggtcgccgtcatgaacttggagatggaggagaacgagatccagcacaacatccagatgagcgtcgacttcgttgtttcccttctg

SEQ ID NO: 177352 - DNA, 685 bp, Zea mays
  Clone ID: MRT4577_93333C.1
tcgaggccggccgggttcgggtgcccaccatcaacggccgcgctcgagacgagaggcgcccacggaaacggagcctcctatgccaccgggcgccgcggctgtcgccgccacctcgcaacaggccgactgctgcggacacgggcccgggcccgggcccagctggcgcggtggcggcggctgcgatgtccccggcggcgcgtcctgcagctacctgccgctgcgcaagcggctgtccgttgacggcaagttcccggcgccgcggatatgcatctgggagtgcgacggcgaggccggggacatcacctgcgatatcgtcgccgctccgatccgccgcagctgcagcgcgagggcaatgccgccgccgccggcggcctcgctcttccgccggatgatgaccccgccgccctcgcggcccaggccgccgcagagggaggtggaggatgctgtggcggctaggaggcccggggagaccatctccaagggccaccggagctacggtctcatgcttaacctgcagcttggcgtaagctattcgggtggggaagtcatcggcgctgccgttcaggaagctctcgtcatcagacttcgacccgcgggagaaggtgtggacgcggttcccgccagaggggtccaagctcacgccgccgcatcacctcgtggatttccggtggaaagactactgccc

SEQ ID NO: 177353 - DNA, 492 bp, Zea mays
  Clone ID: MRT4577_93334C.1
gttagcacgtgtctcccccatcgttgggaggggggagtgtgcaaactatcctagcccgcgcctaatggacctaacttgttcaggcgacaatttggggtctagtcaagaaagcatgaaggagctgtaccgaaagggcctcgagggcgagaccaaagtaacccggcgagaccgactgcgagagcgggggggtccaatagcacctcctcctagggcgcgatccccttaggcctctactctcaaaaagcagatctggcatgctgggtacatccttgaggtgaagaaggcggtctgagcaccacatactaatgcagagaccagcgcgcctccttggagggcaaccgcatggaccagtccatcctcaccaaatagtcctatcaccttcatgctctacacagggggccaaactaactgtgtagtgcacctacaacaacgctagagctactttcttatatggtgtggctcttagataataatgactctagcatcttgcat

SEQ ID NO: 177354 - DNA, 545 bp, Zea mays
  Clone ID: MRT4577_93335C.1
gcccgacgggcaccgtggtctctctggctgacttgatgaggacgaagaactaaaatgcctggccctctgatgttcgcctggtccagacgatcaacgctgttcagagcaccttctttcatggggagcgcgataaggcgtctggagacttagcacacggcaacgcgacctaacgcctcgacggtggctggagaggcctcctcggagcgtacacagaaggagagtgctgccgacacctcgtgctgggctcgaaagctgaagggaacaaagagacaggagtacctttgcacccttgcttgtaggatacaagaagctggaggagagggtccataccaaatgcaacaaagcaggcgcactgcctcctcacctgggtatacggtaaggactggcatctgtgagatcggaaacctgctgttgactgcttatacaatgcctgccgggctgtgaatgcggtacatagttctccaccttttgatcatatggcaccactgtccacttatataacgatttgctgaacggaatggaaccgaggcgcacctctgtctatt

SEQ ID NO: 177355 - DNA, 281 bp, Zea mays
  Clone ID: MRT4577_93336C.1
attgctaccgcaggatccttagagggtggcgtcacgcatcaccaaactatcagccgtggtgacaaacatactgctcgtcctcatgcttggatgatcatctagcgtagagatgctcagggctgcaattaacctcttgaatgactgcaagcgacatactggtactccttaattactacataccagtgcattaacgactcgctgaaggacagcgacacactagaattatacgacgtacgagctgcaacaagcaaatagcagtaagcaacatacctttatcaccc

SEQ ID NO: 177356 - DNA, 713 bp, Zea mays
  Clone ID: MRT4577_93338C.1
cccacgcgtccgcccacgcgtccgcccacgcgtccgcccacgcgtccgagcggccgagagaggccgacgcgcaccagcagatcccaaactcaccggggaggagggagtgggcgaccggcggcggcggcgatgggtttcatcatggagttcgcggagaacctgatcctccgtctgatggaggacccggacaagcgcgaccaggttcggcgggagcatgtctacaagatgaaggagcggtgcgagcgcaccaaggcggcgtggaacctcccgctgcgcccctacggcttctggaccttcgagcgcttcaactcgcagctctcctgggacccgcagatcagccaggccgccggccgccgggacccctacgacgacctcatcacccgccactccggctccccgccgtcttcctaaacacccgcgccgcaggtctacctcggcaccaataagaaactcgcccctctcaaactgattgtgattccattctcttctgttcgaaaaatgttgtcaccaaactactctactttctgtttcagtttggcatggaagcagaagttgtgtacttttattctcaagttgttgtctttgtattatgaaatgttccaataatcattcggagcactcatttgcctttaccattcgggaaattctcctagtgattacaggcgccagatcttatatattttggatggtttgtcaggggcagataattttct

SEQ ID NO: 177357 - DNA, 354 bp, Zea mays
  unsure (1)..(354): unsure at all n locations
  Clone ID: MRT4577_93339C.1
cggcttggttttctgaaacaaggacctttactggggcgctttcagtactcgggaagaggcggcngatgcgtaccacatcgctgcgatcaaatttcgcgggctcaacgccgttaccaacttctacatgagccgcttccccgtggaaagcattcttttgaacgaccttcccgtttggggcggagacaccttgcgcgccggcaaattcccgttggacttggtgcaaaccgcgagcgctggtgagatgattctcgaccgggctgctgccgctttgcaggccaccatgcccccttgcgagaaggactactggggtttggtcaccctgcactaccaacagcagcaggagcacgggccgca

SEQ ID NO: 177358 - DNA, 238 bp, Zea mays
  Clone ID: MRT4577_9333C.1
ctgctcgagggacggccacccctcggcctacagccgcggacacacgggcaacgattgcagccactggtgcctcgccggcgtgccggacatctggaaccagatcctcgacgcgtctcttctcctggcataggaccggggagagaaaaaaggtagactgtagagcaattggcgcaggtcagaggcatttcggatctaaaaattggtgattcgattatttcctttttttcttcttggaaaa

SEQ ID NO: 177359 - DNA, 793 bp, Zea mays
  Clone ID: MRT4577_93340C.1
ttgggtacctcgaggccggccagaccattttggtccaccccccacccggccaccccaccggaggcagagcagactatagactgcactgcacccccaggccccagtctcgaactatcgatacagcaggagcggccgagagaggccgacgcgcaccagcagatcccaaactcaccggggaggagggagtgggcgaccggcggcggcgatgggtttcatcatggagttcgcagagaacctgatcctccgtttgatggaggacccggacaagcgcgaccaggttcggcgggagcatgcctacaagatgaaggagcggtgcgagcgcaccaaggcggcgtggagcctccctctgcgcccctacagcttctggaccttcgaccgcttcaactcgcagctctcctgggacctgcagatcagccaggctgccggtcgccgggacccttacgacgacctcatcacccgccactccggctccccgccgtcttcctaaacgcccgtgtcgatctctgcgcagaaggtctacttgggcatcaataagaatctggtcccgtcaaactgactgtgattccattatcttctgtttgaaaatgttaccgacaaactaccatgttttctttgtcagtttggcatggaagcagaagttgtgtgcttccattctcaagttgttgtctttgtattatgaaattatgaaatattccattattcatatggagcactcgtttgcctttacaaaaaaaaaaaaaaaaaaagagacaagaaaacaaaagaaatatgcgttcttctcactgcttaagaa

SEQ ID NO: 177360 - DNA, 687 bp, Zea mays
  unsure (1)..(687): unsure at all n locations
  Clone ID: MRT4577_93341C.1
ccggccaggccgggcgtgtcctccgattttctctcctctctccgtcccgtctcggcacaaaccctacgcagggagtcgattgatcgattgcagccatgactaatctgcatatccgagcttctcaaggcatggcatctcccatcatactacaggatgcccaaaaaaataggaatgtcactgagactggtgagctgcatatcacactgaacagttatgatccacataaggacacagcgcttccgtggatctggtaaattgcctcacatccctcgacccaagatggaaagtgggcatgcttggtgatgcccatcacgctgcggaggctgacaacgtgtgacttgactacatgtatgttgacgtcctcaagaacatgaacaataacaacagtcttgttaagaaccttgccaagaagtaccatgcttttttgtcatcagagagcatcctcaagcctactccccgactccttggacctgctctcaacaagggaggaaagctccccactctgtgcactcgccaggaatccctgtaatccagggggagtgacacgaacgatacagcccagtttcaactgaggacagtcctttgcatggntgtcgcggtcggtaacctgtctatgcccgagaagcagacccaacagaacatccagatgagcatcaactctcctcgtgtctcgtctgaagaagaact

SEQ ID NO: 177361 - DNA, 158 bp, Zea mays
  Clone ID: MRT4577_93342C.1
cttttggcaacaaaaactattagtaatagctatttgggacgagacaacatcagctttcatctataattcattggggataatgggagatttagataatgtatccagatttaaacctaccagtttgtcctaccccttaagcgtttaaaataaaatatgcc

SEQ ID NO: 177362 - DNA, 292 bp, Zea mays
  Clone ID: MRT4577_93343C.1
aaaaaaccattaccattaccattaccgggcaacttttacaataagaacatgggggaagaaataaccgccgacaaatcgacccatgcccacggggccaaaaaaaaaacccccagcaacagggttttacgatgttcaaagcccggtcaacaaggagcgggtttttgcctaaactacactaaactaaactgccttgttgccggccgcgttgggaacaggggccactttttttttcaactaaaggttgttgggccccaccaaatttgccacccttttgtttttttttaaggaaaaa

SEQ ID NO: 177363 - DNA, 466 bp, Zea mays
  Clone ID: MRT4577_93344C.1
cccgggaaaaacaccaaacgggctcttgggggtataatttaaaaaaaaatatacgtccgggcgcaaaaaaacaaaagtccagacccagaaaaaaaaataacaatttttttttagggggctaaaaaaaccctcgaaggggaatcggaaggcacataaaaattacaaaaatatagagctcaataggagggattaggctcggaagttcctggaaaatgtcctgggaaaaaacgggggaaaaaaaaaattgttaaaaaaccctaagggccatggacatccttgttttaaagaacgtctccattgggaatctcaaacttaactccaggctggggaaaaatgggaaccttgcccttgagggaaattccaaagccaaaccaaacatcaccaaaaaccttaaagctggaaagctaaactatgcgggggagggacttgaaccgagcaaggaaattggaaacctttttaaactaag

SEQ ID NO: 177364 - DNA, 815 bp, Zea mays
  Clone ID: MRT4577_93345C.1
ccggccgggatttgttgattacttataaaaaaactcaacctgcggggtaagacagtctctggtcattatattaagaaaaagatcttctacaaaagccgagaaaaccctccgaacccctgcccacccatacatagaggcatcatagcccatgtgagaatgatcgtgactaggactaggccttagagctatgctttggtataggacagatgagcgatttttttaaaccatatcctgaaattcgctcccacggggagtcaaactcaggacccgagaagtgctactcagaccacctaactaactcagctagacgtcatttcacttgattacttattcaaaatgatgaactaattctactaaatttatagaagatgttatctacatttgaaattttcaattaggtttattatgaaaaatattatgtgattaacctagtgatacttggtagttggtacacgccataacaatgttttcaagtcaggtgacttgctggtcgttctggctaaccgacttggcgattaatcacgattagtcagacaacttggcgattaatcacgattggtctaaaccgacttggacgattaatcatgactaatcgcgattaatcggacgacttgaaattattgcgccataaacattaatggttttatatttatttagttaaaaataactttatttgacttctcgaaagcgagatttacattctttttggcgatggagggaggaagagcagctccacattctaattcgccctaattgataaggggggtggcccattatcaaattcaaatattgggggagaagctgcacatatcacc

SEQ ID NO: 177365 - DNA, 373 bp, Zea mays
  Clone ID: MRT4577_93346C.1
agattgggttttttttttttttgtttttttttttttttttttttttggcccacctcaaacaaacaaatcaccattggatttttcataggataaacttcaccccccgcccaacacttttatcgtccaaaccccggaggctacaactcaaggaacaagttactactttcttacaaacaaccctttcattttccatttacactaaggaacccctgtcaacttttccacccttttgaacaactcctccacggggacccccattccctttaacaccccctccatttttctccccctaaaggcaaagaaaaactccatcaggtccccctccaagaaattcccaacctcccccctttttttttccttattaaaagacccc

SEQ ID NO: 177366 - DNA, 432 bp, Zea mays
  Clone ID: MRT4577_93347C.1
gcttggaacctttgggctgatttatgtgcttgcttatacttagccgcgggggtcaacttgacctttatcgtttaaaatttcattcttacgttcgtctgtatgttcgtggtccttctctagtagaatggcgttataatttagatacccttagcctggtgtagcggtaattgcggaaacggcagtaacggcggtgctagggtcgttaacagcagtggaggcgatgggagtagtggtagcggcggcgacggcaatcggaacgacggaagttccggcatcgatagtggccgtaatagtagtaacggtgacggctttactaacccggacgacaacgctttcggtatctgccgcgtttgcgggaacgataacgatagtagtagaaacttcctcggtaacggttatcggaattataatacatgagggggcggcggcggc

SEQ ID NO: 177367 - DNA, 421 bp, Zea mays
  Clone ID: MRT4577_93348C.1
gcaagaagggcccaaataaattgataaaagtgcccaggctaacagagctcaacagttcacacaataacagcaacgaccacaaacaaaacttggaatggtgaaaactaggttttgctaaagcaggcccaggatcccattatttttttttggcagcagccttggtcaccttggcgccgggtgggtcctttttttccacacttttgataactccaacaggaaccgtttgccttatgttacggacaggaaaccttccaaggggaggattcccttaaaatgtctccaccaccatgggcttggggggtattatttttaccataccaacattaccgttttttaagaactttggctccttttaaaacttcttgccaaaacccctgtcgatcttggtaatgagctcaacaaacttgacagcgatttgggg

SEQ ID NO: 177368 - DNA, 430 bp, Zea mays
  Clone ID: MRT4577_93349C.1
acggaaagagtcaaagcccgtctcgaatagcttactctcattctgatctctttcaggtttcgtattctatatatactagagcacaatacttgcctgatgtctaacaatatgcattgccatactcatttcctcatagattcttctggattattttttgacaatagataatcattttgatgaaagtccgtagctattctgtaatctaattcagaaccgatcaataattcattttttcaaagataaaaacaattacataacatatgggcaaagattgtcataatatgttcaaacatgaaccatgcaatatatacatccatactttacaactgtagtatcagtagaatgcacagacataaatattatagtagtaaaacacattcttagcaagttattgccattatattaacatcattcacagttacacaccact

SEQ ID NO: 177369 - DNA, 1136 bp, Zea mays
  Clone ID: MRT4577_9334C.1
tgggtacctcgaggccggccgggcctggatctcttctcgcgctcgctcacagcaaccggcggcgacatcactctcactactgcagctcagctcagcaagagaattgttcgatcgatcgtcgtcgacgatggccgccgcctcctcctcgcagcaaccaccacgcctgctagtactcgtggcggtctcgtgtctcctcctgcagagcgccatcaccagcagctcggcggagtcgtcgatgcagtgccacgaggaggaccaggaggcgctgctggccgtgaactccgcgctgggcagcccctatcacttcgcgtcgtggacgcccgacaccttctgctgcgactggtacgacgtggactgcgacaacgtcacgggccgcgtcgtcggcctcaccgtcttcggcgacggcaacctgacgggcgccatcccggacgccatcgccaatctgaccaacctccgcacgctggtcctgcgccacctcccgggcatctccggcggcatcccggtctcgctcgcgcagctcgccaacctcacccagctcaccatctcctccaccggcgtctccggcccggtgccgtcgttcctgtcgcagctaacggagctcaccctcctagacctctccttcaactccctcgacggccccatcccggagacgctcgccgacctccccgccctctccagcatcgacctcagccgcaaccgcctctcgggccccgtcccgccgctgctcctcagcaagtacgtcgacgaccaggcggcgtacctcgtgctgtcgcacaacaacctctccggcagcatccccgccgggttcgcctccgtcagcttcgcgtacctggacctgtcgcgcaacgccttcgccggcgacgcgtcgggcgtgttcggcaaggggaagccactgcagcacctggacctctcccgcaacggcttcgccttcagcctcacggccgtggacctgccggagcagctggcgtacctggacctgagccacaacgccatccacaggtgcttgtgtggacctccgcttgctgatccctgcaaatgaagtgacagtcgtgtaactcttgtgatcaaactattgttctaataaaggaataaaatctattattgcctctgtcaaaaaaaaaaaagtccacggctag

SEQ ID NO: 177370 - DNA, 713 bp, Zea mays
  Clone ID: MRT4577_93350C.1
aacacaaatggtagggtagataaacgataagagtaaacatagaatcgaactcgatgctaatagatttgcagaagatggagcaacaatactacggtattcagacacaaccaaaaaacagggctaaataagtttaacaaaaccagttaaggttatttgcagttaaacaaagaggaaacaaacaaactaactaactactgaaagttctgaggctcctctctctctcaaatcctctggcttgtttgctttagtagccaccaccaccgccaccaccgtaaccgccaccaccaccaaatgatgatctcggggcactcgatctttcggttgcaagattcacacggatttgcctaccattcagctcctttccatccatttcttttatggcattgttagcagaatcctcacagctgaagctaacaaatccgaatcccctcgacctccctgtctctctgtctgcaatcaccgttgcttctgtgacttcaccaaagctagtgaaagcttgctttaaggagctgtcatcagttccccaagagagaccaccaacaaaaagcttagaggacatgtaacgaagagagccaagcatagatgtaactggaccatttgagctctgagaaaccccttgtctcaagataccgctaagtttgttgcagaaagccatttctaaatgtcttagagaagggaatggcgaaattagggttttagcgaagtaacagtga

SEQ ID NO: 177371 - DNA, 637 bp, Zea mays
  Clone ID: MRT4577_93351C.1
gcacgagcccgcacctgctcggctggtcctaacccggagccacgaaggcgatccatggcggcgacgggtttgctccgacgtgcggccgcgtcgtcgctaccccgcctcccttccggaatttccctcatacagcctcctctccctgcacctctcaccgagtcgcagtcgctcgtgatccccggcatcggcgccgctgccggaccagccatggagctcatggccgtccctaagaagaaggtctccaagtacaagaagggtttgaggaatggacccaaagccttgaagtctgtgccggtcattattcgctgcaggtgctgcggccgagtgaagctgcctcacttctactgctgcagcggagaaagaggaaacccaagcgagtcaagctcataaatgttttgctttcctactctggggcctgggcactatgctaattctcaactctgcatatcgtaataccactgaaataaattctcaaatgacatttggtatttcacctattgttctgtacacttactatagtttgaattgaaagttctctctgctcgtggcaagaacgtacacttatgatataagtgcctatattgacgtaatactagtttgaattcgaagtaaaaaaaaaaaaaaaaaaggcccctaa

SEQ ID NO: 177372 - DNA, 522 bp, Zea mays
  Clone ID: MRT4577_93352C.1
tacaatcccagatcgctgaagattcgcccagctagccggcggtgggcaggccctcgtctgcagatcgagcagaggtgcaagcggcagccctttgccctgctctttcatgttgttcatctttcaacatctccggatttctctccgtccgggcagcaggcgcggcgatcaatggacgactatcaagcctatgatgcaggatctactcatgctgctaccggcgtcgtggcaagaatatctgatggtgagtttgtgctagctgctgcaaggggatacgacaatattcaaaatcccctgacagctgaaacgctcgcttttagagatgcaattactgaagcagtcaaagaaggatggcagcatgtccattttgaaacagcttgtcaaataggtagtggagaagctaaggaaaatgctagtaacttagttccccttaaaggcgactggtattgttccttcaccatatgatgcttgatttgtataacttgattctgttttaccaatagcataaagtacccaggcctatga

SEQ ID NO: 177373 - DNA, 378 bp, Zea mays
  Clone ID: MRT4577_93353C.1
aacaacttatggatctttgcgcccaccttttggaaaacatcgtctgaagattgtagaagggatctctgtgctgcttacaagtggaaatgaaactgctgaaaaagagctaaaaaaggcgtcagcaataaaacgccccaatggtttggtctttgaagattcctataacaaccttttgcccccacatggtgggaatataaatggtggctggccggaggggaaaaaaacctgaagtggtgagcatgtccttcatgaatgtgataatgtgggtaaaattcttgcctcaaaaaggttttcatccttgtcgactgagtctaatgggcctactggtccctctgaagggaaaacccctccaagaattggaaatggtggtcacatgac

SEQ ID NO: 177374 - DNA, 645 bp, Zea mays
  unsure (1)..(645): unsure at all n locations
  Clone ID: MRT4577_93354C.1
aattcggcacgaggtttctaaaccttttgtttaagcaatggaaacatgtcccactctcaaacattcttaaaaaagtttcatttatgcacaccacactctatgcactaacaactcctagggttataataacatagttgcctgtgtatatatctgaaatagcaccaatgggtattcgagtaggccttgcaacctcaaaccaggtaagagaaattggatgtgaattgcctcttattatttttatatgtagtgaatcttagtaattaatatgggctcttctgaatatgcggttattcatctgttcagggtgttcagctgcttacattattggagcacttgtttcatggcgctgtttggttgtagtaggattgatacattgtgttgtcctacttgttgggcttttcttcattccagagtctccaaggtggctggtgagatggtaactgactctgcatgtaacatggttgtgttgtgatgtattttttgatcgcttattctgttctgtcaagaatataccattgtattttgctatatatgtggtgcaatgcatgctattttcagaagggttgcaacattcaagtatcattctaaaacctctgaaagaacttaccttttgttntcattgagtagtcgcattattaacatgac

SEQ ID NO: 177375 - DNA, 278 bp, Zea mays
  Clone ID: MRT4577_93355C.1
gctgagtcgatggatctaattagggagttttatatgcagagcacctaatgttaaaagtacaaatatctgcgaccagtttagatatatcaaaagatactagtttgatgtcataaattttggcgccttttttgtatgaactcgattggacttgaataaagtcccgacttaagacaactttataaaatgacgtaagacgaggccagcaggtcttggaaggagcaagcggacagagcctgtccgaacgcttttttagcagcaccgtaagcgcggacgcgtgg

SEQ ID NO: 177376 - DNA, 184 bp, Zea mays
  unsure (1)..(184): unsure at all n locations
  Clone ID: MRT4577_93356C.1
gggggggnnggccggccgctcgaggcggncggtcgggctatccctaaaccttcgctccccgccgactcgtccacccgtcgccggcgcgctgacactgccaccgacagagagattgcgacctgagaggacccgcgaaaatcgagctgatcccggatataccatcgaccgagaacaacatgatctg

SEQ ID NO: 177377 - DNA, 374 bp, Zea mays
  Clone ID: MRT4577_93357C.1
agatctgtactggtgatcttttttttaaatacaaatgtttatacttcaggatgttcctgaacataccagcaaaagaaaagttgtttctagctagacttactatactgataagagaaccgaattacaaactagcaaatgagtttataggttgtgtacatttgactcaccctccagctcgaaaaatcttagtaacttgactgccagcccagaccattgtcattagtttaacaaacctttcaacagctgcaccataacccatcctaccaggtgcaggcgcaacataaaaccagactaacaaaaatgcagtcacatagtagacagggttaagtagtccatattgcagaaccccagccacaccctatttttttaggttt

SEQ ID NO: 177378 - DNA, 145 bp, Zea mays
  unsure (1)..(145): unsure at all n locations
  Clone ID: MRT4577_93358C.1
cctggggttgttgttgcaggaaggactgnaggaccacgccgaatgttgcctggaaccggggcaggggttccacctgcctgatcggggggaagaattgttgctgcagggcctggcactggggcgagccgaagggcgtcgccgccgg

SEQ ID NO: 177379 - DNA, 272 bp, Zea mays
  Clone ID: MRT4577_93359C.1
cggtgcgcccctccctttggttggctcctctcttgcggccgcgcttgtgtggttttttttttgccggggcgcctgggggtcgctgttccttgttcccgggttggcggtggtgtggccgttcgcgcgcgcgccgttgcggtggccgcgcgtgccgcgcctgccgttcggtggcgccgtggcggctcctgtgttggggtgggggcgccgtctcggtggggttcttgcgggtgctctgggcctgggcgctggtgctttggtgccctcccctttgc

SEQ ID NO: 177380 - DNA, 163 bp, Zea mays
  Clone ID: MRT4577_9335C.1
cctaaattcccgggtgaggccactcgtacttcaatatacccattacatttatatgcttttatatgtccgaactgcgcatatacatgaggggttggcccggaggggggggtatacttatgttacctactactggtcacattgtcatgcattaaacacattcata

SEQ ID NO: 177381 - DNA, 376 bp, Zea mays
  Clone ID: MRT4577_93360C.1
attcggctcgaggctcgacctccgtactgatcgtcgctcaccgggaagctccgctgcggcgaattatggcgtccgtcaccgcccgcgccccggtcgcagccctgcgcccgtcgtcgggtcggcctgccttggccactctagccgtctaggccgcactgctaccgcgtcgacgacgaggcggagcctaaaggcggaggccaagggcgagaggatgccgggccttacctcccccgcctacctggacgggagcctgccgactgacattgggttggacccgtcgggcctggcggaggacccgaagaacctgacgtggcacgtgcaggcggaactggagaacggccagagggcgatagcttgcgtgcccgtgatgctgacc

SEQ ID NO: 177382 - DNA, 291 bp, Zea mays
  Clone ID: MRT4577_93361C.1
cactaactaccctatccatgtttaggagggcagcctacaccttatcggctcaggtcggacggacgtataatgataaaaggttcgagaggcatggtccagtacaaccagcgccttccactcttggctgcctcttcgatcagtcaactgtgccaccttctgcaccatctactacacctacgcacgggaagcgtcctctagcgaacaaaaaccaggtcgccatacataataacctgtacccacacgtacggtaggccgtagcgaactttcctataccgcagggcataaggacct

SEQ ID NO: 177383 - DNA, 362 bp, Zea mays
  Clone ID: MRT4577_93362C.1
aaggctcacactaacattgacatcaacgctggctgcacagccaactgcctagctaattgggctgatgctatcgatgacgagatcagtgtcaaggacggtctgatgaccactgtgcataccattactgatacccagactactgccgataggacctcatataaggactgaactaatgacaggactgctagaaggaacattattcccaacatcactggcactgctaatgctgctggcaaagcgcttgctgtactgaacggtgagcttaccggaatgtcgactcgagtgccaaccggcgatcgaaccgtcgatgattctactgttaagcttgcagagtcaccagcctatgatgagatcaatgatga

SEQ ID NO: 177384 - DNA, 1722 bp, Zea mays
  Clone ID: MRT4577_93363C.1
aaattctcttggtttcttctttctcctcccaataaacacacccacccggtcgctccgctccaccgttccgccctcgaccgcgcgcggagcctcctcaacccttcagacctccgcctcccaccgcttccgtagcctcgcgccctcgcctcgcctcgcctcgtccttctcctccgtcccaaccatgagggagatcctgcacatccagggcgggcagtgcgggaaccagatcggtgccaagttctgggaggtgatctgcgacgagcacggcatcgaccacacgggcaagtacgccggcgactccgacctccagctcgagcgcatcaacgtctactacaatgaggccggcgggggccggttcgtcccgcgcgccgtgctcatggacctcgagcccggcaccatggactccgtgcgctccggcccctacggccagatcttccgccccgacaacttcgtcttcggccagtccggcgccggcaacaactgggccaagggccactacaccgagggcgccgagctcatcgactccgtgcttgacgtcgtccgcaaggaggccgagaactgcgactgcctccaaggatttcaggtttgccattcattgggtggaggtactggctcagggatgggcaccctgctcatctccaaaatcagggaagagtacccagataggatgatgctgacgttctcagttttcccatcacccaaggtgtctgatactgtggtagaaccttacaatgccacgctctcagttcatcaacttgttgagaatgctgatgagtgtatggtcctcgacaacgaagctctctacgacatctgcttccgcactctgaagcttgctacacccacttttggtgacctgaaccatctcatctctgcaaccatgagtggtgttacctgctgcctgcggttcccaggccagctgaactcggacctccggaagcttgcggtcaacctgatccccttcccccgcctccatttcttcatggtcggcttcgcgccgctgacgtcaagggggtcccagcagtaccgcgccctgaccgtcccggagctgacccagcagatgtgggacgcgaagaacatgatgtgcgcggccgacccgcggcacgggcgctacctgacggcgtcggccatgttccgcgggaagatgagcaccaaggaggtggacgagcagatgctgaacgtgcagaacaagaactcgtcctacttcgtggagtggatcccgaacaacgtgaagtcgagcgtgtgcgacatcccccccacgggcctggcgatggcgtccacgttcgtcggcaactccacctcgatccaggagatgttccggcgcgtcagcgagcagttcacggccatgttccggcgcaaggccttcctgcactggtacaccggggagggcatggacgagatggagttcactgaggccgagagcaacatgaacgacctggtggccgagtaccagcagtaccaggacgcgacggcggaagaggaggaggagtacgaggaggagggagatgaggtggctgcctgatccaccggcacattgtggggttgtgcacattgtggggttgtgttattactgttgctcttcatctggtgtttaaaatgttactgtgatgctgctgcgaaactgacgtaagttttaactgtggaattgattacttctagatcgtggatttgtcgatctgatattagatgtattctatatcttggtatcaaaaaaaagaaaacaag

SEQ ID NO: 177385 - DNA, 405 bp, Zea mays
  Clone ID: MRT4577_93364C.1
gagactcaactgcatcataggctgcactctcgtgtgcgaactttgggcaccacgctggtcgcactgcttatgctacacgaccgctccgcacgcgctgctaccatgaccatcttggcggaatgcttactggctactatagcggatctacttccggcataactctgaccatcgacgtcaccaagatgtgcattcgaattccatcaacgctacaggacactagatgtagcgacagcactgatcataatgtataggagcgtaagacgtcgaacacatacatctcatactacctcagatgcgtatagagcttatacagacacgttgcatgtcgatgctcagatacgtctactgcagctattaaaccttgctgccttagcatatggacaactggaagctttggcgcaatta

SEQ ID NO: 177386 - DNA, 325 bp, Zea mays
  unsure (1)..(325): unsure at all n locations
  Clone ID: MRT4577_93365C.1
agcgcctcacgggatgcatgcagatcttcgtgaagaccctgaccggcaagactatcaccctcgaggtggagtcctcagacaccatcgacaacgtcaaaggcaagattcaggacaagganggcaatcccccaagaccagcagcgggtcaatccttgccggaaaacaacttgaagaacggcgcaagccttccgactacaacatccaaaaggagaacaacctccacttggtgctgcgcctcaagggaagcatgcagatcttcgctaagaccctgaccggcaaaactatcaccctccaagtggagtcttcaaacaccatcgacaatgtc

SEQ ID NO: 177387 - DNA, 381 bp, Zea mays
  Clone ID: MRT4577_93366C.1
attatacggtaaggaacctttcaaatgtgcacaagtatccccaaagaacggaaattcacgtcgtgcggattgctccattttccgctccaactttccatacaggtataaaaccaaaaaaccacaaaagaaaagcaatccagttaaccaaacttcaacacattattttccacccaaggaagcattacaaaaacaatttcaataatgtgattagcataacactaggattcccattttaagacaaaaccttaaattttaggccaagtaactggaatcgcccattcccacaccttaaaagtttgcccaccaattcaccataattaacttgccaatccacttagtttaaaccatttcgaaagctatttaaatttttttaaaccaatt

SEQ ID NO: 177388 - DNA, 310 bp, Zea mays
  Clone ID: MRT4577_93367C.1
ggataggattaaaggttgagagtagaggtcttgttttttttttattcgggcggccgggccacctgttatttcgccaaagacaccagaaaaaatttttttgtttttcaacaacacacggggggcaacaaaagaggaccccaacgggaagaaagacctccaccaaaagggcggtcacgcccccacagggatggccacggaggccaaccacacaaacaatcggggtcggaaagcctacgccatcgggccactaagaaaaaaaacctgggacacaataaggtgaccaaatggcctacttgaactggagggcagc

SEQ ID NO: 177389 - DNA, 1992 bp, Zea mays
  Clone ID: MRT4577_93368C.1
atggtcggctctggagagtcgccggcgatggtaggagatgacgttcgtcttgatccagagacagagggagtagttgatggtaactcactggtcacaccacctcctgctctactgggtcctgtgatcgacgagatgagcataggggaagaaggagaacaaagggttcgacctcctatgtccaatattagctccagggagatggatacgcctcaaatactgcattcacatgaaaaaaacattgatccaactatagtgccaacggtagggatgactttcaaggatgttgatgatgcatatagattctataaaacgtatgcatatgaagttggatttccactgaagaaatacagagagaagacatttagtaagtggataaattgttcacgtgaagctgcaaaaattgaactggtaaacttggagcataaccatgagttcataactgacgaagcagagaaacaacatttacgttgcaacaaaagtagggatgctgagttcataaattttgttgatgcaatgcatgatagccgagtgccgcagcattgcatagttgattttatatcagaaatgcatgatgggccggagaacgtaccggtaactgctcaagatctgaaaaacatgagggcagcaaggagaagagaaaactgcgcaaatgatgtagccaaacttttggctttctttacagaatgcaagaaacagaatccacaatttttttgtgatttccagctagacaatgatgggaaaataggggaatatgcaaattatggtgatgctgtgacatttgatataacacacaagacaaatatatatgataaaccactgggcatatttgttggagctaacagccatctgcagtgtacagtgtttggatttgttttgttgggagatgaaacagtacagacttttgaatgggctttcaattcattcaaaacatgtatgggatgcgagggtccgagagttatgcttacagatcaagatcccgcaatgccaattgctctaagaactgtatttccaaaaacagttcacagactgtgtttatggcatgtccagaacagatttatgccattcctaaatgagatatatgcaagcaggaaaatgaaagaatcaaaggaggtattgatgagcaagggaccaaggacaatagatacattgtataggttcgaagtgagagtctctagagcatacaccagagctgttatgaatagatttgaggaatcaatgaaatacgccactgcatacaaaatattaaaggacgcagacggttgtgataaagattggatcgtacagcatacaaaaaggtctaataaaattgtgtggggacaacatcgattcaagataacagcgaacatagaagctggggagtatacatgcgagtgcaaacagtgggaacatacaggtctattgtgtgttcttcttttaagagccttcatgcatcttcaagttgaaaagataccttcaaagtatatattgcaaaggtacactgtctcatcaagaaaagatgtaccgtttgaaagaattgataagagcttcagaggaaaggatggagttactaaatcatacagacagaaaatgttgttaacgaaaacaatgaaagtagtttgccaggcgtgtatgtcaaaagcagggtacgacaaggcgatggatgtgttggatgagctcgatggcgttatatgccgattagagccaaatattggatgtaatgagtcatgtgattttagtgatgatgaggaagacaaggaaggagaattgaacaaaaataatactggcgatgggatggaagatgacaatacaattacatgccataaaatggatgagcataacaccatgactggatgtgaacatgcgttaacattaataacagctggtaaccaggagaacaacatgagaattccacctgaggttggtgatacaagttctccgtgtcacgtaacacaggaacaaatggaacatattgctgcatcctcagaagctaaaaaggtgagcattgataaatga

SEQ ID NO: 177390 - DNA, 1245 bp, Zea mays
  Clone ID: MRT4577_93369C.1
atggagatggccggctctggacaatcgtcggcgatggtaggagatggcggtcatcttggtccaaacactgagggagttgttgatggaaacttaatggttacaccgcctcctgctctactggggtctgtaatcgatgcttcaagcatgggggatgaagggcaacaacgaattcgaccgctaatgtccaacattagctccagggagatggatacgcctcaaatactgcattcacatattgttatgatcatattccatgctgcaaaaattgaactggtgaatttggagcataaccatgagttcataactgacgaagcagagaaacaacatttacgttgcaacaaaagtagggatgctgagttcataaattttgttgatgcaatgcatgatagccgagtgccgcagcattgcatagttgattttatatcagacatgcatgatgggccagagaacgtaccgctagacaatgatgggaaaatagtgagcattttttggtcacacgcaagtatgcagggggaatatgcagattatggtgatgctgtgacatttgatacaacacacaagacaaatatatatgataaactactgggcatgtttattggagctaacagccatctgcagtgtacagtgtttggatttgttttgttgggagatgaaacagttcagacttttgaatgggctttcaattcattcaaaacatgtatgggatacgagggtccgagagttatgctaacagatcaagatcctgcaatgccaattgctctaagaactgtatttccaaaaacaattcacagactgtgtttatggcatgtccagaacagatctatgccattcttaaatgaattatatgcaaggtttgctgataaggattttaaaacaacattccaatctattatacatcatccattaactcctcatgagtttgaatgtgcctgggaaatgatgctagaggaattcaatcttcatgaagatatgactctacgcaaattatatgaaataaggaaagaatggatactagcattttttaaaaatgacttctgtggggtaatggtgtctacacaacgaagtgagagcatgaacagattagtgaagcaaccacatgtagatgcgaacacccctctgcatgagttcgctaaacacacgatgaaaatgttgcataacaggaaaatgaaagaatcaaaggaggcattgatgagcaagggaccaaggacaacagatacattgtataggttcgaagtgagtctctag

SEQ ID NO: 177391 - DNA, 592 bp, Zea mays
  Clone ID: MRT4577_9336C.1
ggtacccgcggccccctctcgagttttttttttttttttttttttttttttttttttttttaacggaacaaagccttagcagtagcacaagaatgtaacaatcccgttcacaagctttaataattttttaggtcttaccacaactagagctacaaaaaacacaaaatgatcgggcctcccaggaagataaatccatttagcaagaagtcaagtgttgggcgatattgaaaggtagggccctcgtccatcgagctgacgtaaaaggaaataacgtacgtggggaagctgacgagtcaaaggaccgacgatggcctcgtttacagacgggcctcgctgtcctcgtttgcagacgcgacatacctatgatgcggatgtgcctccgccgccgtgccgcccgtgttgcaaacaccccgttgcctcgattgctacccacgggggaatggttgagtttgggcaccgttccccgaacccgtttcctttttggaagatttcgtaatcggtagtaagggggccaatacacgagggacgccgccgccagccaccggacgcagccgggaccccgggatccccaaatgttccctcgtgccgaatt

SEQ ID NO: 177392 - DNA, 744 bp, Zea mays
  Clone ID: MRT4577_93370C.1
ccggccgggattgtgcgtaaattttatattatgaattttagtttgacaaagacgtcgccataatatcgggacgtttcgaaaataatggggagaccctgtaaacgtggatgcggttacttttatagtatccgagatttactttcattcggaaaaaaagaccactgaggctgcataactaatcggagttggagatggccggctctggagggtcgccggcgatggaaggagatggcgttcgtcttgatccagagacagagggaggagttggtggtaactcactggtgacaccaccgcctgctctaatgggtcctgcgatcgccgagatgagcataggggaagaaggagaacaaagggttcgacctcctatgtccaatattagctccagggagatggatacgccacagatactgcgttcacatgtaagtccaatcgctgtatttgattattgattgattatattgttgtgaacatattccatggtacaaacaacaatgacaatgaaatagcagacaaaaaacattgatccaactatagtgccaacggtagggatgactttcaaggatgttgatgatgcatataaattctataaaaggtatgcatatgaagtttggatttccactgaagaaatacagagagaagacattcagtaagtggataaattgttcacgtgaaggttaaaagtgcagcaaaatcaaatgatacacctaggatgaggaaatagatcatcaggggcgtacgcaatgc

SEQ ID NO: 177393 - DNA, 2848 bp, Zea mays
  Clone ID: MRT4577_93371C.1
atggccgactctggagggtcgccggcgatggaaggagatggcgttcgtcttgatacagagacagagggaggagttagtggtaactcattggtgacaccaccgcctgctctaatgggtcctgatatcgccgagatgagcataggggaagaaggagaacaaagggttcgacctcctatgtccaatattagctccagggagatggatacgccacagatactgcgttcacatgcaaaaaacattgatccaactatagtgccaacagtagggatgactttcaaggatgttgatgatgcatataaattctataaaaggtatgcatatgaagttggatttccactgaagaaatatagagagaagacattcagtaagtggataaattgttcacgtgaagctacaaaaattgaactggtaaacttggagcataaccatgagttcataactgacgaagcagaaaaacagcatttacgttgcaacaaaattagggatgctgagtacataaattttgtgggtgcaatgcatgatagccgagtgccgcagcattgcatagttgatttcatatcagaaatgcatgatgggccggagaacgtaccggtaactgctcaagatctgaaaaatatgagggcagccaggagaagagaaaattgctcaaatgatgtagccaaacttttggctttctttagagaatgcaaaaaacagaatgcacaatttttttgtgatttccagctagacgatgatgggaaaatagttagtattttttggtcacacgcaagcatgcagggggaatacacagattatggtgatgctgtgacatttgatacaacacacaagacaaatatatatgataaaccactgggcatgtttgttggagctaacagccatctgcagtgtacaatgtttggatttgttttgttgggagatgaaacagtacagacttttgaatgggctttcaattcattcaaaacatgtatgggaggcgagggtccaagagttatgcttacagatcaagatcctgcaatgccaattgctctgagaactgtatttccagaaacagttcacagactgtgcttatggcatgtacagaacagatttatgccattcctgaatgagatatatgccaggtttgctgttaaggattttaaaacaacattccagtctattatacatcatccattaactcctcatgagtttgaatgtgcctgggtaatgatgctagaggagttcaatcttcatgaagatataactctacgcaaattatatgaaataagaaaagaatggatacctgcattttttaaaaatgacttctgtggggtaatggtatctacacaacgaagtgagagcatgaacagattagtgaagcaatcacatgtagatgcgaacaccccactgcatgagttcgctaaacaaatgatgaaaatgttgcacagcaggaaaatgaaagaatcaaaggaggcattggtgagcaagggaccaaggacaacagatacattatataggttcgaagtgagagtctctagagcatacaccagagctgttatgaatagattcgaggaatcaatgaaatacgccactgcatacaaaatattaaaggacccagacggatgtgataatgaatggatcgtacagcatacaaaacggtctaataaaattgtgtggggacaacaacaattcaagatatcagcagacatagaagctggggagtatacatgcgagtgcaaacagtgggaacatacaggtctattgtgtgttcatcttttaagagccttcatgcatcttcaagttgaaaagataccttcaaagtatatattgcaaaggtacactgtctcatcaagaaaagatgttccgtttgaaagaattgataagagcttcagggggaaggatggagttactaaatcatacagacagaaaatgttgttaacgaaaactatgaaagtagttcgtcaggcgtgtatgtcaaaagcagggtacgataaggcgatggatgtgttggatgagctcgatgtcgttctaagccgattggagccagatattggatgtaatgagtcaacagatgttagtgataatgaggaagacaaggaagaagagttgaataaaagtaatgctagcgatgggatggaagatgacaatacagttacatgttatgataaggattcgcataacaccaggactggatgtgaacatgcattaacaataataacaactggtaaccaggaggacaacatgagattttcacatgaggttggtgatacaagttctccgtgtcacgtagcacacgaccaaatggaacagattggtgcatcctcagaagctaagaagaggttgaattttaatgtggatgttataaatctgaggatgccggatcgtgcaagaccaaaaggacggacaataaaaaatatagaagataggattatgaaactaggtgccaaaagaaaaaaagaagaataggagatgccaattgtgtggaatagcagatggacataacagcagaacgtgtctgtctgtggaagagaacagggcaagactagcaaaactggctaatcgaaagagaggacgaccggccggatcaagactaaacaataaaacaactgctccacagtggaatgaaacatcgactgctaaaaaacatcgtattgatgaagaagtagaaaatgaagaagccgctgagcatctggatttgggcgaataatttgaagtgtgactaaagggaggtcgatgaagtataaatttgtaatagcacaatgacctgtgttttagttttggaaattaatattttgcatgactgagttagatctacaatgccatgctctaaaactgattcaaacagtcacaacggttatggattcaacaatta

SEQ ID NO: 177394 - DNA, 427 bp, Zea mays
  Clone ID: MRT4577_93372C.1
tcgcccacgcgttcggccacaacagcctacagttattttctgcgtaccaaagttgtcggagaggaaattctccggctggatggcggaacgtactcgtcataaatcctaagatgatgaggggcctaagcgttttgcctgctagatggattcgagatgaacacaagaacacacaagggtttagagtggttcatgccgtcggagcgtaataccctactccactgtcggtgtattggatgagagtctgagtgtctgagtgagtgtgtcctgtaacaatcggtgtcctcccttttatagctcaatggagacacgtacaaggatactgagccccgacatgtgggcccagaggcagaatataaggaagaaactaatgtatgttacgcctgagcgatcttcgagcgccattaacggcatatgtcataattttatt

SEQ ID NO: 177395 - DNA, 377 bp, Zea mays
  Clone ID: MRT4577_93373C.1
ggcttgtgtgttgttcccagggtttctaaaccctccttttcttcttgatgagacacaactctcccccgtgttcgagaaaaaacatttagtgctagtcatttcttctaacactttattagattaatggcaatagagatggaaagcattcaagttagggtccatcacatgcatttgccacatttgtctaaagaacattttgttcttcaaatccaacagtaaatagttggtggaatgttattgagcatcttgggtgagttaaatattgacttattgggacagactgtcaggtgctgttgttgccatagcagtctaaagagcattttgttctcccaatcccacaatgaatactttggtggaatgatctttattgggtgagt

SEQ ID NO: 177396 - DNA, 221 bp, Zea mays
  Clone ID: MRT4577_93374C.1
cttatacatactaatttgggttattttgggcccaaaggggggttttacattccccatgaagggacaaaactaatgcgcgcgagtagttaaactcacatacttcattggacattaagagtctacataaatccatggatgcgcctggacagcgttattgtatgagtgggggttatcccacggctactctcatcatttccaacatgtatcaagtacctgcattg

SEQ ID NO: 177397 - DNA, 231 bp, Zea mays
  Clone ID: MRT4577_93375C.1
tagatcgcgagcggacgccctttctttttttatgttatctgcatgctcgcgtgaagaaggaggtgtccttatctttacgatcgtggaagggtgttagaagtttttaatttagcctattattgtttctgttcgttaaggtactattatgaatattgaactaaaaattgaagtttatttttttaatagatattctagatgtgtcaaaattaagcttttgataatggttataca

SEQ ID NO: 177398 - DNA, 736 bp, Zea mays
  Clone ID: MRT4577_93376C.1
ccctcgaggctgggcggggctcacctcggcctccaaagtgctgggatacaggtcatgagccaccatgcctagccaggttctttatttaaatattttgttttctagctttaaggaaaccttttctttctcttaagctacttattagtttacagtaatttggtatactttgtgaacaaaggtggaaacatttttttgtccctatttgattcctctaaaattcagaaactatccatgagtattcttattttttatggcaagaattatttacctaagtttaataaaatttgctctctctttataacaggatgcagttggaaacattggttatatatattaccaaggctttaactagagcatcatatttgagaatgtgcatataatgcctggcttcaagggttcccagccttacagtgagtaaggctgttaatacatctgttcttagattatagccctgtgcattgtctttgagttcctgttatacactggtagactgaactaaatcttaaattcttctagattcctcccatcttttcttccatgaaattagtaaaaacaggaactgctctgttcctgaaatcctaaaagctaaaactagataaattttaaggggcaagtctcatggctgatgatgagtcacacagaaagttcaccaaaccatccagtgccataaccagacattcaaaactgaaaaccagggacataaggtgacattttcatgctgcagacagctttttcc

SEQ ID NO: 177399 - DNA, 936 bp, Zea mays
  Clone ID: MRT4577_93377C.1
gtggtgtcgcgtcgcatcgcgtccgcccttcgccgcagccgtcggtccgggcccggccctccctagcgcggcgatggatacggaggcggtcccggcgctggcggtggtggacgcgcggttctgcgcggcgggcgcggccacgctggccgtggccaaggcgctgagcatgtccggcagcgacttcgccgtcacggacgcggccacgggcgcgcccgtgctgcgcgtcgacggcgtgctcttcagcctgcgccggcgctgcgtgctcgtcgacgccgaccgccgccccgtcctcaccgtccaagaatcggcgctgatgctgaacacgcggtggaaggtgttccggggcgacagcacccgccggcgggacctcatgttcagcgtcgtgaagccgtccgtgatccagctgcgggggcccaccaaggtcagcgtcttcctcgccagcaacgacgccgagcaggcctgcgacttcaggatcaccggcagctaccacgacggcgcctgcgccgtctccctcggcgactccgacaccgtcatcgccaagatcgaccggcggttcagcgtggtcagcgcgctgctggggaagaactcgtacagcgtcaccgtcaacccggggatcgactacgccttcgtcgtcgcgctcgtcgtcatcctcgacgagatgcattaccagcgatgacacgcacgcttcagttttggttccaagccgcgcgccttcccttctgctgttggctgttgcgtggaatcaacgctcgccccgttctcgaatgtttgtcgcgagatactacttaatttccatacgaggatcttaaccttcctaggcacttggcagttccatctggctgtgtactcgacacggacgttctctatttgttaaatacctatgctatttattgtacacttaaatattctacgtattttagttttatttaatttatt

SEQ ID NO: 177400 - DNA, 728 bp, Zea mays
  Clone ID: MRT4577_93378C.1
gtacgcctgcaggttccggtccggaattcccgggtcgacccacgcgtccggagctcctgaggtctctcccggagagtcgtaggtgcccggcgtaacggcttagcagctgtgccaccgctctaaagagcgtaaccgtggccatgaaggaagaaaaagatcataggcctaaggagaaacgagtgaccctgtttacgccgcagggcgccacaggcggctgtattggcgctactgccgaaggcgccaaaggggacgataggcaggatcgcaacagggacaagaaagaagctttgagcaaggtggtaattcgaagattacctcccactttgaccaaggaacagcttcaggaacatcttcaacctatgcctgagcacgattattttgagtttttttctaatgatactagcctttatcctcatatgtatgccagagcatatatcaactttaaaaaccaagaagacattcttttattcagggaccgatttgatggctatgtattccttgacaataagggtcaagaatatcatgctatagtagaatttgcaccatttcaaaaagctgcaaaaaagaagattaagaaaagagatacagaagttgggactatcgaggatgatccagaatacagaaaatttttggagagctatgcgcacagacatgagaaaatgacatctactccagagacattgctggacgaaatctgagccaaaaatcgagcattaatagctaaaagg

SEQ ID NO: 177401 - DNA, 402 bp, Zea mays
  unsure (1)..(402): unsure at all n locations
  Clone ID: MRT4577_93379C.1
tttcttcctcccgcagcagccaaaacctacctagccggggtccattcaaaccggcgtgggctccaaaatncatatctttgttaagactctgactgtgaataccatcactttggatgttgagtcctcctacaccattgacaatgttaattccaagatccattacaaggattgcatcccccctgaccatcatcttctcatcttctccgtcaagcatctctaggactgtcgcaccctctccgactacaacattcagaagtagtccaccctccacctgttgctccgcctccccggtttctccaataaacttaataagaatacttacaccaagcccaagaatatcaagcacaatcacaaaaaggttaatctcttccttctgcatttctatattttggaccactccac

SEQ ID NO: 177402 - DNA, 930 bp, Zea mays
  unsure (1)..(930): unsure at all n locations
  Clone ID: MRT4577_9337C.1
ccttcactctcggcaacggatatctcggctcttgcatcgatgaagaacgtagcgaaatgcgatacctggtgtgaattgcagaatcccgcgaaccatcgagtctttgaacgcaagttgcgcccgaggccactcggccgagggcacgcctgcctgggcgtcacgcaaaccccagacgaaaccctagcctgcctcccaggagcgccgagtccctccgcccccaacagatctacgcgcgcgaggttcggttcggtcttcggagctcgagacatggcggaggagaatgccccagttgaggttgccgctccggttgcggcccctaccccagttcttggagagcccatggacttgatgactgctctgcagcttgtgatgaagaagtcaagcgctcatgatggccttgtcaagggactccgtgaagctgcgaaagcgattgagaagcatgctgctcagatctgtgtgcttgctgaggactgcgaccagcctgattacgtgaagctggtgaaggcactgtgtgctgagcacaacgttcacttggtcactgtgcctagtgccaaaactcttggcgagtgggctgggctttgcaagattgactctgagggcaaggcaagaaaggtggtgggctgctcatgtgtcgttgtgaaggactacggcgaagattccgagggtcttcacatcgtgcaggaatacgtcaagtcgcactagggacagccttccagtttccggattctgcaggatgctagtagcttcgttatgattgtgttccatgtctgaaacttgttagcctaagaaaattatcttgtgcggttttgtcgaatcagagtttcgtttctggtgctgggacatcatggcttgattgtcagagatacagatctntcagtttccatgttgtcggtgctatctctatattanatatngagtgtgttgattttc

SEQ ID NO: 177403 - DNA, 244 bp, Zea mays
  Clone ID: MRT4577_93380C.1
acgacttgacctcaacccgccacccttttttatttttctatagcataacattacaagaaagatatggttcaattttaaccactggacaggacatctaatcagacatacgtacatgatcacctcatgtgctacatctaaccccatcaacttagctcttcccacatagacaaccacgacagcaccgattgagcccaaaacaccgaatttccacaattcaagccatacgagataaccaacatcatta

SEQ ID NO: 177404 - DNA, 356 bp, Zea mays
  Clone ID: MRT4577_93381C.1
ttcatcttcagcaacgctcaggtggtgttccagttctgtctcatccaggagcgcaagagcatggacaaccagcagatcatcggcacggcgctaggcctcaaggagaggcggtcggtgggcggctccgtcatccactacttggacccgtagcgccgcacccgaagttctagaagagcgtctgccggttcaagaccttcctggtccgcccgaggtaggagctctcgcgcacgctctacatccagtcggtgatcggggaggtcatctacccgcagggcttgctgtcgtggctcgggcacttcggcctcagcacctgcttctacgccgaggtggataacctcgggcccggcgcctacttg

SEQ ID NO: 177405 - DNA, 1194 bp, Zea mays
  Clone ID: MRT4577_93382C.1
tgggaccctcgaggccggccggaacccccttccctcctctccgcctccaattggagtggctcgccttcttccccgcagccagcacgagcttgtcgagatttcagctcgtttctccgccagaggtcgagcaggccagcttcccaggaccgaagctctgcccggttcgccagtccaggaactctgctctcccggggccagagatccaaacaaatctctgcgttggggttctccggggttccttgcgctggagggaggtttcgttctcgccggccatggtttggctgagaagaaacagcagcagcagcatattgatgcgaaatctctgagctttatgaagatcgccacccacctgcgccgctcctgcttcctccactccttctcggtcgtcctcctctactggttttatgtgatctcgtaacttgccctcctccggatccgccattccccgtgccccctctctctctctctctccgtcccctcttgcttctcccttctttcttgccttcccgaacaaccgccgaataataatagcactagccagaccgaccgggggaaaaaaagaccgtgtcttgatgtcgtcgtcgtcgctgtcgccggcggggaggacgtccgggtcggacggcgactcggcggcggacacgcgccggcgcgagaagcggcggctgtcgaaccgcgagtcggcgcggcggtcgcggctgcggaagcagcagcacctggatgagctggcccaggaggcggcgctcctgcaggccgagaacgcgcgcgtggcggcccgcgccgccgacgtcgcgtcgcagcacgcgcgcgtcgagcaggagaacgccgtgctccgcgctcgcgccgccgagctcggcgcccgcctccgctccgtcaacgaggtgctccgcgtcgtcgaggagttcagcggcgtcgccatggacatccaggaggaagtaccgcccgcggacgacccgctgctccgcccctggcagctgccctgctacccggccgtcgccatgcccatcggcgccccgcatatgctccgctactgatgagtgatgaatgattgcccccgccaaccatacgaggcagacagagccggggctggtcgtgtgctagacaaagaagaattggctgcgtctcaacaacacatgattattgctgctgatctgttctctctgtgtgtatgagatgatgctcgtttacatatgtatc

SEQ ID NO: 177406 - DNA, 1767 bp, Zea mays
  Clone ID: MRT4577_93383C.1
ataaataccatgttacggtccaattccaatcaaccacgccgtctaaaaccacgagatccccggtgtcccactaatccatcagcagccgcacatagtaagggtgtacccagcaattcggccgcacgatgcacgagcaggaacaacccacggagtcccacaagggtcactgacagacacgcaagacagattcccttcaccttgctcccatcagcatttcatgggagccattctgccatgacaagagaattacaaagatgccctcgtcccggcattaaatacacctccccgctcggcctgatcccctcccccttccctcctctccgcctccgattggagtggctcgccttcttccccgcagccagcacgagcttgtcgagatttcagctcgtttctccgccagaggtcgagcaggccagcttcccaggaccgaagctctgcccggttcgccagtccaggaactgctgctctcccggggccagagatccaaacaaacctctgcgttggggttctccggggttccttgcgctggagggaggtttcgttctcgccggccatggtttggctgagaagaagcagcagcatattgatgcgaaatctctgagctttatgaagatcgccactcacctgcgccgctcctgcttcctccactccttctcggtcgtcttcctctactggttttatgtgatctcgtaacttgccctcctccggatccgccattccccgtgccctctctctctctctctctctctctctctctctctctctctctctctctctctctctctccgtcccctcttgcttctcccttctttcttgccttcccgaacaaccgccgaagaataatagcactagcactagcgctagcgatagaggaattttgttggaggtaaagtagccagaccgaccgggggaaaaaagagcgtgtcttgatgtcgtcgtcgtcgctgtcgccggcggggaggacgtccgggtcggacggcgactcggcggcggacacgcgccggcgcgagaagcggcggctgtcgaaccgcgagtcggcgcggcggtcgcggctgcggaagcagcagcacctggacgagctggcccaggaggcggcgctcctgcaggccgagaacgcgcgcgtggcggcccgcgccgcccgacgtcgcgtcgcagaacgcgcgcgtcgagcaggagaacgccgtgctccgcgctcgcgccgccgaactcggcgcccgcctccgctccgtcaacgaggtgctccgcgtcgtcgaggagttcagcggcgtcgccatggacatccaggaggaggtgccgccggcggacgacccgctgctccgcccctggcagttgccctgctacccggccgccgccatgcccatcggcgccccgcatatgctccgctactgatgagtgatgaatgattgcccccgccaaccatacgaggcagacagactgacagagccggggctggtcggcaaacgagacaagaagaattggctgcgtctcaacaacacatgattattgctgctgatctgttctctctgtgtgtatgagatgatgctcgtttacatatgtatctggttggttgtactttcggtattgtaatgttattatatcaataagtgttatgtaatctcctacgtttgagtgttattcgatgattcaatttttgtatacggttaacaagttactccatgaaaacatttctcatagagttcagtttggaaaaaacaaaacaaatcaagctaaaaaaaaaagaaaaatgagtagaaaaaaaaaaaaaga

SEQ ID NO: 177407 - DNA, 383 bp, Zea mays
  unsure (1)..(383): unsure at all n locations
  Clone ID: MRT4577_93384C.1
tagtgtaccaacaatggcagccaaaaatatttgcttccttatgctcctaggtctttctgcaagtgttgctaccgcaaccattttcccacaatgctcacaagctcctatagctgcccttcttccnccatacctctcaccagcggtgtcttcaatgtgtgaaaacccaattgttcaaccctacaggatccaacaggcaatcgcaacaggcatcttaccatttcaccctttcctcaacaaccgcagcctatacagagtacctttgtcattgtggacaaacataggacaaaatcacaactggtagaaacttgtgatacttagacatagtcttcatcaacactgctgatgacttgtgtattgacacaatacatcagcagtagtgtgct

SEQ ID NO: 177408 - DNA, 361 bp, Zea mays
  unsure (1)..(361): unsure at all n locations
  Clone ID: MRT4577_93385C.1
cttccctnttcatttttaccattattatcaccccacatgttccncannncttcatgcgttcttatagaatctcggttgcgtctaaaccaacatcctacctcttcttccaaattcacctcccttccgttcctccatcaatcttcttcttctatttacgatttttttttttttctctctcccctataaacccaccttctttttttttctctctcttatttttttctacacaaatttatttttttttctaccatttcttcttatctccaattttttttttttttcacactctatttttttttctacatataatatttttttttcaactttattttattattttcttcactctttcctttttttc

SEQ ID NO: 177409 - DNA, 981 bp, Zea mays
  Clone ID: MRT4577_93386C.1
actcctatagggccatggacagctggtacgcgtggctgtcgcggacggggctggcgccgtcgctggcgcacgagtacgggcgcctcttcagccggaacaagctggagccccgggacgcgccgcacttcgaccacgacctgctcaagagcatgggcatcgccgtcgccaagcaccgcctcgagatcctcaagctggccaggaagcaggacgccggcgcctcgtcgtccgcggcctcgcggctcgggcgcagggccaccaggtgcctgtcccggtgcgcgcgccggctggcaggaggcggcgcgtggagggccgcgtcgtcgtcggtcaccgtcgtcccgaggatctgcggcggcgaagacgccgtccgcgtcggagcagtgcagcggaagggcactggtagcggcaccaccaagaagatggtgctcatgatcaccgacggcggcgtcgccggaggagggtacggctacggcctcagaggccgtggcggcgcgaggctgtcgtcggcgtcgtcgcagaaggcgagtctgatgtttcatgacgggtaccaagacgaggaggaggagatgggagacgacgaggacgaggacggcggcgccggtgacggcgacatcaagtgggactccatgtttcaggacctcaaacccacgtgaggatgaaattctccgatctccggactccggctgctggagtttgatgttgctgcgtgagtgagtcggtcgtcatggctttgcttgtgggcttctggtgtgagagaattttaacaactctcctcatgctgtctgtcgttctcccttccctgagaagagaacgtaatgtcgaaaatgtgtattttcctccactggttttgcggtgttaaagcttgagcaagaaccataggtgcctgatcactgcaattgcaagaccatatttaaatgttgtcggggttttttttacttagttagtacagctagatcaacgtgcaaaatagattatgaccgaagg

SEQ ID NO: 177410 - DNA, 4977 bp, Zea mays
  Clone ID: MRT4577_93387C.1
ttacaatttacatgaggctaggaagcctgggaaattcttatctaaaaagtcttgggtttcccatgtagcctcatcttccgaatgttggttccactgtatcttgtagaacttgagagtctttcttcgggtgaccctgtccttttgatccagaactcgaagaggatgttccgagtatgttaagtctggttccaggacaacatcagtcacttcaacggttcgatcaggaacccgaagacatttctttaattgtgacacgtggaacacattgtgcacagcagacaatgtttcggggagctgaagtcgatacgccactggcccatatctttctagaataagaaaaggaccaatatatcgtggtgcaagttttcctttaactccgaaacgcgatacgcccttcattggtgagaccttcaagtagacatagtctccttccaggaaatataagggcattcgccgtttgtctgcataactcttttgccgtgcttgagctttcttcatattatggataattctctgaaccttttcttcaacctctttcaccatatcaggtctaaagaagtatctttctccaggttcagaccaatttaacggagttcgacaccgacgtccatataaagcttcaaagggtgccatcttgatactttcttggtaactgttattgtatgaaaattccgctaggggtaaacattcatcccattttggtgagaaatccaggacacatgcccgcagcatatcttctagtatttggttcaccctctcagtctgcccactggtttgaggatgataagccgaactgtggagtaatttagtacccaaggagttgtgaagtgcttcccaaaacttggctacaaattggggtccacgatccgacacaatggtcttcggaacaccatgcagactaagaatacgagcaatgtacaattgggcgtagacagtaaccggggaatttgtcttgaccggcagaaagtgagcaatctttgtaagtcgatcaacaatcacccagatagagtcatatccttttgcggtcctgggcaatcccacaatgaagtccatgcttatgtcttcccatttccatgttggtattgataatgactgcaatggaccggcagttttcatgtgtatggccttgacacgtctgcaggtgtcgcatttagccacatagcgtgcaatttcaatcttcatttttgtccaccagtaatgttgctttaagtcttgatacatcttagtgcttccgggatgaatagaataacgactaagatgtgcctcatccagaatttgctggcggagctcttcgttctttggcacaactatgcggtttttaaaccatatcacaccttgatcgtcttctttgaaacacttggctgttccagcccttatcttttctcgtatgtgcttcatacccagattatccttttgagcatcaattattctttgcaaaatgattgactcaagccttaactgatttagagtcccttgttgaatgatccccaggtttagcttttccatttcttgacacaaagtgttctcggaagtcttcgccataagacagtggcaggcaaccttacggctcagtgcatctgccaccacattggccttgcccgggtgataatggatctccagttcgtagtctttaatgagctcaagccatcgtctttgcctcatatttaactctgactgggtgaagatgtacttcaaacttttatgatctgtatatatatgacagatatttcccagcagatagtgacgccaaatctttagggcatgaaccacagcagctaactccagatcatgagttggatagtgctcctcatgtcggcgtaactgccttgaagcatacgcaatcactcggccctcttgcatcagtacacagccgagcccactgcccgatgcatcacaatatacgtcaaaaggtttagtgatgtccggttgagctaataccggagcagtggtcaatagtgtcttcagttgttcaaaggcttcattgcacttagaagaccaattgaacttagtatcattcttcaacaaacttgtgattggcttcacaagcttagaaaaatctggtatgaatctgcggtaatacccagctagtccaagaaaactccggacttggtgaacagttgttgggggtttccattccagaatatctttgaccttgctaggatctaccgcaattcctttagctgataatacgtgccccaaaaattgaatttcttccagccagaatgcgcacttactgaacttggcataaagctgatgttccctgaggcgcgtcaatacaatccgtaaatgctgagcatggtcctcttcattcttagaatatattaagatatcgtcgatgaagactaccacgaatttgtccaactcgggcatgaacaccgagttcattaaataagtgaaatgggcaggagcatttgtgagcccgaaagacatcaccaagtattcaaacaatccataccgcgtagtgaatgcggtcttcggtatatcctcgggccgaatacggatctgatgatagcccgacctgagatcaattttagaaaataccctcgccccagttagttgatcaaataagatgtcgattcttggaagagggtacttattcttgatggtgacctcattcaggggccgatagtccacgcacatacgcaaggtttgatccttcttcttcacaaagatggcgggacaaccccacggggacgagcttggccggataaatcccttattcagtagatcttgcaattgagtcttcagttccgccaattcatttgggggcatacggtacgatctgcgggagatgggagccgtaccgggctttagctcaattacgaattctacatctctttcagggggcaatccaggcaaatcttccggaaatacatctggaaactcacatactaccggaatgttcttgatctccggtacaatggcttcatagactctaccagaagttttggccggattggttgcggggagagtcaagagaatctcttcttggttataactcaacctgacggttctgaattcagtgttgaggattgccttgtattgggttaaccaattcattcccaaaattacatctatatcctggccctttagaacaatcatgttagcaggaaagttccgtccggccattattacgggcactccataggccacttctttagtaaaaatatgtcccccaggtgaatgaattttaaatccctcctttgattcatggtatgcaatatgatgttgttccacaaacttcttgctaataaatgtatgtgaagcaccagaatcaaaaagaattattgcagggtgactggccacagggaacgtacccatcatcaccggctctccctccggtgtggtagccacttgcgtataatatactcgccccgttttcttggtattcttgcccgaagtacttcccttgcctggagctgaatttcccgatccttgcgaagcattagattgattttgccttggatagggacaatctttaataaaatgcccagatttgccacagttaaaacatccagttgaagaacttggcaaggcagggaatcgagtgcctggggcacccggctgttttggggtagtgggagtattattggggcggataataataggctgcttgaagggaaatgaaggtggacgagaaaaagggcgattttggtttgagggtcgaatcacaaaccgtggcttcttcgcctggccctgattaggccgctcaccaccgaatcccttagtctttccggaatttgcatatttggcctccacagataaggctgtgctgacagcctttccataagtaagatcaatacatgcagccatttttcgctgcatccggtcgttcagtcctctcataaaacaattcttctttttcaaatccgtatttacctgatcaattgcgtactgtgacaggtgattgaacttgttgagatactgattaacagtatctcccccttgcttcagtttcataaactcttcttgtttcatgtgcagcactccctcaggaatgtaatgctcatggaatgctgctttgaactcgttccatgtaatttgatggttgtctggctggatggccacaaagttcccccaccaagtactggcaggtcctcggagttgctgtgctgcaaatagtggcttctgtacttccgaacagcgtagaaggccaaacttctgctctatgacccgtatccattcgtcggcctcgagcgggtcttctgctttgatgaagagaggcggacgagtctcggagaaatccagataagtggtctcacggggaccttgttggaatcctcttcctgcttgttggtgaagctgttgctgacccgccatctccctcaggaagcgggtgttgtcggctgtggcgtttaccaaggcagcaattgcctcggcaagcgtgggtggaacgggaggcggattcggggtaacgtcccgacccccggatgttccggctgcatcctgtgcacgagtcctcaaggaaggaggaggctcaaaaaggtctaactccccacccagcgcacgtcccgcaacgtgagatggtccagcttctgcctcagcaggtggtgcaggctcacttgggtgtagttgtgagtataatatatggacttcctcgtgcaaagtgttgcagtaaacctgcaggttatcaacagtcgagctaagttctttaactcgggcctgagcccttgcttccttagcacacattagcaaacgagactggacggcccagtcaagagctaagtctcgatcagcgagttgatcctgcagatgtcggatgtcccttcgtagttcgttgattctatcaccgtcagcgacccaagcatcagtcctatgttgaagtgctgcttgaagtcgactcacacgagcttcaaggtctccgatcgggtcgttgcttccactgctgctactttcatgtcggggagccaattgatgccgaggcaccccaattggtcccgtggacttgcgtgccgttagcctggtacgtggcggcat

SEQ ID NO: 177411 - DNA, 5433 bp, Zea mays
  unsure (1)..(5433): unsure at all n locations
  Clone ID: MRT4577_93388C.1
ttacaatttacaagaggctaagaagcctgggaaattcttattcaaaaagtcttgggtttcccatgtagcctcatcttccgaatgctggttccactgtatcttgtagaacttgagagtctttcttcgggtgaccctgtccttttgatccagaactcgaataggatgctccgagtatgttaaatctggttccaggacaacatcagtcacttcaacggttcgatcaggaacccgaagacacttcttcagttgtgacacgtggaatacattatgcacagcagacaatgtttcggggagctgaagtcgatacgccactagcccatatctttccagaataagaaaaggaccaatatatcgtggtgcaagttttcctttaactccgaaacgcgatacgcccttcattggtgagaccttcaagtagacatagtctccttccaggaaatataagggcattcgccgtttgtctgcataactcttttgtcgtgcttgagctttcttcatattatggataattctctgaaccttttcttcaacctctttcaccatatcaggtctaaagaagtatctttctccaggttcagaccaatttagcggagtccgacaccgtcgtccatataaggcttcaaagggtgccatcttgatactttcttggtagctattattatatgaaaactccgctaaaggtagacattcatcccattttagtgagaaatccaggacacatgcccgtagcatatcttcaagtatttggttcaccctctcagtctgcccactggtttgaggatgataagccgaactgtggagtaatttagtacccaaggatttatgaagttcttcccaaaacttggatacgaattgaggtccacgatccgacactatggtctttggaacaccatgcagactaagaatacgagcaatgtacaattgggcgtagacagtcaccggggaatttgtcttgaccggcagaaagtgagcaatctttgtaagtcgatcaacaatcacccaaatagagtcatatccttttgcggtcctgggcaatcccacaatgaagtccatgcttatgtcttcccatttccatgttggtattgataatgactgcaatggaccggcagttttcatgtgtatggccttgacacgtctgcaggtatcgcatttagccacatagcgtgcaatttcaatcttcatttttgtccaccagtaatgttgctttaaatcttggtacatcttagtgcttccgggatgaatagaataacgactaagatgtgcctcatccagaatttgctggcggagctcttcgttctttggcacaactatgcggtttttaaaccatatcacaccttgatcgtcttctttgaaacacttggctgttccagcccttatcttttctcgtatgtgcttcatacccagattatccttttgagcatcaattattctttgcaaaatgattgactcaagccttaactgatttagagttccttgttgaatgatccccaggtttagcttttccatttcttgacataaagtgttctcgaagatctttgccataagacagtggcaggaagtcttacgactcaatgcatctgccaccacattggccttgcctgggtgataatggatctccagttcatagtctttgatgagctcaagccatcgtctttgcctcatatttaactctgactgggtgaagatgtacttcaaacttttatgatctgtatatatatgacagatatttcccagcagatagtgacgccaaatctttagggcatgaaccacagcagctaactccagatcatgagttggatagtgctcctcatgtcggcgtaactgccttgaagcatacgcaatcactcggccctcttgcatcagtacacagccgagcccactgcccgatgcatcacaatatacgtcaaaaggtttagtgatgtccggttgagctaataccggagcagtggtcaatagtgtcttcaattgctcaaaggcttcattgcacttagaagaccaattgaacttgatgtcatttttcaacaaacttgtgattggcttcacaagcttagagaaatctggtatgaatctgcgataatacccagctagtccaagaaaactccggacttggtgaacagttgttgggggtttccactccagaatatctttgaccttgctaggatctaccgcaattccttttgctgataatacgtgccccaaaaattgaatttcttccagccagaacgcgcacttgctgaacttggcatatagctggtgttcccttaggcgcgtcaatacaatccgtaaatgctgagcatggtcttcttcattcttggaatatatcaagatatcatcaatgaagactaccacgaacttgtccaattcaggcatgaatactgagttcattagataagtgaaatgggcaggagcatttgtgagcccgaaagacattaccaagtattcaaacaatccatatcgcgtagtaaacgcggtcttcggtatatcctcgggccgaatacggatctgatgatagcccgacctgagatcaattttagaaaataccctctccccagttagttgatcaaataagatgtcgattcttggaagagggtacttattcttgatggtgacctcatttaggggccgatagtccacgcacatgcgcaaggtttgatccttcttcttcacaaagatggcgggacaaccccacggggacgagcttggccggataaatcccttattcagcaggtcttgtaattgaatcttcaattctgccagttcattagggggcatacggtacgatcttcgggaaatcggagccgtaccgggctttagctcaatcacaaattctacctctctttcagggggtagtccaggcaaatcttccggaaatacatctggaaactcacatactaccggaatgttcttgatctccggtacaatggcttcatagactctaccagaagctttggctggattggttgcggggagagtcaagaaaatctcttcttggttatagctcaacctgacggttctgagttcagtgttgaggattgccttatattgggttagccaattcattcccaaaattacatctatatcctggcccttcagaacaatcatgttagcaggaaagttctgtccgaccattgttactggcactccataggccacttctttagtataaatgtgtcccccaggtgaatgaattttaaatccctcctttgattcatggtatgcaatatgatgttgttccacaaacttcttgctaataaatgtatgtgaagcaccagaatcaaaaagaataattgctgggtgactggccacgggaaacgtacccatcatcaccggctctccctccggtgtggtagccacttgcgtataatatactcgccccgttttcttggtattcttgcccgaagtacttcccttgcctggagctgaatttcccgatccttgcgaagcattagattgattttgccttggatagggacaatctttaataaaatgcccagatttgccacagttaaaacatccagttgaagaacttggcaaggcagggaatcgagtgcctggggcacccggctgttttggggtagtgggggcattgttggggcggataataataggctgcttgaagggaaatgaaggtggacgagaaaaagggcgattttgggttgagggtcgaatcacaaaccgtggtttcttcgcctggccctgattaggccgctcaccaccgaaccccttagtctttccagaatttgcatatttggcctccacagataaggctgtgctgacagcctttccataagtaagatcaatacatgcagccatttttcgctgcatccggtcgttcagtcctctcataaaacaattcttctttttcaaatccgtattcacctgatcaattgcgtactgtgacaggtgattgaacttgttgagatactgattaacagtatctcccccttgcttcagtttcataaactcttcttgtttcatgtgcagcactccctcggggatgtaatgttcacggaaagctgctttgaactcgttccatgtaatttgatggttgtccggctggatggccacaaagttcccccaccaagtactggcaggtcctcggagttgctgtgctgcaaatagtggcttctgtacttccgaacagcgtagaaggccaaacttctgctctatgacccgtatccattcgtcggcctcgagcgggtcttctgctttgatgaagagaggcggacgagtctcagagaaatccagataagtggtctcacggggaccttgttggaatcctcttcctgcttgttgttgaagctgttgctgacccgccatctccctcaggaagcgggtgttgtcggctgtggcgttcaccaaggcagcaattgcctcggcaagcgtgggtggaacgggaggcggattcggggtaacgtcccgacccccggatgttcctgctgcatcctgtccacgagtcctggtcggcatctgtggcaaaatcatttgaagtaaacataatgtgccagagaaaaccttccattttacattactcaaggaaggaggaggctcaaaaaggtctaactccccacccagcgcacgtcccgcaacgtgagatggtccagcttctgcctcagcaggtggtgcaggctcacttgggtgtagttgtgagtataatatatggacttcctcgtgcaaagtgttgcagtaaacctgcaggttatcaacagtcgagctaagttcattaactcgggcctgagcccttgcttccttagcacacattagcaaacgagactgtacagcccaatcaagtgctaagtctcgatcagcgagttgatcctgcagatgtcggatgtcccttcgtagttcgttgattctatcaccgtcagcgacccaagcatcagtcctatgttgaagtgctgcttgaagtcgactcacacgagcttcaaggtctccaatcgggtcgttgcttccactgctgctactttcatgtcggggagccaattgatgccgaggcaccccaattggtcccgtggacttgcgtgccgttagcctggtacgtggcggcatcttttctaaggaggaaaatgttattagtaagattcttagcatgatgcatgtataattacagaatcagccttagtcgattcaaccttctatatgttgcactcttcctatctggtctttaagatagactcttcagaatacttaggtaagaagagaaaagaatttttttttttttttagttaagacttttgaaaattcttttgaagatgcctcataatatctgcaaaaaagggctacgctccgataccagctgtgacggtacctcccaagtaattaggcccaccttcagttgtccttgtctaacggacatcaaacaaccctgtaggtgcccctgaactacttgacaagttaggtatccttcctttccttaccaggaacgtatancac

SEQ ID NO: 177412 - DNA, 4833 bp, Zea mays
  Clone ID: MRT4577_93389C.1
tcaatcaggaactcgaaggcacttcttcaattgagatacatggaacacattatgcactgtagacaatgtttcgggtagttgaagtcggtatgctactagtctgtatctttcaagaataagaaacaggccaatatactcgggtgccagttttccttttaccccgaaacggttcacacctttcattggtgatactttcaagtatacatgatcattgacttgaaagaccaaaggttgacgtcgcttatccgcataattcttttgccgagcttgtgcctctttcaagttgtgtatgattcgttggactttttctttcgtctctttaaccatgttgggcctgaaaaaccatctttcttcgggttcagaccaatttaagggtgtccgacatcgtcgtccatacagtgcttcgaatggtgccatctttatgctctcttgatagctattattataagaaaattctgccaatggcagacattcatcccatttttgcggaaactccaggacacatgcctgcaacatgtcttcaagtatttgatttactctctcagtttgtccacttgtttgaggatgatatgccgagctgtggagtagtttagtacccaagaatttctgcagttcactccaaaatttggatacaaattgtggtccacgaaccgacactatcgtttttggaactccgtgcaaactaagaatacaagcaatgtataactgggcatagacaacaactgggtgatcggtcttgacgggcagaaaatgtgctatcttggtaagtcgatcaacaatcacccaaatagagtcatatccttttgcggtcctgggcaatcccacaatgaagtccatgcttatgtcttcccatttccatgttggtattgataatgactgcaatggaccggcagttttcatgtgtatggccttgacacgtctacaagtgtcacatttagccacatagcgtgcaatttcaatcttcatttttgtccaccagtaatgttgctttaagtcttgatacatcttagtgcttccgggatgaatagaataacgactaagatgtgcctcatccagaatttgctggcggagctcttcgttctttggcacaactatgcggtttttaaaccatatcacaccttgatcgtcttctttgaaacacttggctgttccagcccttatcttttctcgtatgtgcttcatacccagattatccttttgagcatcaattattctttgcaaaatgattgactcaagccttaactgatttagagttccttgttgaatgatccccaggtttagcttttccatttcttgacataaagtgttctcgaagatctttgccataagacagtggcaggaagtcttacgactcaatgcatctgccaccacattggccttgcctgggtgataatggatctccaattcatagtctttaatgagctcaagccatcgtctttgcctcatatttaactctgactgggtgaagatgtacttcaaacttttatgatctgtatatatgtgacagatatttcccagcagatagtgacgccaaatctttagggcatgaaccacagcagctaactccagatcatgagttggatagtgctcctcatgtcggcgcaactgccttgaagcatacgcaatcactcggccctcttgcatcagtacacagccgagcccactgccagatgcatcacaatacacatcgaaaggcttagtgatgtccggttgagctaataccggagcagtggtcaatagtgtcttcagttgctcaaaggcttcattgcacttagaagaccaattgaacttagtatcattcttcaacaaacttgtgattggcttcacaagcttagaaaaatctgatatgaatctgcggtaatacccagctagtccaagaaaactccggacttggtgaacagtcgttggaggtttccactccagaatatctttgaccttgctaggatctaccgcaattcctttagctgataatacgtgccccaaaaattgaatttcttccagccagaatgcgcacttactgaacttggcataaagctgatgttccctgaggcgcgtcaatacaatccgtaaatgctgagcatggtcttcttcattcttggaatatatcaagatatcatcaatgaagactaccacgaacttgtccaattcaggcatgaataccgagttcattaaataagtgaaatgggcaggagcatttgtgagcccaaaagacattaccaagtattcaaataatccataccgcgtagtaaacgcggtcttcggtatatcctcgggccgaatacggatctgatgatagcccgacctgagatcaattttagaaaataccctcgccccagttagttgatcaaataagatgtcgattcttggaagagggtacttattcttgatggtgacctcatttaggggtcgataatccacgcacattctcaaggtttgatccttcttcttaacaaagatggcgggacaaccccacggggacgagcttggccggataaatcccttattcagtaggtcttgtaattgaatcttcaattctgccaattcattagggggcatacggtacgatcttcgggaaatcggagccgtaccgggctttagctcaatcacaaattctacatctctttcagggggcagtccaggcaaatcttccggaaatacatctggaaactcacatactaccggaatgttcttgatctccggtaccatagcttcatagactctaccagaagctttggctggattggttgcggggagagtcaagagaatctcttcttggttataactcaacctgacagttctgaattcagtgttgaggattgccttgtattgggttaaccagttcatacccaagattacatctatatcctggcctttcagaacgatcatattagcaggaaagttccgtccggccattgttactggcactccataggccacttctttagtataaatgtgtcccccaggtgaatgaattttaaatccctcttttgattcatgacatgcaatatgatgttgctccacaaatgtcttgctaatgaaggtatgcgaagcaccagaatcaaaaagaattattgcagggtgactggccacagggaacgtacccatcatcaccggctctccctccggtgtggtagccacttgcgtataatatactcgccccgttttcctggtattcttgcccgaagtacttcccttgcctggagctgaatttcccgatccttgctgattattagtctgattttgccttggatagggacaatctttaataaaatgcccagatttgccacagttaaaacatccagttgaagaacttggcagcgcagggaatcgagtgcctggggcacccgactgttttggggtagtgggggcattgttggggcggataataataggttgcttgaagggaaatgaaggtggacgagaaaaagggcgattttggtttgagggtcgaatcacaaaccgtggtttcttcgcctggccctgattaggccgatcaccactgaatcccttagtctttccagaatttgcatatttggcctccacagataaggctgtgctgacagcctttccataagtaagatcaatacatgcagccatttttcgctgcatccggtcgttcagtcctctcataaaacaattcctctttttcaaatccgtattcacctgatcaattgcgtactgtgacaggtgattgaacttgttgagatactgattaacagtatctcccccttgcttcagtttcataaactcttcttgtttcatgtgcagcactccctcaggaatgtaatgctcgcggaatgctgctttgaactcgttccatgtaatttgatggttgtccggctggatggccacaaagttcccccaccaagtactggcaggtcctcggagttgctgtgctgcaaacagtggcttctgtacttccgaacagcgtagaaggccaaacttctgctctatgacccgtatccattcgtcggcctctaaaggatcttctgctttgacgaatagaggcggacgagtctcagagaaatccagataagtggtctcacggggaccttgttgaaatcctcttcctgcttgttgttgaagctgttgctgacccgccatctccctcaggaagcgggtgttgtcggctgtggcgttcaccaaggcagcaattgcctcggcaagcgtgggtggaacgggaggtggattcggggtaacgtcccgacccccagatgttccggctgcatcctgtccacgagtcctagtcggcatctgaggcaaaaacatttgaaataaacataatgtgccagagaaaaccttccattttacattactcaaagaaggaggaggctcaaaaaggtctaactccccacccagcgcacgtcccgcaacgtgagatggtccagcttgtgcctcagcaggtggtgcaggctcacttgggtgtagttgtgagtataatatatggacttcctcgtgcaaagtgttgcagtaaacctgcaggttatcaacagtcgagctaagttctttaactcgggcctgagcccttgcttccttagcacacattagcaaacgagactgaacggcccagtcaagagctaagtctcgatcagcgagttgatcctgcaagtgtcggatgtcccttcgtagttcgttgattcgatcaccgtcagcgacccaagcatcagtcctatgttgaagtgctgcttgaagtcgactcacacgagcttcaaggtctccgatcgggtcgttgcttccactgctgctactttcatgttggggagccaattgatgccgaggcaccccaattggtcccgtagacttgcgtgccgttagcctggtacgtggcggcat

SEQ ID NO: 177413 - DNA, 663 bp, Zea mays
  unsure (1)..(663): unsure at all n locations
  Clone ID: MRT4577_9338C.1
ccggcctggagagggcggctgtaagaacccttgccttggcgtaggggaaaacggtgacggcagacagagaacatttggggatcccgggtgccggctgcgtccggtggctggcggcggcgtccgtcgtgtattggcaccattactaccgattacgaaatcttcgagagaggagacgggtgcggggagcggtgcccaaactcaaccattccaccgtgcgtagcaatcgaggcagcggcgtgtctgcaacacgggcggcacggcggcggaggcacatccgcatcataggtatgtcgcgtctgcaaacgaggacagcgaggcacgtctgtaagcgaggccatcgtcggtcctctgactcgtcagcttcaccacgtacgttatctccttctacgtcagctcgatggacgagggcactacctttcaatatcgcacaacacttgacttcttgttaaatggatttatcttcctgggaggcacgatcattttgtgttttttgtagctctagttgtgttaagacctaanattattagagcttgtgaacggattgttacattcttgtgctacagctaaggctttgttcagttatttcaattccacgtggatttggggtgtattgnaattagattttaacttactatggaaaaaaaaaaaaaaaaaggcggccct

SEQ ID NO: 177414 - DNA, 585 bp, Zea mays
  Clone ID: MRT4577_93390C.1
atctcactttcgtagccgtcggagtgcttgtgatctcgacccaactcgggcttccgctccgatcacccgtggctcgccacaacgtatgtctcgagggacaccatgcacaccagacaagacaacgtcgcccttgagacccgctggcaggagaaagagagatgtctattttggtcgctcacctctttgcatccttctgtgacgccttcatacatatgcactagatttcgctggtcagggaaactactgggtcatgtcagcgtcgtcatcttggtgatggctgatagtcatgaggaagcgacttaggctgctatgatagcctgatcctatgcctgacctagcatgcaatgaacttgtgattactgcactgcacattcaccttgcgaagaacggcattgcagcaagaccatgatgcctgatatctggagccgcagacctgccctcactatggattggtcgttgcgagataaaaatacaaaccctgttaggacgataccccgtgctgcacgaacagaactcgaagaaacggcgtgaggaacgaaaagaagctagcatgcgtctcttctgcttgacatttgctgggtcttg

SEQ ID NO: 177415 - DNA, 298 bp, Zea mays
  Clone ID: MRT4577_93391C.1
ggagctgtacaatagggtccccgttgagatgtgaggtgcctgactgtgactgcctgctgccgcgttgaattcactgctggatttgggcttttctcgctgctgctgctttcagctaagctgttggacagatttgttcgcgttgtaaaatgtgaggtgctagatgcatttcgaatctcataaaattgccacatacagttcgtcatagtcttacacaatgtgtctttgtaattttgtaatttgtataacagtataacacggtagaacaattctgctttgaactgaaattcggactgtgttt

SEQ ID NO: 177416 - DNA, 3210 bp, Zea mays
  Clone ID: MRT4577_93392C.1
atgaaagcagcagcagtggaagtaatgacccccatcggagatcttgaagcccgtgtgagtcgacttcaaacagcgctgcaacacaggaccgatgcttgggtcgccgatggagatagaatcaatgaactgagaagggacatccgacatctgcaggatcagctcgctgatcgagacttagcacttgactgggtcgtacagtctcgtttgctaatgtgtgctaaggaagcaagggctcaggcccgaattaaagaacttagctcaacggttgataacctgcagatgccgaccaggactcgaggacaggacgcagccggaacttctgggggcagggatgttaccccaaacccacctccggttcctcccacgttagccgaggcgattgccgccttggtgaatgccaccgcagacaatacccgcttccttagggaaatggcgggtcagcagcaattccagcagcaggcaggaagaggttatccgcaaggtccccgggagaccacctatctggacttctctgaaacccgcccacctctattcgtcaaggcagaagatcccctagaagctgatgagtggattcgggttattgaacaaaagtttggtcttctccgttgctcagagacgcagaagtcgttgttcgcagcacaacaactccgtggtcctgccagtacctggtggggaaatttcgtggctattcaacctgtcaaccatcaagtcacctgggatgagtttaaagcagccttccgtgaacactacatccccgaaggagtgctgcatatgaaacaagaggaatttatgaagttacaacaaggtggagataccgtcaaccaatatctcaacaagtttaatcacctgtcgcagtatgccatcgaccaggtgaatactgatttaaagaagaagaactgttttatgcggggactgaatgatcggctacaaaggaaaatggccacatgcatagatctcacctatggaaaggctgtcagtacagccttatctgttgaagcaaaatacacaaattctgggaagaataagggattcggtggtgagaggcctagtcagggccaggcaaagaagcaacggtttgtgatccgaccttcaaaccaaaatcgcactttttctcgtccaccctcatttcccttcaaacaacctatcattatccgccccaacaataaccccactaccccaaatcagccgggtgcccgaggcactcgattccctgccttgcctagttcttcaactgggtgttttaattgcggcaagtcgggacattttatcaaagactgcccatatcctaggcaaaatcaatctaatgcttcgcaaggatctgggaaatcagctcagtctaaaggaaatgctatggggaaaaatacaaagaagacagggcgtgtatattacactcaagtggctactacaccggaaggagagccggtgatgatgggtacgtttcccgtggccagtcacccagcaattattctttttgattctggtgcttcacatacattcattagcaagaaatttgtggagaaacatcatattgcataccatgaatcaaaggagggatttaaaattcattcacctgggggacacatttatactagagaagtggcctatggagtgccagtaacaatggccgagcggaactttcctactaacatgattgttctgaagggccaggatatagatgtaattttgggtatgaattggttaacccaacacaaggcaattctcaacactgaactcagaaccgtcaggttgagctataaccaagaaaagattcttttgactctcctcgcaaccaatccagccaaaacttctggtagagtatatgaagccattgtaccggagatcaagaacattccggtagtatgtgagtttccagatgtatttccggaagatttgcctggactgccccctgaaagagatgtagaattcgtaattgagctaaagcccggtacggctcccatctcccgaaggtcgtaccgtatgccccctaatgagttggcggaattgaaaattcaatatcaagatctactgaataagggattcatccggccaagctcgtccccatggggttgccccgccatttttgttaagaagaaggatcaaaccctgcgaatgtgcgtggattatcgacccctgaatgaggtcactatcaagaataagtaccctcttccaaggatcgacatcttatttgatcaactgactggggcgagggtattttccaaaattgatctcaggtcgggctatcatcaaatctgtattcggcccgaggatataccgaagaccgcgtttactacgcggtatggattgtttgaatacctggtaatgtctttcgggctcacaaatgctcctgcccacttcacttatttgatgaactcggtgttcatgcccgagttggacaagttcgtggtggtcttcatcgacgatatcttgatatattctaaaaatgaagaggatcatgctcagcatctacggattgtattgacgcgcctgagggaacaccagctatatgccaagttcagcaagtgcgcgttctggctggaagaaattcaatttttggggcacgtgttatcggctaaaggaattgcggtagatcctagcaaggtcaaagatattctggagtggaaacccccaacaactgttcaccaagtccggagttttcttggactagctgggtattatcgcagattcataccagatttttctaagcttgtgaagccaatcacaagtttattgaagaatgacattaagtttaattggtcttctaagtgtaatgaagcctttgagcaattgaagacactattgaccactgctccggtattggctcaaccggacatcactaaaccttttgatgtatattgtgatgcatctggcagtgggctcagctgtgtactgatgcaagagggccgagtaattgcgtatgcttcaaggcaattgcgccgacatgaggagcattatccaactcatgatctggagctagctgctgtggttcatgccctgaagatatggcgtcactatctgctgggaaatatctgtcacatttatacagatcataaaagtttgaagtacatcttcacccagtcagaattaaatatgagacaaagacgatggcttgagctcattaaagactatgaactggagatccattatcacccaggcaaagccaatgtggtggcagatgcactgagtcgtaagacttcctgccactgtcttatg

SEQ ID NO: 177417 - DNA, 232 bp, Zea mays
  Clone ID: MRT4577_93393C.1
atctttgctcatattcacaaattcaggtgttacttcccttttctcatccttcctcattcttttctttctcatttctataggagaaaagtgcttattttatttgtaattatagtttaataggttaaactctaagggagtatgaattgttgcatcatgttgaactctagatttcacttttgcttggtgcataattcatggaaagtctaatttgaatttgtggcttattttgatt

SEQ ID NO: 177418 - DNA, 719 bp, Zea mays
  Clone ID: MRT4577_93394C.1
gccgaactgtggagcaatttggtacccaaggatttatgaagttcttcccaaaacttggatacgaactgaggtccacgatccgacactatggtctttggaataccatgcaaactgagaatacggctgatatataatgctgcataagtggctactgtatatttggcccttacgggtaagaagtgggcaatctttgtgagtcgatcaacgataacccaaatagaatcataccctttgaccgtcctgggcagtcccacaataaagtccatactgatgtcttcccatttccatgttgggataggtaaagattgcaatggtccagcggtcttcatgtgcactgccttgacacgtctacatgtgtcacatcttgccacatagcgtgcaatctcaatcttcattttcgtccaccaatagtgttgctttaagtcttgatacatcttagtacttctaggatgaatggaatatcgactaggatgagcttcatccaagatctgttggtggacttcagcatctttaggcacaactatgcgatcattgaaccataatattccttggtcatcttttctgaagcaattagctttgtcggcttctattttctcatgaatatgcttcatacccttatcacttctttgagcatcaataattctctgtagaagaactgactcaagctttaattgggtcaaagttccatattgtatcatacccaggttcaacttttccat

SEQ ID NO: 177419 - DNA, 1155 bp, Zea mays
  Clone ID: MRT4577_93395C.1
atggaaccttatgtgttcttctggtgggcaaagatgcaaattgaaattgcacactatgtggctagacgtgacacttgtaaacatgtcaaggccacatacatgaagactgctggtccattacaatctttacctatcccagcatggaaaggggaagatattgtatggacttcatcatgggattacccaggactacaaaaggtcaagacagatcacccagttactgtctatgcccaattgtacattgctcgtattcttagtctgcacggtgttccgaagaccatagtgtcggatcatggatcgcaattcgtatccaaattttgggaagaacttcacaaatccttgggtactaaattactccacagttcggcttatcatcctcaaaccagtgggcagactgagagggtcaatcaaatactggaagatatgctgcgggcatgtgttctggacttctcacagaaatgggatgaatgtttgcccttagcggagttttcatacaataacagttatcaagaaagtatcaagatggcaccttttgaagctttgtatgggcaacggtgtcgaactccgctaaattggtctgaacctggagaaaggtacttctttaggcctgatatggtaaaagaggtcgaagaaaaggttcagaaaattattcataatatgaagaaagctcagactcggcaaaagagttatgcagaccgacgacgacaacccttatgttttctggtaggcgattatgtctacttgaaagtttcaccaatgaagggtgtatcgcgtttcggggttaaagggaagcttgcacccaggtacattggtccattcctggtgattgagcaatgtggaccagtggcataccgactccaactacccgaaactttgtctgttgtgcataatgtgttccacgtgtcacaattgaagaagtgtcttcgggttcccgatcgaaccattgtagtaacagatgttgtccttgaaccagacttgacatactctgagcaccctattcgagtcttggatcaaaaggacagggttaaccggagaaaaactctcaagttttataagatacagtggaaccagcattctgaagatgaggctacatgggaaactcaagactttttaaataagaatttcccaggctttttagcctcatgtaatttataa

SEQ ID NO: 177420 - DNA, 404 bp, Zea mays
  Clone ID: MRT4577_93396C.1
ttttttttttttttttttttttttttttttttttttttttttttttttttttttttttttaaaaaaagatgtttataataggtttatttcaaaacggtaaaggggggaagtcaaataaaaaaaaaagggatttttattggtgggggataatataaaagggaattgccggggaggaaaaaaagttacagttttattccatgcaaacttgaaaaaaacccaaaaagagacgacggtccggggtttaaattgtccatgggaaccccaggcaagtggaaaggggcgtccccctggttgagctgttgtttgagcatcaattttttgaagggggggaagaggatttctttgggagagggtttttgtttggggggcgggggaatttttttaaaatgccttttcccgccggg

SEQ ID NO: 177421 - DNA, 521 bp, Zea mays
  unsure (1)..(521): unsure at all n locations
  Clone ID: MRT4577_93397C.1
ggcacgagggtcatctcttcgccttcgctacgcaattccgatccacgctgcgggccacttgtgacgactggcggaacccgcgagaaacagaggcgggcgagcggcgatcggagatggcgccggagaagccccggaaggaacaggaggaggagttgatgctggaggatggaggcatcgaggagagcccgcgccgcagcttcgaggactgcggcgactccgaggaggaccgcggggagggcgatgacgaggaggagcgggacagcgaccgcgacggcgtcggttcgacgcgctccttcctgccccaaaagtggccgcagagctacagggaaacaactgacacctacacaatcgctgcatcaccgagctttggttacttaggttcttctacaagcaaatactcgctcctcgaccttggtcgcagtattctgggctctgacctgaagtcacctctaatatcggccaaggctgattctgtcagaaacttgccgaanacccttggttcaatgagagatgggagagtc

SEQ ID NO: 177422 - DNA, 4064 bp, Zea mays
  Clone ID: MRT4577_93398C.1
ttacaatttacatgaggctaggaagcctgggaaattcttatttaaaaagtcttgggtttcccatgtagcctcatcttccgaatgctggttccactgtatcttgtagaacttgagagtctttcttcgggtgaccctgtccttttgatccagaactcgaataggatgttccgagtaggttaaatctggttctaggacaacatcagttatttcaacggttcgatcaggaacccgaagacacttctttagttgtgacacgtggaacacattgtgcacagcagacaaggtttcggggagttggagtcgatacgccactggcccatatctttccagaataagaaaaggaccaatatatcgtggtgcaagttttcctttaactccgaaacgcgatacgcccttcattggtgagaccttcaagtagacatagtctccttcaagaaaatataagggcattcgccgtttgtctgcataactcttttgccgtgcttgagctttcttcatattatggataattctctgaaccttttcttcaacctctttcaccatatcaggtctaaagaagtatctttctccaggttcagaccaatttagcggagtccgacaccgtcgtccatataaagcttcaaagggtgccatcttgatactttcttggtagctattattatatgaaaactccgctaaaggtaaacattcatcccattttagtgagaaatccaggacacatgcccgcagcatatcttcaagtatttggttcactctctcagtttgtccactggtttgaggatgataggccgaactgtggagcagtttagtacccaggaatttatgaagttcttcccagaatttagatacgaattgaggtccacgatccgacactatagtctttggaacaccatgcaaactgagaatacgggtaatgtataactccgcataggtaatgacgggatatttaactttgaccgggagaaagtgggcgatctttgtaagtcgatcgatgataacccagatggagtcaaagccttttgcggttctgggcaatcccacaatgaagtccatgctgatgtcttcccatttccatgttgggattggcaaagattgtaatggaccagcagttttcatgtgtatggccttgacacgtctgcaggtgtcacacttagccacatagcgtgcaatttcaatcttcatttttgtccaccagtaatgttgctttaaatcttggtacatcttagtgcttccgggatgaatagaatagcgactaagatgtgcttcatcaagaatttgttggcggagctcttcggtctttggtactactatgcggtttttgaaccatatcacaccctgatcgtcttccttgaaacacttggctactccagcctttatcttttctcgaatgtgcttcatacccagattatccctttgagcatcaattatcctttgcaaaatgattgactcaagctttaactgatttagagtcccttgttggatgatcgccaggtttagcttttccatttcctgacacaaagtgttcttggaagtcttcgccataagacagtggcaggaagtcttacgactcaacgcatctgccaccacattggccttgcctgggtgataatggatctccaattcatagtctttgatgagctcaagccatcgtctttgtctcatattcaactctgactgggtgaagatgtacttcaaacttttgtggtccgtataaatgtgatagacattccccagcagatagtgacgccatattttgaggccatgaaccaccgcaactaactccaggtcatgagttggataatgttcttcatgctggcgtaactgccttgaagcataagctattactcggccttcttgcattaaaacacagccgagaccactgcctgatgcgtcacaatacacatcaaagggcttttcaatatccggttgagccaataccggagcagtggttaataatagtttaagctgctcaaaagcttcattacatttcgaagaccaattgaatttaatatcactcttcaataaacttgtgattggtttcacaagcttagaaaaatctggaatgaatcggtggtaataaccagccagcccaaggaaatttcggacttgatgtatagtggttgggggtttccactccaaaatatccttgactttgctgggatctaccgcaatccccttagcagataatacatgtcccataaattgaatctcctctagccagaatacgcacttactgaacttagcatataattgatgttcccttaagcgcgtcaatacgatccgcaagtgctgagcatgctcctcttcattcttggagtatatcaagatatcatcaatgaataccaccacaaacttgtccaactcgggcataaataccgacttcatcagatatgtgaagtgggcaggagcattcgtcagtccgaaagacataactagatattcaaataatccataccgcatggtgaatgcggtctttggtatatttttgggtcggatacggatctgatgataacccgacctgaggtcaatcttggagaatacccgagctccggtaagttgaccaaatagaatgtcaatccggggaagagggtacttattttttatggtgacctcattaaggggtctataatccacgcacatccgcagtgtttgatccttcttcttgacgaagatggctggacaaccccaatgtgaagaacttggccggataaatcctttttcaagtagatcttgcaattgggtcttgagttctgccagttcatttggaggcattcggtacgaccttctagaaataggagccataccgggcttcaactcaatcacaaattctacatctctttttagaggcaatcccggcagatcttctggaaagacgtctgggaactcacatactaccggaatatcttggatctccggtatgatagctccatacactctgccaattggtccagctggaatggctatggggatagacaaaagaatctcttcttggccataactcaaccagattgttctcagatcagtgttgaggattgctttatgatctatgtcttggccttttagaacaatcatgtttgttggaaagtcccgttcagccaatgttacgggcacttggtaagccacttctttagtaaatatttgtcccccaagcgaatgaatagtaaacccttcccttgattcagtatatggaatgcaatgtttttccacaaatttcttgcttatgaaagtatgcgaagcaccagaatcaaagagaataactgcagggtgattggccacgaggaacgtacccatcatcaccggttcgccttccggtgttgtggccacttgagtataatagatccatcctgttttccttgtatttttgcccgcagtactgtttgccgcatttcccttggaactctcggacctctgttgattatttgattgattctgcctcgggtatggacagtccttaataaaatgaccaaactttccacagttgaagcagccagttgaagaactaggtagggtggggaaacgagcaccaggggcactcggctgatttgtagaagtgggggcaatggtaggatgaatgaaaacaggctgtttgaacggataggacggtggacgaggcgaagaacgattctgattaaaaggtcggattaccaacctggttcgcttctcaggtccctgattggacctgtcacctccaaatctctttaattttccttggcctgtattcttggcttctactaccagtgccatgctgacagctctactgtaagtaagatctaggcaggtggccattttccgttggagccggtcgttgagtcctctcatgaagcaattcttcttcttcaggtcagtgtttacttggtcaatcgcatattgggataaatgattaaacttgttgagatactgcatcacagtatccccaccttgttttaatcgaataaactcctcttgtttcatgtgaagcactccctctggaacatagtgttcactgaatgctagattaaattcatcccaagtgatccgatgtccggctggttgaactgctacaaaatttccccaccaggtactcg

SEQ ID NO: 177423 - DNA, 1660 bp, Zea mays
  Clone ID: MRT4577_93399C.1
ccatcatcaccggctctccctccggtgtggtagccacttgcgtataatatactcgccccgttttcttggtattcttgcccgaagtacttcccttgcctggagctgaatttcccgatccttgcgaagcattagattgattttgccttggatagggacaatctttaataaaatgcccagatttgccacagttaaaacatccagttgaagaacttggcaaggcagggaatcgagtgcctggggcacccggctgttttggggtagtgggggcattgttggggcggataataataggctgcttgaagggaaatgaaggtggacgagaaaaagggcgattttggtttgagggtcgaatcacaaaccgtggtttcttcgcctggccctgattaggccgctcaccaccgaatcccttagtctttccagaatttgcatatttggcctccacagataaggctgtgctgacagcctttccataagtaagatcaatacatgcagccatttttcgctgcatccggtcgttcagtcctctcataaaacaattcttctttttcaaatccgtattcacctgatcaattgcgtactgtgacaggtgattgaacttgttgagatactgattaacagtatctcccccttgcttcagtttcataaactcctcttgtttcatgtgcagcactccttcagggatgtaatgctcgcggaaagctgctttgaactcgttccatgtaatttgatggttgtccggctggatggccacaaagtttccccaccaggtactggcaggtcctcggagttgctgtgctgcaaacagtggcttctgtacttccgaacagcgtagaaggccaaacttctgctctatgacccgtatccattcgtcggcctcgagcgggtcttctgctttgatgaagagaggcggacgagtctcagagaaatctagataagtggtctcacagggaccttgttggaatcctcttcctgcttgttgttgaagctgttgctgacccgccatctccctcaggaagcgggtgttgtcggctgtggcgttcaccaaggcagcaattgcctcggcaagcgtgggtggaacgggaggcggattcggggtaacgtcccgacccccggatgttccggctgcatcctgtgcacgagtcctcaaggaaggaggaggctcaaaaaggtctaactccccacccagcgcacgtcccgcaacgtgagatggtccagcttctgcctcagcaggtggtgcaagctcacttgggtgtagttgtgagtataatatatggacttcctcgtgcaaagtattgcagtaaacctgcaggttatcaacagtcgagctaagttctttaactcgggcctgagcccttgcttccttagcacacattagcaaacgagactgcacggcccagtcaagtgctaagtctcgatcagcgagttgatcctgcaagtgtcggatgtcccttcgcagttcgttgattctatcaccatcagcgacccaagcatcagtcctatgttgaagtgctgcttgaagtcgactcacacgagcttcaaggtctccgatcgggtcgttgcttccactgctgctactttcatgtcggggagccaattgatgccgaggcaccccaattggtcccgtggacttgcgtgccgttagcctggtacgtggcggcat

SEQ ID NO: 177424 - DNA, 127 bp, Zea mays
  Clone ID: MRT4577_9339C.1
atcgggattagactaggatgacgcaacgctcaccgttgtcttccaatccgcagtacgccctacttcgcagttggtaaacgctctcgcaggcagccggtatcacgagacaggaaatgtcgctcgtgag

SEQ ID NO: 177425 - DNA, 291 bp, Zea mays
  Clone ID: MRT4577_933C.1
cccaaccatctttttcccttatatataatcccttcccatttaaagggttcattcaggtcattgctcacactgccacccatgggaatgggtgacactacgttactcatcgccgttaaatgagtaaactagcaagctaggtagctagtcagcggctccattacattattactacagtacatagtttcctaagaagtaaacacccccggcagctgctttgaaagggcaggaacctggttgttgcagcttgaggccgaacatcgccgtaagttgttgccctacctgggcccccat

SEQ ID NO: 177426 - DNA, 194 bp, Zea mays
  Clone ID: MRT4577_93400C.1
cccacgcgtccgaaaaaaaaaaaaaaaaaaaaaaaaaaacaaactaaaaaaaaaaaaacatgcggcggggtaaatatagtatggtggtccctaaattcaaactcactggccgtccttttacaacgccgaaactgggtaaactctggcgtgtcctaactcattttttttgcggcatatcctcctttccccagctg

SEQ ID NO: 177427 - DNA, 1486 bp, Zea mays
  Clone ID: MRT4577_93401C.1
ggaccctcgaggccggccgggaaaaaaacacccccaatcatcatcccctccgcctctcctccactggagagagtgccctcgtctccctctcccctcgccgtcgtcgtcctccctcctctcctccgctcccaccgaggaggggaccctctataagaaggcaggagcgacgaatccgatcgtctgtcgtgtgggagagccgcggccccatcctccgtgtgatgaagttcgggaaggatttccggaaccacctggaggagacgctgccggcgtggagggacaagtacctcgcctacaaggccctcaagaagctcatcaagaacctggtgccacgcgagcccgcagcggcccctcctctccctcctcctgcccccgccgccgccgacgccgaggggccgggggctcctgccgccgcgcacgggaacgtcaacctggccaactggttcgccagcatcctcgacgcggagctgcacaagctcaacgagttctacatcgagagggaggagtggtacgtcatccgcctccaggtgctcaaggagaggattgagcgcgtcaaggctaagaagaatgacgcttttacatccaggagtgagtttaccgaagaaatgttagagatacgtaaggattttgtgatcatacatggtgaaatgattcttctgcaaacctacagctccctaaattttgctggactagtgaagatactgaagaagtatgacaagagaacaggtggcgtgcttagcctgcctttcactcagcgtgttcgtcaccagccatttttcacaaccgaacctttaacaaggcttgtccgagaatgcgaggctaacctcgaactacttttcccggtcgaagcagaggttcttgagcctagttcatcctcgaatctggaaccgcatgatgtggctaggtgtgacccgacatcgtcccgcgatgtggaaaccgtcgatgtttaccgaagcacactcgcagctatgaaggcgatacagggccttcggagagccagctctacttacaaccccctgtctctgtctaggttcttccacggcgaggatggcgaaccctgctcgggtgccatcacttctgagagctcactgtcagattcctcaacggactcccagattcaggatgctgggaaggatgataaggaggtgcaatcaaattcgagggaccagaatgctgcccaaggggaacagaatgcacaaggcgagccgactgatgaataaacagtttttttccacacgctgttcaataagacaataaccattgataagtgtaaatgctaataatcttgctggttaaccctcttttgaagtgacacatatgcaatgactccctggtggcgcagtttcatttttcttctttttccttaattaatgggtaaagagtatatgggatgttggatttatcatgttcctatcgtgttgacagcatgccagttgccagaagtttgacacttgataagagctatgatcgtaatcagcatgttggatct

SEQ ID NO: 177428 - DNA, 594 bp, Zea mays
  Clone ID: MRT4577_93402C.1
taatgtgccgcgcgcgtcctcgctgcccaacccttgctcgctgcgccgccgcctccgacatcgtcccttcttccccacgagtaaccgataatccgccggcgttgatatgctgttttatcaggatctcctatctaggggatgagctcctgtctcattcattcacctactaggagctcgagaacggcgttctgagctgaggtgactcaaagagggtctacccaggtgacggttgaagggccacatggctgcaacatcgtccgacgaggtggtggttgacaaaactgcttctgagacactggtgatggtgagtgctattgccgagatgttcctgctagacgagaacctctgttttacaagaaatcgtttagtgtcttactttcgacaattcttccataatgtcactgttgtgatggagccagagaatgcggatgacttcttcaatcgtgtccagtacgccattgagaatctccttattgagctgagcgatctccgattctttgatgttgaatacatgatggatgatgctccatgtgttattcgcctatcacgatgatggtgccactaatccgaccttcctctatttctctcctgctg

SEQ ID NO: 177429 - DNA, 813 bp, Zea mays
  Clone ID: MRT4577_93403C.1
cgttgctgtcgggcaacaagtcgcttatctgttttattatctagttcggctgtttgttcaactagcacataccaatttctgaagaattatgaagatcttgccattttcattttggctggcgaagcattttgtggatttgaagctagtgagttccgccagaagttgaagactgtctgtttgaactacatggtgtcctttcaccggcaaaatgtatatgcacttaagatggtactggaaaatgaatcttggacaataatgtccgctgaagcttcacaaataattagtttagcaggtctaactggtgatggtgctgcactgtgctctcctaccagtagaagtcctaagttgccaataaattgttaccatgggacaactacatccaactcaggaaaggaaaagctcggatttgcttcttggcttgtgattgaaaatccattttcttttaagctagaaaagggctctgccgaatccccaaagtccaatatgcttgttgactcatcagctagcaataatcatggcaatggaaacaattcatctttagatgaagagaatgaagaccttctagcggattgcattgatgaagatagtcagttgcctagtaggacaccaaaagcgaaaattgtaaaaggcaattctttacattggaaagatggagacatttcatcacagacaggctcatcactttctctattaaggatgatggacaaatacgccaggctgatgcaaaagctggaaattgtcaatgttgagctttttaagggggtctccccactatttggcatcttttaccactacatatatgagacatttggg

SEQ ID NO: 177430 - DNA, 324 bp, Zea mays
  Clone ID: MRT4577_93404C.1
aaaaacacaaggggggccttttattattcatcatataagatatagcccctaaaaagcccagcgttaggaatgaaaagggggaaaaaatgatattgcttattacacttcacattgggcgattgttgatccggtttttttatgtagatgccgaaaacagattgttctcgacgcattcacattgctcgggtgcatatcgggagggacccagtagtatagttataggatatatatttatgatgatgcaggagtcggcgggcccgtaaaattgccttaaccctagtttttcactttttccatgtgaggaccgacccctgggccgacccc

SEQ ID NO: 177431 - DNA, 667 bp, Zea mays
  Clone ID: MRT4577_93405C.1
aattcggcacgaggcgacggacggacggacggagaccggagcaaacgaggcggccggggtccggagcagaggacgcgtccactactacaacaggagcgcccgaatccttcccaccccccaaaattccgcacgagggattcccgctgtcctgtcccctccaaacaccctcccgccgaaggcctccgatccaggccgcaaccgggatggcgcgtgccggcgggaggaggtcggcggcggcgccggcggcttcgggagagccctccgtcgagtgctctcgcggcggataacagtctgatacccccccacccactgtcttcactgactgctagagcccctccttgtcagtacagtgtttggtgctgaatcaaatccactgaagatgccaagttctgaaccagacagtgatgatgttttctttgacgcatttgaagatgttcgatctgcaggggaaccttcatgttcagaggattgcagcaccagcgatgaagtttcagtggtgaaatttgagtatgagatttgggcaaacgagccgatgagcgttcaagaaaggcggcaaaggttcctcaagggaatgggattcgatgattttcgtgtctagtagaacagattcttttcaatgccatggtgaaatacagccgttgagtcttcactgcatgggaggtgagac

SEQ ID NO: 177432 - DNA, 138 bp, Zea mays
  Clone ID: MRT4577_93406C.1
agacacagttgacgtcgacggcggcctaagacagggtgctgaggcttacgatggactgatgggacggcagcgagcacgcaccagtgggtgaagaaatggttgatggtgaggacattcagcctgttgactgggacaatg

SEQ ID NO: 177433 - DNA, 477 bp, Zea mays
  Clone ID: MRT4577_93407C.1
aaaacccccaaagcggtaaagggaaaagggggaaattaaaaaaaaaaaaacaaacaaaaataaaagaattccaaaaaaaaagggggaggggggggggcaaggggtaattaaacaattaaaaccaagaaaaaaagggggacaaaagggaaaaaaacttcaccccccttaaggaaggggccccccaaaaaaaaaaaaaacaaccacaaaaaaattaacccccaccaaaaaaaggggggggccccaaaagggggggggccaagggccacgggtaaaaccaaggggggcaaccccaatcattttccaaaaagggccaagaaggggggggccttaaaaaaaattaaaaaaaaaaaaaaaggccgggaatgaaagggaagggggtcccaattttttaataaaaaaagtcagggcgaaaaaaatcccaattaaagagaaaaggggggccccgaaccccaccctaagggttttggcaggaggaac

SEQ ID NO: 177434 - DNA, 675 bp, Zea mays
  Clone ID: MRT4577_93408C.1
tatccttcaaacgtcattttttcttcatatatttctgcaacatgttacatgtacagtctggtagaaggcactgctcccccacagtccctctctacacgttgcattggtgaaaacaacagcagcagcagcaaagggctcaaagcccaaccacgtacagctatacataaagaatgggtgtcgaacccggtttgagtctctagctaagacctcacacgcggacatacccctcttctttccctgcaaaatgtggaaaaattgcaggatcttccgttgggactatcttgaggtgaggtggttgtcgtccatgtaactggactcctaacagccagcagcccttaggaaattgtcgtacgggctcgccgccggtagcttcagagactgctgttggaagtcctggcctggctgtgcgttgtcgccgttgggcccgttcatgtactgtgggtatccctgaacgctctcatcagagaatgggtttgtgctctgcgccccggcctgaggcaactgcaggtcttggaaaaggtccagctccgtcgtctggttgggctggctgcctggcagccctgcagcttgcacgctttgctggaagctcatgaaggcagacattttctgctgtttcccgatcgtcagggcttgacgctggctagtcatatccttgaatccaatcggacgcgtggg

SEQ ID NO: 177435 - DNA, 361 bp, Zea mays
  Clone ID: MRT4577_93409C.1
aagaaacccaaaaaggggggaaccttcaccatttttttttaacccgggcgggggggggcccctttggaacacgggattccattcaattaccggggaaaaaaaacccgtggggccccgcaaccggttttacttaaaaaagccaaatttgttttggtgccaattccaaaaaaaaaatttgcagacttttaaaaaccaaactgggaacaaaaaatgggccccctggctttaggggaaaacaaaacaagatttttaaggtgggcctgattttccaccattttttgcccccggaagggcttggaaaattttttaacaaggggcaggccccctttttcctttttcccccttaaaacttagccttaag

SEQ ID NO: 177436 - DNA, 353 bp, Zea mays
  Clone ID: MRT4577_9340C.1
gaggaacaaaacggcacattacagggtatgaaaagcagatctggtagatgagtgaggactttaccggtccaagatagcacctttgcaacaccacttactatcaagggaaagacccgacggccttatttaagttctgaaaacccagctggggaaaaaaaactaggtggggaaacccccgccttcattgggggggggctacacttagcgggtccgtttgggggaaactggcaagggaaaagggcaatttccaggggagccccaaaaggttaataaaattgcctcccaaacttgtgtgaaggcttggatgggaccccctggggattggtcaaacttccctcaaggggggtttgggg

SEQ ID NO: 177437 - DNA, 265 bp, Zea mays
  Clone ID: MRT4577_93410C.1
ggacttttgggaaattttgcccatggtgtaactgatgtaccttgccctagaccttgtgcacaggtggttaagttagcttcaataactagtttacaaattatgttggttaattttttccctgatcccactttgcctttacaaattatgctgtaccactaaactttaaagggcagtggtgttttctttgcaaataaaattagagagaagggaatcatgtttatactgatatttcaaaagaagtggccatcctgcatagacttgaagg

SEQ ID NO: 177438 - DNA, 489 bp, Zea mays
  unsure (1)..(489): unsure at all n locations
  Clone ID: MRT4577_93411C.1
tcgagcgccgggtctatcgctacacgtgcagcgcgcagtcttcgactgagaaccatacgccagcactcggcgacggcggcgcgccaccggcgacgggatcagcggcatcactcccctccttccccggtgcgtgtgntccttgtacctatgtcttattatttgttttcttgttaatagtattagnggattatttctttttttttttnnnntnngttttggttncttctatttccnnaacttctttctaccctattgtctttcntattatttttttcattggnggtcttattttttattttttctattttctatttctnattcccntccttttattttggtttttttttttttattcctcccccccttttctaatttcttntctcttttnacttttttttttttttnttttttttttntttntttttttttaatttttttttttttntttttatnttttttttttttttttttttttttttttttattttt

SEQ ID NO: 177439 - DNA, 570 bp, Zea mays
  Clone ID: MRT4577_93412C.1
gagcggtatgatagttcgttaagtggcgttttacacctggtactagcctgctagacactagattatgatagtgtggatgccggtacacacagtaatacatgtactatatgtatttgagtgaaggcgtcatgcatgtaataatgtggcgtgtaccagctttgcactgatggactgaatataggaggagtgactttatatggactatgacactatagataacacattgaactgcacattcgataatagtgtatgctaagatacaacggtgtattatttgtaagactaatgttacatgtctaaaaaaaaaataacagtacggacaatttaaaaaatccaaacttacatactcttacttacgaagaaaaaacatgttgtatgaatggaattaaataagataattgtatcttgactttattcaagactacagccaaaaatatttgaactccaacgacaatgtgcttgaattgcattcatatttcaccaggttgtgttgtgagcactatatgcatactttgcggacttaccaatagaggaacacccagatatggaaatgcctctacctactgtaat

SEQ ID NO: 177440 - DNA, 396 bp, Zea mays
  Clone ID: MRT4577_93413C.1
gctccacctccaccatgttttcacctttccctccatcaccttctccttcgtccatcgcctcatttacaacttctcgagcacccccacaccaacccctaccaccttccaccataactcctccaccactactatctacctctcctccaactataacctccaccaactcctcaataaattagtgtaccttaacaagcatcgagatttactataactggacctgattctctagacctagctcgaacatcactttcacaccattcactatgccaacatccacaccctccatcaagtgctcaacctctaaaacccatatttctgtaaataattgactatccaagatcatccaccataagatctgaactctaatcctctgttctcttccatcaaatcaaatat

SEQ ID NO: 177441 - DNA, 393 bp, Zea mays
  Clone ID: MRT4577_93414C.1
gaagcgcgtaagcatctttgctgctgcgcgactgcgcgagagcttttctctccttgtcctcctactacagaaaaaaaacggctatctacagggacacacatcctggcatcacctttgcttcctccattcggaaggagcactgagtactttttttatcaggggggacaggggcggaggaggcagcagatcccagagatcgccaggtggaaccagcataccgacgaggcggcgtacttggagtcggcggtgcaagctggactcggcaggcccggccactgctaccactaccactgtggcaaccaggctgagctgatcaggacctccgcctcgccggctccgcacaagccaggccaagaaagtgcgaagcaaggatggaggcccactgtcaccacc

SEQ ID NO: 177442 - DNA, 1053 bp, Zea mays
  Clone ID: MRT4577_93416C.1
gcggcgggtttgctgactgacttttctctactgttgcacatatggaacttggtttgctttcttttcgcacctttaatgtgttccaaggttgtggagcaccaattacgaacctaaagcaattattacgcaaccagacctttacttggtcggttttgagttaaaaattgaactttctctattgtgcttgtgtcgctattcaggttactgtggaacggcacttgtcttctccatgagcacttctttgtagccacgttctagtgccttgtgaccatgttttttccatcaccaatcgagccacaaaactctagtgtattagttgttgacaagtgctgctgtctgcttgacatatttgatctgaggaactattcatttcctttccaattttaattccttaatcaccattggcagatatgctcgtgaacctagtatcatgaggtacattaagatagcagctatgcttcctaacagaaccatcagggatgttgcgctgcgatgctgctgggctacaggtaaagagagaaggaagaaacctgatggattctacacagggaaaaaaatgagagacgtgaagccaatccaggacaaaatggttgcatcagtcccactagctaattttcacatgacacctacagcgaatgtaatccctttttcgaatgcaacgcagcatactaatcagtttagtcagccgcccaattgagctcctgacctccccaattcttgaaggattctcccgtttggaaaaagtcaccagttttggtgcgaaacccccaagctatttgctggtgcttctgtttgctttgtccggcaaatagaccagagtatcagcccctttatcttggcccccgcaagtgactgtaaatatcggatgactggaggcgttccatgttttgttttactgatcgttggtgaaggcatttcttcttttcttgtttttaatggtaaccccagacagggttcccttccccccaataggtaactatgtccaaaagcccctgccctagactgttaggggtagaacgaccccattttttgactatttggaccctggacccc

SEQ ID NO: 177443 - DNA, 388 bp, Zea mays
  unsure (1)..(388): unsure at all n locations
  Clone ID: MRT4577_93417C.1
ggaaaaaactatttcgttccaactttaagtataggcacgtgggctggnnccnngaccctccttatnngccggccgnttttgggggggccggggcttgccccgntggttctgggggggggggtggcgtgctgcctgcgggggtggtggccctcggcgtgggggggggtgcgccgccgaacgcggccggggccggtccgcgcgacggctacgacggggacgccggattggactgcgtggtccgggcgcagtggctccgcgcggccgggctcggcgcgaacgacggactggattacgtggcctgcctcatgatcggnttcggcgccgtgaacgcgacgcgcaaggccatgctggtctgcggcatggcagggcttgtggtcggcgcctgcag

SEQ ID NO: 177444 - DNA, 298 bp, Zea mays
  Clone ID: MRT4577_93418C.1
tatgagcgagtggccgagctcactaaaaatctctcgccctgtgggaggcagcttgcattgaccaggaccgtcgaagctctcatgagaggcacaccgactccggaggaagacacctatctgctgattgacccaccttcctctagatcaggatgcgctgtacaattcaaagggccattcctagacgcatttgtgtatatgataggcgggggaaataaccccgactacaggagcttgatggacctggcagaatgctcacatacaccttcttgaacccatgccatatacggcgcaaatgaca

SEQ ID NO: 177445 - DNA, 525 bp, Zea mays
  Clone ID: MRT4577_93419C.1
cattcaaacatggcagagttggcatttcccgctacctatcatacgagtccgccgtagtattccaccaaaaacaactcccatgtccgagtcttcctctgtcgaacaatgcgcgccagccgagagcgagtagtttacttcagcttcttcttggggcggagctggttggtgtgaccgcacttcttcttgcggcagttggtggcacggggagggagacgagcgtagcacttgcggcagatggccttgtcgcagttgtacttggaggcaagggccttgagcgagggctcaatgataccaccacggaggcggaggaccaggtggagggtagactccttctggatgttgtagtccgacagggtacggccatcctcgagctgctttccagcgaagatgagacgctgttggtccggaggaatgccctccttgtcctggatcttgctcttcacattgtcgcctgtgtcagaggactcgacctcaagggtgaaggtcttgcccgtcagggtcttaacgaagatctgcatctttgct

SEQ ID NO: 177446 - DNA, 643 bp, Zea mays
  Clone ID: MRT4577_9341C.1
ccggccgggaacatactctcacgtctccacacgcttcttattcgaggcagccgttctcacgtctttggatgaccaacccagcggagatccatggaggtgaggcgtggtgctgatactgtcgaatgactccagcgacgtatgcagtgccaagaatatggctgtgtgacatgtgaagggaggagccaacacacgttgccatctctgccccaagcaaatatgcacacgcatgttaggtgctagagtaacagaggactggtacacctccgagtgtacacatccggttccatgcgtcgctagaccacacactgctttagataccgttcgtatcacttcattaatgacaccttttgcattatggaggagcgttgaatacagctgaccatgccatcactgtcaaggacacacaacgtttgtggcactcctcagccaaggactgaacatgatgcacaactgccagctttaacatcattcccagcagcaccgagagcgtgccaaggctgatagtaatggtcatcctggaccgaacggaaaactcactgacatgctctttcgggtacccaccgtgaatgtgtcatcagttgacctcactgtgacactggtgaaagtggactattatgaggcaattaagatagctatgaacgct

SEQ ID NO: 177447 - DNA, 473 bp, Zea mays
  Clone ID: MRT4577_93420C.1
aaacaggaaaaatcctttttaaaaaaattctcgtatgaaaaacccaaacaatacattgggcccaaaaaaagccggggggccaaaaaagggggcaaaaaaaacaacgcgaaaacagctttttttttcaaatggtttataggccaacccccaaaaagcaaatccctgctagtttgctacggggggaacatgaccccccccccccccaaaagccataaaaaaaaccggaaaacccccttaaacacgaaacacgggggccatgattaaaagcttttaaaagcccccccccatacttttgttgcacctaaaagggggcccccgttaactatttcactttccttgaaaggcttgcggcccaaaaaaaaaaaggaccctggaaaaatcccttccccacccccttttaaaaggccatcaaaggccctcgttaggacgttggaggctccccccctgcctggtggggcaatacgggggaactt

SEQ ID NO: 177448 - DNA, 825 bp, Zea mays
  Clone ID: MRT4577_93421C.1
gctctttcccttctcgcttcaaaccaaaccaaaatcggagcggcggagcaaaacgatccgtagcctcgcttaccttcgattcagctcgaccagggcactaaccgggaagccaatgccgcgcgagtcgcgagatctgtagcgccaatcggcttcaccggcggcggggtgggcatggaagcgcagaacggctcctgcggaggggcgcccgtggtgctcaacgtgtacgacctgacgcccatgaacaactacctctactggttcggcctcggtattttccactctggaatcgaagttcatggtatggagtacggatttggagcacaccagtttccggcaagtggagtattcgaggtggaaccgaaaagctgtcctggtttcatctacagaagatctgtgtggatgggcacaactgacttgtcagagcagagttccgctcgttcattgaaaatcttgctggaaagtacaacggcaacacgtatcatttgatttcgaagaactgcaaccattttacagatgatgtctgtaagagcttgaccaagaaatcaatccctgggtgggtgaataggctagcaagagtgggttcattttttaattgtcttctaccagaaagcatccaagtttccacaatgatgatatggattcggtatcttcatcggttcttggagacagtgatctgggagagttagaccaacaccttctgccatcgtcaactgctgacgtccattctatagacgtgccaccaaatctagccaaggatcttctctgaattatccaaccctttggattccacgtagcaggatagcttaaattgctgcagttgatgtc

SEQ ID NO: 177449 - DNA, 1291 bp, Zea mays
  Clone ID: MRT4577_93422C.1
cattgggtacctcgaggcaggccgggtagtcagttagctagttgttctcgttcccttgttagttgagctctttcccttcctcgcttggaaccaaatcaaatcggagcggcggagcaaaacgatcccttgcctcgcttccattcgaatcatctcgaacggggcactaatcgggaagctaatgccgcgcaagtcgcgagatctgtagcgccactcggcttcaccggcggcgcggcgggcatggaagcgcagaacggctccggcgtaggggcgcccgtggtgctcaacgtgtacgaccttacgcccatgaacaactacctctactggttcggcctcggtattttccactccggaatcgaagtccacggcatggagtacggatatggagcacacgagtttccaacaagtggggtatttgaggtggaaccaaagagctgtcctggtttcacctacagaagatctgtgtggatgggcacaactgacttgtctagagcagagttccgctcgttcattgaaaatcttgcaggaaagtacaatggcaacacataccatttgatttcaaagaactgcaaccattttacagatgatgtctgtaagaacttgaccaggaaatcaatccctgggtgggtgaatcggctagcaagagtgggttcatttttcaactgtcttctaccagaaagcatccaagtttccacagataagacacgtccctactcatcctgcattttctgatgatgatatggattcggtatcttcatcggttattggagacagtgatctggaagagctagaccaacaccttctgccatcgtcaactgctgacgtccattctatagacgtgccaccaaatctagccaaggatcttctctgaattatcctgcactttgggtccagccgagcaggatagcttaaattgctgcagttgatgtccacttagtgcctctccaggtggcataggaatgcaggagtgtagatgaatgctgctgattgtgttgattctttgccactgaatttgttacatacgcaaacaaagctctcgacagaaatgacgtgctttctaattttttcctaagtatcttgtgttcgagcgatactgtacgcattcagaatgccgtcaatggcgtgtctggttcgaggcatacaaagtagtgtcttgtgttcgagtgatattgtaggcacttgtgtatgcggtcaatggtgtgtgtttggactggtcacaggtaatccgtcgagtgtagttaacccaaacaaatcttagtatcatctggcttcaatcaaaaaaaaaacaaaagaa

SEQ ID NO: 177450 - DNA, 1372 bp, Zea mays
  Clone ID: MRT4577_93423C.1
cctcgaggccggccgggttataataacgggtacccgaattttacccaagaagaaaaaaaaaaaaaattaagttcccttgttagttgagctctttcccttcctcgcttggaaccaaatcaattcggagcggcggagcaaaacgatcccttgcctcgcttccattcgaatcatctcgaatggggcactaatcgagaagctaatgacgcacaaatcgcgagatctgtagcgccactcggcttcaccggcggcgcggcgggcatggaagcgcagaacggctccggcgtaggggcccccgtggtgctcaacgtgtacgaccttacgcccatgaacaactacctctactggttcggcctcggtattttccactccggaatcgaagtccacggcatggagtacggatatggagcacacgagtttccaacaagtggggtatttgaggtggaaccaaagagctgtcctggtttcacctacagaagatctgtgtggatgggcacaactgacttgtctagagcagagttccgctcgttcattgaaaatcttgcaggaaagtacaatggcaacacataccatttgatttcaaagaactgcaaccattttacagatgatgtctgtaagaacttgactaggaaatcaatccctgggtgggtcaatcgactagcaagagtgggttcatttttcaactggcttctaccagaaagcatccaagtttcgacagtaagacacgtccctactcatcctgcattttctgatgatgatatggattcgggatcttcatcggttattggagacagtgatctggaagagctggaccaacaccttctgccatcaactgctgacgtccattctatagacgtgccgccaaagctagcgaaagatcttctctgagttattcagcactttgggttttcacatagcaaggataacttggactgctgcagttgatgtccgctgagtgcttctctgggtggcgcagccgcgcaggactccaggaatgtcgaatgctgctaattgtatcgattcttttgccactgaggtccttacatgcacacagagctctcgacagaaatgacacgctttctaatcctttgcctgttgttatgacttttatgttgtgacttcatcctaagtatcttgtgttcgagcgatactgtacgcattcagaatgccgtcaatggcgtgtctggttcgaggcatacaaagtagtatcttgtgttcgagtgatactgtaggcactgagaatgccgtcaatggtgtgtgtgtttgaggggtcacaggtaatccatcgagtgtagttaaaccaaacaaatcttaatatcatctggcttcaatccgtgcagcttttcctagtgatatatataatttttgttttaat

SEQ ID NO: 177451 - DNA, 464 bp, Zea mays
  Clone ID: MRT4577_93424C.1
ctcctccttcttccagcacctagcacttcatttcacctaccacccattatatggaggcgctcgcggcgcgcccgctgggcgatcccaccctgccctctgccgctgaagcctccccgttactccgcgcgtctcctggcggatcacaccgactgccgacaaactctcatctgaccgcccgctgtccgagtgcgagtcgcggcgaccagtctacactccccccagtgcctccatgtgcaccgcaagcaccagagagcggcgccccgcgtgcctgcctgcgcctcggcatccaactcctctgcaccggcctacccaaccaggtaccggtgtgcgtgggctccgcgcccgcgcccgcgcatgttccttcacccgactcggttactaccatgcccgcatggccgccggacacaagcagctacgctccgtgcctgctggatgcgacctggtaacagtccggctccttacca

SEQ ID NO: 177452 - DNA, 1354 bp, Zea mays
  Clone ID: MRT4577_93425C.1
cattgggaccctcgaggccggccggggaaaaccaaaccaaaatcggagcggcggagcaaaacgatccgtagcctcgcttaccttcgattcagctcgaccagggcactaaccgggaagccaatgccgcgcgagtcgcgagatctgtagcgccaatcggcttcaccggcggcggggtgggcatggaagcgcagaacggctcctgcggaggggcgcccgtggtgctcaacgtgtacgacctgacgcccatgaacaactacctctactggttcggcctcggtattttccactctggaatcgaagttcatggtatggagtacggatttggagcacaccagtttccggcaagtggagtattcgaggtggaaccgaaaagctgtcctggtttcatctacagaagatctgtgtggatgggcacaactgacttgtctagagcagagttccgctcgttcattgaaaatcttgcaggaaagtacaacggcaacacgtatcatttgatttcgaagaactgcaaccattttacagatgatgtctgtaagagcttgaccaagaaatcaatccctgggtgggtgaataggctagcaagagtgggttcattttttaattgtcttctaccagaaagcatccaagtttccacagtaagacacgttcctactcaatctgcattttctgggcggatctacacccgggccacccggtccagggcccggggcttgatccatataactgagccttagacccgtgctctggcgtgggatagacgaggagatttttttaaccacggcctggaattcgctcccacggggagtcgaactcagtaactgagtgctactcataccacctaaccaactcagatgatgatatggattcggtatcttcatcggttcttggagacagtgatctgggagagttagaccaacaccttctgccatcgtcaactgctgacgtccattctatagacgtgccaccaaatctagccaaggatcttctctgaattatccaaccctttggattccacgtagcaggatagcttaaattgctgcagttgatgtccacttagtgcctctccaggtggcataggaatgcaggagtgtagatgaatgctgctgattgtgttgactctttgccactgaatttgttacatacgcacacacagctctcgacagaaatgacgtgctttctaattattttcctgttcataagcctgttaaaaaaaaaaaaaaaaaaaaaaaaaaaaaaaaaaaaaaaaaaaaaaaaaaaaaaaaaaaaaaaaaaaaaaaaaaaaaaaaaaaaaaaaaaaaaaaaaaaaaaaaaataaaaaaaaaaaaaaaaaaaaaggggggccctttgggggggc

SEQ ID NO: 177453 - DNA, 299 bp, Zea mays
  Clone ID: MRT4577_93426C.1
gggggggggggacctaccgtacgggccgtgtttcccgcacccgttctggccactcaaccgtaattctctcagtctaaaggactctcggacacgtcgtgggactgactcgtctctagtcgaaacccgtacccttcactgcacctaacgtaacctattaacacttttttccccctccaacaactttcggttgggcccgacgcaccgcatagaactagaaagttatgctagtctttgagttggtcgcctagtaccttcgtttcgagaatactttagtgtcagaaggataaggagttcctcct

SEQ ID NO: 177454 - DNA, 437 bp, Zea mays
  Clone ID: MRT4577_93427C.1
atgatgttggactggtgatactttagggggctcgagtggtttctcgagtgcctctgcgtaaggacctattcgttcgatgaccgcccggaaaaacagtgcaaccatgagggtggaatgggatgcccttagctaattagttagagaaactagagatgtagttgcttcgccgccgtgccgtcaatggggtccaggcacagtgcttgctctgccgaggctgggtgccgaggttctttcattttgcttttgttagtcacccctctgcgaggagtggtgctgtgtttatcaaactggagaaacctaacgggcggttatgacctctagggaatctttgtaaaggcttcgtagtgaatccctggccattcaccttgggagtggataagggtcttgcaagcccgggctagagagggaatcacgtcttgtgggtaaagtgtgcaacc

SEQ ID NO: 177455 - DNA, 159 bp, Zea mays
  Clone ID: MRT4577_93428C.1
ggtggtgcagccgcagcaacagccccaggcgtcggcggacgcggggcggctcaagcggaagcggcggcatcaggagcagcttatcgcgtttgcgttcttttttgagcggctgatgcagcggttgatggagcaccaggagagcctccaccgtgggtttct

SEQ ID NO: 177456 - DNA, 118 bp, Zea mays
  Clone ID: MRT4577_93429C.1
tcgaaggtattagctgaacactctggataggatctttatttaatgccgggtattattggaattggacccttcttaatctggaaaggtggttttcctttggaccaatccttatggtttc

SEQ ID NO: 177457 - DNA, 155 bp, Zea mays
  Clone ID: MRT4577_9342C.1
cccacgcgtccggacagataaagaccaggcaaactatattgaatgggagaggataaagccaatcaacatatgagaggtgattattttaatttgcaatttgtctacataataaattagatacgaaattgtttgtcaaaaaaaaaataatacaaaat

SEQ ID NO: 177458 - DNA, 266 bp, Zea mays
  Clone ID: MRT4577_93430C.1
tgatagcatatcttgaagaggcaacttttctatttgtagtttacgggtctattcaagataggaaggctatctatacataaaaaatattgaaaacaacatattatgctttggaattaaataaaattaaattcaagttcacctaattgatggtggtgtcatttattttttttattctatttatcactgtatatgtcctttatttctatatttttctattttaaatttatatactttatagttgttttttcacgttttgcctactatac

SEQ ID NO: 177459 - DNA, 320 bp, Zea mays
  Clone ID: MRT4577_93431C.1
ccgtccgataagaaagcacatatacgtgtacacaaccaatgagcacgcccaaaatatctttcgcttcctgtatgcgtgctgtggtactttctcgcaagctgtgtgctacgcgcaacacattcttacccaccaatgcatcaacaagctgcctatagcgttccgcttcttcaccccataccttttcaccagaccgtgtgcttcaaatgtgtgaacaacccacattgttcacaccctacagtgatccaacagtgcaatcgcaacatggacatcttaccaattatcaccacttgtttcctccaacagaccgtcatgccctatta

SEQ ID NO: 177460 - DNA, 303 bp, Zea mays
  unsure (1)..(303): unsure at all n locations
  Clone ID: MRT4577_93432C.1
tttgaaggaactgtaatgttctctcagtactgagaaattcttagacaatgctcctttagaagcagacagtcgcggactccttaaaaataacgccccgggccactttacaaatataacgatgtactactcgtcttttagtttttcgcactttaggggtagtaacatttaaaacaatccaatggaacttttaatttttcgcactttaggggtagtaacatttaaaacaatcaatggaactgtggcagatagaganaaagaatcaaacgttcgacaacaattactcaccatagaggagaaacactc

SEQ ID NO: 177461 - DNA, 721 bp, Zea mays
  Clone ID: MRT4577_93433C.1
cccacgcgtccggcttcttgctgcaggtttcatctgctcggggagttcgatgaggtgaagcggagctgcaggaagcgcctcgatggacacaaccgccgccgccggaagccgcagccggaccctctcaaccccgccggcttgtttggcaatcaccacggagtgacaagattcacgtcttacccgcagctcttcgcggcgtccatggaacagcctaaatggtcggtggtcaagacggaggccgacgtgttccaagaccagtactacccggccgtccacctcaatggcgctggcggcggcgccatcggctcccacttccacggcaaggagcggaagcacttcccgttcctgaccagccacagcaacggcggcggcggcggcgacgtggcgaccgccgcggccctgggctgccagccattcaccatcaccaccacggcggcctcagagagcgacagcaagcagagcaacggcaactgtgctctctctcttctgtcagacaacccgacatcagcacagacggtcatgatccctactaccgcgcagtccctcgccgcggtgatgcagcacgggggcagactccctggcagcgtcagcgctcagcggcgataacagatgctgcttgcagccttggatatttgtggagtgaacgcattgttgatagcatatggataagaaagtaatgtaattatctggagatgtgtaattatgtggcaatattatttgc

SEQ ID NO: 177462 - DNA, 233 bp, Zea mays
  Clone ID: MRT4577_93434C.1
gtgtcttaacaccatcagccctatttactttatagcgcataaaaacccgagcgaggccaggagggtgttactaaactccctcactctacatactctacttgcgagctccacctccactcatacaagaaagctctcataggtcagatcatcctctaacacgcatcgaccgccaaaattgcatacttcatctaacgtgtcacctacgacctcccaggcacatgccaacaaccgac

SEQ ID NO: 177463 - DNA, 370 bp, Zea mays
  Clone ID: MRT4577_93435C.1
ataccaaccccgctggaaatgctggagaaggtaccgctcaaactgacagatccaatatggttcaaatcgcaactttgggagatgccaaaccagctactgatgattggattagcaagaatactcctcttttcgaatcaaaggaattgagactttacatggctatgttgggacaaaccaactgtttgacttatgaacaattgttggctaagaacgcaaacaaccaaaacaatgttgaggctgacgttcaaaactgtatgaaactcaatgctgccccaagatattttgatgctggtctcattaaaatgaacaagactggaactttgcactatatgtcttccagaaacaatatcttcaccaaccgaactcaaag

SEQ ID NO: 177464 - DNA, 387 bp, Zea mays
  Clone ID: MRT4577_93436C.1
gggacaacacaggttcttaaaaggaaaggggatattattggcgattacacacgataatttgtttgttgaacaatttgggaaacagtacttgttcttgataaaaaaaaaagccaaaacttgcaggtgtttgaccaaaacagcagttttagtggtcaaaaaggctgaaacccatttcctcgggcgactccttttaaggctccgaagactttttttcttcctggggagcagattcagcgcctgagttcccaaaaccaaccggggcggctacagaaaccttgcttgggtccttgaggaactgcttgatctggggcaggatgtggttccgagaagtctgtctcgacagcaccagcaagcccattcttggccccattgaggaacatgtggggc

SEQ ID NO: 177465 - DNA, 278 bp, Zea mays
  Clone ID: MRT4577_93437C.1
gtgcctgggagctggatctgtgtacgcggcgactggcccaaggaggccactagcgcgcgagctcaatacaagcaacagatcgaacgccatgttaggagactcaatattgctctacatgggtactaactcagccgaccagatctgtgaaccgtggtttgttatttttgttgttgatcattagcaccacaggtgagaaccttgggctattagtcccctcacatggggtaacactttttcataccatattgagtgctggtaaccaattgagcatgcttact

SEQ ID NO: 177466 - DNA, 587 bp, Zea mays
  Clone ID: MRT4577_93438C.1
gaagaaaacctctgttggaaatgatgtgggataccgtttgattccagcaatcccagctcatcctcttctcacagatgacgattatccacaaatacgtggcgcttttaccaatttcaatgtgtgggtcactccatacaataggactgagaagtgggctggtggactctacgttgatcacagccatggagatgatactttagccgtttggaccaaaaagaatagagacattaacaacaaggacattgtgctgtggcacgttgtgggaattcatcatgttccagcacaggaggactttccccataatgccattatttgagcaatgccttcgagctcaggcctgcccatttcttcgagaggaatccggttcttaaaacactttctcccccgcatgtccaatggcctggttgccccaagtaaaactagctagccagccatttcctctatattagtgtgcgtcgagtgctacatctagatgtgttccttggataatgtgaaatgcggtcggcttattgcatgtgcaagaataatgatttcatatggatcgcttattattatatcaatgagaagttcacttgaacttgactccg

SEQ ID NO: 177467 - DNA, 194 bp, Zea mays
  Clone ID: MRT4577_93439C.1
gtccaccgacccgtctgatgacgaatgggctgcttctccccacggcgcacgcgcgcaccatcttctgcgcgccgccagccccgcttgttctggcgcccgggcgccgccagccgtcaggccgtcaccgagtggggatccttgggcacctgcacgcccccagcccgtcaacgcttggagacccgcgcaaccgcggc

SEQ ID NO: 177468 - DNA, 1829 bp, Zea mays
  unsure (1)..(1829): unsure at all n locations
  Clone ID: MRT4577_9343C.1
cctcgaggccggccgggacggccgcgagcgggaaagcgaaatccactacattgcgggttgccgccttcgtcccattttgtagtcgataccatctccctccggcgcggcagtgtcatcggttaatcgaaacgcgccgcgcgcccgccttcgtttcaaacgcgaaattttccgccatctcccaaaaaaatttcccttgcctttgcctccgcccaaccaacaaatcgccttctattttgcttgcctgcctgccgcccaaaccaaccttcctctcccccgtaatcccagaaatttccgcccacaccaaccggcacctattccgtgggcgcgaaaccctaatcggcgcccgcctccctctccatggcggagcaggacgacgccgcggggcagagcccgctcgactccgttccgattgacgaaacttgtgatgctgaagatatgcattctcctttgtccttttcttacagaagtcagcctaaatatgtgggagctggtcttagcaatatggggaacacatgcttcctgaacgcaactcttcagtgcatcactcacactgtaccgctttttctcaagcttcgctcaactgatcattccaccccatgctcatataataaggatgggttttgttctttctgtgcccttaaagaacatgttgatgaatcaattcaaaggtctggatctgttatagcaccagcaaagttcagagataatttaagaaagttatcttcggatttttggccaggacagcaagaagatgcacatgaatttctacgttgcttgcttgataacttgcacaagtgtactcttgatcccatgtcaaagggcaagggctcatcctttgacgaagaaagtatagtcaacgagatttttggaggacaactgaaaagccatttatcttgctgcgagtgtggtcacagctcagagacgtttgagcccttcctggatctaagcttggagattgatcaggttgatcatctggtagatgctttgcaatcttttaccaaggtagaacagattggggactctgaaaacaagctcacctgcgaaagttgcaatgctcaagtttctaagaacaagcagcttacacttcatagagcaccagatgttattgcatttcatctcaagcgttttacaacccttgacaattctgttgaaaagattgacaaacatgtggtgtaccctctggaggttgatttgaagccatttcatagcaatccagacacagtggggggactgaaatatgatctttatggtgttgttgagcattctggattacccaactatggccattatacctgcaccattcgttcttcaccaagtacatggtacttgatgaatgactccaacgttgattctattactgattcaagtgcattaaaccaggaagcatatattctgttctatgttaggcagggcaaatttccatggttctcgagtttgttagaaggcaaggttgtcctacaagctgagaatacctgtggaacatctcctgtgtcagttttggaaaatatagatgtaaactgttcaacttcttcaggaggaggcagtagcagtagttctggtgataagttagagaaaaatgaagccagccaattagaagagacaaagaaagatgaaacgagtcagtacaaaacgtcattccttcccgacgagccatctaagagttcttttggtgcttctaacagcaataatgcaatggatgaagataatccacccagggtttctttccaaaattctgtggctagttgttcccgcagtgtagaaaccaccaatctcgagaagccttctactccacggngctcccagcgactggcctctcatgatgagtttag

SEQ ID NO: 177469 - DNA, 284 bp, Zea mays
  Clone ID: MRT4577_93440C.1
aggaactaaacgaaactgattaaatgtatgagaaatagaaactgatttctggatgatctttatactaattgcagctttcaggctactaggtggcatagtgttaattaggactccccaagatatggggagttctactctcaatggtcttgtttctttgctttctacattagttaaccagttttataccaaaaaatgcatgtttgaggaattgtctgaaattgggacaaaacaccttcatgtaaaccagctttgcaaaattttccagcccagatactcttcatcta

SEQ ID NO: 177470 - DNA, 656 bp, Zea mays
  Clone ID: MRT4577_93441C.1
ggggccggaaaacaacccccctgggggggggggggggaaaaaaaacgaggcaaatgccccactgggtttttacaaaaaaaggccccgggcaattttttaaaaaccccccaaacaaaggggggaaaaacaggtcccgtgggggggcgaaataaaaaaaatttttaacctacccccagagggggtacaaaaaaaggggggccccaccccttttttttgaaaaaaaatgggattcaacaaccccctcctggaaaacaaaaaaggaaaaaaaagggggctcatttggccctggcaacctgggggcggaaaaacttagcgggggaaaccattttggtaagggggggtttaacccccgggtacttgggggttttggggcccaaaccggggttcccccaaaggatgtgggggcccaccccccccagatttttgtgaatgggggggggaatttcctaaccccacggaatcctgggggaggggatgttaaaaaccccggggccaatcccccccccttatttaaccccctcgggaaacaaggaaagaatttttttgtgggaccgggagttttaaaggggaaccccccccccccccttttcaaaaatcaaggggatgatgtctttaaagttggagaaacaaatgggggtgggaatctggggggggcc

SEQ ID NO: 177471 - DNA, 274 bp, Zea mays
  Clone ID: MRT4577_93442C.1
gtgcttcctgtccttaaccgaaagtggagtggaatgtgtttaacagtcccaaccttggatgtttctgcagttgatttgactggcaggcttgagaagtcagcaacctatgatgagaccaagggtggagcaaatgccgatgcataaggtagcctcaagggcatatctgtgttacgatgaggaggaccttgcttccaccgattcacatggtgacagatggtctagcatctcttatgctaaggctggcattgacttgaacagcaacttgatgaagctc

SEQ ID NO: 177472 - DNA, 511 bp, Zea mays
  Clone ID: MRT4577_93443C.1
gtacgtaagctcggaattcggctcgtggactgagctgaacgttcttgccaagcgcatggagccgtctctgtgcacgccgcacgccacggtgaccgcagcaaatgccgccccgctatccgtgcgcgcccaccgcggcgcgcgcagggctcgtgccgccgtgcgcgcccacagccaccaccagggggcaggggcgggggcgcgggagccggagccggagccggccgacccccagggcgcggtccctgccaagggttccggggcgccggcgctgcccaacgccgcgctgcgggtgggcgccggcgtggcgctggcgctcgcgctgggaggcgtgtcgtggacggcgcgcggcgggagcgccggcgccgggcccgggcccgtcacgcagccggccatggtgtgcgccctcaacgccgtgaccgacgccgcggtccgcgccttcgcggagcagcgcggctcggcgaccatgaagacgagcgtggacgcgctctcggactcgctgttccgtcgggag

SEQ ID NO: 177473 - DNA, 1678 bp, Zea mays
  Clone ID: MRT4577_93444C.1
ctcgaggccggccgggaaaaatttcccacccacccaccaaacacaaaaaaaaaaacccaaaaaaacaaaaaaaaaaaaattattaaaaaaaaaaaaaaaaaaaaatgggtacccggtctatgtggagtcaccacagaatcagtgagaagcttcccggcgactcgctgggggacacccgccgtctgttccttccccgcggtggcggccccccagccgagccgccacagcccacagggcatcaagcccgtgcccggcgaccgttttcccggaccccgcgtgcgggctaacactcgcacgtcaagtccgtatttataccggccgcctacctcccggcgtggcgggagttcgtggagtggagtcaccacagaatcaaagaaaagctttcccccgatcctctcgcggacaccagcgatgggttcccgctacgaggtggaggtcaccgtcggctccgcccgggacctcaagaacgtcaactggcgcaacggcgacctcaagccctacgccgtggtgtggatcgactccggcagcaagtgctcgacccgcgtcgacctcgacaacggcgagagcccggcgtgggacgagaagctgctcgtcccgctcccgcccacctcccgcctcgacgacgccgtcctctacgtcgacgtcgtccacgccaacgccgcccagggcgtcaagccgctcgtcggctccgcgcgcctcccgctccgcgacgtcctcgacgacgccggggtcgggggcaaggcctcgcgcagcctccgcctcaagcgcccctcgggccgcccccacggccgcctcgacgtccgcgtcgccgtcaaggagccgtccaggtactacgaccccaacccctacccggcccccgcggcctacgccaacacgggcggcggcacccgtgacccctacggctcgtccgctgctgctgccggcggctactacggctccggaggcggatacggttccggtggtggcgcctacggtggcggcggctacggcgccgcgcagccctacaccgcagcgcccccggcggggtacccttccacctacggcgccgcgccgccgcctcagccagcggcagcgtacggcgctcctcctgccgctgcatacggcgctcctcctgtcgccgccaccgccgcgtacggaaccggcgccgttgcttccgacgggaagaagaagaacaagatggggatggggacggggctggcagtgggcgcggcggcgggcgtgctcggagggctggcgctggccggcggggcgagctacctggaggacaagttcgaggagcgcgtgtcggagcgggtggaggacaacctggagagggaggagtcgtacggcggcggcggcggcggctacgggggtggctacgacgactatggcggcaacgacgactatggcggcgacgacgactactgatgggtcctgatcctccgatcgtttgcccggctgctacgcttgccatccacctccaccttcgtctcgctgtcctagatgtttgctgtatgaatcgcatagtagatcatgttctctattcctgccttcagtttcttttctcagttgtggtttatcgcggcggggttgatgttgagatttgagatcctcacctgaggaatggaaaaatgctcacctgaggaatggaaaaatggtaagggcttgttcggtttaaattgattaattcggttgctac

SEQ ID NO: 177474 - DNA, 2465 bp, Zea mays
  unsure (1)..(2465): unsure at all n locations
  Clone ID: MRT4577_93445C.1
cagaccgcagacctgggactctgggagggaggcgagcatcttcccctggcaagtggcacacgcgcacacagtaggcacaggtttggaagccgcgtggagactggaggggaaggtcccgtcgtctccaccttccccactggcaccgccccccagccgagccgccacagcccacagggcaggcagcccgtgcccggcgntcgttttcccggaccccgcgtgcgtgctaacattcgcacgtcaagtccgtatttataccggccgcctaccttccggtgttgctccagttcgtgcatgcatctcattcagtcctgagttcttccgtccatccaaagtgttagacagtaacccacatctcgtttcctcgcccgacggcgccgactgagcgaggtcttcatctgcgcttcaccagcgacgattatccactaggtaggggatcatccgatcatgtcgagcgcggcggtgaacgggctgtccggcgccggcggcggcatcatcgcgcagatcatcacctaccctctccaaaccgtgaacacccggcagcagacggagaggtcaacgaagaagaggaaggccaggagcggcgccagcgccaccccagcctccaccatgtaccagatgctccagtgactgcagctgattctatagaagagctatgacgtcgcatgcacgcgtacgtaagctcggaattcggagtggagtcaccacagaatcaaagaaaagctttcccccgatcctctcgcggacaccagcgatgggttcccgctacgaggtggaggtcaccgtcggctccgcccgggacctcaagaacgtcaactggcgcaacggcgacctcaagccctacgccgtggtgtggatcgactccggcagcaagtgctcgacccgcgtcgacctcgacaacggcgagagcccggcgtgggacgagaagctgctcgtcccgctcccccccgaacctcccaaccgaaggatggagtgggttgtacagcggcctcaagccctctctcatcggcactgccgcgtcgcagggaatctattactacttctaccagatcctcaagaacaaggtggaagatatagcggttgctcgtagcaagaagggccttggggatggtactgtcgggatgctttcttggcttggtattgcagctgttgctgggtcaatcaatgttcttctaaccaatccaatatgggttcttgtgacacgtatgcagacacatactcaagcgaaaagaaaaatattggagtctaagagggagcttttactgaaagaaatgtctagggcgaattcgttggaggttgcagttctgaaggataggctggttaaattggagtcagaaaaagctcgtccatatggtactcttcaagcgatccaattttggacatggtatgtaatccatcgattcagttcatgatctatgaaacattggcaaagcgtctgcagtcaaagcgttctggaaagcagctaccaaaaaggcacctcacagctatggaggtttttttattgggtgcattggcaaaacttggagctactttagtcacctatccattgctagtcgtgaagtcaaggttgcaggcaaaacaagaaattggcagcaatgtgatgtccagatacacgggtacaatagatgcgataataaagatggttcgctacgaaggactacacgggttttacaaaggaatgggcacaaaaattgtacaaagtgtctttgctgcctcggttctctttatggttaaagaggaattggtcaagttagcagtgcttttagttgcgagtagtaggactatgcttattactacatccaagaaacaataggtggtggtgtatttgggagaaaagctcatttttttgcctcaacttgtaatgtatagggtcccattatacatatcctgttcaagatcaatatgaaattctttactggttactagagcttccacctacggggccgggccgccgcctcagccagcggcagcgtacggcgctcctcctgccgctgcatacggcgggcgggcggctacgggggtggctacgacgactatggcggcaacgacgactatgggggcgacgacgactactgatgcggacgcgtgggcggacgcgtgggccggctgctacgcttgccatccacctccaccttcgtctcgctgtcctagatgtttgctgtatgaatcgcatagtagatcatgttctctattcctgccttcagtttcttttctcagttgtggtttatcgcggcggggttgatgttgagatttgagatcctcacctgaggaatggaaaaatgctcacctgaggaatggaaaaatggtaagggcttgttcggttattcctatcccatgtggattggatgggattggaaaaaattatgaaagattttaacttgtttgagattgaaatccatccaatcccacctaatccacatgaattaagagcaaaacgaatatgccctaaattgattaattcggttgct

SEQ ID NO: 177475 - DNA, 261 bp, Zea mays
  Clone ID: MRT4577_93446C.1
gggaggtggaagggttgatttgaaatatattatttctaaaaaggtccttccacctccacactggtgatggtttgcatctgatacgtacccgtttaagttataatatctttgacattgtgctccctctcttggttgatcacatccttgaacctttacgtctaatatgttatattaccagaattactaaagatggaattcattggtccattcattcttttggcttatcaattctgacaacataatatataccatgtgctgggt

SEQ ID NO: 177476 - DNA, 871 bp, Zea mays
  unsure (1)..(871): unsure at all n locations
  Clone ID: MRT4577_93447C.1
cccacgcgtccgcccacgcgtcccagacccagaccccagtcgctgctcgaggataattcccaagaatccgaagaaaattcattttcgagatgaacgaacagtccagaacccactgctcgaaaccgcagccactggccagtcgatgcccatgactgcggtgcccaggaccggccccggttgcctggggtcgccgccggctcaggctctgtcgagctcactagccggggttcaaggcgccccgaagcgactgggcgcatcgaagccgtcgtggatcgttcgcactgagtcaaacgtgaggagggagagagcaaaacgacctgatcctccttgcaccatctgcaagggcacagggagaatagactgccgcaactgctttggccgaggaagaacaaaccatgccgatgtggccatgcttccgaacggcgaatggccacaatggtgtcgaatttgtggtggtagtggactggattactgcctccggtgccatggaactggtgagtatcgtgaacccatgggcttccacttcactgtccaaagaaaatgaggtgggatggccttgtatgctacgatgcagcgcagttggtaccagctgcggggacatcgtagccactcagagcatgtttctccactgtctctcagaactcaaatgatttatgtctagcgctaacgctgtaataacgttgcttcataaaaggaaaaaatgtaatgaaaaatcacagtggtctgccgtgcattgatagtcttttagtctgtgtactagtggcagtgcacgtgcggtccgcgaaaaaatacatacaagatgtttatatatatctctatgtaatatcagattcattgatatatactggtcttttaattagttgcttnnnnn

SEQ ID NO: 177477 - DNA, 1103 bp, Zea mays
  unsure (1)..(1103): unsure at all n locations
  Clone ID: MRT4577_93448C.1
cggggtgggtgcggcgccggagtgtggagttgatcataaaccccgagaggaggatctcactggcgcaacggcgacctcaagccctacgccgtggtgtggatcgactccggcagcaagtgctcgacccgcgtcggcctcgacaacggcgagagcccggcgtgggacgagaagctgctcgtcccgctcccgcccacctcccgcctcgacgacgccgtcctctacgtcgacgtcgcccacgccaacgccgcccagggcgtcaagccgctcgtcggctccgcgcgcctcccgctccgcgacgtcctcgacgacgccggggtcgggggcaaggcctcgcgcagcctccgcctcaagcgcccctcgggccgcccccacggcccgcctcgacgtccgcgtcgccgtcaaggagccgtccaggtactacgaccccaacccctacccggcccccgcggcctacgccaacacgggcggcggcacccgtgacccctacggctcgtccgctgctgctgccggcggctactacggctccggaggcggatacggttccggtggtggcgcctacggtggcggcgcctacggcgccgcgcagccctacaccgcagcgcccccggcggggtacccttccacctacggcgccgcgccgccgcctcagccagcggcagcgtacggcgctcctcctgccgctgcatacggcggcggcggctacgggggtggctacgacgactatggcggcaacgacgactatggcggcgacgacgactactgatgggtcctgagcgggcgatcgtttgcccggctgctacgcttgccatccaccttcaccttcgtcttgctgtcctagatgtttgctgtatgaatcgcatagtaggttctctattcctgccttcagtttcttttctcagttgtggtttgtcgcggcggggttgatgttgagatttgagatcctcacctgaggaatggaaaaaatgctaaattgattaattcggctgctacgcaaaaaaactaacattaaaactgaagatataaccaacaagtggngaaaaatggcgctgtgcangctgcgattgacggcttgcttggactcgggaggcgatcagttagcctcc

SEQ ID NO: 177478 - DNA, 738 bp, Zea mays
  Clone ID: MRT4577_93449C.1
cccacgcgtccgcccacgcgtccgggccgtcgagatgaacgaacagtccagaacccactgctcgaaaccgcagccactggccagtcgatgcccatgactgcggtgcccaggaccggccccggttgcctggggtcgccgccggctcaggctctgtcgagctcactagccggggttcaaggcgccccgaagcgactgggcgcatcgaagccgtcgtggatcgttcgcactgaggaagaacaaaccatgccgatgtggccatgcttccgaacggcgaatggccacaatggtgtcgaatttgtggtggtagtggactggattactgcctccggtgccatggaactggtgagtatcgtgaacccatgggcttccacttcactgtccaaagaaaatgagtgaggtgggatggccttgtatgctacgatgcagcgcagctgcggggacatcgtagccactcagcatgtttctccactgtctctcagaactcagatgatttatgtctagcgctaacgctgtaataacgttgcttcataaaaggaaaaaatgtcatgaaaaatcacagtggtctgccgtgcattgatagtcttttagtctgtgtactagtgacagtgcacgtgcggtacgcgaaaaaaaaaacatacaagatgttcatatatatctctatgtaatatcagattcattgatatatactggtcttttaattagttataatagttgcaaaaaaaaaaaaaaaaagcggcc

SEQ ID NO: 177479 - DNA, 735 bp, Zea mays
  unsure (1)..(735): unsure at all n locations
  Clone ID: MRT4577_9344C.1
caccaactccctctacttcgccttctacgaagccaccgaagccggtgccaacccccagcgaccgccgtgccgctgctcgtctggctccagggcgggcccggctgctcctcgctcattggaaatttcgctgaggtcggcccattcctcctcctcaactctagctccagtggcctctcccgcaaccgcaatcgctggaaccgacgcttcggcgtcatcttcatcgacaacccgctcggctccggcttcagcgcgcccgcttcactcgccgacatccccagggacgagcccaccatcgccgcgcacctcctcgcggcgctgcagtcgttcatggcgctcgacgcggccttccgcgcgcgccctctgttcctcgcaggagagagctacgccggcaagtacatccccgcggccgcgaggcacatcctcgacgcgaacgacaagctccccgcgggccagagggtgaacttgcagggcatcgtcatcggcaacggcatgactcaccccgtggcgcaggtgaccgttcacgccgaccaggcgtacttcgccggtctcatcaacgccaagcagaaggccaccgtcgagggcatgcagacgacagcaacgggcttcggccgggcccgcgaccccgcagtccccgcaaggagccgaacgcatcataagcttcntccggaaaccacctggttgcgacggctttnaactacgcccccaaacaagtatccacgcgcccctgccaacttc

SEQ ID NO: 177480 - DNA, 1413 bp, Zea mays
  Clone ID: MRT4577_93450C.1
aaaaaaaaaaatttacaaaaaaaaaaaaaaaaaaaaaacttggcctcgaggccggccgcattgggtacctcgggggcggccgggacgcagaagcaaaagtctttcccttctatccttcctcccccctgatccatcccattcggccaccagcgacagcgatgggctcacgctacgaggtggaggtcaccgtgggctccgcccgggacctcaagaacgtcaactggcgcaacggcgaactcaagccgtacgccgtcgtctggatcgactccggtgccaagtgctccacccgcgtcgacctcgacaacggcgagaacccgacgtgggacgagaagctcctcgtcccgctcccgcccacctcccgcctcgacgacgccgtcctctacatcgacgtcgtccacgccaacgccgccgagggcgtcaagcctctcgtcggctccgcacgccttccgctccgcgacgtcctcgacgacgccgggatagggggcaaggcctcgcgcaatctccgcctcaagcgcccctcgggccgcccccacggccacctcgacgtccgcgtagccgtcaaggagccgtccaggtactatgaccccaatccctacccggcccccgcgggctacgccaacgcgggcactcgtgacccctacggctcatccgcggctgctggcggctactacggctccggaggaggctatggcagcggcggcggttacggcggcagtggcagctacggcgccgcgcagccctacaccgcggcgcctcctgccgggtacccttccacctatggctccgcgccgcctcctcagccgggatacggcgctcctcctgtcgccgctgcttacggcgctcctcctgtcgccgctgcttacggcgctcctcccgtcgatgctgctaccgctgcgtacggaaccagcgccgttggtgccgacggcaagaagaaaaacaagatggggatgggaacggggctggcagtcggcgcggcggccggcgtgctcggaggactggcgctggccggtggggcgagctacctggaggacaagttcgaggagcgcgtgtcggagagggtggaggagaacctggagagggaagattcgtacgggggcggctacgacaactatggcggcgacgacgactactgatcggatctgatcctcagctcccatcatttgcctggctgctgcgcttgtcttctaccttcaccttcgtttcttccgggtgtcctaaataaatatttacttgatgaaccgcaaattagataatgttctacgttgtggtttattgcggcggtattcatgctgagattgtggtttgagagatcctcgtttgcgagttgaaaaaatgccgaatgaattaatcccaccgctaggtgtgtattgaaccggatcatacatagagctaagtttcgatggattcacggat

SEQ ID NO: 177481 - DNA, 837 bp, Zea mays
  Clone ID: MRT4577_93451C.1
gggccgagccacgcgtcattggcccacgcgtccgcccacgcgtccgtcgaacagtccagaacccactgctcgaaaccgcagccactggccagtcgatgcccatgactgcggtgcccaggaccggccccggttgcctggggtcgccgccggctcaggctctgtcgagctcactagccggggttcaaggcgccccgaagcgactgggcgcatcgaagccgtcgtggatcgttcgcactgagtcaaacgtgaggagggagagagcaaaacgacctgatcctccttgcaccatctgcaagggcacagggagaatagactgccgcaactgctttggccgaggtctcttttagtccgtatctgtgttatcttgcgatatgctgctgaactacattgtcattcaccagcgtgatgtttacctttactcctcaaattttggtctggggtctacaggaagaacaaaccatgccgatgtggccatgcttccgaacggcgaatggccacaatggtgtcgaatttgtggtggtagtggactggattactgcctccggtgccatggaactggtgagtatcgtgaacccatgggcttccccttcactgtccaaagaaaatgagtgaggtgggatggccttgtatgctacgatgcagcgcagctgcggggacatcgtagccactcagcatgtttctccactgtctctcagaactcagatgatttatgtctagcgctaacgctgtaataacgttgcttcataaaaggaaaaaatgtcatgaaaaatcacagtggtctgccgtgcattgatagtcttttagtctgtgtactagtgacagtgcacgtgcggtacg

SEQ ID NO: 177482 - DNA, 1358 bp, Zea mays
  Clone ID: MRT4577_93452C.1
ctctccgtctctccctcctccctctcctccaagtgtagtgtagacagtaacccacatctcgtttcctcgccgcggccacggcgccgactgagcgaggtcttcatctgcgcttcaccagcgacgattatccactaggtaggggatcatccgatcatgtcgagcgcggcggtgaacgggctgtccggcgccggcggcggcatcatcgcgcagatcatcacctaccctctccaaaccgtgaacacccggcagcagacggagaggtcaacgaagaagaggaaggccaggagcggcgccagcgccaccccagcctccaccatgtaccagatgctccagctgattcaaaccgaaggatggagtgggttgtacagcggcctcaagccctctctcatcggcactgccgcgtcgcagggaatctattactacttctaccagatcctcaagaacaaggtggaagatatagcggttgctcgtagcaagaagggccttggggatggtactgtcgggatgctttcttggcttggtattgcagctgttgctgggtcaatcaatgttcttctaaccaatccatatgggttcttgtgacacgtatgcagacacatactcaagcgaaaagaaaaatattggagtctaagagggagcttttactgaaagaaatgtctagggcgaattcgttggaggttgcaattctgaaggataggctggttaaattggagtcagaaaaacctcgtccatatggtactcttcaagcgatccaggaggtttaccatgagtctggtataagaggattttggaaagggcttattccaacattaatcatggtatgtaatccatcgattcagttcatgatctatgaaacattggcaaagcgtctgcagtcaaagcgttctggaaagcagctaccaaaaaggcacctcacagctatggaggtttttttattgggtgcattagcaaaacttggagctactttagtcacctatccattgctagtcgtgaagtcaaggttgcaggcaaaacaagaaattggcagcaatgtgatgtccagatacacgggtacaatagatgcgataataaagatggttcgctacgaaggactacacgggttttacaaaggaatgggcacaaaaattgtacaaagtgtctttgctgcctcggttctctttatggttaaagaggaattggtcaagttagcagtgcttttagttgcgagtagtaggactatgcttattactacatccaagaaacaataggtggtggtgtatttgggagaaaagctcatttttttgcctcaacttgtaatgtatagggtcccattatacatatcctgttcaagatcaatatgaaattctttactggttacg

SEQ ID NO: 177483 - DNA, 144 bp, Zea mays
  Clone ID: MRT4577_93453C.1
gcgacagaaacatataatatcattatcctagggttgtcataagaaaacagataattagaaattcaacaaatacaaataaatctaaccattggcaccagtacatcagagttgccaaaagtcagcacatattatttcaaggaaaaa

SEQ ID NO: 177484 - DNA, 1593 bp, Zea mays
  Clone ID: MRT4577_93454C.1
cggacgcgtgggtgtgaatatatccttttccaacaacattggggcctatgagtttcaaggcgatgatggtggccccagttggaaacccaggcctctgatccacttaagtttagccaagaccttctctcagatggatcttaggggtcttttgctggaaaaaacgaaaactgagcttaaaaacaagctaacagtaataaaaagtaaaacatcccaagttgctagtgaaaaagcgagcaagaaaattgcggtcaaggaaaatggtggggataatgaagctcttggaccagaagatcctacagctattaaagattctcatgattcagaacagactggttctaatactagcacagatgctgaaaatgaagatgatgaccacttatcttataatgttcctgatccagatttccatgattttgacaagaatcgcactgaggaatgtttccaaagtgatcaaatttgggctacatatgatgatgaagatggaatgcctcgttattatgcatttattcagaaagttctttccttgaaaccattcaagctcagaataagctatctcacatcaagggcaaatagtgaatttgggcctttgaattgggtttcttctggcttcataaagacttgtggtgatttcaggattggtaaatatgaaagctgtgatatagtcaacatgttctctcaccagatgaaatgggataaagggccgcgcgggcttatcaaaatttatccacagaaaggtgatatctgggctgtttatcggaattggtcctctgactgggatgaagatactccagataatgtgctccatgcctacaatgtggttgaggtactggatgcctatgatgaagtccatggcatctccataattcccttagttaaggttactggatttcgaacagtatttcagcgccatcaggatccaaatgctaccatgaagattcctaaagaagagatgtttcggttttcacacctagtgcctttttacaggatgtcaggcgaagaagctgcaaatgtccccaaagatagttatgagcttgatccagctgctatttctaaagaactgcttcaggggatcacggaagcagtggagccaaatggaacctaaggcagttgatgatgcctgccttggttaacctgccattttgaagtaatcgagcaaaaaaatattaacgcttgctagttttatagatttccttctgcttttgactatcacctttgcatagaagagatacaatggggccagtcattcaggagtcagctgcttagcagcttctggtgtaattagcaggctctgatatgaattttgctgtgatatgttacttagggcttgtttggatgtacgtggattggaggggatcgaagcggcatataatcccttactagtccattcccctcaatcccatgcatccaaaccagcccttagcaactctagatgtgggtgtactaacgcgaagctcaagcagtttttatggtcagtgttgacacctgttatctctgttgccttttttgcgaattcaaatgctaattgaactcgtggccgtttgttggttctgttattttgaaacacccatacgttgtatgtgaaaaactactagc

SEQ ID NO: 177485 - DNA, 181 bp, Zea mays
  Clone ID: MRT4577_93455C.1
gccggtaccggcagttctcctaccgagcttcgtcccgtgcccgccgcctgcatcagccatgggaagtacagtcgagcccttactcgcgttccttgtcgctcgacctgatcgtacagcacggcgaggctgccgcgcctcctgacctctattccgcctcgtcttgctacccgcacctgcggcc

SEQ ID NO: 177486 - DNA, 133 bp, Zea mays
  Clone ID: MRT4577_93456C.1
aattattatcattagggcaggaccagcaagaattcctgatccattaaaatcagtctaggcaaacgatcatttcaatgagtgtttaccactactagtcagaatttagagagattgaaaaaaaaacatttctttt

SEQ ID NO: 177487 - DNA, 169 bp, Zea mays
  unsure (1)..(169): unsure at all n locations
  Clone ID: MRT4577_93457C.1
ataagancngngcnnggncnngcangggacaaggaagggaggaaagggcgagcnagngcaagngcaaacacaacngnnaaaancngggananagcngnnggnaaaagggcagncacaccagaacaccangangacaaggggcaagcagnngcnnggagcccacagncac

SEQ ID NO: 177488 - DNA, 324 bp, Zea mays
  Clone ID: MRT4577_93458C.1
gcgttcgcccactcgttcgctagcccaatccaatcttaatctttctctaggagttcatctgaggctaggggtccctgagcggggcgatccttttcaacccttttagcgtgaattccattacctatgacatgaacaccacactacttatgccttatgccatatcattgttgcaacacaaaaagcactacaagtacgttagcacccacaacatcttctactggtctcgttacttctactcgaacctgcagcgctcctgcaaagaccatttctcgctccggcattgaggtatcagctttgtgatgagtttcaaggtggtggaccttg

SEQ ID NO: 177489 - DNA, 409 bp, Zea mays
  Clone ID: MRT4577_93459C.1
agcagtgaaaacaacacgttgacatggggtattacacatactattgcaaagatttggggggggggagcacacacccggcagtcgatttgcaggcccaggattttattaataatttattagtaatagtttgccccccaaaacgatggaaaatttattcccaccccaaaaatacttgatcgagatatatgttagcatcatcatatcgacccctcaagcaagctaaatgggacgtaattttgttcctcgagttgatcagcccgcgttcgatggaagcacacagtttccgaccttgggttgctggtaaacaataaaaccggcgccggaaaaatcgcacgccactttagccatgctggagaactggtagaaaccgttgaacgcgtaccaggaaatacaggccttattgtccggc

SEQ ID NO: 177490 - DNA, 598 bp, Zea mays
  Clone ID: MRT4577_9345C.1
tgggccgctcacgctgtctgttttgtacagacaaggactgagctgcaccgcgaaaagaacaatggcgttttagcttattaactgacgggccaatcttaaggaatacaaaggcttcaacattctatccgggtaaaaactacagcagcggcaagtgcagtctgtggcctacattcaatgcagcacccttgctggcatccgcatgagtataccctacatttataatgtccgaggctacaactctgcagcgcaagccctctacaggggctactggttaactatacatccggatagcaaaatctgtgtacctggggcggagaacatagacttgagagataaacacaaagcaggggattgttggtgtgaggtacttgaggtatggcgctagcgctcgatccgatgagggagagatgaggggtgacacaacgttacgactatggtgtatttataccccaatcctgatttgcatgagcatcagagaatgggttatccaggattgactcactgatatcatcagatagcctgatttctgatcctcctagaagagcactacacatttgcttaacctcctttcgactagtaacacacctgggctatccat

SEQ ID NO: 177491 - DNA, 113 bp, Zea mays
  Clone ID: MRT4577_93460C.1
ttgatgccgggccaaatatacatacagaaaagcggggcttttttactcattgctaccacgaaaataaccacaagcagaaagttagagacgggtacaagcccgaatgtacccac

SEQ ID NO: 177492 - DNA, 187 bp, Zea mays
  Clone ID: MRT4577_93461C.1
cttttattgcgggaaataaaaataattgaaccaagacccaaaccaggccgcaagggacagaggccaaagagcggcactacagatgaaatatacaaataggcacagttaaggcctctggtacagcggaacgacccgaagcccggccaagacatggactgagcgtccgatgctggcacttgcaagccag

SEQ ID NO: 177493 - DNA, 168 bp, Zea mays
  Clone ID: MRT4577_93462C.1
gcggctgtaaatattcttttttttcaaatttttttgggggttccacagcttccaaaatgtgggagaagacaacattcccggggatttttggttctttcacttgacccccaatacaacacatgttaatttctggggggacacttcattttttaacctgaccattaccaa

SEQ ID NO: 177494 - DNA, 408 bp, Zea mays
  Clone ID: MRT4577_93463C.1
aagaatcagggccgtttaaatcgttctaaaagtagactgtggtttaattaaaacttacattactggctttcaaaatgccttttgtccccttttccgaaaggcaagattttttacacttttttttcccgtcaagggaagaaagaaaacagcccccagcgggccggactttggtggccgatttgggccaccaccgggcgttattttcttgaccgggttgggggagcgttccttttttcacttggatcgatcggtggggcccacaggttccgccgccggacttatttagcgtttcttccgtaggaccccagctttgtggggcttgctcttacacgttcttgtggtaggcggcggcgattgcggcgcccatcaatgggcccacccacaaaatccattggtcgtcccaagcct

SEQ ID NO: 177495 - DNA, 232 bp, Zea mays
  Clone ID: MRT4577_93464C.1
cggggagcaccttgcttttacctatcgatcacggacctttgtattctagctcgccggtgtgggcctctgcgaagatgcagaagaacaagcgtaagggaggctagaaccggaagcgaggaaagaacgaggctgaccacgacaagcgcgagctcgtcttcaaggaagacgggcaggggtactcgcaggtgtcctggatgctcgaatcacaatgagtttgggggggggggttaat

SEQ ID NO: 177496 - DNA, 1287 bp, Zea mays
  unsure (1)..(1287): unsure at all n locations
  Clone ID: MRT4577_93465C.1
gccnggccattcggctcgaggcacatcaacaacaaaaagatggcagcgccacctctcggcctcgcttgcagggtcgccggcgccttcaccaccccggccgtggcgcattccggcttcctcccccgacaccttgcccgtggtctcctcccttcaaagagatggagcggggtggtgaggatgggggcggtggtcggaggaggaaaggagggagaagatgacgaggagctgagacagaccaaggagcaggctgccgccaggaggcggtgggaagccctgattagggagcagaaaattaaaacccttacaccgagggaagctggctatacgttcaaactgacggacaaggttcttttggatgttaggccttcaaacgagcgtcaaaaggcttgggtgaaaggctctacctggattcctatatttgatgtggatgcatcggttgatctgggcggacttagcaaaaaagtcagcaactttgtaatgggtggctggtggagtggcagctcaacattgtccttgaataagaactttgtacagcaggttgaggagaagttttcaaaagatacagatataatgctagtgtgccagaaaggacttagatcacttgccgcctgtgaacagctgtacaatgctggttttgaaaatttgttctgggtacaaggaggccttgaagctgccgaagaggaggattttgaaagggaaggttcccagcctttcaagcttgctgcaattggagggatttctgaattctttgggtggacggaccagcaacgcgcgcaggctgcaaaggaagggctgggataccggctcgtcttcactggtcgcttggtcggagcattggtgctacttgacgctttgtttctaggcgcccaaaggatcggccctatgctccaagaaatgcaaccgcgttgatctcctccgcagaacgtttctgtagccaagggtagctctgcaaacgcgtccgcttgggttttctgcgtcgtagccctaatcatgctgtccgctgtgcaagtgtacatgtatgttcgcagctgggtcttctcggctgcggacaggcggtgcgtagtagattggctttgttgtaggcttacgccatttttgtgtgtgtggctgtgtgcacatggcaaaaacaaacaaacaaaaatgtttatgcaccggagcagattctatttctactccactctcgtaaaatagttgactttatagggttcaaattttgttctaaactaatggttattctcacctctcaatgcaattttatctttttctaatacatattttactttttcc

SEQ ID NO: 177497 - DNA, 241 bp, Zea mays
  Clone ID: MRT4577_93466C.1
ttccggggcctgcgtctgaagacggattgcctggtcatgtagatgggtatcttttagaggcaaggataaaccatccagggggatgtacagtggtcgacaggggtagcatttatccggctgatgccatgaacttggccttaatactgatcaatgttacaggtgttacaactattgctgggggagaaattagtcatcgaaggccatgtttacggaccaactgctgaggcaaaattttctactg

SEQ ID NO: 177498 - DNA, 394 bp, Zea mays
  Clone ID: MRT4577_93467C.1
ggatacaaaaaccaaacgaggttttttttagcttagccagggttccattatttggggcaaataattacgggttccaagctcatttttttacaacccttggcccaccaaaaagctggggggggttaccatacatttatttgggagacctttacaacctaaacaaaaaaattgttgacgtggggccaaagaaacccggctgggttattttttttttttccactcagatccctgtaattcccccaaaacccctcaacatggggggcaaaaaagggtgtccccaaaaagcttttttacgtcgggataaaataccccccgggaccacggcatgtttttatttactttttgcacacataggagcctcggggggtcagggcaaaatctgattgcaattaaa

SEQ ID NO: 177499 - DNA, 152 bp, Zea mays
  Clone ID: MRT4577_93468C.1
ggaaaacacgggccgacccacgcatccggatactgtaatatgaagatgacctttaagatttctgggacgaacacagggaggctgggtttgtggctattttacaggcactctgcaaggctttcgatcggctctgacacgttaatgaaggttga

SEQ ID NO: 177500 - DNA, 280 bp, Zea mays
  Clone ID: MRT4577_93469C.1
tttttttttttgcagatacttaatagatatcaaacgcccattattgcacttacgggaaccagagatgaaatcattcaagattcttaagcccaagcttgaggggccaaaggattggtatgctccagcagattattcttgggacagactaacccattcttaagttcataaggtaaagccttaaaaacatctctggtaaagcataacaatcttgtgattggccatatctgaaacatagccttatccacaatgggattaccatggtttaacatagcccttggac

SEQ ID NO: 177501 - DNA, 375 bp, Zea mays
  Clone ID: MRT4577_9346C.1
ttgggtacctcgaggccggccgagatctcttcttcgcgtgcgctgctcgagctacttgagaaaaatgacttgacgttcggcaccgaccgtgcgaatcctctcttcgcccccctgagtgctcagattgcttcttcgcgatctgtattatggaatgccttcaaagcacttattcgctgcctagatacgaagccatgatcgatgagctgacaccggattatgagatggatgtctcctgcaccacccctgatgatcttatcatgtacccccttataaacttccatgctttgatgactgctgatgggcctgatgttgatagtgaagctatctcacgctaggtcgttccctagcaggatcacaactctgctgtttgactgt

SEQ ID NO: 177502 - DNA, 606 bp, Zea mays
  unsure (1)..(606): unsure at all n locations
  Clone ID: MRT4577_93470C.1
ctggnaagctagcaagggggaataagaaggactcaacaggacaataaacacttattcaggctaaattgattacccacccagcacaacatcttacaggaaaaacatagcatttcctagaggaatatgagcattactagaaggtgttattgactctgaattaaatttttaaccggtcccttgaacagctacaggatttggaagctgaatcaatgttatcagatgagttagaatccaaaccagagctcctggtacagtttgttcagaatacatccatcccattgggacaggggctagtagaatcagaagctaaagacataacttgcttgtccctccttccagtgactgaggcctcagaatgcagtcggctgatgttaccagatgatactccaagtcatacaaactcctccaaagaggtcccttcctcagctgttttgagaagccttcaggtgaatgtgggcccagatggagaggagacgagggctcagactgtacagaagtccccagagtttttgtcgactccagagtctcctagcttgttgcaagatctacagccaagtgatagcacttctttcattcttcttaatctaacaagagcaggtctgggct

SEQ ID NO: 177503 - DNA, 178 bp, Zea mays
  Clone ID: MRT4577_93471C.1
atcataaaaacatattacctagatcgtgttagagtggatgctagatagtttgcgtggttggatgttagagcaccttttcaccttcccatttgtttcttgcagtgaacgaaaatgatgacttctactcagtttttaaatgttataagaatgctaccaatctaataactcctaatgtttt

SEQ ID NO: 177504 - DNA, 810 bp, Zea mays
  Clone ID: MRT4577_93472C.1
gtgacactaaaaattctccaccgcagccacgtttccaagccaccgcagccctagcgcgccgccaccttcaccttcgcagccctagccgccgcctcctccattgctgctaaacccgcaaccatgggtcccgtgctgaagcgcccgaccccgggcacggtgcagtgtttcgggcgcaagaagacggccgtggccgtggcctacacgaagccaggccgggggatgatcaaggtgaacggcgtcccgatcgagctgctccgtcccgagatgctgcggctcaaggccatggagcccgtgctgctggcggggcggtccaggttcaaggacatcgacatgcggatccgcgtgcgcggcggcgggaagacgtcgcagatctacgccatccgccaggccgtcgccaagggtctcgtggcctactaccagaagtacgtggacgaggcggcgaaaaaggagatcaaggacatcttcatgcgctacgagcgcaccctcctcgtcgccgacccccgccgctgcgagcccaagaagttcggcggccgtggcgcccgcgccaggttccagaagtcctaccgctgagcgagagcgcttgccggaccgctgtcgtggctccgtttgctaccatcgtagctacgactttacagaagtcagtctgataataacatggttggcgattcgtaggcttctcaggctttattttattttattttagtttatgtttatcctatttaagtgcaagactagttcctcaaatttagtttatagtatacaccgattggtattttatatttatgcacttcagatagcgctcttaatttc

SEQ ID NO: 177505 - DNA, 861 bp, Zea mays
  Clone ID: MRT4577_93473C.1
ctcgaggccggccgggaccgcatccctagcgcgccgccaccttcaccttcccaggccgccgccgccgccgcctccattgctgctaaacccgcaaccatgggtcccgtgctgaagcgcccgaccccgggcacggtgcagtgcttcgggcgcaagaagacggccgtggccgtggcctacacgaagccaggccgggggatgatcaaggtgaacggcgtcccgatcgagctgctccgtcccgagatgctgcggctcaaggccatggagcccgtgctgctggcggggcggtccaggttcaaggacatcgacatgcggatccgcgtgcgcggcggcgggaagacgtcgcagatctacgccatccgccaggccgtcgccaagggtctcgtggcatactaccagaagtacgtggacgaggcggcgaaaaaggagatcaaggacatcttcatgcgctacgagcgcaccctcctcgtcgccgacccccgccgctgcgagcccaagaagttcggcggccgcggcgcccgcgccagggttccagaagtcctaccgctgagcgcgagcgcctgccggaccgctgtcgtggctccgtttagctacgactttacagaactctgataataacatggttggcgattcgtaggcttctcaggctttattttattttattttagtttatgtttatcctatttaagtgcaatactggtgcctcaaatttagcttatagtatacaccgattggtgttttatattttatatttatgcacttcgtatagcgttcttaatttccatgattatccttgtgcaagatcgaccaatcggccacagtatgaatttataaagttcaaattataaatatattggattatat

SEQ ID NO: 177506 - DNA, 409 bp, Zea mays
  Clone ID: MRT4577_93474C.1
aatccattagcaacaatttagcatcaatgtcgaccaagatattttccggtgttatgcgccttgctctttctacatgagttgctaacgcgacatttttccctcaatgctcacacgctcctataactacccttgtttccccataccttacaccaattatagcttcagtatgtgaaaacccagctcttcaaccatataggctacaccaagcaatctcagcacgcaacatacctttatcgctcttgctgtttcaacattcaccagccctatcttcggagcactcattggcacaaaccatcagggcacaacagctgcaacaactcgtgctacctgtgaacaaccaagtatctctggcaaacctttctcactactctcagcaacaacaattttttacatacaaccaactgtctac

SEQ ID NO: 177507 - DNA, 839 bp, Zea mays
  Clone ID: MRT4577_93475C.1
cattgggtacctcgaggccggccggaccgcagctctagcgcgccgccaccttcaccttcgcagccctagccgccgccgccgcctccattgctgctatacccgcaaccatgggtcccgtgctgaagcgcccgaccccgggcacagtgcagtgtttcgggcgcaagaagacggccgtggccgtggcctacacgaagccaggccgagggatgatcaaggtgaacggcgtcccgatcgagctgctccgtcccgagatgctgcggctcaaggccatggagcccgtgctgctggctgggcggtccagattcaaggacatcgacatgcggatccgcgtgcgcggcggcgggaagacgtcgcagatctacgccatccgccaggccgtcgccaagggtctcgtggcctactaccagaagtacgtggacgaggctgcgaaaaaggagatcaaggacatcttcatgcgctacgagcgcaccctcctcgtcgccgacccccgccgctgcgagcccaagaagttcggcggccgcggcgcccgcgccaggttccagaagtcctaccgctgagcgagagcgcctgccggaccgttgtcgtggctccttttagctacgactttacagaactctgataataacatggatggcgattcgtaggcttctcaggctttattttattttattttagtttatgtttatcctatttaagtgcaacactggtgcctcaaatttagtttatagtatacaccgattggtgttttatatttatgcacttcgtatagcgttcttaatttccgtgattatccttgcgcaagatcggccaagcggccacattatgaatttataaagttc

SEQ ID NO: 177508 - DNA, 503 bp, Zea mays
  Clone ID: MRT4577_93476C.1
caacagaccttccagtacctggagctttcccactcggcggggcggcccaaataatcagggtttaaaaaggaacaaatccttccgggtcatagccttggggggggcggcttgatttaaaaacgggcgggccacacttgccaaatggaccacgggtgaaaacgtcacaacgtacatgttccgggaggcgggggttttataaaaaggcaaaaccttgactttcgactgggccccaaaaatagacttttccttttgggtaggaggggaacaagattccattggcaaacatgcatggatcggccttacctttaacaaaaaagcatgattccaaaacccgggggttggggcttaagcctttcaggggcacaaaagtcctaacctttgattccccaaaccctggaaattaaatttggccctaaaaggccttaacaccatcgggcacatctttaggaggcctaaacaaatacctttcggagaaaaccttaaaatgggaaggcgggggggga

SEQ ID NO: 177509 - DNA, 467 bp, Zea mays
  Clone ID: MRT4577_93477C.1
agcagtggtaacaacgcagagtacgcgggcaggccgtcgccaagggtctcgtggcctactaccagaagtacgtggacgaggctgcgaaaaaggagatcaaggacatcttcatgcgctacgagcgcaccctcctcgtcgccgacccccgccgctgcgagcccaagaagttcggcggccgcggcgcccgcgccaggttccagaagtcctaccgctgagcgagagcgcctgccggaccgctgtcgtggctccgtttagctacgactttacttatctctgataataacatggttggcgattcgtaggcttctcaggctttattttattttattttagtttatgtttatcctatttaagtgcaagactagttcctcaaatttagtttatagtatacaccgattggtgatttatatttacaaaaaaaaaaaaaaaaaaaaaaaaaaaaagtactctgcgttgttaccactgct

SEQ ID NO: 177510 - DNA, 1341 bp, Zea mays
  Clone ID: MRT4577_93478C.1
ggcccgtacgctccagcatcttggtagggcacaggccaatctccgccacaataagaggggacttcaacaaaacttcttccctccacagagagaaatgaagcacatctgcaacttgatcagcgagatcagcaacagatggcaccggcacatctgacgacattgaagctgctcccatctgtaggactcctcgtgcccctggggattggtgtggtagacgcagaagttgtgtagcagcaaagacgccacttccgggcagaagaaaaatccttggaaacaggacatgtagttcagagctacatccgggtacgttataagcgcgggcttgtcctcgtctccgtacacggcaacagtcacagaaccacatctcgtcctcacaagatgttcccggggaagaagaagaaaaagtagtcaccttttagcagctatttcagcagcaccggcacttgactggaaatgtgatagatatgaagtttggttgtcaagagttccctaagcctcctgatagccttcactttgtttgctaaaacataacatttccatgcaatctctgaagaagtatcatagacatgagttgatatgttggaatggcacaaccccactttgaaggggttcattactcctcgactgcctcacttgaaggtttagtacaaggtctgcatttatttggtctggtgctgaaatactctttgcagttatattggtgtatggagaagacaatgcacaaggtttaataatatccctctgaagtgcaattgtctgtgcgctttggtttggatttgcacatctttccctgtcaactcgaacaccaatgtgatgtggaaataactggcaaggatctctgttgattctattgaatctagagaagaagtggaatgagtactgtgtacgtctcctctctagattcaatatttttgtactcaataccatttgatcatctctaaccttgactgcatcaaactcattgttagaacccatcatgctgccattctgcaacagagaaggtagaccttcttggtgagcatcagctgtaacgccacttcctctaatgatagaggcaacttcttgctcatatctatcgttgcaatgttgacatcgtagagccttgtagtggcaggcatggacaaggcagcgaccgtggtggctggagctggaggaggaggcacgagtcccgctgcagggccggcgtcgcgcacggcggtgatcggcagcagctggagttcccagtccttgtcgacgagtgggaacttggaaaggaaggcgaggtaggtctcgtaggtggcggaccagcccatgacccagaccgtttgggtttggcgggcagcagcccggccggcctcgagg

SEQ ID NO: 177511 - DNA, 764 bp, Zea mays
  Clone ID: MRT4577_93479C.1
ttgggtacctcgaggccggccgggaggccaccgttgccctagcgcgccgccaccatcaccttcgcagccctagccgcggcggcgcctccattgctgctatacccgcaaccatgggtcccgtgctgaagcgcccgaccccgggcacggtgcagtgtttcgggcgcaagaagacggccgtggccgtggcctacacgaagccaggccgggggatgatcaaggtgaacggcgtcccgatcgagctgctccgtcccgagatgctgcggctcaaggccatggagcccgtgctgctggcggggcggtccaggttcaaggacatcgacatgcggatccgcgtgcgcggcggcgggaagacgtcgcagatctacgccatccgccaggccgtcgccaagggtctcgtggcatactaccagaagtacgtcgacgaggcggcgaaaaaggagatcaaggacatcttcatgcgctacgagcgcaccctcctcgtcgccgacccccgccgctgcgagcccaagaagttcggcggccgcggcgcccgcgccaggttccagaagtcctaccgctgagcgccagcgcctgccggaccgctgtcgtggctccgtttagctacgactttacttatttctgataataacatggttggcgattcgtaggcttctcaggctttattttattttattttagtttatcctatttaagtgcaagactagttcctcaaatttagtttatagtatacaccgattggtgatttatatttatgcacttcgtat

SEQ ID NO: 177512 - DNA, 462 bp, Zea mays
  Clone ID: MRT4577_9347C.1
tccttccccgcccgtcggtccgtccgtccggcccgaccgcgaccagccaccgccccgtcgttcgctgggttgcttcagatctcctcctccccctacctctccaccctccgccctggggcgccacctccaatcccactcccgccattgcgcaagatatataaatcccatccccatcagcccagtctcctccccacccgcccgcgacctcgccgtctctctcccccgtccagctcgctctcctgccctgctcgcggggcatggcctgctgacgactgatttggtacagaatcctctcccggatctgacccgcccgcgccgccgctgggatcgggatcgggatctcgcgcgggagggacgggcatggaggtcttcggccccgtcacgccaggccaggtgtcatttttacttggtcttttcccggtcctcattgcatgggtctactccgagatcctggagtacaag

SEQ ID NO: 177513 - DNA, 751 bp, Zea mays
  unsure (1)..(751): unsure at all n locations
  Clone ID: MRT4577_93480C.1
cgactgcctcactgaaggtttagtacaaggtctgcatttatttggtctggtgctgaaatactctntgcagttatattggtgtaggagaagacaatgcacaaggtttaataatatccctctgaagtgcaattgtctgtgcgctttggtttggatttgcacatcttccctgtcaactcgaacaccatgtgatgtggaaataactggcaaggatctctgttgattctattgcaaccttgatggagacgtacacagtactcattccacttcttctctagattcaatatttttgtactcaataccatttgatcatctctaaccttgactgcatcaaactcattgttagaacccatcatgctgccattctggcaaaatatttccacgtcgatctgtctgtttgtgtgaatgatgatctttaggacaaaaccgtgtgtgatggcgcttttgcaccacaatgaatgtaactggaggaaggtagccctcttccaagctggcacacgcctttctaattgcatccacttcataaagaaagaaccggcgaaactgctgctcactggcatgtctcatgcggtgacgagcttgacatcctcgctctggagggggaccctgccacgagctcgctgatcctcccgaaacctccattttcccctgtagggcatcgacgtcgtcaatctcgcgcagaccacggaagccgatctccacggccgccagcgcgactcggcccgccggagccaatctccacatctgccagtcg

SEQ ID NO: 177514 - DNA, 1030 bp, Zea mays
  unsure (1)..(1030): unsure at all n locations
  Clone ID: MRT4577_93481C.1
cggaggacgccccgggccggggctttaacgcgctccgctctttggcgtgggtgtgtccctcgcggagggcggtggcgcgctctgctcgcttcgcgtgccgccccccctcacggacccggaggggaactggcacgcggacgccatcgtggcggcgggttacattcattgtggtgcaaaagcgccatcacacacggttttgtcctaaagatcatcattcacacaaacagacagatcgacgtggaaatattttgccaggtattggctgtgatcgagtatctcctggctaatggaagtgaacatgttatcaacaaaattattgatgatagctcatgagattattcaaactgcaaatatagtgaaacttaagatattgttcactagaatatatctactagctcattgttcactggaatgtgtctgttttacttctaaatttacagaaaagaattcttgatttatagcttatattaacagtgttgcctgctctccccctctccctcacacacactctctctatctatctatctttctatctatctctatgtgattaaagtataacatataaactgtccttggcctgctaaagctattattttcagtttgcttgcatggtgtgaagctacttatatattttcagtttgcttgcatggtctaccttctctgttgcagaatggcagcatgatgggttctaacaatgagtttgatgcagtcaaggttagagatgatcaaatggtattgagtacaaaaatattgaatctagagaagaagtggaatgagtactgtgtacgtctccatcaaggttgcaatagaatcaacagagatccttgccagttatttccacatcacattggtgttcgagttgacagggaaagatgtgcaaatccaaaccaaagcgcacagacaattgcacttcagagggatattattaaaccttgtgcattgtcttctccatacaccaatataactgcaaagagtatttcagcaccagaccaaataaatgcagaccttgttctaaaccttnaagtgaggc

SEQ ID NO: 177515 - DNA, 572 bp, Zea mays
  Clone ID: MRT4577_93482C.1
ggtcgactctagaggatcgccaaatctgtttatactttggcccttgtcagcggtaaaacagggttaattttcttcccttagcctaacattgaccataatcagctccatgggtccttcctagctttggtgctaccatttatcgcctcctcctcctccaatgttaaaaattctgcaaaaattactcatcggtgttctcacactttgccccagtatggccctggccggggtgcccaacggcacttggttatcccaaccccaaatccgtttctatgcttcccaaaacgccctagaccaagtgatgaaggatattcaaagtcagggctaccgccttgtatttttggattttcggggagtagcggacgatgtgcaggaacaaattagtcaacaagcccgcaaccataacttaattcccattgcctgggtccaatctccccaataccgtcgccttaccattgaacaaattattaatgaagcccgccacacggacggtctacaggtggatgaccatttttttgccaactactcctcagggattttgagtatttagctaaccagtatcgttagtttatttt

SEQ ID NO: 177516 - DNA, 434 bp, Zea mays
  Clone ID: MRT4577_93483C.1
agcagccgcagtccaccgaccccgccgtcggtcgccctccatctcctcgccgccgggcgccctccatctcctcgccgctgcctctcggttgtatcagtttatcttgcctcaggagctttgttaattaagaatttgacatcattggcatatggcgtcccagaagagttgtcttctgatcactttctcccaggagattgtagatggggtgcctctgtttgtttcatcaaactgccttcctgtaaaagctttgaaatatgaacctgctggttattcgttccatgctgcggcaatgaagctgcttggtcttgcggacatgaagatatagaaactgatgatcacagcgtttcatcggatgacaaaagccaagattttaatactgcttctgatacctttagcagcaaaggggaagaagaagtcatctggcagtcaacagc

SEQ ID NO: 177517 - DNA, 412 bp, Zea mays
  Clone ID: MRT4577_93484C.1
gaacgacccactcgtcccacacgtacgaaaagtccaactaacagacccattacaactctatcctcctctaacactctcacggtatactgcaccatttaacattgaaagacctcatctgcatcactttatgcagccaatattcaacatctcctaactgccatgtacagtctacaccaaccaactcaatgacattacaataatgatagatacatgcatcactgacaagactatgatctatactatagaagcttgctaactagctaattaagtcatttatctgagataatcgactaccaatctttcacgaatcagcatatgtaatacagttaccttgacctattacccttttcaaccatttacattaacatagacaactattactacaaacacttcaactgatccactaacattc

SEQ ID NO: 177518 - DNA, 168 bp, Zea mays
  Clone ID: MRT4577_93485C.1
ggggtaaaaaaaaaaggccccttcatgaactcaagaattattcccgagataaggacgccaacccaccagccaggcactgagtgcacacattgacagggatggccaccagtgcaacctacaccttttttgaagtttacacacagggggggggggggggtcacattcatt

SEQ ID NO: 177519 - DNA, 553 bp, Zea mays
  Clone ID: MRT4577_93486C.1
aattcggcacgagggcgctcccctcctctcctacggccaccactccattgctgatggccgcctccgcttactaattcccacaaccgcaccgatccatcgctcgccttatggtttctgctccactacctactgcggctacaccgagctgactcgattctcgccgagggcggggggtgcaagctcttagccatcctgtggccgctacagcctgctaatgagggggtgctctgccatcggctgccgctgacgacgaagaacagggcttaggaactgccagacggatgaggctgcatcgcttgtgtagcgcatggggatggcgcccaacaggctcctgaccactgcgtctgactagatgacgccacggatcacaccccgagcgctgggcggacgaggaggaccgcacagcaggaatggatcgcgttcattcaacccaacaagtactccaaagggcggatgctggccgtgaccactacttgcacaggctcataatgaactgcctctcctgccaggctcttacctattggtcagtccctctcaagacttactcacccga

SEQ ID NO: 177520 - DNA, 414 bp, Zea mays
  Clone ID: MRT4577_93487C.1
aaactggtaaatagcaagtgctagttgctcacttgctccacagagctccattgttgtatccacaattttgtatgttcggcaccaatcaagatatactcatttacttttgcctagtcagattgttttggggtacatacatttgactgtgttttatacaagttttgccatctagaaaacgaaggcatcattcatcaatcatcactccattgctatgtgtgctcctctagacgccgtgttcatgctgctcattcacaatattcaaacaaaaacaaagatagtgaaacaaatatacatcaaaagttgcattttccaagatagattagatttcaacaaaacaaaaaggaaataaagtatcacccttcctatcttgggcaggcataatcatagcacattcaaaaaggattttttcttttc

SEQ ID NO: 177521 - DNA, 306 bp, Zea mays
  Clone ID: MRT4577_93488C.1
ggcctttggggttctttttcgcgactgaactgggcgaaatggcggcgtttaatgtttagtacccctccttcaccagcggcctcgcctgctccacgcacgaccactcactacacaacgccttaaacacctactgcaatgtcctctaatgcaaaatcattctatattgcaagacccacaggtacccctgattcacataatttaccttctgcatctaccagccgatgcgtaaccctatggaggccacaaactggtagtggactctatagccgacacaccacgaggacctaggcctactcccgaggcacg

SEQ ID NO: 177522 - DNA, 793 bp, Zea mays
  Clone ID: MRT4577_93489C.1
ctgtctcctctgctccttgtccagatcgatcccgccgccagcgatggaaagatgctgctccgccgctgcctgatctttcgcgctctctctccccccctggtccaaatccctaattttttccccaaggattcaaccccaaactttctaatcccctctcagatttgtcgtgcaggttatgttcttgttgggactgctcttcctctgctgctccagattgaactcgccggcgctgatgaccacggtgccgctgggtggtgcaggttaacgctcaagtgtgcagccatggagcagatcgagcatatgtgcaggttagtgatgcccttgttcctctccttatttttttatgctcaagttctcagatctagtaaattaatttagtctcatgtgcatgtgtgtgtactgaatcagttcctcctgtgcaagatgtttgtgtagtgatgctgtacaaataccttgcttcattttattttacttatttgaggttgtatcccctttctttcttatactgttacttccaagaacagagacagatgttcttgctgtgatttgtgtgcacgtatggatcactgggatacttttgtatgtgcatctgggctggcttctttgtgcttgtgaatactaaagaaatggcagaagaagaagagctcacctttcttctcttgctccctctgttggtcctactagtgttgctcctacctccagaccccagtccagtaggctagcttcttgctctagcctgtccccttcgatctcaatattgctcaggtcaccatcttcacttattgctcttgga

SEQ ID NO: 177523 - DNA, 877 bp, Zea mays
  Clone ID: MRT4577_9348C.1
ggaagaaagctaccagagtcgcgaccttgaaaaggcatctcagcaagtcgccaagaatctgtacgagaccaaggttcagccaacaacattgatcccaaaacaagttgggaatatgtatacagcatcactctacgcagctcttgcatcggttgtccacagtagacatgaaactctggcaggccagaggattgttatgttttcgtatggcagtgggttgacatcaacaatgttctctttcaagattaatgaaggccatcaccctttcagcttgctaaacattgcaaacataatggatgtttccaagaaattgaaggcaagacatgtggtcccgccaaagaaatttatcgaggtactgaaactgatggagcaccggtatggggcgaaagatttcgtgaccagtcaagacacaagtttgctatctgtaggcacatattatctcacgcatgttgactccaagtaccgaaggttctatgacgtgaaaggtgacggtgtcaccactactgcaatgtccaacggccactgatctgtcttctgcccggagctgcaacaagtcaaataacagaggcaggtgttcctaagcattctgactcttcttagattatctattaggaggggacgctggagcttagattaatctctgccaagttgtaaggttgtaaagttagttagagctgcgtcattgctgtaatgcttgcttggtaaaagttctggcgctcttcagttcttcagtgcttgcaaaattcaaatcaagctcactactggttgtaagaattctgaataatctgcagaatcactggttacatccaagttacgctgttgaatgcatgatttcatgtttaacacgattaatgcatctggattcagctgtgttgttgga

SEQ ID NO: 177524 - DNA, 734 bp, Zea mays
  unsure (1)..(734): unsure at all n locations
  Clone ID: MRT4577_93490C.1
ctggtggaggctcgaagcgatactgacgtgcccggcttccggccctcctgtccccggaggtcaccgccgccgtcttcgtgggcggccataccggccacgatgaatagcatcaagtcggctatcttctccggccatcggtcgcacccccacgtgggggcggcggcggtcccgcagcagcagctggggagcaccgcttcgttccactcgacacccattctgcagcggaagcacaagacccagtggcacaacagattcaactattatacgagacgtaggaggaacagaggaactaaaaggtcaatgctacggaacatgtcagaatatgcagagtctctctttcagagttggcgtgatgaagatgagaaaaatgctgcatctgctgggccttcatggtttagaagacatcgttgggtcagaaattcaagcaacaatggtttccgtacacacgatttttattacgggaatttcaaaagcaaagaggaactccaaacgtgctcgctcacaaaaatccagaaaactggagttttgaaacagacgagggaggatgaagtatcagctccatcagaggtatctnttggcacgacaagctcttgggttgagcacttctggtccgtttanaacttgaagatgttaaaagcgcataccgagctggggcacttagatggcatccagatcgccacaaggnatcatctaagtctacagccggaggagaaatccnaagcattgcagtgcag

SEQ ID NO: 177525 - DNA, 1205 bp, Zea mays
  Clone ID: MRT4577_93491C.1
cccacgcgtccggccagccactcactcaaacggtgattccttctccgcggagggccacgggcacggcgacgcatccggcttccggccctcctgtccccggaggtcaccgccgccgtcttcgtgggcggccactaccggccacgatgaatagcatcaagtcggctatcttctccggccatcggtcgcacccccacgtgggggcggcggcggtcccgcagcagcagctggggagcaccgcttcgttccactcgacacccgttctgcagcggaagcacaagacccagtggcacaacagattcaactattatacgagacgtaggaggaacagagaaactaaaaggtcaatgctacggaacatgtcagaatatgcagagtctctctttcagagttggcgtgatgaagatgagaaaaatgctgcatctgctgggccttcatggtttagaggacatcgttgggtcagaaattcaagcaacaatggtttccgtacacacgatttttattacgggaatttcaaaagcaaaggaggatttgagttttgcacaagtgatgaggatgaaccagagaatctgtttcgtaatgtttttcgagaccagcacacatattattggtctttttcatctgataattttcagaggaactccaaacgtgctcgctcacaaaaatccagaaactggagttttgaaacagacgaggaggatgaagtatcagctccatcagaggtatctttggcacgacaagctcttgggttgagcacttctggtccgcttaaacttgaagatgttaaaagcgcataccgagcatgtgcacttagatggcatccagatcgccacaatggatcatctaagtctacagcggaggagaaattcaagcattgcagtgcagcatacaagaccttatgtgatagtttggccgctgcatagataattttgaatgaagatggactctggatgagccccttccaaactttctagctgcaaattctgaagagctgccacatgcttgtggtagctccgaccatcccaatcccaagaggcgggagtcgcatttcttggttattgaggcgattgagtcaattcaaaattgaccggataatatatgtactgtaccgtgtaaaattttttctcacagctcattgttgtattatttttatagatatgaagacattgttcacaccactcaataaattttcttggctgagttgtgtc

SEQ ID NO: 177526 - DNA, 826 bp, Zea mays
  unsure (1)..(826): unsure at all n locations
  Clone ID: MRT4577_93492C.1
aatatcttagtgatgacatttgttttcatcttcttctccttttttctgtggacctttcatccttttatttatcatagcaaacgcttctacaccatcctaatctggcgcagggtgcttgcttttttagttgcttcacaggttttaaggatcgttacattttattcaacccagctcccaggtccaaactatcactgtcgcgagggctcaagtatggccactcttccaccacccaataatgtgcttgaagtgctcctaattaattttcctcgaggagtaaatcttgggtgtggtgatcttatattttcatcccatatgattttcactcttgttttcgttcgaacatatcacaaatatggctcaaaaaggtttattaagctccttgcctggatgatggctataattcaaagtctccttattattgccgctcgcaagcactacactgtggatgttgttgttgcctggtatgccgttaatctagtcgtcttcttcgtggacaccaagctcccagaaatgccggaccgtacaaatgggtcacccttgattccgctgagcaacaaagataaagatggaagaccaaaggatgagaaagacgtgaggctgaaggacgagttccataagctgttgaacgggaaccatggggatgcgactgatcggcggcagcgggtgcagatgaacgggaggcacgccgaggaggacatgagcatgctctccgacgccacgcccaacggcacatgagatgagcgggcgttttgtctcggcgcgcccaaggagatcctgtggncgaccctttctgtatgcatgcatgcatgctcgaaccgagcagccc

SEQ ID NO: 177527 - DNA, 1034 bp, Zea mays
  unsure (1)..(1034): unsure at all n locations
  Clone ID: MRT4577_93493C.1
tctctggccgggattataacaggtctacccctggcaattactgtgcttgcaggaatattacgatcaaagtttatccccatggagtgggatgtcatattcgaacatctcgagtccaatggccagccaaaaccggttagaagcatatggtctttggcttttgatgacttgccacactacctcaagtcatgtttcctatacttggcgtccgtttcagaaaatgttattctttacccagatcgtttggtgcgtctgtggattgctgaaggttttgttatgcccaagaaagcagaaacactggaggacgttgggtttgactatctaaaagaactggtcgcgagagggttagtccaggtcgtgcagaaggatgctggtggatccatcaagctggtagccatccacaatctgctccatgcttttgtggagtctgaagcacaggactctagtttccttgaaatccaccatcatgctaatgttgtaaacccaaatgcagtgcggcgccttgccatacaaaactatgtggatgcatatgtccacattcctaatgtgttccccaagctgcgttcgcttctctgtgattttgcagaagaccaacaacgcggtagctcaagctctggagagctgcaacctcagtcgttatggggcaatcttgcagagttgtgttcaagagcctgtggcacttcggagaatgttggctcaagcacattgcatgggctccacttcttacagggctccaggtacctacgagttgttgacctgtatggtcttaagacgcgaaagctgccagatgagatcggcagcataatccactttgaggtaccttggcattaggaccagcaacctggtggaaatcccctcatccatctacaagcttgacagtctccagacgttggatgtaaggaaaacaaacgtggcgaaagccgtcgatgaagtctgggaaaatcaagaactacggaatgtggtttgcgaaaaaatgattttgcccgattggtcaaaaattcccttgattatntgatgaaactcaacgggggggggcc

SEQ ID NO: 177528 - DNA, 242 bp, Zea mays
  Clone ID: MRT4577_93494C.1
gtacgaagcagactcgtccgcaagtccactcggaggcaaggccccgcgcaagcagctcgccacgaaggcggcgaggaagtctgcgccgactaccggcggcgtgaagaagccccacaggtacaggcccgtgacggttgctctgcgcgagatccggatgtaccagtatagctcggatctgctgattcggatgttttacttcatgctttttgttcgtaagatttctcttgacttgtagtcggttg

SEQ ID NO: 177529 - DNA, 157 bp, Zea mays
  Clone ID: MRT4577_93495C.1
ggtcgaccagctccggctgttcacgggccagttgtctatgttgcgactaccaccattgctcggcaacgtgctgggggtcgcgaaatccctgacgtgccgggcctgaaaatggagcacacctctgcgaccgcagtgtctaagcaagggcaggacaaga

SEQ ID NO: 177530 - DNA, 329 bp, Zea mays
  unsure (1)..(329): unsure at all n locations
  Clone ID: MRT4577_93496C.1
attccctttgccccataccccttttttttttttttttttctgtgtggctttttgggggtaatttccccgctttcccccaaacccaattgaaaaaaaacaaaactggaggaaggagcggggacgtaactagcaaaatgttcccgggggcccccccgaattaaatctgacgcaaacccccccccgtngcaacggccagccaggaaaccgcccgggcagagaaggccaccaccccgcggccgaagggccccccgccggaaaaacacaaacaaaattggacaccccaacccccccaggggtttncggagggggggcgcccccccccaggaaaa

SEQ ID NO: 177531 - DNA, 324 bp, Zea mays
  Clone ID: MRT4577_93497C.1
tttacgcgtgcgcgggacgtgcacgtgagaacagcatggattatagcctttgctcttccttttaggagagcctcataagaaacagagctactcgccgtctaggcgcagatagaagcgcagttcgcagagcgctgttgccagattagatcactctctctctgtatgctttgctgctcttaccgctcggttgatcggtttccttccttctgtgcgtccggaagcatcatctagcgaacctgagatcacgactaggaccatttctttggctgtaccacatctttcgatggccggtcaggctactacaagaggtactgcggtatgctc

SEQ ID NO: 177532 - DNA, 461 bp, Zea mays
  Clone ID: MRT4577_93498C.1
aattcggcacgaggggatgacgtgcgggctaaaccacaggatgactaacctgatgatgcacaagggaacactgagctagcgccaaggccctacacggtccacatctggttaccaaccctgagataaagagaaccctgctaatgctagctcgcctaacgataccatgattaacatcatctatgccaccacggggaaaagccatgaggaaactgtgcactaggctcgaagcgaccctgatttccaaatcgacccacaggacttgtgcataggggcgatagacttaatcgcaacgcatatacgacttgggtcccttatacaggttgcttcagcatagctgaatcccacccaacacctatctgataaagccaataatgtatacgcatatcggggcgcatcgacctcaaactattcatacactctaaatatgtaacacgactcagatggtcatgactgccatggcc

SEQ ID NO: 177533 - DNA, 824 bp, Zea mays
  unsure (1)..(824): unsure at all n locations
  Clone ID: MRT4577_93499C.1
atcgtcttatcctcccgcggcgccgccgtcttgaaccggcctccgcgacgcctcttcgattcgccctacgcagctcaattccactgacaagatcgcgatggccgccgacgagcttcctcatcagatggcgatggccgccgaccagctccctgatcagatcgcgttggcgccttccgcctgctccaccaacagctgcctgcaggggcttgcgcaggaggatgactatgcgatactaattcctctttcccacatctttgccctcatgctgcaagctctcaagttgccccctgcaatttatcatcacaagacatatctagccaatgagtctcgtgtgacggttactttcaattcatcattacagttgatcgatggtttgcttattccaacctcgatttctggtgtgatctcaaagaactgtgatgaagcggaagacagtgctgctatggcagccattagatttatggaggatgtatgtggcaaggaaatcagggactatcactacatccatgttaaaaggctggaaaataaagtcacgcacctggtgaggttgctgaacgcagcaaacaggacaataaagaaggcacgcagaggatggtattatgctgctagatacatgaagtcgtattctacctagataaagaatacggcagctgctcggcacataagagggcgcgacgacaccaaaagggctatgaagacagcgctcgcaagcacagcaaagttggcaagaaggctatgttacataggcatgnaaatcggagcagtgcctagagaccacggatagtatctggtgagcttcggtaagctcatcataccgagcacgt

SEQ ID NO: 177534 - DNA, 365 bp, Zea mays
  Clone ID: MRT4577_9349C.1
gaattccgagggaggagcgatcctactccccagagcagcagatcgagtactcttgcagggcgatcattctttagctgctctagctctagccctagctagtagctagccactcggtcgtgtagtcatgaaccttctgatcgtgacccatggccgtgccgaggtccagacccagaccgtcctggcgaccgaggaagcgcaggcgagaggagaccccggctccgcccgccggcgtgcccgaggaggatgaccccgacgacgaggtcggccaggaggatccaggtgacacgactgataccgaaccagatgccctccgatggaaccggaggcggtccttgcatgagcaggaggaagacattccgcaggag

SEQ ID NO: 177535 - DNA, 145 bp, Zea mays
  Clone ID: MRT4577_934C.1
aacatcaagggaaaaaacaaacacgggcactcgtcatattattaaacacatgcccttccttacataagggaaattaacacacgtcgcatacattcaaaccatccctacatatgctcagacgcttgtatccacccaggaatatcat

SEQ ID NO: 177536 - DNA, 500 bp, Zea mays
  Clone ID: MRT4577_93500C.1
aaaaaaaatgtttttaattataaaatacccaatggccctcacaaaaaacaacagggccatttctccctctcaaaaccaaaggcaacccaaaaaaaattagggcacaaagaacccaaaaaagaaactctacccttttccccccccccaaaattccccctcaaaaaccaaaagaatgccccctaggggagcattgtaccccccccccctcccttttggcccccccaaaaagagcgccaccgaaacaacccccgcaccaatggggaaaaaaacaacccccggggtcttctttttactaaccacccaaacacataaacgaccccaatcgccgccccagggtccccccccggaatcccagacccgttcctggacgcaacccccccacaccaaatgaagggtaaaaaaaccctggctaaacacgagaaaatactgctcccccgccaaaatctctctcctccccccttccccaaaaataatacacccctaagccaaaaacggaaaca

SEQ ID NO: 177537 - DNA, 2666 bp, Zea mays
  Clone ID: MRT4577_93501C.1
gggtacctcgaggccggccgggctcgcatcctcatcgtgaatcgcgtccgcttcctccatctctctctagccgtgagaaaccgcgtccgcttcctcctgctctctccatctgcgaatcgcgtcctgcaatcccagccgcgagaaactgtgtccgcttcctccgctcattccctgctctctccatccacgaatcgtgtccgcttcctcgaatcacgtatgcttccctactccccaaggttttcttcgccctccgtcgggatccacagattccccatccaccctccgctcggatcgacagacgcaatccctgctctctcctcgccctccgcccggatcaccaggtcatacttatggcgtcgccaccacaaccaaagcagctggtgctcgctatgtcatccacggattcggacctggctgccttggacctccacaccggcgtggaggactcatccatggatctaggcccagctgcctgggacctccgcacccggtgtggaggacatttgcctctgccccttcgcttcccaccctcggtcgctcgcctcagttgtcgaccgcttcctcgccttcgctcaggcttttcccgctggccacaactctaggaccatccacatctactactgggacaaggtgtgttgggttgtggccactagccggcgtcagctaggaacaacaacctgtagtaggtgtcaattgaggcgacattgtgtcaggaagcagaagacatgcacgcaattggtgaatgacaactttgcatctgtgatttggcccaagaaaatttgttcttaacagtgttgtcggacagagaaaaaggtcgagtcaagaactcttctcccccgttcgcgcagcacagtcggccactacacacacgccgcccaccaacaccatggacgccgccgcgaaggaggcgctgatcctggacctgcacgcggtggaggccgtgaagctgggcaccttcgtgctcaagtccgggatcacctccccgatctacctggacctgcgcgtgctcgtctcccacccgcgcctgctcgcctccgtcgcgtccctcctcggcgcgctcccggccacgcgcccctacgacctcctctgcggcgtgccctacacggcgctgcccttcgcggccgcgctctccgtcgccgcctccgtgcccatgctgctcagccgctacgacaccaagcgcgtcgagggcgccttccgcgccgcccagaccgtgctcatcgtcgaggacctcgttaccagcggcgcctccgtgctcgagaccgtcgccccgctccgcgccgaggggccaccttgggtcgccgacgccgtcgtcgtcatcgaccgcgagcaaggtgggcgcgataacctcgtcgctagcggggtcgcgctgcactcgctcatgaccctcacggagatgctagaggtgctggcgaggcaggggaaggtcggcgagggcaacctcaccgtagttagagggcacggcgcacgcaaggagtggggcaccttctccggctcgttgctatgctccaatggcgtcaatgtccacgtgccacgtcatggagcggatgcagcacaattggctagctgtatacatgcatctgttcaatccatggcttctcgacgctctcctaggttttggacttcaaaactttgtcatggtcaaagctagaagataaatcacaagcagaaccatccgaattagctggagcagtttcattttcagcaagtgctggtcattcactgttaaggagtttgatccacaaacctgcacttggtctaccttgtgtacttatggaaggtcacttgcttgacagtaaagacacgaccacctaactgaacatgccctcaaaggtaataaaaaaaaaaaaaaatccgcatcttagactgggcggatattattaatgcgcatatagttcctggacctgggattgtagatggcttgaagctcaagggtttgcctaaaggaaggggcctacttttgcttgctgaaatgagctcagctggcaaccttgcttatggagactacactgctgcggctgtaaagattgccgagcaacatcctgactttgtaataggatttatatcagtgaatcctgcatcttggtcaccagcaccgtcaagcccagcatttatccatgccactcctggggttcagatagctgctggaggagatgcccttgggcaacaatataacactcccttttctgtcatcaacgacagaggtagtgatataattatagtcggacgagggattataaaggccagtaaccctgtagagaccgcgagacagtatcgcatggaggggtggcaggcgtatcaatccggcttttcttgaggatgtttaagcaactcgccaaacgtagccggaggacattcgggcgagtgttgatgtgataagagtgcgccccatctatgatctatgtatgcaactgcgttctttcacttttacctgcccatcattgccacgcagtgattttcagtaatggttctgactgtacccccggatgctataatttgcaataaggtaacgccaaatcttagctgaactttcagtatgtatgtctctcattggcaagcagtgatagtattacctgttttgatcggagctctgtagagcaatttcatgtttctagatttgaattaagccaaactttcttaattttcattgaaaatatcattgatgtctg

SEQ ID NO: 177538 - DNA, 141 bp, Zea mays
  unsure (1)..(141): unsure at all n locations
  Clone ID: MRT4577_93502C.1
tgacattggcagttgatgcangngnttgtggctcggtgtgcggctcgagcgatttcaaagactgaaggaaaatcagcgcgcacagtgggataagcgccagtgcaggacgtctggcaactctagagtcatagtgctggctta

SEQ ID NO: 177539 - DNA, 424 bp, Zea mays
  Clone ID: MRT4577_93503C.1
caaacccgactagtatacaacatggtttgggtttccaaaacccccttgggggaatatggccccacgggggttggaaaacaaatttcaaaattttcaagttggtggaacaaaggggggaaaaaaaaaaaaagggaaaggggggcaagccttacttgactttggcaaaaaaaaaacccccaaccgcccccctggtaaaagggcctactaccaaatgggttggaacccttgacaaacacaagggggaaacttaacccgggcccaccccttcctaaaaataaaaaccaccaccccctaaagcaactccaaggggccctttttataacgggttgggtggggccaaacttttccgggggcgcacgggaaaaacccacttattagactgggatggacccccaggcaataaaatttccgggaaaaatccaaa

SEQ ID NO: 177540 - DNA, 159 bp, Zea mays
  Clone ID: MRT4577_93504C.1
ataccaatgcaggactggtatatcgatccacaagtgattaagtctaggggagggaggatatgatcgtttaggtcgctgtgtcgtccgtcgaagtgtgcggctcggcgcgagggaaataagcaagcgaggtacggtaggcttcacgatcaactgcattaa

SEQ ID NO: 177541 - DNA, 257 bp, Zea mays
  unsure (1)..(257): unsure at all n locations
  Clone ID: MRT4577_93505C.1
gcctcattcatctccattagaaacaccgtcgcacccacactcttccttggggcgcagcccaaagccgcggaacgatgggtcgcgcgaagcatactgcgcgcaagtccacgggcggtaaggtccacaggaagcatattacgaccaaagaatggcgcaaaacggcccctgctaccggcggagagaaaaagccgcaccgcttccgcccgtncaccatggcgctgcgcgagatccgcatgtaccagaagagcacggagttt

SEQ ID NO: 177542 - DNA, 336 bp, Zea mays
  Clone ID: MRT4577_93506C.1
agcagagtcgtcaacaacagcaggaaacataactgaaagagctagcactacctgatcgagcaccatgggcatccccaaggctttgcttcttgccatcctcggctgcggcgtctgcttgtgcagcgctgctgtccttgcagctcgcgagctggggggcgacgacgagctggccatggtggcgaggcacgagcagtggatggtccagcacgggcgcgtctacaaggatgaaaccgacaaggcacaccggttcctagtgttcaaggccaacgtcaagttcatcgagtcgttcaacgctgccgccgccgccggcaaccgcaagttctggctgggtgtgaa

SEQ ID NO: 177543 - DNA, 111 bp, Zea mays
  Clone ID: MRT4577_93507C.1
cgcatgcggagcagcatgccacgggaatgagtcgtgatgcgagcttggcggaatcagggacatagctgtctcctgtgcataagtgagatcggctcataaatctacacaaca

SEQ ID NO: 177544 - DNA, 185 bp, Zea mays
  Clone ID: MRT4577_93508C.1
attcggctcgagggttcagccacggaggtgtaaaccaaacttgtggggaggcgctgcagaggagtcataaagtcttccggcgcgacaacactggataagcactagtgaggcaggccccttccacgagagcctgtcccaatgctgcaacagatgagcaggcaccttcagaagccaccacgtccaac

SEQ ID NO: 177545 - DNA, 491 bp, Zea mays
  Clone ID: MRT4577_93509C.1
aaatatcatgcctacttatactccttgaactttctgcaagtgatgctactgagaccattgtgccgctatgctcacatgctcctatagcttctattcttaccacgtacctctcaccagtggtgacttcagcatgtgatttctcaatcttgaaccctacaggatccaccatgcactcgcatacggcatcttacctttatcacccttggtcctccaacaatgataaaccctattacagcagttaccttcggtgcattgattggcacaaaacatcagggcgcaacaactcgggctagcaaaccttgctgtctactctcagcaacagcagttacctttggtgcatttgttggcacaaaacatctgggcacaacaactacaacaactcgtgctaggaaaccttgctgcctactctcaccaacaacagtatctgccattcaaccaactagctgcattgaactttgctgcttatttgcaacaccaactagccctaccat

SEQ ID NO: 177546 - DNA, 994 bp, Zea mays
  Clone ID: MRT4577_9350C.1
ggccgcttttttttttttggccgcttttttttttttttttttaagaaaaacgtatatcagcgtacaattggacaacttcaaaagcttctctgaaaaaagaagtgtagctgaccaaaaagggatgtctactgtctgcacacaacacaagtttgtcaatgatcaaaatctcgacagcatcaacaactttctaggatcattggcacctgccgatccttgagcagcatctacctactgttcatcatcagctctcatatgcgctcagaaacttcttagcagcatccaaattcagctctttgtaaacaagcttctcatgagtttcttcaaatgccttgcagaagaactctgcttttgttgttccaatctttttctctgcagccatcttcaacttctgcataaacaaatcttgtgcgtcggatgagtccttgtcattgcccttcgctgcctcctgaactcgtgagcgctgtctggttcctctgatagatgttccaggatcagccatatttattcagttacttctgcaatgggacatctgccacataggtgatgaacttatgattgcatgtctatgtgcttatttaatacattaccctttgttctggttcaacccagttttctatttagataaatgcatgcataccaccaaagtcccatgcggccatccccccatgcaatactctctgaaccacaaaccttgaactcaaatagaaacaagcatttatgacattgcgtgactatgtgtagctcaacgcagagatagcaacaactttgtcgatctctaccttcaaagtttgtcactaatacttacccactttaagaggccaacaatagccttctttcttaaatggcacgggaagaacagtacaagactaatagtagactgcttaacttgagaggctaggagtaacagactaaacctggaacccccctttagaagcattccaactattattaggcagggagtgttaatatatgtatggtcccattctgcagggaa

SEQ ID NO: 177547 - DNA, 831 bp, Zea mays
  Clone ID: MRT4577_93510C.1
agtgacgtcctgacggggacgcgagagccgagaggctccagttgtttatataagaaaaaaaaaaggaagaccggaagggctgattttttgttcccttcaccgacggcgaggagtgagggttgacaacgggatggcgcggagcgtatcgtacgtttcggcggcgaagctggtatccatggcgcgaggcaatccccgcctcgccatcatcgacgtcagggatgaggagaggagctaccaggctcacatcgcgggttcgcaccacttcgccagcggcagcttcgaggcgcggatgccggagctggtgcgggccgccagcggcaaggacaccctcgttttccactgcgcgctgagccaggtacgaggtccaacttgtgctcggatgttctcagactatctatcggagaccaaggaggattcagggataaagaacatcatggtactggagcgcgggtttaacggatgggaggtttcagggcagcctgtctgcagctgcaccgacgctcattgcaaagggacgtgttcttaagcacacgagtttatatctctcttaggccttgaacaaccaaggatcggcatggtctccgtttctcttgtcggtggttacttcacctcattaaaactcattaaaatgattgacacgcgacagattattgggttggcaactcctttgtgggaactgcatgcataactaccaccagaccactgtcagacataagacacttcacggtgtactgccaggtggcagtattcgtttcagaattcacagttttttgcttctgcatataaattgcagctctgtgcaaaaaaaaaaaaaaaaaggcccctaagccc

SEQ ID NO: 177548 - DNA, 387 bp, Zea mays
  Clone ID: MRT4577_93512C.1
ctccgagatcggaatagcggcgccccgcctgcctgctccgtcatggcgccatctctgatcagcggcttcacacaagtagatggccatgactgagctctccgaggtcggggacaagaccttcttaggcgacgagatattggctatgctccatcccaggaaactggtcctggcatgctgtatgactgcactaatagagatgacagctctgtcagctcctctatgttgggccgtaccagatctgatttccagtagatggactcatcatgcgaccactatattggtcttagcattcggcatccggacattgggggaaggcttcgaggcagaccgacattgagaagaatcggctgaagctgaagctgagctggatgatcgctttaagagtaa

SEQ ID NO: 177549 - DNA, 1149 bp, Zea mays
  Clone ID: MRT4577_93513C.1
cattgggtacctcgaggccggccgggctcgcgcgtctctcacccggtacctgctcctcggcgcctccccaaccaagcctccgcaccttcctcccgacgcgcccctcatggcgaggaggcgctgctgatgcctcccggcgtcggatcggacgcggcggccacgacacctagccgcttgcggtggtgctcgccgagctctaggcgcctaatccgccgacgctgctcctcggatcctccccgagagattcaggcctcgtctcgtctcgtcctgcctagttcaatcgacttccccaagtgcccgacccctacaaggtagtgcgcgtgcgtcgccccaaccccttgcatgcgctgacgctaaccctatctaggagacggagtggcgcgccagcggccacgccggcgaagagaggacgacagcgtgcaagaagagaaggcccgtgtcaggcgcagctataggtggcaggtgcaaagataggcaacaagtgttcaacaacacgactgtggatcaattgacctgcatttcagcttttcagttgaggattaaagtggagctttaagaagcttgaaaattgacattatctcaataatacattgaagtgcaagatgccaaaaataaagaatctctctaatgcatgcaaagtatcattttctccggaaggtcccatatctgaagaggtgcttgagagagtccgtgcactgttagatgagataagacctctagatgttggcctagataatgaagcacaaattgcacgcaattggagtagtactacgcgtccatcaaatgggagacgaggacgtaatggggctaaccagttcactgctccaatcaaatatttgcacattcatgaatgtgaaagcttctctatgggtatattttgtatgccaccttcttcagttatcccacttcataatcatcctggaatgactgtacttagcaagcttctttatggacgtctgcatgctgaatcttatgactgggttgacatacctgatcatccaattgatcaattacaaagtggtaacatccacactttcagagccattacaccttgtgctctctttgacgttctttctccaccatactccgctgaggatgggcgacactgttcatacttccgaaaatctcaaatgaatcagccacctgttg

SEQ ID NO: 177550 - DNA, 179 bp, Zea mays
  Clone ID: MRT4577_93514C.1
accaacatcagtatgaaaactgaccatgatcggacaaggggtcacgaacaaaatttctggcagtgtagacacgggtagtctcacccaatacatttgcttctcgtggatggcggtccctaccaaacgaaacacaagagctcacttaccaatggggtagacctagaccgaacaaaatgtat

SEQ ID NO: 177551 - DNA, 790 bp, Zea mays
  unsure (1)..(790): unsure at all n locations
  Clone ID: MRT4577_93515C.1
ccggccgggnatcctcgcgtctcgctctcacccctcctcggcgcctccccgaccacagtgtaaagcccccgtcccttcctccccgactcgcccctcatggcgaggaggcgctgctgatgcctcgcggcgtcggatcggacgcggcggccacgacacctagccgcttgcggtggcgctcgcctacgcgcccaatccgccgacgctgctcctcggatcccccgagagattcaggccccgtctcgcctcgtcctgcctagtgcctaggtgcaaggataagcaacaagtgttcaaaaacacgtctgtggatcaattgacttgtatttcagcctttcagttgaggattaaagtggaggtttaagaagcttgagaattggcatctcaagaatacattgaagtgcaagatgccaaaaataaagagtctatctaatgcatgccgagtatcattttctccagaaggtcccatatctgaagaggcgcttgagagagtccgtgcactattagatatgataagacctctagatgtcggcctagataatgaagcccaaattgcacgcaattggagtagttctacgcgtccatcaaatgggagacgaggacgcaatggggctaaccagttcgctgctccaattaaatatttgcacattcatgaatgtgaaagcttctctatggggtatattttgtatgccaccttcttcagttatcccacttcataatcatcctggaatgactgtacttagcaagcttctttatggacgtctgcatgctgaatcttatgactgggttgacatac

SEQ ID NO: 177552 - DNA, 1180 bp, Zea mays
  Clone ID: MRT4577_93516C.1
ttgggtacctcgaggccggccgggattaggtccagccgtccagggcatctagctcgcgcgtctctcacccggtacctgctcctcgccgtcctcggcgcctccccaaccaagcctccgcaccttcctcccgacgcgcccctcatggcgaggaggcgctgctgatgcctcccggcgtcggattggacgcggcggccacgacacctagccgcttgcggtggtgctcgccgagctctacgcgcctaatccgccgacgctgctcctcggatcctccccgagagattcaggcctcgtctcgtctcctgcctagcggttcactcgacttccccaagtgcccgacccctacaaggagacggagtggcgcgccagcggccacgccggcgaagagaggacgacagcgtgcaagaagagaaggcccgtgtcaggcgcagctataggtggcaggtgcaaagataggcaacaagtgttcaacaacacgactgtggatcaattgacctgcatttcagcttttcagttgaggattaaagtggagctttaagaagcttgaaaattgacattatctcaataatacattgaagtgcaagatgccaaaaataaagaatctctctaatgcatgcaaagtatcattttctccggaaggtcccatatctgaagaggtgcttgagagagtccgtgcactgttagatgagataagacctctagatgttggcctagataatgaagcacaaattgcacgcaattggagtagtactacgcgtccatcaaatgggagacgaggaccgtatggggctaaccagttcactgctccaatcaaatatttgcacattcatgaatgtgaaagtttctctatgggtatattttgtatgccaccttcttcagttattccacttcataatcatcctggaatgacagtacttagcaagcttctttatggaagactgcatgctgagtcttatgactgggttgatgtacctgatcatcctattgatcaattgcaaccaaggccagccaagcttgttaaagattgtgaaatgacggctccagagacaactattctataccctaatgcaggtggtaacatccacacattcagagctatcacaccttgtgctctcttcgacgtccttttctcgccatactccgctgaggatgggcggcactgttcatacttccgcaagtctca

SEQ ID NO: 177553 - DNA, 2265 bp, Zea mays
  Clone ID: MRT4577_93517C.1
cattgggtatctcgaggcgggcccacgcgtccgcaaaagcatcgacccgtttcgagccagggcatcctcgcgtctcgctctcacccctcctcggcgcctccccgaccacagtgtaaagcccctgtcccttcctccccgactcgcccctcatggcgaggaggcgctgctgatgcctcgcggcgtcggatcggacgcggcggccacgacacctagccgcttgcggtggcgctcgcctacgcgcccaatccgccgacgctgctcctcggaccccccgagagattcaggccccgtctcgcctcgtcctgcctagtgcctaggtgaggctctggccttcaaaggtgcgtgggtgggatctgctgcctcggtttgcgttattcccaagtgccctgcccatactccaacagcggtccagtcgacttccccaagtgctcgacccctacaaggcagcgcgcgtgcgtcacctcaaccccttgcatgcgctggcgctaaccctatctaggagacggagcggcgggccagcggctacgcgggcaaagagaggacgagagcgtgcaagaagagaaggcccgtgtcaggcggcggctataggtgcaaggataggcaacaagtgttcaaaaacacgtctgtggatcaattgacttgtatttcagcctttcagttgaggattaaagtggaggtttaagaagcttgagaattggcatcatctcaagaatacattgaagtgcaagatgccaaaaataaagagtctatctaatgcatgccgagtatcattttctccagaaggtcccatatctgaagaggcgcttgagagagtccgtgcactgttagatatgataagacctctagatgtcggcctagataatgaagcccaaattgcacgcaattggagtagttctacgcgtccatcaaatgggagacgaggacgcaatggggctaaccagttcgcggctccaatcaaatatttgcacattcatgaatgtgaaagcttctctatgggtatattttgtatgccaccttcttcagttatcccacttcataatcatcctggaatgactgtacttagcaagcttctttatggacgtctgcatgctgaatcttatgactgggttgacatacctgatcatccaattgatcaattacaaacaaggccagccaagcttgttaaagattgtgaaatgactgctccagagacaactattctttaccctaatgcaggtggtaacatccacactttcagagccattacaccttgtgctctctttgacgttctttctccaccatactccgctgaggatgggcgacactgttcatacttccgaaagtctcagatgaatcagccacctgttgttttgcctgctgagatagatagctctcaggtagtttggttggaggagttggaggaccatcagcccccagaaggctttgttgttgcaagaggtctgtataaaggccctgtaattaggagataatttgctttggagcgcagaatcaaccaagctgcaaatcagctgaaagacgatgcaggcttgtagtgcctagtgcaagcatcgtcaggtcatgtgcagcctacggtttatttgtacatctcaaagtgatctttgataatttaacagcagttttacagaacaggaacggatgttttttgtttggctgccattttaactgtgtcccactgctggagtatctctgacctagttatggagctcttatcagatcaagaccatggagaacatacttttgatgtaccagcatagctattgtcatgatgtaccagggaagatcaagacaagtgtttccatttggtgatttcagaaagaatttggtgtggggctaccattttgtctgtgtaatagcagcattactattttggagcaagactgtaaattacgggagaggaactataataatatcattaggtttatcatgaaatatattttatgttttttgtttggctgccattttaactgtgtcccactgctggagtatctctgacctagttatggagctcttatcagatcaagaccatggagaacatacttttgatgtaccagcatagctattgtcatgatgtaccagggaagatcaagacaagtgtttccatttggtgatttcagaaagaatttggtgtggggctaccattttgtctgtgtaatagcagcattactattttggagcaagactgtaaattacgggagaggaactataataatatcattaggtttatcatgaaaaatattttaaaggtgtatctatttaggcctaaaa

SEQ ID NO: 177554 - DNA, 150 bp, Zea mays
  unsure (1)..(150): unsure at all n locations
  Clone ID: MRT4577_93518C.1
ttggacatcgtgtgcttantcantgatganncgaagtctgnccatttgcctagagtaaccagatgtntccacaagtcaaccgcttggggcgtgggaacaagtcccggntctcctgggtctcgggatggcacgtgtctgactctcccttga

SEQ ID NO: 177555 - DNA, 480 bp, Zea mays
  Clone ID: MRT4577_93519C.1
attcggctcgggccagctgtgaccgcctactttttcaccgtgcgctactgctcctcccaaccggactcctgtgcaggaacggcggcggcggcggtgaggacgtacctaacataggctagcggcggcggcacccacggaggcaaaggcaagatgttaggtcgcgcgccgcataagatcgacatcaccaagtcctacgagatcctcgaggtgcccaagtcggcgttccaggacgaactgaacaaggcctaccgcatggctgctatcaagaaccaccatgacaagggcggagacccttgaaagttcatggagcttgcacaagcctatgaggtttcgagtgatccagagaaacgtgaagatttatgatcagtatggagacgatgcctttaaggaaggcatggttcgtagtaggatcccacgtcgatcacatgtgacatctaatcatcattttagggaccctgttttggaggaggtggtggaagc

SEQ ID NO: 177556 - DNA, 1357 bp, Zea mays
  Clone ID: MRT4577_9351C.1
gaaaattccggtgtcggtgcccacggacaggcgtgtgcgccacgagcccgacgaacaagggaacgaggctatttccaccggtcaaactaggagctttcacaccaaacacggtgattaagcaagtttcttgtggagctgttcatgtcatggctctatccgaggatggtctactgcaagcatggggctacaatgagtatggtcagcttggcagaggtcgcacttctcaaggacttcagggagctcgtgtgttaaatgcttatgcaaggttccttgatgacgcccccgagcaagtgaagattgttagagtgtcatgtggagagtaccatacagcagctatatctgaaaatggggaggtgtatacttggggactgggaagcatggggcagcttgggcattgctccctccaatctggagataatgagctgatccctaggcgagttgtggcccttgatggtatagtagttggggacgtttcttgtggaggtgtccactcttgtgctgtaactgaagggggagctctatatgcctggggcggaggacatgtgggtcagctgggagtcgggcctcagggtggcttcttctcttgctcccttaatggatccgacatgctgctccgaaacatcccagtcctggtgataccctcaggtgtgttggtgaagtgagacgactcgccgctggaggtggccattctgctgttctgactgatgcatgttcgctgaaagagctgtgcgaattcaagctcgcagagaccgtgaacctttcaaatgctcagctaatagaagatgttgcatcgcggactggtgcggatgccttggcacgcttgtgcgagaaagtaagggagcatttggataaggaaggagaatgtgaattcctggaaaagcaagtggcagaagaggtcaacactataggcagttaggccactagcaaaacagttcaagcagtctgaggctgaagccagtctgggattaaacagggagtcatctacaattgatagcttgacctcccagtaaagttactgattcggacattaattgttgtggtgatcatggaaaatatgtgactcgtcaattgattctgattggtctgtagacctccattggtggtgagcctctcagctgcatcggggaggcgcagaggctctatatgtgtcatgatcttgttccgaactgtcaggttgctgtaatgtagccaaatggaaacctttgtatccctggaacttgaaaggcatgtacctggtatctgcagccagtaagtttggcaatctgaattcgatgccaattcctgggcgtattcgaacgtcctacgtccatgtatttatttcagttcatgtgcatctaaacaatattggtatagcatg

SEQ ID NO: 177557 - DNA, 470 bp, Zea mays
  Clone ID: MRT4577_93520C.1
gggtttcgttgtttccctgagaagctggctagagcaaagcgcacgtatgaagactacaggcggacgctgttttacagcagctgcagggatgaaggtgattgccaccgatggtgcgatggcttgcgtatccacctacacctgcctctgatattgaggaagagactagtatcattatggatatatgtcagtgtgatggcatcctggccagggaaaggactgctggggagtaaaaactactgcccttgtttactctaaagacgtacatgttctgaagtacatcggagtgtgtattccaatacatgattaatggaaaactagaaattcctagcgtaaagctctggtgagagcgtatgtgctgtctgttcaacagattgatagattgactgttgctcacagtgtctgaccttatctggaaaaatatggtgacgcaaaatggacttggagtcaaaaaaaaaaaaaaaaaagcggcc

SEQ ID NO: 177558 - DNA, 331 bp, Zea mays
  Clone ID: MRT4577_93521C.1
agaagcacaagcgtaaggtgttggcggggtagctagaaagaactgctgcaggttgttggcccctgctgtcgcggccgtgacatgggatgggaggaagcttcccttcggtgaggtaatcaagagacatgccagtgaggagcattttacccggttcttgcattatgaagtggatgcaattagaaaggcttttgcaaccttggaaaagggcaaccttccccaagttacatccatagtggtgcaaaagcgccatcacacagtgttttgccctagaattcatcgtacacacagacacccagatcgacgtggaaatattttgcagggatgatctata

SEQ ID NO: 177559 - DNA, 346 bp, Zea mays
  unsure (1)..(346): unsure at all n locations
  Clone ID: MRT4577_93523C.1
gggtacctcaaggcggncgggacctgtataacgcagagacggcgtcttcgnactcgcctatctccgcgactcnnagctttccccaattnccccccttctcccatttctcaccnccgccgccgctccccccgttcagcaacaccatgacgggagtggatnntcgagccgatgcggccaggctgcggatccaggcccgaaaacgcgcggtcgggagctgcactgccccgagcatggcatccccgctgacgcccagaagcccggcgacaacaccattgcccgccacgccacgacgctcccaacaccctccccacagagactgcccctggcaagcacgcccccccgcgct

SEQ ID NO: 177560 - DNA, 287 bp, Zea mays
  Clone ID: MRT4577_93524C.1
cttggtcgatgcgccgacgcctccgatatcgtaccctctcatcctccacgagaaaccgataatccgccggcgacgaaacgatggattatcaggatctccgatctggagaccagatcctgtcgaatgcattcagctacaacgaggtcgagaacggagcgctgtgtgaggacaagggaaaggggaccaccccacgtcctgctgatgaggagaatgaggacaatgcatcccccgagggcgatgaagcttcaatctctggggacacatttgagcaggcgaccgacatagtt

SEQ ID NO: 177561 - DNA, 793 bp, Zea mays
  Clone ID: MRT4577_93525C.1
gactctatgacacaaccaaagggatcaaatcctctcccaagttcggaatcactccaaatcaaatagtgactagagagagcgacatttgtgttcatttgagctcttgcacttggattgcttcttttctttcttgtgatcaaactcaattgtaaccgaggcaagagacaccaattgtgtggtggtccttgcgggaactttgtgttccgtttgattgagaagagaagctcactcgatctaagtgaccgtttgagagagggaagggttgaaagagacccggtctttgtgaccacctcaacggggagtaggttctatagaaccgaaccttggtaaaacaaatcaccgtgtcatcctctttattttcttggttgatttgttttcccctctctcccggactcggattttattctaacgctaaccccggcttgtagtgtgcttaaagttgtggatttcagtttccgcctattcccccccctctagggactttcaattggtatcagagctcggtacttcattagagtctaaccactcgaagtgatgtcgagaggatccgccaatagggagatggaaacaagcacaagccacgggaaggctccatcaaaggagtctggcgccaaaggaatggaggaatcacctccatgagtcaagtcgcatcagagtggcgacaagaagaagaagatgaagaaagtggtctactacgagactgattcttcgttgccctccacatccggctccgacgcgccgtccgtcacttctaagcgccagagcgcaagaagtttagtaagacccccctacg

SEQ ID NO: 177562 - DNA, 550 bp, Zea mays
  Clone ID: MRT4577_93526C.1
aactcagcaccagccgatcggtacacgcgcgcggcaggcacagtaacacactcactcacgcgtgcgtgcagtgcaagccgcagcggagagcggacagcatgagctcctcgtcgccccagctccggcgcctcaagccggcgtaccagtacgtggtgaacaacctcctcgccgtgctcgccgtgctcgccgtgccgctggtcgtcgcgggcatcgtcagcgcggcgcgcgtcgggccggaggagcttctcgccaggctgcacgcgctccggcccgtgcacgtcttcctggccgcgttcgtcccggccgccgcgggcgtcctgtacctcatgatgcggccgcgctccgtgtacctggtcgactacgcctgcttccgcaccaagcccagccaccgcgtccccttcggcacgttcctcgagcacgccaagctggtgacgttcatcgagggggcctccattgacgagcgcagcgtccggttcatgacgcggctgctggagcggtccgggctcggggaggagacgtgcctgccccccgcgcaccacttcatcccgcc

SEQ ID NO: 177563 - DNA, 2743 bp, Zea mays
  Clone ID: MRT4577_93527C.1
tctccgagctacgcagagaaacctccgcatgtactgtctcgcgagcgagtgctacttttccccactcgagctcttttgctttgcttgcgtgtcatctacccaaaacggggggctcgaagcgggtgtaggccctcccagagtccccaattcccttttggtcctggtgcgaccaaatcaacgtgttcgattgactagaggaccccactcggtctaagtgaccgtttgagagagggaaagagttgaaagagacctggtctttgtgaccacctcaacggggagtaggtttgcaagaaccgaacctcgttcaaacaaatcatcgtgtcatccgccttatttgcttgtgatttgttttcgccctctctttcggactcgtttatatttctaacgctaaccccggcttgtagttgtgcttaaagtttctaaatttcagattcgccctattcaaccccccccccctctaggcgactttcagttagctcgaatgagctagcatttatatgtaaaacaaagcttatacttgacttggatgaattaataagtgaacaactatgttagtttaaggaggatgaagctcgaaatataaaaggagaagtacaagaagtttttccaactcaagaggagaacaatgatcaagggggagatactcattatcaagatgaataagatgaacaagttttaaggccaccacagtcaagagtccaccaagcaatctaacgctatcaccccggtagaggaagcactacaagattcggattgggtggtggcgatgcaagaggagctcaacaacttcactaggaatgaggtatggcatttagttccacgtcctaatcaaaatgttgtaggaaccaagtgggtcttccgcaacaagcaagacgagcatggtgtggtgacaaggaacaaagctcgacttgtggccaagggatattcacaagtcgaaggtttgcatttcggtgaaacctatgcacccgtagctaggctagaatcaattcgcattttactttcctatgctacttaccatggctttaagctttaccaaatggacgtgaaaagtgccttccttaatagaccaatcaaggaggaggtctatgttgagcaacctcccggctttgaagatagtgagtaccctaactatgtttacaaactctctaaggcgctttatgggctcaaacaagccccaagagcatggtatgaatgcctaagagatttccttatcactaatggcttcaaagtcagaaaggccgatcctactctatttactaaaactcttgacaatgatttgtttgtatgccaaatttatgttgatgatattatatttgggtctactaacgaatctacatgtgaggaatttagtaggatcatgacacagaaattcgagatgtcgatgatgggggagttgaagtacttcttgggatttcaagtgaagcaactccaagagggcaccttcattagccaaacaaagtatattcaagacattctaaacaagtttgggatgaaggatgccaagcccatcaagacacccatgggaaccaatgggcatctcgacctcgacatgggaggtaaatccgtagatcaaaaggtgccaaaggttcacaacaagccaataaaaagaccaaagatgggttcaaataaagagagccaaagacatcccaaaggcaccctggtctggcgcaccggactgtccggtgtgccaccggacagtgtccggtgcaccagggcacttgacgctgaacttgctaccttcgagaaaatgggaggccgctccgctataattcaccggacagtccggtgtgccagcgaatcaacggctacttcacatgcaacggtcgactacaacgcatttaatgcgcgcctgcgcgcgcagaggacagagcacgcgcagaaggcgcaccggacagtctacaggacctgtccggtgcaccaccggacagcccaaaggccccaccagtcagagctccaacgggcagaacccaacggccggctgacgtggctggcgcaccggacagtgtccggtggcgcaccggactgtctggtgtgccatgcgacagacagcctcccaacgaccacttttggtggttggggctataaatacctcaaccacatcccattcaatggcatccaagttttccaccttcaacacattacaagagctatagcattcaattctagacacaaccaaagagatcaaatcctctcccaagtccggaatcactccaaatcaaatagtgactagagagagtgacatttgtgtttatttgagctcttgcgcttggattgcttcttttctttctcattcttcttgtgatcaaactcaattgtaaccaaggtaagagacaccaattgtgtggtggtccttgcgggaactttgtgttccgtttgattgagaagagaagcccactcggtctaagtgaccgtttgagagagggaaagcgttgaaagagacccggtctttgtgaccacctcaacagagagtaggtttgcaagaaccgaacctcggtaaaacaaaacaaaatgtctcgctctttactcgctcacgatttattttgcgccctctttctcggactcgtttacatttctaacgctaacccggcttttagttgtgcttaagtttacaaattttcagattcgccctattcaccccccctctaggcgactttcaattggtatcggagccggtacttcattagagcttaaccgctcgaagtgaatcgggagatcacgccaagaagatggggatcggcggtcc

SEQ ID NO: 177564 - DNA, 290 bp, Zea mays
  Clone ID: MRT4577_93528C.1
gatagaggtaaagaaggataaagtgtgtgcggttaaataagtaaattaagtaaagcaagcagagtatcagagatttgagagggtttgggtgggcgacttagggtttatttaaaattagaaaaaaaaccaacccaaaaaaaagtataatgtaagtgcgctatgttgaaaaaaaaaagtggtacggtttgcgaatgttataacgaatgcgattaggtaggtgctgtgggagtgcgacaacagagtacgttcgcgctgctgctacaacaaacgcaaatgcacaaggtgcttgt

SEQ ID NO: 177565 - DNA, 454 bp, Zea mays
  Clone ID: MRT4577_93529C.1
gtggcctacggtgcccgctaactgtcactccaccacactctagtaattctgaccctcttagacctctagaaagtaaatagccgcaccgatagttagcgtatccatagaggcctgtaaggaacaacaatggccagtgactatgtccatacacgaccgtcaacagggtccatgaagctcccgataggtagatcgctgctccggcctgttggcccatagattcatacatagcaacgatcccttgctaaacgcgtgctgcgtttcatgctgatccaggggcagattcctagcctctatcatggtgaatacatcgaggggtaggcacgatttactgatgatgccgatgtaaccctttgctggactaccggacttttatgatgaggctacttgtactgttttatccaacaaaacttcttaaaaaaagacttactgtgtcgccgaggaggaggctgctgct

SEQ ID NO: 177566 - DNA, 357 bp, Zea mays
  Clone ID: MRT4577_9352C.1
gggtaccggttttccccctcggatttttttttttttttttttttttttttttttttttttttttttttttttttttttttttttttttttttttttttttttttttttaaacaaacgaccccaaacccggttaaccgatccgggtctgtttaatataactgggccccttacccacagtttccctcaaaaaagggccccggaaccccaaaactttttacctttttggggggggggataacatttttttttaaggccaaagggattaaagggcaaacccatatccggggggaacataaactggggaacaaagggacttccttgagctgaaggccaacctggttgggcggggtatttgga

SEQ ID NO: 177567 - DNA, 263 bp, Zea mays
  Clone ID: MRT4577_93530C.1
gttttgtcacctccgcgccgccgcctccgtaccgcgtctgcaccatcgccaaaaactcatttcgccggctcgaagtcatcatccatcgcttgtcgtccccccatcaaaccttcgagagccatggcgaacaggcgtgcagatgcgaatgcaacaacatcagtggaggatgatgcctcactcaggacctcttccgtgcttgacacctccccatagggcagcacatctccaacggcgaggaagaggaaggacacagaagccaatgc

SEQ ID NO: 177568 - DNA, 878 bp, Zea mays
  Clone ID: MRT4577_93531C.1
gccggccgggtcgcgagcgtcctccgcactattattcttttcggattcgttccacaccccccatgcccgtgcccacctcaggctgcatcacatcgtcgcccacgcccagcaccaccagcggcggcgcaccaccggcggcgccagcaccagtgccagcgcaggcggaggcccgggcgacgcggactggcctgctcttcctcagcggcgtcccttcctgtaaggtcttccggcgaggaggtcacgtgcaggttaccgatgggtctggataatacttatggcgagctatctggcatgttctatggaggcctgtcttatgatggctacgcagaccacagcagcgcaagtgattatttcaggtttgcggatccacttcctgcagttgtgccccagatgacagcagaagcctgttcaaatccttcctccactgtgtcgagggccaacactgaagctgacaacccggaggattgggaattcatctcagatgagtccctcaactatattagccggatgctcatggaggaggatattgatgagaaagttagcatgtaccaggcggagtcagcggcactgcgtgctgctgcaaagccattctacgacattcttgggcacaagtttccaccgtctcctgaccggcaggtgatgccttggcccatggacagccccagtgagagtagcggtagcatttgcacacaatctgtggcaagtgctgtcactagcagcagtgttggcggcacagtggatagcaaccggtgctacgatgttggacacagtgagcagctggaagcttttcgaggcttgtgtggtcagtcttctcatccactttgtggtgcatcaagtgatgcttccaatgcagtgggtgagctagaagacattttgat

SEQ ID NO: 177569 - DNA, 232 bp, Zea mays
  Clone ID: MRT4577_93532C.1
caaaaaacaacagtcaacaacctgagcttcttgattccaacagatggaagaaagataagaagcactggatccttggaagttcattgtttctaggaagctctatcttgctgaacattgtcctgatctctgttatactcttcggtacttactgtactataaccataaatgaaagcccgtctgtgcagtcatcaaacaatctaggattgcccctgaaagccttcaattacactga

SEQ ID NO: 177570 - DNA, 758 bp, Zea mays
  Clone ID: MRT4577_93533C.1
atcattccccatctcctcgccgccggcgccggcgccgccgcctgcgccatgctccgcctccgcagctgcgtcgtcacccacctcctctcctctcgcaccgcctccccactcctctctctccagcgcctcctctccaccgccgccgcgcccgccgtttccccaaaccctagcttcgccgtcgaggactacctcgtctccacctgcgggctgacccgagccaaggcgctcaaggcctccgcgaagctcccccacctcaagtcccccgccaagcccgacgccgtcctcgccttcctcgccggcctcggcctctccggcgccgacgtcgccgcggtcgtcgccaaagacccgctcttcctctgcgccggcgtggagggaaacctgggccccgccgtcgcggggctcaccggcctcggcctctcgcgctctgaggtcgcgcgcctcgtctcgctctcccccgaccgattccgccgcaagaacgtcgtccccaaggcgcactactacctgtccctcttagggtcctccgaggacctcctcttggcggccaggcgcggcttgttccttttctcggtcgacctcgacattgtggtgaagcccaatgtcgcggcgctgcgggagtgcgggctaggtgctcgtgatattgccaagctgctcatccaaatgccgaggatcgtcacggccagcccagggcgcgtcctggcaatggttgcgtgtgcccaagaataggcgtgccccgtggctcggggatgttcatggacgcg

SEQ ID NO: 177571 - DNA, 202 bp, Zea mays
  unsure (1)..(202): unsure at all n locations
  Clone ID: MRT4577_93534C.1
gcggacggggatngtttatggtattcatacacaatgtacaaactaccttatttgttccttactgacaccgagacccgactgcttgtacttcgttcgctccgcggaataaaaatcaagcactgctagacttcccattgcaaaactgaataaatattgaaaagccatttgtatatgatgaacttaccgttccgtttctgacctg

SEQ ID NO: 177572 - DNA, 817 bp, Zea mays
  Clone ID: MRT4577_93535C.1
gataagtccattaagattgccgactttggtgtggctaggatgccgggcaagactgaggggatgacacctgaaactggaacataccgttggatggctcccgagatgatccagcacaggccatacaaccagaaagtggacgtctacagtttcgccattgtcctgtgggagttggtaactgggaatgtccctttcgcaaacatgactgcagtgcaagctgcatttgctgtggtgaacaagggtgtgcgaccagccataccccacgactgcctccctgcccttggggagatcatgaccaggtgctgggacgcaaaccctgaggtccgtcccccattcactgagatcgtgaggatgctggaacaggtggagatggaggttctgaccaccgtccgaaaggctcggttccgctgctgcatcgcccaaccgatgacgctggactgagtcatccacaaatccaggaaaataacctggagtgccgtttactcctatgtatttataatatatattattagagttgtgcttcagaagaagcaggaagctgactcctcagtctgccttctgtctttgacatgtcaccgtagagtacaccagagtggttgtaatagaggtagctttatgcttgaccaaatacccttctccgttgtaaaagtgcctgttcttgctggtcgctgtttgcgtgtttatcatcatgcggcaacatgtgggagtcttgatgcttcatggtatatataatatgttttattaagtaactagcatggatttgctcctgaaaaaaaaactaaaaagattcagtgctaacagaatcatctttgcattggtc

SEQ ID NO: 177573 - DNA, 476 bp, Zea mays
  Clone ID: MRT4577_93536C.1
aattaaccagcgatgatcgattgagcaagtcagacagtgggactggctggtacacgcagaagatggagaaaaggaacgaattggtcttggttcatttgatcatctctggaaacaaagaaaaaagcacgcccgtgaaatctccgcgaaacatgtacaaaatttccgaaactacacgacagccgaagcaaagaaggcgccggcggtcaccagaaggcgcgcttccgccggaaacgcctggccgtggcgaggaggccaacgccgaggcacacggcccacacgcccacctccatcgcccaccgcaccgtctccatctcgacctcctgctcctcctcctcctccgcgtccccgaccacctcccacccgtcgtcgtcgcactcgcagcggcaccagccgccgaggcccgtggtggcgtcctcctccggtatcccctccagccgggtggctccgcaccgcatccggccccgcccacgcgtccg

SEQ ID NO: 177574 - DNA, 404 bp, Zea mays
  Clone ID: MRT4577_93537C.1
cggaaaaagaggggcggcccacacctacgcgctcggttgcgcaagcaccaagtaggtgtaagatgataaaggcagcgggggctcaggcacatgcttttgcgctcctgctccacaacaccatctccatgcacacctccatctccaactcctgcgcgggctcccaccggagctgggtggcaacgaacacatgtgaaggggacgagacccgcggattcgacaagatgcccatggacaccccccgcgcgtaccgcctggtagaccgacacaccggcctgaatcgtatcgtgtggggcggaaccgactacagcgacgaggccttcatgccgggcccagcggtgctctcccggaccaactaacgacagcacaagcaacgtgttgggggatgtacaagtatacgaaatttc

SEQ ID NO: 177575 - DNA, 2109 bp, Zea mays
  Clone ID: MRT4577_93538C.1
cattgggtacctcgaggccggccgggaacaactcccccaatccgtcccgtcggccggacgagcagggcccaagggcccaccttaccatggcgaccgccactgccgcccccgtccccgccggcggccacccgtaccgccgcgcccgcactcgctgcggcccaccgcgcctgcaccgcctgcgcttcccggccgcagcagcagccgcttcgtcttccctgcccgccccgtcgtccatgctgccaccgctgccagatggaggcgggcggctggtggcggagctggtgtgcgcgttcaacgagctcacggagcggatgggggaggacctggcgacgtcctcctcgtcgagcctgctcttccgtgtgctgaagctggcgctccccgccctccgcgacgtggagggcggccgggcactcgcacgcgcgctcgccgtcgccgcgaccctcgctgacctccagatggatgctgaagtcatatcagccggcatactaagagaagcattagatgcaggagctgtaagaatgagggatgtaaaaacacagattgggatcagcacagctcatttgctgcatgacagcttaaggattaagcatgctccttcgaagcttgacgtattggatgatgaaggtgcaagcacattgagaaggtttattctttcatactatgatatcagggcagtcatattggagcttggaatgaagcttgatatgatgagacaccttgattacctccctaagtatttgcagcagataaaatctctcgaagtcatgaagatatatgccccacttgcacatgctgttggagcgggtaatctgtcactagaattagaggatctttcatttcgttacttgtttcctcattcctatgaccatgttgatcagtggttgagaagccaagaaggtgactgcaaggctataataaatttgtacaaggagcagttgcttcaagcactgcaggctgataatgagttgaggaggattgcacaggacatctcaattcaagggaggtataaaagccgtttcagtactatgaagaagctagtaaaagatggacggaagccagaagaagttaaagacattctaggtttgagggtaatcttggagcctcggtgtggtggcaattcatctgattggggccctagggcttgccacaggacacatgaaattattcaagctatgtggaaggaaatcccgggtagaacaaaagattatataactcacccaaaacgaaatggttaccagagcttgcatgtggccatcgatgtcagtgaacctgggaaggtgaggccattaatggaggtacagatacgcaccaaggagatgcataggtttgctgttggtggagaggcatctcactctctctacaagggtggtcttactgatcctggagaggctaaaaggctcaagactattatgttggcggcagcggagttagcagctctgcgcctacgagacctaccaggcagtgaccacgtagttgggaactgcaagaacccggctttctgtcagcttgacaaaaatggggatgggagaatcagcatcgaggagctcactgaggtgatggaggatctaggtgctggaggcgaagacgcaacagagctcatgcatcttcttgatgcaaacagtgacggctccttgagctctgacgaattcgagtcattccagagacagatcgaagtgatgagaaacttggaggatgatgataaccactataggaagatcttgaaggagaagctgcacacgatcgacagtgcaggtctcatccatgtgtaccgcaaggagctcagtgacaaattgcttgtgggctgacctggcagccatcttattgtagttttgtatgtataccacaccgagaggtgactccagcactgatctgtaaatagtcgttgaacgtacgtggtatcgagcaatattacggtagtgaatttatagggtggattgcgagatcgagaaatgaaggtaaatatataagagattcgaagatttagacaggttcgaaccatataacaccctatgtccttttggggttcatgtctatatacaatgtgatcagatgatttgtcctagggacgcaccgtccactttttatagtctaaaaaaacgtggttagttt

SEQ ID NO: 177576 - DNA, 247 bp, Zea mays
  Clone ID: MRT4577_93539C.1
cctaatttttttttaacccccgtatttttttatcggtagggcttttttttagcttctggccctttttttaataacccacaaacattaacggccgaaaaaccctatcatcatagtccaggcattctacgattcagggcattcctacaggattcaacttgggccttgctggcacgcctacctcgccacatacccagaaggggcctccagaattattttttcctcacccaacgcgcacttggggggctgg

SEQ ID NO: 177577 - DNA, 756 bp, Zea mays
  Clone ID: MRT4577_9353C.1
agcagtggtaacaacgcagagtacgcggggggttttcgtaagatgtggcactactaatattcctctgataaatatatatatggctagaggaaactttataagtaatatatggcagtcatgtttgccgaaatggagttatagggttgcacatattttcttttccctgaaattgatttcgatgaataaattacttggactacttttgctttttcttgcaattgagaaatgagtacaccatttaattcacattttgcagtcgcacctgtttgttatgaatgtcaatatggaacatccactaacaatttggatagaaaccaacagcagcatgaaatattactaaatgaacttttgcaaacttgcagcattacaagcaggaatctgctaggctgaggcagcagatcgttaacttgcagaactccaacaggttcagttcttatagaaaattatcatgtgcgcgagaatacagaaaggtcatttgatgaacttataagttttcagggccctgataggtgattctatcacaaccatgagccacaaggaacttaagcacttggagactaggttagacaaagctctcggaaagattagagcaaaaaagaacgatgtgctgtgttctgaagtcgagtacatgcagagaagggtagacagcaacaagaacacatttttcctctcgggaccttattgatttcgtggccattgcgcaaaaaaaaaaaaaaaaaaaaaaaaaaaaaagtactctgcgttgttaccactgct

SEQ ID NO: 177578 - DNA, 404 bp, Zea mays
  unsure (1)..(404): unsure at all n locations
  Clone ID: MRT4577_93540C.1
ggcagcgtcaacaactgacaacacgcccsaacgcggagcgaccgcacmmatcttgtatcctatccacggggmacatcgaatatagactcccttcccggggtgcccmagggaggcgccgagcccgtaccagccccacgaycsaggccagcaaaccgggggtatggtatgggtccaccagccaaggcsstgcttgytgttgtacagtttcgtaatttctgcttccttcttytsggttcgccgaatccagttgctcgtatcatgctggaagaacactctgttacctcgsccatgttgcggggtttncacgggtgtcmagtaatgtgmgaagccgctatggtcaggyatytcaatmccgtcatctcagyggatccattgaatttttttgtaagamggttattgcaatg

SEQ ID NO: 177579 - DNA, 398 bp, Zea mays
  Clone ID: MRT4577_93541C.1
ttactgcacacataagcacccttcaatgcttcgttactgaatctgcagttttgggatatgtcaattcagagttgtgtgggggtttgcttacgttccttggttttgatctgatatatatggctatttttatgttgatcatggtggcgtgaagattgccaccagactaattaggagcttgattgtccttaattggaaaaatgcagtagaggcaattgaggggatgttttggacctgggttgaagctttgacctgactaaattcatgacatgctgataacattgatgggatatatgtatctctcacacttctattgggactcttaaaattccttgtgtcttatatttgggctgatgttttttttcaacaactggtttacaacatctggattggttatggat

SEQ ID NO: 177580 - DNA, 411 bp, Zea mays
  Clone ID: MRT4577_93542C.1
cagagtgtgagaatagtttgtagggttgtcatcaaccaccaaaaagggcgagattgagggcatgtatgcccgtggttggttttagtaattaatgacaacgtaatattatatgtgactaacgtgtgttctgcagagcaaatggtaagttagattgtattacaggaagttgtactacaacggtgaatacaatcactgagatgagaacttgaagcaacagctgaaacgacgaatcaaaagatgaatgtcttcatattccaagtgtcatgagttgcggacactttgtatagaattatgtcttctattgtattttatccatactattaagaggagttgtggatgagttattttgaccaagataatgctagtgtattgttgtatcatattgcacactctattactagtttaactcta

SEQ ID NO: 177581 - DNA, 508 bp, Zea mays
  Clone ID: MRT4577_93543C.1
ggcgagcgagccaccgcccgacagatacagagagggagagtgatactggggagtagggttaaactcactatcgagccgataggaaggcgccactctccgaccacaactgagataactgaccgcaggggctcgactgcggcccagtatccagcgcgataccgctatgcgtactgtacaccccaggcctgattgttccatctgccggcgcacggtcgagcccatctgtgctgcaccatgcacaccagctctctggccatccttagcgacgccgtcctccacttctcgctcatacccatgcatctaacagccttcactgcgcacagatacacgctgtaaccacggtgaggcttaattctaacccaactcttaatgatactagatgcttgttgctgctcttcctcgacatgtactactagtctactactactcctagtctgctgctactactagaagacccaagcttcacgactcgtgcgtacaatgttgtaatttattatatagagtgcct

SEQ ID NO: 177582 - DNA, 330 bp, Zea mays
  Clone ID: MRT4577_93544C.1
gagctcacatggcggcggccgccctttgttgtgtttttggcaggggagtttaagacggggccagcatgccatcacgagtgacacaaaacaaacacagtattatgggagattggatactatgcactgggcgattgcgcaaacgctaggattaacaagtaagtgagccgagactagcatactaactgtgtgaagacctatagcgggccaacacagagttggctgtcatgctttgacctatactacgacttgagggtgacactcctgtcgccgacatcaaggatgtctgaaccctgtctggggcccataatgccgatgtccatggtccatctt

SEQ ID NO: 177583 - DNA, 642 bp, Zea mays
  unsure (1)..(642): unsure at all n locations
  Clone ID: MRT4577_93545C.1
agcctttcagttttcggcggcggcggcgcactcccgtgttctcacccaggcgcgcactcctcctcgccgtctcggatccaccgccgcttccgcagccatggtgaacgttccgaagaccaagaagacctactgcaagaacaaggagtgcaagaagcacaccctccacaaggttacccaatacaaaaagggtaaggacagtctttctgcccaggggaagcgtcgttatgaccgcaagcagtctggatatggtggccagacaaagcctgttttccacaagaaggccaagacaacaaagaagattgtgctgaagttgcagtgccagagctgcaagcattactcacaacgtgctatcaagaggtgcaagcacttcgaaatcggtggagacaagaagggcaagggaacatctctcttctaagctgatgatattgtcgttatgtttagaatgttgtgccagaacttcccacaagaagactgtattatctttaattttctggctataaccctattggcaatggagcatatgttttgctattgtgtcaactactttctccagatccaatcgacaagtaaaatgttatttatatnaannnnnannannnanaaaaaaaaaaaaaaaaaaaaacccaaacgagcatcaattca

SEQ ID NO: 177584 - DNA, 206 bp, Zea mays
  Clone ID: MRT4577_93546C.1
ctactacgtatatccatttctttctactaaattaagagagacgacgcggggtggccagcatgcatcgtgcggtcaccaccatttcagctcacgagggcgtcatgaggctggagtcgcactccatcgcggcccacgaccgtcggttgccgggtcagtacactgcggcagggcacggcgccaagaaggacatgtcgccgtcgctggag

SEQ ID NO: 177585 - DNA, 531 bp, Zea mays
  unsure (1)..(531): unsure at all n locations
  Clone ID: MRT4577_93547C.1
tataaatatatgtagtgtttactgctctgtaaataaaaatactgaatgcctgtggacataattgtactccatgttttctatttagtttgatgcatcatcaggaattcaaattgaagggtaaatattgtatacttctttgttaataaccagctggcattatgccctcttcctggggtacttgtagcctttgcaactctgttcttctaaaaaactagaccaacctaggaggaataggtggcattttattattaagaagaaaccattatnnnttctgcctggggtacttgtagccgttgcaactctgttcttctaaaaaaattagaccaataggtggcattntattattaatacaaatttgcctcaatgaggacgacttgaacctggtctggctatatatccacaccacacccttgaccaaccgagctagctcagctttctcaactccggaactatttagtatgttccttgcttgcctttacctttaaagttggaatcaatgatcatagatacatcattttggatgtctgtttt

SEQ ID NO: 177586 - DNA, 283 bp, Zea mays
  unsure (1)..(283): unsure at all n locations
  Clone ID: MRT4577_93548C.1
caaaaaggatagcggatagaacggataggagataaggaggccaccggataacaactataaggattggaacagnaaacgagggagaacnngggggaanaaagattaagccnttggactggggaaacnggcataagttgtaagaaacaactgnaaacagcccagagatnnggagagannaancaaccttcactttattcctatggactattagttataatacaataaaaggagaattgcaaaaaaaatacccaagaaaatttgcacgagctaaggatgtactaac

SEQ ID NO: 177587 - DNA, 214 bp, Zea mays
  Clone ID: MRT4577_93549C.1
ctgtaccagattgttatatttaagcaaaacggtgctcaccaggtataagatagaggggcacgaacaataggtcaccaacggatctttcatgcatttactcttgaggaaacaaaacaaatgggatatgacaaactcctgtgtcaaggcactaaagggggacgaataggacgcatctggcgactcctggggcctctccttcgtcctgatgcgcact

SEQ ID NO: 177588 - DNA, 1314 bp, Zea mays
  Clone ID: MRT4577_9354C.1
aatcagtatcctgtggcgcacattgtacagctgccgtcgctgagcctcgagaaaacgatggcacggtatcgaaaagcaggctttgggtttggggacaaaatcagggttcagattaccctcgtctattttggggagctttcacaccaaacacagtgattaagcaagtttcttgtggagctgttcatgtcatggctctatccgaggatggtctactgcaagcatggggtatacttggggactgggaagcatggggcagcttgggcattgctccctccaatctggagataatgagctgatccctaggcgagttgtggcccttgatggtatagtagttggggacgtttcttgtggaggtgtccactcttgtgctgtaactgaagggggagctctatatgcctggggcggaggacatgtgggtcagctgggagtcgggcctcagggtggcttcttctcttgctcccttaatggatccgacatgctgctccgaaacatcccagtcctggtgataccctcaggtgttcgtcttgctacctgtgggcactcccacacacttgtgtctatgaaagatggccgcatatatgggtggggctataatagttacggtcaagcgacgaacgagaaatctacttatgcttggtttccctctccggtcgattggtgtgttggtgaagtgagacgactcgccgctggaggtggccattctgctgttctgactgatgcatgttcgctgaaagagctgtgcgaattcaagctcgcagagaccgtgaacctttcaaatgctcagctaatagaagatgttgcatcgcggactggtgcggatgccttggcacgcttgtgcgagaaagtaagggagcatttggataaggaaggagaatgtgaattcctggaaaagcaagtggcagaagaggtcaacactataggcagttaggccactagcaaaacagttcaagcagtctgaggctgaagccagtctgggattaaacagggagtcatctacaattgatagcttgacctcccagtaaagttactgattcggacattaattgttgtggtgatcatggaaaatatgtgactcgtcaattgattctgattggtctgtagacctccattggtggtgagcctctcagctgcatcggggaggcgcagaggctctatatgtgtcatgatcttgttccgaactgtcaggttgctgtaatgtagccaaatggaaacctttgtatccctggaacttgaaaggcatgtacctggtatctgcagccagtaagtttggcaatctgaattcgatgccaattcctgggcgtattcgaacgtcct

SEQ ID NO: 177589 - DNA, 396 bp, Zea mays
  unsure (1)..(396): unsure at all n locations
  Clone ID: MRT4577_93550C.1
cccccgggctgcggttttggggacgaggtcgtggagtgccggggaccgaggacgttttgcagctggtgttagagcgcgatccattgtcggggaagaagtatgttgttgcgagcctcctttatggcgagctccgaccatggctgcaccaccgcccccaaggacttttggtggctttcacagacagccttttggggggggcgngcgcgagcgtctcgagttctactacttncaggggcagggggggggggtgtttctcttcgcgtggagcgctacgggttcaccgtggtgcgcatgaacgtgctcgcgggccgttgtatggggcgcgagccggggggggtgggggtcgtgggcgccaagagctttcccgtgctcttcgacgtggagaaggtgggggag

SEQ ID NO: 177590 - DNA, 417 bp, Zea mays
  Clone ID: MRT4577_93551C.1
aagccataaagcaccaccgaatttttgttttgagcccacaggcctgaaacaaacaggggcaaaacttttaatgggaataataattaatgggggggaccgtattcctattttaaaatcgcaggaggcaaccggccagccaggtctgaactgaacccagccccagcaatgaactgaacagggaaccctagctaggcctcctagggggggccccagcaggtgagggacatgacgggcctaatcccctcctccgggggggccttgcccggccgccttttaaactccgccgccggggccagtttcttgtcccctttcccggaaaggtttttgcggactttggccttgggggggcgggggacggaccccaacgcgtatttccagggggaaaggccaccctggtccttgagcgcctccaggggc

SEQ ID NO: 177591 - DNA, 753 bp, Zea mays
  Clone ID: MRT4577_93552C.1
agcgtggtcgcggccgaggtacgattagtcctcttccaatccggccgttaatccaaaagcattccaactcacacagggacgcagaggagaaagagacagacaggcagcgagagagagagagagctcaaagcaggcaggcaggcaggctcgtcgggctcatgagttgctttcattcagttcctgacgaactggaggccgttggcccgggagtacctgcccgggcggccgctcgatgaagcgcatgaagcggtcccactcccggggcgtgcgcatcacgtacttggcctcgatccgcgccggcttgccgttcacgaacttggcgctcacgtccacggactgcagcacgccctcgtcgtccaccatgtaaaagcccgtgatgtcgcccagctccgccgacgagtcgaacaccgacggacgctcgaacgcgaagacggccacgccgttggtgccgtcgcgggacttggtcagccgcacgtccgggaccgtctgctcgtccgtggaacaacgacaagttctgctgttgatgctgctgcctagggccacctgcgacgtggtaccgacggggatgctgtgctgcccgtgccgacaccggcgaggcgacagcaagagccttcatcactgcggccatccctagctagggggcggtctctgtgactctcgagtgagaggcaggcagctagctggccggggaaggtgcagccgcctgcaactgcaaggggctggtcccggccggccggcctcgagggacccaat

SEQ ID NO: 177592 - DNA, 1115 bp, Zea mays
  Clone ID: MRT4577_93553C.1
gggtttggaacgttcagagcaaaacaaacctcccatatttctttcttttctctacaaaaaaaaaaatcactcacaagcacacagcaggtcacaatcacaacaccaggggcgcagcacaggggagaaaggaaagaaaaaaaaaaagaacactagcaagcaagcagaacgtagcgcagcaggcaggcaatcgatctcaaagccggctcgtcagttcttgacgaactggaggccgttggcctgagagtaccgctccatgaagcgcatgaagcggtcccagtcccggggcgtgcgcatgacgtacttggcctcgatccgcgccggcttgccgttgacgaacttggcgctcacgtccacggactgcagcacgccctcgtcgtcgatcatgtagaagcccgtgatgtccccgagctccgccgacgagtcgaacaccgacggctgctcgaacgtgaagatggccacgccgttcgtgccgtcccgggacttggtcagccgcacgtccgggatcgtctgctcgtccgtgccctggatgaactggatcgccggccggaccgccgccgccaccaccaccgccacctgcggcccccgccggggcgtcgcccgccgcggtcgcccagggcactgcaccgacacgccgtggaacggcgactgcagccgccggctagcgccacctgcgacgtaccgacggggctgccgtgccgacaccggcgaggcggcgaccgcgagagccttcatcgctgcgactgcggccatcctccagctttgccctgctggtggagtggtggttgtggctctcgagcgatcgaggcagctggggcttgggcgcggcggccggggaagctgcagcctgcggggactggtgtggtttccggaaaggaagaagaggtttgagtggtgcagagcgagacgggaaccccggccggagcccgtagggcagcgcggtcatgatcgtcgtccaggagcaaacgacggcgaaggaggaggcgcggcggccgaagacagcaagagccagcagcactgcggccatccctagctagggggtggtctatgtgactctcgagtgagagcccggcagctagctggccggggaaggtgcagccgcctgcaactgcaagggg

SEQ ID NO: 177593 - DNA, 1221 bp, Zea mays
  Clone ID: MRT4577_93554C.1
ataaattaataatttaaaataatttttttttttttaaaaacaacctccccatattcctttcttttctctcaaaaaaaaaaatcactcacaagcaccaagcagggcgctttttggccgctttttttttcacaaaacggcccaaattcatcgatagatcgatttagggtgttcgaatttcgatacccttccttgttccttcacacagacacagtgacacagcgcacgccacatgctttgtgtcatgccaaggccaaggctctaacgggacggtacaactgccacggacaatgaacagggaggaggggttgcatgtggccagcctgtgtgcgagcaatcagaggatgcacaatacttgtcagactgtacgattagtcctcttccaatccggccgttaatccaaaagcattccaactcacacaggggcgcagaggagaaagagacagacaggcagcgagagagagagagagctcaaagcaggcaggcaggcaggctcgtcgggctcatgagttgctttcattcagttcctgacgaactggaggccgttggcccgggagtaccgctccatgaagcgcatgaagcggtcccactcccggggcgtgcgcatcacgtacttggcctcgatccgcgccggcttgccgttcacgaacttggcgctcacgtccacggactgcagcacgccctcgtcgtccaccatgtaaaagcccgtgatgtcgcccagctccgccgacgagtcgaacaccgacggacgctcgaacgcgaagacggccacgccgttggtgccgtcgcgggacttggtcagccgcacgtccgggaccgtctgctcgtccgtgccctggatgaactggatcgcgggccgggccgccatcgccaccacctgcgcccgccgccatcgcccagggcactgaaccgacgacacgccgtggaacaacgactgcaggtgcaggctcaagttctgctgttgatgctgctggctagggacacctgcgacgtggtaccgacggggatgctgtgctgcccgtgccgacaccggcgaggcgacagcaagagccttcatcactgcggccatccctagctagggggtggtctctgtgactctcgagtgagaggcaggcagctagctggccggggaaggtgcagccgcctgcaactgcaaggggctggtgtcccgcccggccgcgaggggcccaacgatgggatcccggccggcctcgaggtacccaa

SEQ ID NO: 177594 - DNA, 561 bp, Zea mays
  Clone ID: MRT4577_93555C.1
cccacgccgacaccgatgccgagagccggggtgtccagcagcgagagtagccgccgtggcgccggtgcgttcagaaccctctccgaagatcgccgcatcaccgtattctgctccgacggtcgcctctaccaagtcgattacgcgtggaacgctacgaagctggcgggcgtcacctccgtcggggtgcgtgggaccgactccgtatgcgtcgtcggccagcggagggcgaacacgcacgcgcccaaggacaaattgctggacatgaccagcgtttcgcgcctgttcccgatcaccgaccggctggggttgctcgccacggggatcgcaggtgaggggagagcattggcacatgaggcaaggaatcaaactgcagaatttcgtttcaattggggatatgaaatgcctcctgatgttttggcacaatggattgcagacagagcacagatctggacccagtatgtttccaagagaccttctggagttgttgccatgattctgggcattgatgatgagaaagggactccacaactctttacatgtgatcctgctgggtattttttc

SEQ ID NO: 177595 - DNA, 446 bp, Zea mays
  unsure (1)..(446): unsure at all n locations
  Clone ID: MRT4577_93556C.1
aaaaacacaccagcgaagcgcanagcggggggcaacaccaaggcaccaagagacagcccggcgggcgcgncnggcccnaagagggagcgcaacaaacgcgnncacaagaccacagggcgcacnngcaccnagcgccagnannccacagnnccaaccaccagngacnncaaggggcgaagaacggggcgggcgagcaagccaacaggcaacaacnagcgcgngcggggagcgccanacaacaaccaanggcccaanagcaacaacaagccnnggcacaacaaacccgacaaaccaaggcaacgcaacaacaacaacaacagacagcagccagcacagagccaccgagccgaggngaacccngacaccgaccagcaacagcagccgggagcaaacaacccacgagcacgggcgaacgcagcgggagaccagcaacaacaacagccgca

SEQ ID NO: 177596 - DNA, 356 bp, Zea mays
  Clone ID: MRT4577_93557C.1
ttcttttttttttttttttttttttttttttttgggggttggggttttttttttttttttttttttaaaacgaacaaaacattcccaatttatttttggagggaataaccaaacaaaacctttggtggatgggcaaaaaagccacggggcctgtttttgcctgggcacccccacaaaaagccaggggggggcccccccccaaaccatgttttttggggttatggggacaaatttttaggccctattttttttcattttaggctctaaattcccaaaaccaaaaactaaaaatttatggtaatggggggcttttcccctttaaagacctaaaggaaataaacccgggcccggggggg

SEQ ID NO: 177597 - DNA, 259 bp, Zea mays
  Clone ID: MRT4577_93558C.1
tcgttcatttgtctcttgcgcctccattgcggcctctgtcccttgcacggtcaatcttacctccaaccatgggtaaagagaagtcccacataaacattgtggttattggccacgcagactttgaaggtgacctccacctaagacagcttatcgtacacgcattggcagcagttgtcaagcgtacgcacgagtggaaggagtacgactatggtacaatgaacatccaggtcatggagtacgcgtgggtgcacgacccgct

SEQ ID NO: 177598 - DNA, 200 bp, Zea mays
  Clone ID: MRT4577_93559C.1
ggggaatatgggataaatgatcccctcatacgggggaagaccccaaagcaacgggttggttttaggacaaataggaaattagcccgcccagacaatggggggggcacaaacaactgagggcccgtttggaaggccaaaacccggagggtcccaaacttgccccgaatgatcacccagtaccgggcgttccccccttaccc

SEQ ID NO: 177599 - DNA, 344 bp, Zea mays
  Clone ID: MRT4577_9355C.1
atatgaacgttggctgacagttttatcactgaagtgcatcaaatccacatgatttgtgagtacgaggatcaaacagggaccgtcgaactcattcacatatcaaattgccataaaaagtgtacacaatccccaagtagcagaaccatcgtcatcagcagccaaccaaagctgctttgcttcacttggggtcagtaaagaacttgttgatagctggcatgatctcgggggtcttgtcgtgcacaaagcttctgaggccatgcatggcgtaacgcctcccctcctcatggttctcaagcacgccggctgccctccctgccttgtttaccctgacttccgggttgccg

SEQ ID NO: 177600 - DNA, 188 bp, Zea mays
  unsure (1)..(188): unsure at all n locations
  Clone ID: MRT4577_93560C.1
cccagcacagatccggctctccgccgccgctatggccgctcgccgcctcctcctgctcctcgccgttgtagccgcgtccctcctggccgccgacgcgcggccgagccacggattacttgtcaccatcccgtccgatcccaaccccgaccccaggagaggcgacggggccgncaaccgccacctcagcg

SEQ ID NO: 177601 - DNA, 400 bp, Zea mays
  unsure (1)..(400): unsure at all n locations
  Clone ID: MRT4577_93561C.1
aaaaaaaaaaaaaaaaaaaaataaaaaaaaaaaaaaaaaaaaaaaaaaaaaaaaaaaaaaaaaaaaaaaatttgaaaatggggaagaaaccacccataaggggaaattttggggatttcaataaaattgggggccgattaaaaattgggggggggggggaaaaatttttttcttatcccgaggccgccttagaggggaatggtcgggggttttaaaaacatgggggtgggaaaaccctgtgtttaccggaggtaaatggctttgtaggagggggcgctttttgccggttgggggagtgnggaaaaggcccggcccgtggggccttcctncgggcgcggcgtttggtgggggggggaacgcccctttttgcggcgctttantgtggggggggggggtggtt

SEQ ID NO: 177602 - DNA, 533 bp, Zea mays
  Clone ID: MRT4577_93562C.1
aaaacaaaaaccaatcaagggaatcaaaaactaatctttcaacaattatttaagggtttttttgcaacttttatcatttaagaaaaaaacccaatggggattcaaaatactttatttatttaaaaagcagggtttttcccccctcccccaaaattggggggaataatgaaacaattaccaaggaaactgtttttggataaaaccccccaatccaaacaaggaatatccatgtttttttggcttggggtcccacggttacataaaaaaccggagggccatgcaatcccagtttcttttttttattttgccccggcagggtactggggaagcgctaatctcggtttttggtttttgggggacccgtccttgtaaaaaaggaacacaattcaccagtggggagctaacaccttattgccagggttgaacaaccaccgcttataaccggtgaggtttcaaaaagggagggtttcggcatgctgctgactaaaaaagcaggtttccaggggacccaacgcaaaaatgggtcttagggc

SEQ ID NO: 177603 - DNA, 130 bp, Zea mays
  Clone ID: MRT4577_93563C.1
tggaccggccatggccgcacctttttgcacgtttcgcgcctggcattactactgagtctatggatgatcacggttgtgctcatgcgtgtggaggtgccgatcccgtcgtcgttgaaaggcgaggtgctca

SEQ ID NO: 177604 - DNA, 299 bp, Zea mays
  Clone ID: MRT4577_93564C.1
ggttggaacatgacataattgctggaagatccattataaaaaaacactcggggattgcagggcccctaacatgttcttcgtgcacggacaccaagagaacattcactgcattatcatctggcttgctgctaggactgctcaatctgtgcgcccaagctaacacaggttgcatacacggcgtatacaccactcccgcatagccgtagcatccattcaaccactattggtctaacacgactcacgatcatgtgtacctacagagtgatcacaagctaccaacaacctgacacatttgctgt

SEQ ID NO: 177605 - DNA, 311 bp, Zea mays
  Clone ID: MRT4577_93565C.1
aagaggggtaaatgggcgctttggggaaaaaagggcaaagatgtgttctgtgtgaaaatttgatacccttacaaattcacacaaaatataagaccgaaaaataaaaagtaaaaaccggggggcccaaagagggagctaaatcacatttaatggggggggctcactgtgcccttttcagaggggaaaaccgtggggccaaatgtatttaaaaaaatggcacaacgcggggagaggggggtttggtatatggggctctttcgctttctctcttactgacactctgtgctctggcgttttggtgtggggagagg

SEQ ID NO: 177606 - DNA, 110 bp, Zea mays
  unsure (1)..(110): unsure at all n locations
  Clone ID: MRT4577_93566C.1
gtgtatagncagtgagcatgccgctacgtagctcggattcggtcagcttcactgcctaatctttgaacagggtggaagttcttttcttccctcaaaattttcatggacat

SEQ ID NO: 177607 - DNA, 368 bp, Zea mays
  Clone ID: MRT4577_93567C.1
attcgttcggattattttagtgtttgtgcgtatagaggatcgtttttcagatcattttgaagaaaaccaaaacttttttatgagggctttgttatgggacatgccacacatgatgatgtgcagagccttacgccttatcacatatatagatctagaggggtggttacacgagatttcccaaaattattgaatcaggcgggggggggaatggcacggagtaccccacagaggctggtgcgagaccttggcaactggtactggatcctggagaggccacccatggacggcattgtttcagccattataaaggccattgggggtaaaaccctgggatgccaacagatgttggtgctgttgcataaaaactg

SEQ ID NO: 177608 - DNA, 156 bp, Zea mays
  Clone ID: MRT4577_93568C.1
gggaaccaaacaagtggctgcccccaactgataatatatgaatttaggccctcgccaaccaaaattataggatagtctggggcggtacattgccagctttggagggcccttgatagaacaaaaaaagggggctgtttgaatctccatcggcaggac

SEQ ID NO: 177609 - DNA, 388 bp, Zea mays
  Clone ID: MRT4577_93569C.1
tcgaacgatatggactgatgcttctacaggttctcacctgatcctagacgaagccacgcatatctcctgtccttaataactcgttggacaaacgaatccttttgtgaacgccacttgaaaggagctatgacgggaaagttatggaggaatagagagagagtgccctgtgcctgcctttaacaatgctatacttgcagacaggaccctgggtatacatacccacgcattttactatataacgccgggctaggtgacgattgaactgacgcgctgataactcctgtaccatgttcatatgatgagacgacagatacaggcattccggatactcggcgaatgagattacgctcactcgtggacattccaccggactcgtggcatcccccat

SEQ ID NO: 177610 - DNA, 2666 bp, Zea mays
  Clone ID: MRT4577_9356C.1
cgaagtctgccccgctcttcggcctcgtcccttctctccaggtgagcgctggatgaacctctgctcggctttctgcgttgcgctaatcgattgctggatggtcgccagtctgatttgatgaaacagaagttggggaaattgaggatctccttagggccatggatgtagatgatgtgctcagtaacttgcgtgttgttggtgtgccaacaaagagtgcaatttacatatggggttataaccacagtggccagactgcccgaaagggcaaggaatgccacttgaggatccccaagagcctccctcccaaactattcaaattggggaatgggaagagcctcaggtggaccgatattgcatgtggccgtgagcataccgctgcagttgcttccgatggatcactgttcacctggggtgctaatgagtttggccagttgggagatgggacagaggacagcgcgaaagagcccaagaaggtcaagtcattggagactgagtttgtaaaatcagtatcctgtggcgcacattgtacagctgccgtcgctgagcctcgagaaaacgatggcacggtatcgaaaagcaggctttgggtttggggacaaaatcagggttcagattaccctcgtctattttggggagctttcacaccaaacacggtgattaagcaagtttcttgtggagctgttcatgtcatggctctatccgaggatggtctactgcaagcatggggctacaatgagtatggtcagcttggcagaggtcgcacttctcaaggacttcagggagctcgtgtgttaaatgcttatgcaaggttccttgatgacgcccccgagcaagtgaagattgttagagtgtcatgtggagagtaccatacagcagctatatctgaaaatggggaggtgtatacttggggactgggaagcatggggcagcttgggcattgctccctccaatctggagataatgagctgatccctaggcgagttgtggcccttgatggtatagtagttggggacgtttcttgtggaggtgtccactcttgtgctgtaactgaagggggagctctatatgcctggggcggaggacatgtgggtcagctgggagtcgggcctcagggtggcttcttctcttgctcccttaatggatccgacatgctgctccgaaacatcccagtcctggtgataccctcaggtgttcgtcttgctacctgtgggcactcccacacacttgtgtctatgaaagatggccgcatatatgggtggggctataatagttacggtcaagcgacgaacgagaaatctacttatgcttggtttccctctccggtcgattggtgtgttggtgaagtgagacgactcgccgctggaggtggccattctgctgttctgactgatgcatgttcgctgaaagagctgtgcgaattcaagctcgcagagaccgtgaacctttcaaatgctcagctaatagaagatgttgcatcgcggactggtgcggatgccttggcacgcttgtgcgagaaagtaagggagcatttggataaggaaggagaatgtgaattcctggaaaagcaagtggcagaagaggtcaacactataggcagttaggccactagcaaaacagttcaagcagtctgaggctgaagccagtctgggattaaacagggagtcatctacaattgatagcttgacctcccagtaaagttactgattcggacattaattgttgtggtgatcatggaaaatatgtgactcgtcaattgattctgattggtctgtagacctccattggtggtgagcctctcagctgcatcggggaggcgcagaggctctatatgtgtcatgatcttgttccgaactgtcaggttgctgtaatgtagccaaatggaaacctttgtatccctggaacttgaaaggcatgtacctggtatcagcggccaaccaaagctgctttgcttcacttggggtcagtaaagaacttgttgatagctggcatgatctcgggggtcttgtcgtgcacaaagcttctgaggccatgcatggcgtaacgcctcccctcctcatggttctcaagcacgccggctgccctccctgccttgtttaccctgtaaaaattccaagacgtttaggtgctgctcgtctcaaaaaaaaactgtatcgcaaacgtcgatggaatttgaaagcgctgctaacaaaaaaaaacaaaacagcaaatcacgagctttgttttggtttctgcactgtaacgcaaatggaaagaccagaagctgacatcggaggcaagctgtcccgtgtccaagcccaagctgtccttgagcatgaacgggacattagagcaccgtcgccgccgtctgtgtgggtaagtgtgcctccggagcgcgctcaacgacacgtttatctgtggcatccggttttttatttatcggccgaaattttcatcgattttaaattcagttcgtccaaacctacagttatgtatttagactacaaagaaaaggtccaaaacgctatcatctacttcttttatccattatctacaaataatctacattttttatgattgaattgaactttttttctctaaattttgtccgaaattttttgagaaaaacaaaaaaatcgagaaatccgagaaacatgttctcggtgaggtcagttttttttttttttttc

SEQ ID NO: 177611 - DNA, 456 bp, Zea mays
  Clone ID: MRT4577_93570C.1
atgaatgcgctctctcgcgaagggtgccggcactatgaggtcttcgaccaagctgatgaggatttcgagtgcgatatttacaaggttgaggaccctgtggtgaaggaatccgcgggagccctctacgaccggatgtggggcccccacggtcgggaggtggtcagggagcgggccgagacggcgaggggtcaggttcaagattttgggcctgcgcacgcaaccgctactgctaattttttggcggcttcgaccgtggatgatgggaataaatcggatgagtctgcatctaagttttctgattttagtgactctgggagctcggttgagtgcaccgaagagtcgtcggatgaggacttggattactttgcggccttagatgtggcagcggcggaggcttcgccgcatgctgcggatgctgaagttgtgcctggtccgagtgctgggcgtaggcggtga

SEQ ID NO: 177612 - DNA, 2082 bp, Zea mays
  Clone ID: MRT4577_93571C.1
atgccgacctcttcttcttctgctgccgctacgccgccggccgacgtgtcgtctgaggagacgctgagtactgtggcggtggaggagttgcgcgccggcgatacggtggatttcgatgtgtcgcggatgtcctcggtccacgtgcaagatatgcagcagcttgggtactttggcggcggagtcgctcgtgtcccggggacggaggagaagaggatgatcggaaatgaagttgcccagtttgggtcctgtacatttacgccgaagaccggcaagacctcgatggaggtagttgagttggttccttgcgcccgcaacaagtggggcaactggcatgagttttggttctacgtcgcggagagcacattcgaagaccatccggggctccccgtgtccgagatgtgctcgcattattactcagcatacccgccgtttgaagtggcggaggaggatgcggacgaaggggcccttcggtgcgccgccggcctgagcagcgggcacgatttggttgaggagtttgtggcgtacgagaatatcgctgctgttgtgtcggcagtgatggacaaggatcgtcagggagctgcgcagaagcgccaggcggtcgtcaggcttcatgaggccaggccgaagaggcaacggggggctgcgaaggctgctgcccccggcggaggccagccgccgctggcggcgaagtcggccgtccctgcatccagcagggcgccggaggctgcgaaggcggctgccgccggtggttccaagtctgtgaaggccgcccctacgtccagcagggtgccggaggctgcgaaggcggcccgagagttgctgccgccgggcaagcatgtcgccgacttcgccatcgacattagtgtggaagattatcttgttgggtcggacgaaggccaacttgttgttgttccgcctgccgtggcgaccgcggcggctgccgtggtgcccagggcgaagggcagtgctcttagtgccggtggcgagataccggcactcactgccgtcaaggacgaagcgggtgctgtgtcccgccggctgaaggagatgcaagaggcactaagtcaggcggctgacttcgcagaccgcgcggcgtcgggggccctgacggcagttgtgtctgccgaagtcgagagacttcggatgcaacatgccgatgccgtccgggaaaaatcgaccgccgatagtaagtgccgcaagctagcggataaggtggccgcactggagggtgagaaaactgacctccggcgccaactggcggaggaaaggaaggaggctaatgaggccctcgccaaggcgcaggctgcgcaggcggaggccaatttggcgcgggcggagggcagtcttgccaggcagcgcgccgagcagttggaggagcggctcagcgctctgcagagccgtgtggagagggccgaggcctcgacgcgctcggaggctgagcgaacacgcaaacagcttatgaattcataccatgagctgggcgcgcggaccgctgactttgaagtgccggaccgagagcccggacttcgctgccttgagtggatacaggaggagttgctggcgcttcccgccatcgtggaggggtttatgtcctatgcgtccctggtcacctgcgagggggcgatgaacgcgctctctcgcgaagggtgccggcactatgaggtcttcgaccaagctgatgaggatttcgagcgcgatatctacaaggttgaggaccccgtggtgaaagaatctgcgggagccctctacgactggatgtggggcccccacggtcgggaggtggtcagggagcgggccgagacggcgaggggtcaggcggcgcgtggcgagagggtggatgacttcggggctttgaacagcgcgctgcctgacctggagccgaacccgacggcggatgtgtccgaggccaccctggagccgcccccggaaaccgccgaaggcgttcctgatgcccccgcagccactgcagccggcggaggcccgtcgccaactgctgcgccgagggctgaggatcctgtgaaggtggcggtggagccgacaacggaggatcccgtgacggctgggtcttcgcaggtggcttag

SEQ ID NO: 177613 - DNA, 252 bp, Zea mays
  unsure (1)..(252): unsure at all n locations
  Clone ID: MRT4577_93572C.1
gctcttnatctnccacacccacgancagctcccctccacctactactaaaagccntaaccaacccacccaggggtgcgcagcgcagtgcatctatgatccaggtgtctgtccccgggccggtcggcgtcggttagttgctttagtgcacgtgcatgcatgagagactgtcttaggccgacgatgagccggcgccgatcgtataggttgcttttccttggaccatcgaatcgncggcgtaaggttgagctggt

SEQ ID NO: 177614 - DNA, 463 bp, Zea mays
  unsure (1)..(463): unsure at all n locations
  Clone ID: MRT4577_93573C.1
tatatatattttccatatttttttttttcccgaggtggtttttattaaattttgtgtggttaaaaccaccnngaacacccaaaaaaccccccccttttggccccctcttaaagaaaaccttataaaacacccgatacccaaatccaaaaaaatcccccacaaatgttttcaaaccgggtctcaaatacaccggaacaacataagggcaaacaaaacccttccaaaatttttctacaaggcccaaaaatgaaactttcaaacccttttggggggtgccctagggctccccccccccccacccaaattttggcaaccccggggccccttgtgctacggatcccctcaaaaaatttcggggaaaaccaaaaggttccccctcaaaaccaaccacctttttttccccgaaattggaacgttaccaaccactaaaaacccccccgggtggggtcaaccccccccttgg

SEQ ID NO: 177615 - DNA, 1188 bp, Zea mays
  Clone ID: MRT4577_93574C.1
atggacaaggatcgtcaggaggctacgcagaagcgacgggcggtcatcaagctgcccgaggctaggccaaaaagggcgtgggggactgcgaagtctgccgcccccggtggtagccagtcgacgctggcggcgaagtcggccgcccctgggtctagcaaggtgccgaaggccgcgaaggcagccggaaccggcggaaccaagtccgcctcagccggagccgcgaagacccgggaattgccttcgccggagaagcgcgttgctgacttcgccaccgatattagcgtggacgattacctcgttggatcgagcgaggggcaacttgttgttgttccgcctgcggtggcgcccgcggcggctgacttcgctgatcgcgtggcatcgggggccctgacggcagttgtgtctgccgaagtcgagagacttcgcgcgcagcatgctgacgccgtccgggaaaaatcggccgccgatagcaagtgccgcaagctggcggagaaggtggccgcgctggaggccgagaggactgacctccggcgccagctggcggaggagaggagggaggctaatcagaccctcgccaaggcgcagtctgcgcaggcggaggccaatttggcgcgggtggagggtagcctcgccagccagcacgccgaggaatgggaggggcggttcaacgctctgcaggcccgcatggagagggccgaggcttcgacacgctcggaagttgagcggacgcgcaaacagcttatggattcataccacgagctgggcgcgcggaccgctgacttcgaagtgcccaaccgagagttgggccttcactgcctcgagtggctgcaagaggagttgctggcgctccctaccattgtggagggttttatgtcttttgcctccctcgtcacctgcgaaggggcgatgaacgcgctgtcccgtgaagggtgccaccactatgaggtcttcgaccgagctgatgaagattttgagcgcgatatttacaaggtcgaggacccggtggtgaaggagtccgcgggggccctctttgaccggatgtggggccctcacagtcgggaggtggttagggagtggtccgaccgggcgaggagtcaggcggcgcgtgccgagaccatggaggacttcggagctttaaacagcgcgcggcccgaagccgagacgaacccggtggcggccgaggctgaa

SEQ ID NO: 177616 - DNA, 564 bp, Zea mays
  Clone ID: MRT4577_93575C.1
gggacctcgaggcggccgggaaaagatgaaaaaacgcttatgctcggggtcttctcaaacgccggggcaaactctcgcccgagcccgacagatcttctgttccccattccgcccaccgatcgaccttcacggcagtctcggtctcttccgaaggcgtcacgcgcgtatgtttgagaggagaggaggaagatgagggagtgctatctccgtgcacatcatcgcgtcagggcgtcatccaagcacgacaacgcgatgctgggaactttactgcctcgagcacgttatccagcctgataggccaagtgcctgtagataagaccgcgggacatcacgatgatgccttcagcaccttcttcagacatactggtgctggcaagcacgttccccgtgcaatcttctgtgatgtacaacccactgtgatcgatgacgtgcgcactggccacgaccgccagttcttccaccctgagcagctcatcactggcaaggaggatgccgctaacaatttcgccgcgtggcactacacaattgacagggagatatgtgatctgtgacttggacagtatc

SEQ ID NO: 177617 - DNA, 2103 bp, Zea mays
  Clone ID: MRT4577_93576C.1
atgccgacctcctcttcttccgctgccgctacgccgtcggccgacccctcgccgccggccgacgcctcgtctgaggagacgatgagtagtttgatgacggaggagttgcgcgccggtgattctgttgattttggcatgtcacggatgtcgtcggtccgcgtgcaagatatgcagcggttgggttacttcggcggcggagttgctcgtgtcccggggacggaggaagtccccgagccggagggcgagttggttgtgttcgaggcgttcttcgccgccggtctccgcctgcctgcgcaccgatttgttggcgaagtcctgcgcaggtttaacgttcagatacatcagctgacaccgaatgccgtggtggctctgtcgaagtatgtctgggtgacgacttcgtacggcggacagccatcggtcgaagtctttgtgaagtattattgtttgcactggcagaagaggatgattggagatgaagttgctcagtttgggtcctgcacgtttacgccgaagactggcaagaccacgatgcaggtagttgagttggttccttgcgcccgcaacaagtggggcaactggaatgagttttggttttacattgctgagggtaccgtcgaaaaccatgagggacttcctgtgtccgagatgtgttctcatttttactcagcgtacccgccctttgaagtggcggaggaggatgcagacgaaggggaccttcggtgcgccgccggcctgagcagtgggcgcgatttggttgaagagtttgtggcgtacgggcaaggcgccggaggctccaaatcggcgaaggctgtgccgccgcccagcagcgtggcggaggtcgcgaaggcggcccgagtgttgccgtcgtccggcaagcgcgtcgccgacttcgccaccgatattagtgtggacgactatcttggtgggtcagacgaaggccaacttgctatagttgcgcctgccgcggcgaccgtggctaccgcggcggctaccgtagtgccgaaggcgaagggcggggctcttagcgccggaggcgagatgtcggcactcgcggccgtcaaggatgaggcgggcgctgcgtcccgccggctgaaggaggtgacggaggcgctaagtcaggtggctgacttcgccaaccgcacagcgtcgggggccctcacggcagttgtgtctgccgaagtcgagagacttcggacacaacatgctgacgccgtccgtgaaaaatcggccgccgacagcaagtgccgcaagctagcggacaaggtggccgcactggagggagagaaggctgacctccggcgccaattggcgggggagaggagggagaccaacgaggccctcgtcaaggcgcaggctgcgcaggcggaggctaatctggcacgggcggagggcaatcttgccagggagcgcgccgagcagctgcaggagcggctcatcgccttggagagccgcgtggagagggccgaggccgcgacgcgcgcggaggctgagcggacgcgcaaacagcttatggattcgttccatgagctgggcgcgtggaccggtgacttcgaagtgccggagcgagagcccggacttcgctgcctggagtgggtgcaggaggagttgcaggcactccccactatcgtggaggggtttatgtcgtatgcctccctggtcacctgcgagggggcgatgaacgcgctctctcgcgaagggtgccggcactttgaggtcttcgaccaagctgacgaagactttgagcgagatatctacaaggttgaggaccccatagtgaaggagtccgccggagccatctacgaccggatgtggggtccacacggtcgcgaggtggttagggagcgggccgagacggcgagggctcagccggagccgaccccggcggaggccgtgtccggggccgccctggagccgcccccggagaccgcagaaggcgcaccggatacctccgcatccgccgcggccggtggagacctgcccccagagaccgccgaaggcacgcctgatgcccccgcagccgctgcaccgagtgctgaagatcctgcgacggtggcggcggaggcgacagcggaggcaacggcggaagctccgcaggtggcgtag

SEQ ID NO: 177618 - DNA, 1290 bp, Zea mays
  Clone ID: MRT4577_93577C.1
cattgggtacctcgaggccggccgggattccatcacagccaactaaagagaaggagagcgtgtgttcgtttcgaggacgcacacacagacgccatggaggtgacaccaaaccacaccctgaccgtgaccgggtgggcggccatgaacgagtccgccggcaaggtggagcccttcgtcttcaagagaagggagaacggcccggacgacgtgacgatcaaagtgcagtactgcggcatgtgccacacggacctgcacttcatcaacaacgactggggcatcaccacgtacccgctggtcccggggcacgagatcacgggcgtggtcaccaaggccgggcgcaacgtcacgggcttccgtgtcggcgaccgcgtcggcgtgggctgcatcgccgcctcctgcctggactgcgaccactgccgccgctccgaggagaactactgcgaccgtgtggcgctcacctacaacggcgtcttctgggacggcagcgtcacgtacggcggctactcgcgcgcgctggtggcggacaagcgcttcgtggtgcgcgtccccgacgcgctgccgctggacgccgccgcgccgctgctgtgcgcgggcatcacggtgtacagccccatgaagcaccacggcatgctggggcaccccggcgccagcctcggcgtcgtcgggctcggcggcctcggccacgtcgccgtcaagctcgccaaggcgttcggcctccgcgtcaccgtcgtcagcacgtcgccggccaaggaggccgaggccagggcccggctcggcgccgaccgcttcgtcgtcagcaccgacgacgcgcagatgcgggacgcggccaggtccctcgactacgtcatcgacaccgtctccgccaagcactcgctcggacccatcctggacctgctcaaggtcagcggcaagctcgtgctcgtcgccgcgccggaccagcccgtcgagctcccctccttcccgctcatctttgggaagaggaccgtcagcgggagcatgacgggagggatcagggagacgcaggagatgctcgacctctgcgcccgccacaacatcacctgcgacatcgagctcgtctccacggacgggatcaacgccgcgctcgcgcgcctcgcgcgcaacgacgtccgataccgcttcgtcatcgacatcgccggcgactccacctcaaaactatagttcattcaattcgttgcattaccattatgggcaccaaacctattatcatctatcaatatcgtcaccagtggcaggcatggcctctggttgcttgcattttgctctctatcc

SEQ ID NO: 177619 - DNA, 336 bp, Zea mays
  Clone ID: MRT4577_93578C.1
aaaaaaaaaaaaaaaaaaaaaaaaaaaaaaaaaaaaaaaaaaaaaaaaaaaaaaagaaaaggaaagaaaaacgaatttgaagtcacctagattccgtacacttgcatacgaggtcatggcttttgtgttgggaaacctgaacgcaattgaataggccgcttgtttacaacaaccggggtgtcaaaagttatactgtgcgcaatgcatgttccatggctgacatatggattcacaacgaagtcgcccataccaaagcgccctgagcccaatctccattgccttcattagctctgcccgcatggtgcatggcccatggccgattccggcgctttctgc

SEQ ID NO: 177620 - DNA, 472 bp, Zea mays
  Clone ID: MRT4577_93579C.1
agcagtggtaacaacgcagagtactttttttttttttttttttttttttttttttttgtacctgcctccttacccgctttccaaaaaccctatctgtcattgcattgccgtggtttcgcacctcctacgccaatacttgcttaaataaattctctagggaagtagggcttcaaggaagtagacaaccacttatcgttatcggggaggatggacggttgtcccttcttctcaatagaatccgatagacaagaatcgaaagcagctgatttattcctcaagtaagtcagttgatgattcaattccttcaaggcaagagtggggcatctagatcgattcgttttccggttgttataccgcgaatagaaagaattctgattatctgttgaggcaagctattcatcattaacaggaaagcccgcgtactctgcgttgttaccactgcttaagggcggaatccagcacactggcggcg

SEQ ID NO: 177621 - DNA, 372 bp, Zea mays
  Clone ID: MRT4577_9357C.1
ggagggcgagaagacccactaccgagtcgtgcggggggtcgggacgagaacgagacatcgaagcaccaagtctcagatccatcctgcccgcccggaccggcacggagacgggggggtcttgctggccgggtgacgcctccgctctcacctccgccaaggacatcgcatactgcacaggctgcgcgacggtgctgaggcatcttcgaatacggctccctcatctggaaccccggctacgaatacggaaacaaaatcctcagcttcatcatgggctacaagcgcacctttaatctcgcttgccttgaccatctaggcacaccgcagcgttcggctaggagctgaacggttgaaaccgtccacgaggtagatatg

SEQ ID NO: 177622 - DNA, 2838 bp, Zea mays
  Clone ID: MRT4577_93580C.1
atgtcgtcctcatcctcttctgctgtcgcgccggccgacgcgtcgtccgaggagacgctgagcaatgtggcggcggaggagttgcgcgtcggcgacacagtggagttcggcgtgtcgcggatgtcctcggtccaccagctgacaccaaatgccgtggtggccctgtcaaaatatgtctgggcaacgacttcgtacggcgggcagccatcggtcgaagtcttcgcgaagtattattgtctgcattggcagaaaaggatgatcggaaataagattgctcaatttggatcttgtacatttacgccgaagaccggcaagacttcgatggaagtcgttgagttggttccctgcgcccgcaataaatggggcaactggtgggagttttggttctacgttgccgagggcatagtcgaagaccatccggggctccccgtggccgagatgtgctcacattatactcagcgtacccgcagtttgaagtggcggaggaggatgcagacgaaggggccctgcgatcccgccgcattcgtgcgtgaggtggaggatggggcggtgtggattgttggtcgctatgtgccacagatggaggcccaacgtagttgggatatacgcggatccaacgatcgcttgaatagggtcttcgagttgaaccgtctgccgtatggcggttatcccgggcaagacgttgtcgaccgccgcgggaaaaaaccggcggcggagactgaagacgactccgcgccggcggccgccccatcctccaagaagaggaagctaggtactgtgaagggaggacttggggtctctgatagttttgctatggagttgatggggacatgcgcggcctccgggggaaggatgtcttcgcccgacctctgggagtcttcggcgcgaatgctgaaggttaccgggggttggtggcctaagaacgttcctatcccccacgtggccggcgaagacttttttacatctcgcatggttcgtgatatgagagtgtttccttatggacggaatattgctgctgttgtgtcgacagtgatggacaaggatcgtcaggaagctgcgcagaagcgtcgggcggtcatcaggctgcccgaggctaggctgaagagggcgcgggggactgcgaaggctgccgcccccggcggtagccagtcgacgctggcggcgaagtcggccgcccctgggtccagcaaggtgccggaggtcatgaaggcagcccgagccggcggaaccaagtctgcctcggccggagccgcgaaggcccgagaattgccttcgccggggaagcgcgttgccgacttcggcaccgatattagtgtggacgattatctcgttggatcgggcgaggggcaacttgttgttgttccgcctgcggtggcaaccacggtgtctgtcgcggtgcctggggcgaagggtagcgctctcagcgctggtggtgagattccggcgctcactgccgtcaaggacgaggcgggcgctgtgtcccgtcggctgaaggaggcgtcgcagtgtgctaagtcagttgtgtctgccgaagtcgagagacttcgggcgcagcatgctgacgtcgtccaggaaaagtcggtcgccgatagcaagtgccgcaagctggcggagaaggtggtcgcgctggagggcgagatgactgacctccggcgccagctggcggaggagaggagggaggctaatcaggccctcgccaaggcgcagtctgcgcaggcggaggccaatttggcgcgggtggagggtagcttcgccagccagcgcgccgaggaatgggaggagcggttcaacgttctgcaggcccgcatggagaaggttgaggcttctacgcgctcggaagttgagcggacgcgcaaacagcttatggactcataccgcgagctgggcgcgcggaccgctgacttcgaagtgcccgaccgagagtcgggccttcgctgcctcgagtggctgcaagaggagttgctggtgctcccgaccattgtggagggttttatgtcttttgcctccctcgtcacctgcgaaggggcgatgaacgcgctgtcccgcgaagggtgtagccactatgaggtcttcgaccgatctgatgaagattttgagcgcgagatttacaaggtcgaggaccctttggtgaaggagtccgcgggggccctctttgaccggatgtggggccctcacggtcgggaggtggttagggagcggtccgaccgggcgagggatcaggcggtgcgtgccgagaccgtggaggacttcggatctttgaacagcgcgcggcccgaagccgaggcgaacccggtggcgtccgaggctgaggtcgtcccggcgccgcccccggaagccggcgaaggctccctcgctgcccctgcggctactgcgtccggcgatggctcgtcgccaaccgctgtgccgaaggctgaggatcccccaaagacggcgacggagccggcagcggaggatcccacgacggctgggccttcgcagattttgggcctgagcacgcaaccgctactgctaattgtggcggcttcgaccgtggatgttgggaatgaatcggatgagtctgcttctaagttttctgattttggtgactctaggagtttggttgagtggacggaagagtcgtcggatgaggacttggattactttgcggccttggatgtggcagtggcggaggcttcaccgcgtgctgcggatgctgaagttgtgcctggtccgagtgttgggcgtaggcggcgaagggcggttgcgaagcgtagagtgagtgaggcggacgacggtcggcttcgtgtgggcagggctggcaagcaggattgttgtcctcgccggccgttgcgagtgtag

SEQ ID NO: 177623 - DNA, 1432 bp, Zea mays
  Clone ID: MRT4577_93581C.1
ccggccgcgtgggcggaagtgtgggcaactaaagagaaggagagcgtgtgttcgtttcgaggacgcacacacagacgccatggaggtgacaccaaaccacaccctgaccgtgaccgggtgggcggccatgaacgagtccgccggcaaggtggagcccttcgtcttcaagagaaggtacggttagggtacaaaccaaaggcggcgtccattcgcttccagtactgatctgctggcctgttgggcatcatatcatgcagggagaacggccctgacgacgtgacgatcaaggtgcagtactgcggcatgtgccacacggacctgcacttcatcaacaacgactggggcatcaccacgtacccgctggtcccggggcacgagatcacgggcgtggtcaccaaggccgggcgcaacgtcacgggcttccgcgtcggcgaccgcgtcggcgtgggctgcatcgccgcctcctgcctggactgcgaccactgccgccgctccgaggagaactactgcgaccgtgtggcgctcacctacaacggcgtcttctgggacggcagcgtcacgtacggcggctactcgcgcgcgctggtggcggacaagcgcttcgtggtgcgcgtccccgacgcgctgccgctggacgccgccgcgccgctgctgtgcgcgggcgtcacggtgtacagccccatgaagcaccacggcatgctggggcaccccggcgccagcctcggcgtcgtcgggctcggcggcctcggccacgtcgccgtcaagctcgccaaggcgttcggtctccgcgtcaccgtcgtcagcacgtcgccggccaaggaggccgaggccagggcccggctcggcgccgaccgcttcgtcgtcagcaccgacgacgcgcagatgcgggacgcggccaggtccctcgactacgtcatcgacaccgtctccgccaagcactcgctcggacccatcctggacctgctcaaggtcagcggcaagctcgtgctcgtcgccgcgccggaccagcccgtcgagctcccctccttcccgctcatctttgggaagaggaccgtcagcgggagcatgacgggagggatcagggagacgcaggagatgctcgacctctgcgcccgccacaacatcacctgcgacatcgagctcgtctccacggacgggatcaacgccgcgctcgcgcgcctcgcacgcaacgacgtccgataccgcttcgtcatcgacatcgccggcgactccacctcaaaactatagttcattcaattcgttgcattattatcatctatcaatatcgtcaccagtggcaggcatggcctctggttgcttgcattttgctctctatccatatcaagtgtgtgtcagcatgggccagcgtgcatattgcgccattgcttgcagcaaataaacattcatatatacacatctgctcgatattttc

SEQ ID NO: 177624 - DNA, 2442 bp, Zea mays
  Clone ID: MRT4577_93582C.1
atgccgtcctcttcctcttctgctgccgctacgccgccggccgacgcgtcgtctgaggagacactgagccatgtggtggcggaggagttgagcgccggcgacacagtggagttcggggtgtcgcggatgttctcgaagaggatgatcggaaataagattgctcaatttgggtcctgtacatttacgccgaagaccggcaagacttcgatggaagtcgttgagttggttccttgcgcccgcaataaatggggcaattggtgggagttttggttctatgttgccgagggcacagtcgaagaccatccggggctccccgtggccgagatgtgctcgcattattactcagcgtacccgcagtttgaagtggcagaggaggatgcagacgaaggggccctgcggtgcgcggccggcataagtagcggacgcgatttggtagaggagtttgtcgcgtatggggtgtggcccttggcgcgtggctgggcgttgggcgaagtatgccctcgccagatgccctcccgtggcgggatgcaggtgcggagtcccgccttcgcattggatttgcatggccgcgatcccgccgcattcgtgcgtgaggtggaggatggggcgatgcggattgttggtcgctatgtgccaaggacggaggcccagcgtagttgggatatacgcggatccaacgatcgcttgaatagggtcttcgagttgaatcgtctgccgtatggcggttatcccgggcaagacgttgctgaccgccgcgggaaaaaaccggtggcggagactgaagacgactccgcgccggcggccgccccatcctccaagaaaaggaagctaggtactgcgaagggaggacttggggtctccgatagtttcgctatggagttaatggggacatgcgcggcccccgggggaaggatgtcttcgcccgagctccgggagtcttcggcgcggatgctgaaggttaccgggggttggtggcctaagaacgttcctatcccccgtgcggtcggcgaagacttttttacatctcgcatggttcgtgatatgaaggtgtttccttatggacggaataatgctgctgttgtgtcggcagtgatggacaaggatcgctgcccgaggataggccgaagagggcgcgagggactgcgaagtctgccacccccggcagtagccaaccgacgctggcggcgaattcgtccgcccctgggtccagcaaggtgccggaggtcgcgagggcggctggagcccggaaccaagtccgcctcggccgcagccgcgaagacccgagaattgccctcgccgggcaagcgcgttgccgacttcggcaccgatattagcgtggacgattacctcgttggatcgggtgaggggcaacttgttgttgttccgcctgcggtggtgaccacggtgcctgccgctgtgcctggggcgaagggtagcgctctcagcgctggtggtgagattccggcgctcactgccatgaaggacgaggcgggcactgtgtcccgccggctgaaggaggcgtcgcagcggctaagtcaggcggctgacttcgctgaccgcgtggcgtcgggggcccttacggctgtggtgtctgccgaagtcgagaggcttcgggcgcagcatgttgacgccgtacgggaaaagtcggccgccgatagcaagtgccgcaaactggcggagaaggtgggcacgctggagggcgagaggactgaactccggcgccagctggcggaggagaggagggaggcgaatcaggccctcgccaaggcgcagtctgcgcaggcggaggccatgaacgcgctgtcccgcggagggtgccgccactatgaggtcttcgaccgatctgatgaagattttgagcgcgagatctacaaggtcaaggacccggtggtgaaggagtccacgggggccctctttgaccggatgtggggccctcacggtcgggaggtggttagggagcggtccgactgggcgaggggccaggcggcgcgtgccgagaccgtggaggacttcggctctttgaacagcgcgcggcctgaagttgagacgaacccggtggcggccgaggctgaggtcgtcccggcgccgcccccggaaaccggcgaaggctccctcgctgcctctgcggctactgcgtccggcggtggctcgtcgccaactgctgtgccgagggctgaggatcccccgaagacgacgacggagccggcggcggaggatcccacggcggctgggccttcgcaggttcaagattttgggcctgcgcacgcaaccgctactgctaattttgtggcggcttcgaccgtggatgctgggaatgaattggatgagtctgcttctaagttttctgattttggtgactctgggagttcggttgagtggatggaagagtcgttggatgaggacttggattattttgcggccttggatgtggctgcggcgtag

SEQ ID NO: 177625 - DNA, 370 bp, Zea mays
  Clone ID: MRT4577_93583C.1
caaagatccattgaccagttctttgtttgaaaatggccactcgtgcacatggctgcttgggcacaaacttatcaccataacaaccagtgcttgtaaaaacaaggctggggaaagggatctatttggaaaaaggtgttaaccgttacaacccttcaatggtttttttaaaaaccaccgttgagaacaaggtttttagggttcaatggatggaaccaccaaccgaaattcctgaaccaatttccaagacaaatttaattcctaaaatttcctaattacctaacattgctaactttaacactcctacaaattcaaactcgtttgtgaacaattccaataatgcattgaattcctgtcgacgacgacatcagtc

SEQ ID NO: 177626 - DNA, 322 bp, Zea mays
  unsure (1)..(322): unsure at all n locations
  Clone ID: MRT4577_93584C.1
cttgcttgaagggaatagagggttcttttacccttggcgcgaaaattcccttttttgtggaattatccgngtcttagaagacatgatcacttggtagttattcatctctggttatatctattgcgaaaactatgacacttttgtcacgctgatggtgaggttgaaggcatccccccggaccagcaagcggctcatctttgctggagacagatgaactgccatgcacggaaactgcccatacacatatcaattagtgcccaaccagacacgctatcgaatattgcaggctgggcatcttttatgagtgacaacctgcacttga

SEQ ID NO: 177627 - DNA, 2922 bp, Zea mays
  Clone ID: MRT4577_93585C.1
atgtcgtcctcttcttcttctgctgccgctacgccgccggccgacgcgtcgtctgaggagacgctgtgcaatgtggcggcggaggagttgcgcgccggcgacacggtggatttcgacgcaccgcggatgtcctcggttcgtgtgcaagacatgcagcagcttggttattttggcggcggagtggcacgtgtcccggggtcggaggaggtccccgagccagaaggcgagttggttgtcttcgaggcgttcttcgccgttggtcttcgtctgcccgcgcatcgattcgtgggagaagtcctgcgcagattcaacgtccaggtccaccagctgacgccgaatgccgtggtggccctgtcaaaatatgtctgggcaacgacttcgtacggcgggcagccatcggtcgaagtcttcgcgaagtattattgtctgcattggcagaaaaggatgatcggaaataagattgctcaatttgggtcctgtacatttacgccgaagaccggcaagacttcgatggaagttgttgagttggttccttgcgcccgcaataaatggggcaactggtgggagttttggttctacgttgccgagggcacagtcgaagaccatccggggctccccgtggctgagatgtgctcgcattattactcagcatacccgcagtttgaagtggcggaggaggatgcagacgaaggggccctgcggtgcgcggccggtctgagtagcgggcacgatctggttgaggagtttgtcgcgtatggggtgtggcccatggcgcgtggctgggcgctgggcgaagtatgccctcgccagatgccttcccgtggtgggatgctggtgcgaagtcccgccttcgcactggatttgcatagccgcgatcccgccgcattcgtgcgtgaggcggaggatggggcggtgcggattgttggtcggtacgtgccaaagacggagggccagcgtagttgggatatacgcgagtccaacgatcgcttgaacagggtcttcgagttgaaccgtctgccgtatggcggttatcccgggcaagacgatgtcgaccgtcgcgggaagaaaccagcggcagagactggagacgaccccgcgccggcggccgccccatcctctaagaacaggaagctaggtactgctacgggaggactgggggtctccgatagttttgctatggagttgatggggacatgcgcggcccccgggggaaggatgtcttcgcccaagctctgggagtctttggcgcggatgctgaaggttaccgggggttggtggcctaagaacgttcctatcccccgcgcggccggcgaagacttttttacatctcgcatggttcgtgacttgagagtgtttccttatgtacggaatattgctgctgttgtgtcggcagtgatggataaggatcgtcaggaagctgcgcaaaagcgtcgggcggtcatcaggctgcccgaggctaggccgaagagggcgcgggggaccgcgaaggctgccgcccccggcggtagccagccgacgctggcggcaaagtcggccggccctgggtccagcaaggtgccggatgtcgtgaaggcagtcggcgccggcggagccaagtctacctcggccggagccgcgaaggcccgagaattgcctccaccgggaaagcgcattgccgatttcggcactgatattagtgtggatgattatctcactggatcgggcgaggggcaacttgttgttccgcctgcggtggcgacaacggtgtctgccacagtgcctggggcgaagggtggcgctcacagcgctggcggtgagatttcggcgctcgctgccgtcaaggacgaggcgggcgctgtgtcccgccggctgaaggaggcgtcgcagcggctaagtcagcatgctgaggccgtccgggaaaagtcggccgccgatagcaagtgccgcaaactggcggagaaggtggccgcgctggagggcgagaggactgagctccggcgccagctggcggaggagaggagggaagctaatcaggccctcgccaaggcgcagtctgcgcaggcagaggccaatgtggcgcgggtggagggtggcctcgccaggcaacgcgccgaggaatgggaggagcggttcaacgctcaacaggcccgcatggagagggccgaggcttctacgcgctcggaagttgagcggacgcgcaagcagcttatggactcataccacgagctgggcgcgcggaccgctgacttcgaagtgcctggccgagagtcaggccttcgttgcctcgagtggctgcaagaggagttgttggtgctcccgaccattgtggagggatttatgtcctatgcctccctggtcacctgcgaaggggcgatgaacgcgctgtcccgcgaagggtgccgtcactatgaggtcttcgaccgatctgatgaggatttcgagcgcgagatttacaaggttgaggaccctgtggtgaaggaatccgtgggagccctctttgaccggatgtggggcccccacggtcgggaggtggtcagggagcggtccgacacggcgaggggtcaggcggcgcatgacgagaaagtggaggactttggggctttgaacagcgcacggcctgaggcggagtcgaacccggtggcggctgggcccgaggttcaagattttgggcctgcgcacgcaaccgctactgctaattttttggcggcttggaccgtggatgctgggaatgaatcggatgagtctgcgtctaagttttctgattttggtgactctgggagttcggttgagtggacggaagagtcgtcggatgaggacttggattatttgcgaccttggatgtggcagcggcggaggcttcgccgcgtgctgcggatgctgaagttgtgcctggtccaagtgctgggcgtaggcggcgaaggacggttgcgaagcgtagagtga

SEQ ID NO: 177628 - DNA, 2376 bp, Zea mays
  Clone ID: MRT4577_93586C.1
atgtgctcgcattattactcagcataccagcagtttgaagtggcggaggaggatgcagacgaaggggcgctgcggtgcgcggccggcctgagtagcgggcgcgatttggttgaggagtttgtggcgtatggggtgtggcctttggcgcatggctgggcgctgggcgaagtatgccctcgccagatgccttcccgtggtgggatgctggtgcgaagtcccgccttcgcactggatctgcatagccgcgatcctgccgcatttatgcgtgaggcggaggatgaggcggtgcggattgttggccggtacgtgtcgaagacggagggccagcgtagctgggatatacgcgggtccaacgaccgcttgaatagggtcttcgagttgaactgtctgccgtatggcggttatcctgggcaagacgatgtggatcgtcgcgggatgaagccggcggcagagactagagacgaccccacgccggcggccgccccatcctctaagaagaggaagctaggtactgctactggaggactgggggtttccgatggttttgctagggaactgatgaggacatgcgcggcccccgggggaaggatgtcttcgcccgagctctgggagtcttcggcgcggatgctgaaggttaccgggggttggtggcctaagaatgttcctatcccccacgcggccggcgaagacttttttacatctcgcatggttcgtgactggagagtgtttccttatggacggaatattgctgctgttgtgtcggcagtgatggacaaggatcgtcaaggagctgcacagaagcgccaggcggtcgtcaggctgcctgaggctaggccgaagaggtcgcgggggacttcgaaggctgctgcccccggtggcagccagccgacgctggcggcgaagtctgccgcccctgggtccagtagggtgccggaggctgtgaaggcagccagcgccggcggaaccaagcctgccccggccggggctgtgaaggcccgagaattgcctccgccgggcaagcacgttgccgccttcgccaccgaaattagcgtggatgattatctcgttgggtcgggcaaagggcaacttgttgttgttccgcctgtagtggcgaccgcggcggctgccgtggtgcctggggcgaggggtagcgctctcaacaccggtggtgagattccggcgctcactgccgtcaaggacgaggcgggcgctgtgtcccgccggctgaaggaggcattgagtcagggcgagaggactgacctccggcgccaactggcggaggagagaagggaggctaatgaggccttcgccaaggcgcagtctgcgcaggcggaggccaatttggcgcgggtggagggtagccttgccagacagcgcgccgaggaatgggaggagcggttcaacgctctgcagacccgtgtggagagggccgaggcttcgacgcgctcggaggctgagcggacgcgcaaacagcttatggactcgtaccacgagctgggcacgcggaccgctgacttcgaagtgccagaccaagagcccggacttcgttgcctcgagtggctacaggaggagttgctggcgctccctgccattgtggaggggtttatgtcctatgcctccttggtcacctgcaaaggggcgatgaacgcgctgtcccgcgaagggtgccggcactatgaggtcttcgaccaatctgatgaggatttcgagcgcgagatttacaaggttgaggaccctgtggtgaaggaatccgcgggagccctcttcgatcggatgtggggtccccacggtcgggaggtggtcagggagcggtccgacacggcgaggggtcaggcggcgcgaaacgagaaagtggaggacttcggggctttgaacagcgtgcagcctgattcggagtcgaacccggcggcggctgtgtcggaggtcgccccggcgccgcccccagaaactgtcgaaggcgcccctgatgctcccgcagccactgcggccggcggtggctcgtcgccaactgctgcgccgagggctgaggatcctgtgaagatggcggcggagccggcagcggaggatcccgcgacggctgggtcttcgcaggttcaagattttgggcctgcgcatgcaactgctactgctaattttttggcggcttcgaccgtggatgatgggaatgaatcggatgaatctgcgtctaagttttctgattttggtgactctgggagttcggttgagtggactgaagagtcgtcggatgaggacttggattactttgcggccttggatgtggcagcggcggagtcttcgccgcgtgctgtggatgctgaagttgtgcctagtccaagtgcggggcgtaggcggcgaagggcggttgcgaagcgtaga

SEQ ID NO: 177629 - DNA, 2079 bp, Zea mays
  Clone ID: MRT4577_93587C.1
atgtcggtagtcgagttagttccttgcgcccgcaacaagtggggcaattggaatgagttctggttttatgtcgcggagggtaccgttgaagaccatgaggggctccccgtgtccgagatgtgctcgcatttttactcagcgtacccgccctttgaggtggcggaggaggatgcggacgaaggggcccttcggtgcgccgccggcctgagcagtgggcgtgatttggttgaagaatttgtggcgtacggggtatggcctttggcgcatggttgggtgttgggtgaagtgtgccctcgccagatgccttcccatggtgggaagctggtgcgaagtcccgccttcgtgctggatctgcaaggccgcgatccggccgcctttgtgcgtgaggtggaggatggggcggtgcagatcgttggtcgagaattgatgaggacatgcgcggccccggggggaaggatgtcttcgcccgagctccgggagtcttcggcgcggatgctaagggttaccgaggtgatggacaaggatcaccagggagccgcacagaagcgccaggcggttgtcaggcttcaagaagtcaggccgaagaggcagcgaggggctgcgaaggatgctgcccccggcagaggcaagccgccgctggcggcaaagtcggccgtccctgcgtctagcaaggcgccggaggctgcggctggcaccggtggctccaagactgcgaagactgtgccggcgcccagcagggtgccggaggtcgcgaaggcggcccgagggttgccgtcgtcgggcaagcacgtcgccgacttcaccaccgatattagtgtggacgactatctgggtgggtcggacgaaggccaacttgttgttgttgcgcccgccgcggcgaccacggcggctgccgtggtgccaaaggcgaagggcggcgctcttagtgccggaggcgagatgctggcactcgctgccgtcagggacgaggcgggcgctatgttccgccggttgaaggaggtgaaggaggtactaagtcaggcggctgccttcgcagaccgcgcggcgtcgggggcgctcacggcagttgtgtctgccgaagtcgagaggcttcggacgcaacatgctgacgccgtgcgggaaaaatcggccgccgacagtaagtgccgcaagctggcggacaaggtggccgcactggagggggagaagactgacctccggcgccaactggcgggggagaggagggagaccgctgaagtcgaagtgccggaccgagagcccggacttcgctgcctggagtgggtacaggaggagttgcaggcactccccactatcgtggaggggtttatgtcttacgcttccctggttacctgcgagggggcgatgaacgcgctctctcgcgaagggtgccggcactatgaggtcttcgaccaggctgatgaagatttcgagcgagatatctacaaggttgaggaccctatagtgaaggaatccgccggagccatctacgaccggatgtggggtccgcacggtcgagaggtggtcagggagcgggccgagacggcgagggctcaggcggcgcgcgacgagagggtggatgatttcggggcgttgaacagcgcgctgcctgacccggagtcgaacctggcggaggccgtgcccgagtccgccctggagccgccaccggaaactgccgaaagcgctcctgacgtccttgcatccgctgcggccggcggaggcccgcccccagagacagccgaaggcgctcctgatgctcccgcagccgctgcgccgagggctgagggtcctgcgacggttcaagaatttgggcctgcgcacgcaaccgccactactaactttttggcggcttcgaccgtggatgatggtaataaatttgatgggtctgcatctgagtttcttgatttcactgactctgggagctcggttgagtggactgaggagtcgtcggaggaggacttggactactttgcggccttggatgtggcagcggcggaggcttcaccgcacgctgcggacacaaaagatgtgcctggtccgagtaccgggcgccggcggcgaagggcggttgcgaagcgtaga

SEQ ID NO: 177630 - DNA, 121 bp, Zea mays
  Clone ID: MRT4577_93588C.1
aaaacccataagccaacccatgggagtcagagctcttagagaatttggagttgccaacaaaacatgcttaaagaaacacgactctgaataggatgccagattcaactttggtgagagcacc

SEQ ID NO: 177631 - DNA, 1685 bp, Zea mays
  Clone ID: MRT4577_93589C.1
cattgggtacctcgaggccggccgggagccttcacttgccagttcccactcctaactctctcttcgtctactcttcttcccacccccagcgttcgcttccatccaagctcatatcatcactaggccacgcgccccaatactcagaactagtcttgagtaaagcatggcgtcgtcttctccgtcctgccgtggcagcggcggcaagtcggacgtggaccggatcaagggcccctggagccccgaggaggacgaggccctgcagcgcctggtggcccgccacggcgcccgcaactggtccctcatcagccggtccatcccgggccgctccggcaagtcgtgccgcctccggtggtgcaaccagctgtcgccgcaggtggagcaccggcccttcacggccgaggaggacgacaccatcctccgcgcgcacgccaggttcggcaacaagtgggccaccatcgcgcgcctcctctccggccgcaccgacaacgccatcaagaaccactggaactccacgctgaagcgcaagtactacgccgccagcgacgctgttgttgctgacgctgacgacgagcgcccgctgaagcgcacaagcagcgatggccacccggggctctgcttcagccccggaagcccatccgggtccgacctcagcgactctagcaaccacagccttccctccgtcatgccgtcagccgcttctgctgccgccgtcacctcccaccagcagcagcagcacgtgtaccgccccgtgccgcgcgcgggcggcgtggtcatgctaccggtggcgcctcttgtgccgccgccgccacagcctccggcgacctccttatcactgtccctctccctgcccgggctggacggccagaagcccgaaccatccccagcggttctgacgccggcaccggcaccgcctcaacctcctctgcagatacagcagcagcagcctgctccacctcagatgccgccaccacaagcccaaccgagcttgccgttccagctgcaggcggctgcgacgaacctcacgtcgcagcagccggcagcagcgccgttcagctcggagttcctgttgttgatgcaggagatgatccggatcgaggtacggaactacatgtccgggtcggggctcgatccgcgcaccgacggcgccgccgtgcacgccgtgagcaagcgcatgatgggtatggccaagatcgagtagtttcagcgggcatgcacacagcggcagcagcaggagtggaagatacaaaagaaaacgaagcgccgatcgatccgcggcggccagcgcgtgtatgaagtagtaatgaaccagcaagaacggcgtggccttgaaacatacggaggccgtgtggtgcggcaagtgaacagctccatcattcggctttttagctcatgacaatatcataccctttgttaatctagccgtttctctatcttttattcttcttcttccccctttttttttttttgaatttttgggtctccaagcaagcagagacgaagacgaagagaactttgtctgttgtctgcctgcctgcccctttggaggtaagatgctacctgaataaactgcagagcaaaggatccttctttcattgatgctggtggtaaccagtaatcaaaaaaaaaaaaaaaaaaaaaaaaaaaaaaaaaaaaaaaaaaaaaaactcgaggagggggcccggtac

SEQ ID NO: 177632 - DNA, 637 bp, Zea mays
  Clone ID: MRT4577_9358C.1
attcggcaccagggaacagggagtggtaaacatactcagttaaacaagaacatctcaagatgttttgtgttttagaacagacaagtacctcttgacaatttcatcagaacagagatgactacctcttgacaatcaagaataagtatcaagtgatgacagacttgtaggataagcattacaacacacaacaaggcgttcctattttcagacagccaagaacagagatgaccacctcacgataatcaggagtttagtattaggtgatgataccaacttgtagagtaagcatgtatccattatatgttaaaactacaagctgcagccccaattcttcaaaattggagaacagctgctctttctatgaactaaagattgttacttggaagatgaattgaaaactacacaaacctctactttttcttggagtcatatataatttgtggccagaccatgcaaaaaatccacttcaagagcaaaagcaaagacaaaaagaatagcgctatttattctgctagatcttatgttcaatacagatcaatcttatatttaaaaattgaggtagtttcagagttaaggcagtaaaggtaccttcgggtcttgcaccacaagaagagctgccctgtcacaagtcagctct

SEQ ID NO: 177633 - DNA, 325 bp, Zea mays
  Clone ID: MRT4577_93590C.1
agcagtggtaacaacgcagagtacttttttttttttttttttttttttttttttgggggtttatctcttctttcattcagctcacatacaaacttagatatttttatattaaaaatagttgcgtatgagaaaccaaaaggcgggaatgacttggcggggagaaatactgaccacttagaattggctactcctatcacaagccacatgagtctgtgcctaattaaacgccattgctcctaatccccttgcttaaagtaagacaacgcaatccttcctcaccctcctctctctctctccccgcgtactctgcgttgttaccactgct

SEQ ID NO: 177634 - DNA, 523 bp, Zea mays
  Clone ID: MRT4577_93591C.1
aaaaaaaaaaaaaacaaaaaaaaaaaaaaaaaaaaaaaaaaaaaaaaaaaaaaaaaaaaaaaaaaaaaaaaaaaaaaaaaaaaaaaaaaaaaaacccccccccctggggcgtagccctaccatttagttaatggcctccagttgggagacctcccccccttgaaggggttgtccgttgcctttgttttcttggcgctggttggaagccccccctccattacaggggggggttggggttgccaaaccccacggtttattttcccgcctccgttttttttgccgcttcggttttttttgccgccgaacaagaacccgaacccttggaattcccccattcaccccccgaagttaaccccggcccaccagtccgaaccctggggggtgggaagcgtgggaaccccgtccctgggccagggccccggttccctgaggccccatggcagccgggggggaaccccctccggctcgccaaagggccggggcctgcaccgccggggcgccccccggaacaggcggggggccc

SEQ ID NO: 177635 - DNA, 456 bp, Zea mays
  Clone ID: MRT4577_93592C.1
tttttttttttttttttttttttttttttttttttttttttttttttggttttgaaccctgctggatttggttttttcactttggtggggtttttggattacaatttttgggggaagctcaaacttccccgggtaaagtaaaatgtaaaaaaaaaaaccttaaaaaatgggaaaacttttttaagggtccaagggccttggggactggtgcaatttttttgtttgaaccttaaatgttttgagctgcacaatgctgcagggggtgaacaaattgggaaagcctttttttggggggggggacggaaaaaaccaaaaaatttgcccaggttgatttgtccctcccgttcaagaaatgttgtcaaggacaggattcccggccccaaaaggtttgatttgtgacaaccccccaccgcctaagagctgctttgggagctcgtcgtacgtgtttgcctgtat

SEQ ID NO: 177636 - DNA, 273 bp, Zea mays
  unsure (1)..(273): unsure at all n locations
  Clone ID: MRT4577_93593C.1
ctggggcgcgctagggggattttttcgcgggagccgcccagaccccaagcgngacgaggacaaaagcgaccgaaacggaactagggaaacaggacccaggaaccaattacactatgccaggcagctgtgtacaccacaaactcccatgcctcttgttcgagatgccgtgcaaggctgaatcaaaaagaataaacaggctggaaatatatgatggactcgagcctctccctaccttgggtatcaacctcagggtgtgcactatattatggagca

SEQ ID NO: 177637 - DNA, 364 bp, Zea mays
  Clone ID: MRT4577_93594C.1
ctcacgcgtccggagttttgtaccacactagattaatggtctaggggcgctcatacgcaggacacttgccttatcttttaacagatgtgccgacacagccagacttggcacctgacaatgtctagcgcccggatcgggacaatgaggctggaccgttcaacgaaaatgagggtcgttacgacgcatcgagcgctgtctatactagcattgtcggcaggcgtcgcgacactggagtgacggtcggcatctgccactaagatgactatgttgacgatgaagctaaatccagactaggtatactgacactgaggtacccaattgagcactgaattcgtcaagaactgggatgacattgagaatatct

SEQ ID NO: 177638 - DNA, 150 bp, Zea mays
  Clone ID: MRT4577_93595C.1
gagccatcagggggggagggatatctggggaaatatatccaaataaacatgtgaatttacatcttggattacatgaatttaatgacagggataaataatatgattaaaacatatcgaactactcaaagcacgctttataattaaaacaat

SEQ ID NO: 177639 - DNA, 536 bp, Zea mays
  Clone ID: MRT4577_93596C.1
tcgagcggccgcccgggcaggtgctttttttttttttcttttttcttttctttcttttttttttttttttttttttttcttttttttttctttggcgaccaagattgtttccccccttctgctgcaaagctctttttacatcaccctggtaacaccaatattacatcctgaatgtggcacaagtcacctatttatttccgtgttggccccataccttacccaaaaaactttattatgtgagtgacaaccccaaatcttcctcaaaagagggctccaccaatcattcgttgctggcacaaggcttcatggttcttcaaagcaagtcggacaccgggcaccatcttgtggtgcattgcaaaagggctgccggtatagcccaacactgtttgtaaaaaggcactacctgttgttgtgccaaaaaggaagcacaacttgctgcagctagctcgctaaatggcagtagtttttgctgctgcaaataaccaccggggttcatggcggccaattggttaaacggaaaaaactgttgatgctga

SEQ ID NO: 177640 - DNA, 576 bp, Zea mays
  Clone ID: MRT4577_93597C.1
ccggccgggataggcctgcctccttcccccggcacgggaagccaagtcccacttgcgcggcggctttctcctctcccccacaagggccgagacatgccaactctccctccgcggcgccgaccccccgtttcctctcctgctctcctcctgacgaacacagccggaaacgtccactagaacaatgcttgacgataggtgacagatgtgaaagtccttccggttgaacgcaaaattgcagataagctgcaacatacaggacgttaacagatgatactagttcgaagtatgatacaatgtctggacagtcggaatagttgcacttcttgccatattgctctctgacgcaatatgatttagcaacatcttggcattgcgctctctatgacaatctggcggccacatagcctaacagtatctcatgtaccttatcctaacaatggccctcgtattcttcctgcggtatgatagttcctccatgatgtccaatgccagagactgctgggcgaactacacgaaattcttgacgggcgcatccatagtacggagcatcgacattccgtcgatcctgaagcatgc

SEQ ID NO: 177641 - DNA, 984 bp, Zea mays
  Clone ID: MRT4577_93598C.1
cctcgaggccggcctggagcccatttgtccgtctctccttcgcaagatacgaatagagacacacgcaccactcgaaccagaaccaccaggctgctggtgctggaagggggcgcggcagctgggcagctggcaacggacatggcggcggccggcggcgagaccatgatgacgagggagcagctgctccacctcttctcccgcttctccttcgtcacctccctccccgaggtcaagcagcggattgccgacgccgtcagggacaagcaggaggctgtggccgtgaccactgaaatacaagaggagattcttcgcgagatgggagtagatccaagttttggtattggttgcctaggaaaggtgaatgttgtttacaaaaatgacaaggacttgatgattaaattctatcaatttgttgccaaagaagaaatggctattgatgaagctgagcttgaacccagagaattggctgaaaaactacatgctcaacaaataatgcaagaaaagcaactgaacatgctagttgaaatgaggaaatatagccgagagagccaatctgtcatacttgggactttgcacaaagaattggaagaagctaattttgacatcaatgcatcgatcttgagcccagagcaaatgcaagagattgttcaaaagtgatatatttccaacaaatgagatcagtacctgccttgtctacctttgtggtgcttgtgtctacctttgtataaattgctaaaaatagcaagcactcctgtctatatgagaagtgtagctgttacaagtaaccctgtagaacatattgatcgtgcaaagatagttcacagggatgtaaaacattctgaattttacaaacataatactttttgtggatgctactttcttagcttgaatatggtcatgtaaaccactacagacaatactgtttacagagtgaagtttaaaatataacatgtgataggagagctgttggagacaaaacaaaac

SEQ ID NO: 177642 - DNA, 520 bp, Zea mays
  Clone ID: MRT4577_93599C.1
ccggccggggtcgcgcaccagccgcgggcgaggctcgccgcttgacacggcgcctctgccccggcgtgctcccctgcctatgcagccagcgccccccgcccagcgcgacgtgcgcgtgtgcgcattccccactgcgctgtgcgtagttgcccgcccgtcgtgctgtttccttcggccccgcgcgcaggcgctccgcgtacgtgcagaggagtctcccgcgcgcacgccgtcgaacacctgcacccgcgcaccgaagctccgttgagccaccatctgcaccaccttcgttcgatctcagtccaagcctctgtaacgccctgaatttgggggtaaaattttttcttcttttctctcaccaaattcgggcgttactctcttttctctttccccttttgctctttcttcccaatttcaaaccagtatagcggcaggtgtccgtgtcatgtataaaccaaaacctaagtgtcatgggtgttgcatcatgccgaagcacaaaaaaaaaaaaaaaaaatttgcggcc

SEQ ID NO: 177643 - DNA, 421 bp, Zea mays
  Clone ID: MRT4577_9359C.1
gtccataaacacactattctatccacatacttttttaacctaacaacaatggctaccaagaggatgctcctttcttgcgcattcttgcgctctttgcaagcgcaacaaatgcgttcattattccacaatgctcacttgctccaaccttccattattacacatttcccaccccccgttacttcaatgggcctttgaacacccagctgtgcaagcctatttgctacaacaagcaattgcggcgagcgttttacaacaaccaatttcccagtttcaacaacaattcttgtaacatctaacaatacaaaccatttcaacgcatcatcaacaacatttcctaccattacttgatccacctagccattgtgaacacctgcccctacttacaacatcttttgcttatcattaaaccccactttctttt

SEQ ID NO: 177644 - DNA, 613 bp, Zea mays
  unsure (1)..(613): unsure at all n locations
  Clone ID: MRT4577_935C.1
aaaaaaccaccgggtccacaacacattctcatggcttggaaggcttccccgaaccaccaaaaggagggaaaatcaggccttatccagaaacaaaggaaacgcccatagtggcaaaacacaatttccccggaaaaaatatgggccggaccaaaaaaaaacccggggaaaaaaccgggggggggaacccccgacccccccccgggttaacaataaagggggcctaaaacagcccctcccatgacggccctaattttggccctttttgaagccagccttccccggggttgccccccccggccccggggggatnccgctggcggcttnccgcccggcccccccccnnccttcgtccccccgccccncgcccccccccccccccccccccccggcccncccccccgccccgcccccccgcccccccccgccccccccctccggcgcgcccggggcgccgcgcccgggccggccccccccccccccccccccccccctccgccccctccgccgcgggggcccccggcccgcgtcgccccctccccggccccggccgccgcgccgcgccccccccccccccccccggcccgccccccccncgccccccgccgccccccgg

SEQ ID NO: 177645 - DNA, 884 bp, Zea mays
  Clone ID: MRT4577_93600C.1
gggtaccgcgaggctcgccgccacgcgtccgatagagacacgcaccactcgaaccagaaccaccaggctgctggtgctggaagggggcgcggcagctgggcagctggcaacggacatggcggcggccggcggcgagaccatgatgacgagggagcagctgctccacctcttctcccgcttctccttcgtcacctccctccccgaggtcaagcagcggattgccgacgccgtcagggacaagcaggaggctgtggccgtgaccactgaaatacaagaggagattcttcgcgagatgggagtagatccaagttttggtattggttgccttggaaaggtgaatgttgttttcaaaaatgacaaggagttgatgattaaattctatcaatttgttgccaaagaagaaatggctattgatgaagctgagcttgaacccagagaattggctgaaaaattacatgctcaacaaataatgcaagaacagcaactgaacatgctagttgaaatgaggaaatatagcccagagagccaatccgtcatacttgagaccttgcacaaagaattggaagaagctgattttgacatcaatgcatcgatcttgagcccagagcaaatccgagagattgttcagaagtgatatatttccaacagatgagatcagtacctgccttgtctacctttgtggtgcttgtgtctacctttgtataaattgctaaagagagcgagcactcctgtctatttggtttctggtgattgcacattgtatgttgagaagtgtagctgttacaagtaaccctgtagaacatattgcttgtgcaaagatagctcacagggatgtaaaacattctgaattttacaaatatactgatcgtggatgctcctttctt

SEQ ID NO: 177646 - DNA, 515 bp, Zea mays
  Clone ID: MRT4577_93601C.1
tcttggacgcgtgggcggacgcgtgggttaaattctatcaatttgttgccaaagaagaaatggctattgatgaagctgagcttgaacccagagaattggctgccaaactacatgctcaacaaataatacaagaacagcaactgaacatgctagttgaaatgaggaaatatagcccagagagccaatctgtcatacttgggactttgcacagagaattggaagaagctaattttgacatcaatacatcgatcttgagtccagagcaaatccaagagattgttcaaaagtgatatatttccaacagatgagatgactacctgctttgtctgtggtgcttgtgtttgtataattgctaaaaagtgtgagcagtcctgtctatttgatttctagaaaaatacaaattgcatgtcgagaagtgtagctgttacaagtaaccctgcagaacaaactgattttgcaaaggtagttcacagggatgtacaacattctgaattttgcaaatatacttctcgtgc

SEQ ID NO: 177647 - DNA, 885 bp, Zea mays
  Clone ID: MRT4577_93602C.1
atggacttcgcctcgcccgaccccagggctcggactcaaccacaactcagaagacgacggactccgcctcgcccgaccccagggctcggacatagcctcggcctcggaagacagtctccgcctcgcccgacccggggctcggactcgacctcgacctcggaagacggactcgacctcgacctcggaggagcctccgcctcgcccgacctagggctcggaccgaccacgtcacagggggccatcattaccctacccctagctagctcaggctacggggaacaagaccggcgtcccatctggctcgccccgggacccctcggggtcgaaacgccgacaagtgccttcctcaatggaccaattaaggaagaagtttatgttgagcaacctcccgactttgaagacgataagtatccctctcatgtatttacgcttaaaaaggcgctctatggccttaagaaagcaccaagagaaatgtatgaatgcctgagagattttcttatttcttatgccttcaaagttggaaaagcagatcctatactctttaccaaaactatttataaagatttgtttgtatgccaaatttatgttgatgatattatatttgggtctactaacaaatcctcttgtgaagaatttacttggatcaggatacaaaagttcaagatgtcgatgatggtggagttgaagtatttcatcggattccaaatcaagcaactccaagaaggcaccttcatctgtcaaacaaagtacactcaagacattctgaagaagtttgctatgaagggtgctaaacccatcaagactcccatgggaaccaatgggcatctcgacctcaacacaggaggtaactatgtagatcaaaaggttatgccggatgtaaggtaa

SEQ ID NO: 177648 - DNA, 1261 bp, Zea mays
  Clone ID: MRT4577_93603C.1
cattgggtacctcgaggccggccggatcgcagactccagaccaggctcctctctgttctctcagtcgttatctcctcctctcctcctctcccacggcgagctccagcacgtaccaggctccccacggctccccacggcttgctccagcacgccgcccgggctccccacggcaagctccaccacgccgcaagggctccccacggcaagctccaccacgccgcaagggctccccacggcgagctcccctcggtggcctgttcccctcggcgacggccggttcccctcggctacctacagcggcggtggctggttgccctcagctaacctcgacgagctctagttggctagatggattacagctggaatgattctatgtacggttttgacgatgagcttccgcctagcttagcattggtagtacatcctagtggtcacccaaaggttggtattgactgggacgcacttcaaattgttgagaggcaagatgaggaaggtaggatagaaattgttgacgatgacagaatgtatgagttgatcggtttgagagctgaggatgaagctgctgagaaggcgggtgaagctttcaagatgcaagagggtgatgtcaatagaagttatagtgagaatgaaattattgatgcagccatccctgttgatgatgaaattccagatgagagggtgatgttgcatgacccaacaagccttgtatggatattggaacagtgtaccccagcatgcgtgacttcaggctagctttgagacagtttgcgatcaatgaagagtttgagctagaaatatataaaaatgatccaagtcgatttattggtaattgcaatggagaaggttgcccttggcatattgtgggacgtaggcaataatctgggaatagtgttatggtatagacttgttattactaatctatgttgtgcccttgccatctatgttgttactaactgaggtttattattgcaggtaattgtcttaattgaggaacacacttgtacttccagtgctagaaggaaaaccacgacccctactagcgcttgggtagcatcaaaggttatccatctcctcaaggagtctaacatgggtccgaaggagctgcagaaaaggttggaagaaaaatataaatgtgaaattcattatgacacggtttggaaggggaggcaattggcgataaaagagttacatggcagttgggaagagaaagcctcgcatgaatagaacaaagtatggggataatgccaaaatccccaaactc

SEQ ID NO: 177649 - DNA, 1977 bp, Zea mays
  Clone ID: MRT4577_93604C.1
aatccatttagggttttgtcatcttggcaagtgcagaaagtaaagcgattgtttcgccagtggtcagatacaagcaatgtggcctaaaatagttttcagcctcgtttgcacgttgattttctgttcagctcccaggccatttttgcgccagtgactgagaattgactgctttatttattcgccacaggtggattactcagcgagaacatatataatcactggtgcacttagtgatcaatagctggcaggtgtgcccgaaataagacaggattcatttcagctcatcaaaatctatataaattagagaagtaatcccgctaggaattaatccggggctccaatcccaaacaaccgaacaagaccttagtcaactccactccagcgctcacacaactgccatattggttggttacctctgatcttttctgttatccgcaagggacacaagccagagcttgacggcttcacaagtgttccatcttcggaacctcatgtaccattattgttcatcatacgcctgttcatcttcagttgatgatgactgcccgaaagctagtaggctcatatgtctggatccttctggtatcatagctcgaaccaccttttctatctcatcgcagatggttgggctctctcggagatactgcagtgccttctctctgccttggcccaatcttatatctttgtagctgtaccacgaacccttctttgcaactacatccatcagctcagcacaatcaagaacgcaccccaatttactaacaccctccccaaaaatgatttcaaattcagcttgcttgtagggcctagatactttactcttctgcactctgacacgaaccttcacaccaacatcttcatctcccttggcagattttatctttccaatgagccgtatctcaagacggacagatgcaaagaatttcaaggctatccctccactagtgacttcaggattcccatagaacactccaatcttgtatcttatttgattcaagaacataagagtacagccagcctttgaggcattgcctgacatttttctcaatgcttgactcatcagacgagcttgtagacccatctgctgcattcctatctcaccttcaatttctgcacgtggggtgagcgctgacaccgaatcaatacagataagatctattgctccagatctgcacatacggtccgcaatttctagtgccatctctccgttgtcaggctggcagacaatcagattttcaatatctaccccaagagcttttgaataagctggatcaaaagcatgctctgcatcgacaagcatggcatttcctccgagcttctgtatttcagcaattgcatgcaaagctagggtagtctttccactgctttctggaccatatacctccactactcttccttttggaagaccgccacccagagcaaaatctagtgttagacaaccacttgggaatgtctcaacaaaagcaccaccagcactgcctaatcttgtaacacttccttttccaaaagagttgtttatgtcattcatagcggcatcaagaactttttggcggtcgacgaggcgagggtcgtcctctccggagagcgccccgttcccaccaccggcgacgaactcgcagcgcagccgccgtgcgcgagccgttaggccgcctgccgcggcgcggggcgcagcgcgtctccggcgactacgtgctggaaaagagagagcgagatgggaggcggtaacagcggagacggccattggcatgcgtggctgtggctccgctccgaactcgaaggcggcggcgagcgctcggtgtccccgcgggggggagtggccgagtgggagaggggtggggtgaagaagagccgagcgaagaagctacgtcagatagtggtgatcgaacagctcgcctcgagattcgtgagacggtcggatcctgggattcggatgggagcatctcgcgatcgtgatccttgactgcgtgacagattccc

SEQ ID NO: 177650 - DNA, 299 bp, Zea mays
  Clone ID: MRT4577_93605C.1
ccgcgggcctttccccacctactcgcgcggcgctcgccagtttgtctccggtttcgggcccggggtgcttatccgcccccgccgcccatgtcggaacaaggaggtaaggccaagccgctgaaggcgcccaaggccgacgagaaggagtaccacgagacgggtcttgcatatctgcagaagaagaaagatgatgacaaagcgctgaaggaggttaaggccaaggcacacaaggacgctattgaggcctcgagtccgaaggaaagaggaaagaaacgataggggccatgggtttccaatac

SEQ ID NO: 177651 - DNA, 305 bp, Zea mays
  Clone ID: MRT4577_93606C.1
aggtggggggaggacgacaggaggggccccccctgagcggttgcggcatgccccccccctattgctgaccgtaccacgctgctgcgaggctcgaggtggagaaggcggtgccttgattttttgctcgccgttcgtcagaaggagcacgctcacgaggtttataccccccactactctgattgaaacattggaagcccccgccacagagccacagagacatcacatccctagaatggaagcccttcgccgtttggctagacttgaggctacaaacggcgagcttgcaaagtcacttgccagggaac

SEQ ID NO: 177652 - DNA, 523 bp, Zea mays
  Clone ID: MRT4577_93607C.1
agaaattggaaaatctgcaccttgaaaaatctaatacattagacacgcacaatcaaatactcacgcactacctttgacctttctatgctcacaagtctcacaagtcacaatcagacaactagaaacacagaagcacgaagcaagcagacaactagaagcactaagcaagcagccaagcaaacaactagacaagcagacgtgcggccaagcaggaagcagcggcaggcggcagccgtgcggtgcgggtcgacgcctcggcgggaccaagcggcaagcagcctgcagccggccgccgggcgggacaagacaatcagacaagcagatcagcgaagcgccggagcggacagctggagcgccgagcgtgccgaggctccgagcggctggagcgccgccaggagcggtctgcagccgagcgggcgagcggttggaggctggaggcctggaggaatgagcgccggcaggagtgcgggacgtcgggacgcgcctgtgcggctgtgcgggacgaaccctaatctctattctc

SEQ ID NO: 177653 - DNA, 421 bp, Zea mays
  Clone ID: MRT4577_93608C.1
gctacatgggagctaacgccgcccgagtgcgttgcttgactgggagctcatgccagcccgagttgctgggcccatccatgcttgggtgacatggaacttatttcacatttctatctgcctactttctaccagaaggactatattcaccgcctgcccttcggcggagacagggatcttcatagcccggcctcgctggccagcatgcacttcgacgtatcgccgatgcccaacaaggacattatccgcgaagagatccttaactatattgccagggctgcttaacgggtatgcacataccaaggtacccgactaacacaccattggttgacacccccgccatgtgtgccttatctgctacctccactcatggtgccgtacacggaaaccccacggagccccttaagcgcaagagacgtagacc

SEQ ID NO: 177654 - DNA, 313 bp, Zea mays
  Clone ID: MRT4577_93609C.1
ctcatctggtcgctcactcttgcagctccacccttcactcagtcttaagctcttagctctaggctggagctagccgcgccactccttcgcgtagccatcagccttctcatcgccaccaatggccactgccgaggtccagaccccgaccgtcgtgtcagccgaggaatcgccagtggtggagaccccgtcaccggtcgtcgtgccctaagagactgccccctccaaagccgatgctgaagctgaagctgatgctgctgctcctgctgatcccgaagagcttcccgcggccgagcagcatgcaacctccgagccc

SEQ ID NO: 177655 - DNA, 306 bp, Zea mays
  Clone ID: MRT4577_9360C.1
tcattcgtgactccgcccactagaccatccattctttcgacaacaaccatgtcacctcatttcatgagtgttatgacaccatcaatcaactcactggcctttgcattacaatgatctcaatgataaatcactgcccctaccctacttacttagcttgcatcacatatccctatcctcatctggcttaatacctaagaggtccacacctatcccacttcctatcacttgcgcagcctcaattactaatatcactctccctgtatcacagcattaatcgcagactgtgtcatatttacacacaacatc

SEQ ID NO: 177656 - DNA, 194 bp, Zea mays
  Clone ID: MRT4577_93610C.1
atatgttcgagagcactgcatcctttggttccaacggcattgttgattttgggtggggccgatcgatccactcttgcttgaggcttgtgcagttgaacacacgtcgactcaagctgcatgctagcgcacaccgtctccgtttagacgagacccgtccatggggttcgcatccttcagctatgcgcgccgcgaca

SEQ ID NO: 177657 - DNA, 1660 bp, Zea mays
  Clone ID: MRT4577_93611C.1
ggtaccgggggccccccctcgagtttttttttttttttttttttttttttttttttttttttttttttttttttttttttttggggataggaggattgaaccccagctttcaaagggttccttgctttgattacttgggacgggtttggtttgatgaatgaaatagcccatcatcttctcactcctcacttttttggttgatttggggaatataataagttgattcattaccatttcattcatcataagctcataattagcaataacatgaagaataaatttattccaccaaatttataaaataaacttatgatacacaacatcatctaaaatagattgactcttcaaaccaaacgctccttagtttttctgtcttcacgtgagaactctctcagcaagtatctatggtatcacatgtactgcgcgagccattgcttacacatatcaagcactgtcaatgcatttgcatgtaatgcctgatgagcaacatattgaacatcagcgacacttccacttcgtgcggctatttggaatgcactttttagacgtccacagacaacacaagcaagtactttcctgtgattgctgattagcatgtcgataaggcgatctggtctttctttatgcttgttggcataaacatttatagcagcaccaataacctgatcccattcatcatcatctatagtcccccttatattcttcaagaactctgtcaactggcccccttttttcctttctgcgagggatgcagctaccccagcataaatatcaacagctgggagatcaaactcatgaagcattctgaaagctaaatcaaaatgcttttcagccagagtttcaacaaccatgcaccttcgcctcagagtttcagggtctgttggattcccaaaaagggaagttttccactgagagccatctatactattgagggccttcaccacatccatctgataggaaacacgagtggaatatttcattatcgtttccctggtcatttttccaggtgcacccttattccgagcagaccgcaataccaacttagtagcctcgattgttctatctcgtacagataaggcttcttcgaaatgtgtcttggcatgtcccaaatgcctcaaagcctcctcttgagacattgaattcataaataattgaatacaacaaaggccagaagcaacatggtcatcttttagaaccaggaagttgtagagataattaaaatgcctgtgtgtttcacaatagttgcaaatgcgggtgataatagtgttcatgtactgaatcatgtgtgcctcatgatatgtgggcgattgtgttattgtccgtattgtattctccaaaacagccatggcaccatatccaagacagagatcacacaagtcatcaattgtcccataatcagttgttaaaggatcactccatggagctgaagacaaagatgtttccccttccgtggttggttgactgaatgggaagaacagagagcatgcttcagtgtaatggccatgcctgaacatgaaagcaagcatttgtggccgagcataatcttgcaagtaatgaatacactcagcatatcggacactatcaagattgctgcgagggccatcttcaaggtaggaactagcagtcctgaattggctgtctacatgactctggactgtcg

SEQ ID NO: 177658 - DNA, 866 bp, Zea mays
  Clone ID: MRT4577_93612C.1
cggccgctcgaggcaggagcatcccgcatcgcatcgcactaggtctcggacattcctctctctctcccttgcttggggaagaagaagaagaagaagaagaagagagggcgagcgcccccgcctcccgacgccgtcgcccctcgccgccgatctgatctcaggagccagcgaagatgcattccaccaatctgctcctcgaggagcccatccggatggtctccatcctcgagccatccaagccgaacttcttcccggcgatgacgaagattgtggggacgctgggtccgaagtcccggtccgttgaggccatctccgcctgtctaaaggccggcatgtctgtggcccgtttcgatttctcgtggggggatgccgcgtaccaccaggagacactcgagaacctcaagctcgccatcaaggccaccaagaagctatgtgctgttatgctcgacactgttggccctgagttgcaagtggtgaacaagagtgaagtcacaatctcgcttgaagagaacgagtctgttgttctcacccctcaccagggccaggaggcctcttccaagttgctccctatcaacttcgctggactcgccaaggctgtgaagcccggagccacaatattcgttgggcaatatttgttcacgggcagtgagactacatcagtttggctggaggtttctgaagttcaaggggatgacgtggtttgcgtgatcaagaactcagctaccctggctgggtcactcttcacattgcactgctcccagatccatatcgacatgcccacgctgtctgatgaggataaagatgttatgaaaaaatggggtgctccaaacaagattgacttcctctctctttctatacaggcacgc

SEQ ID NO: 177659 - DNA, 287 bp, Zea mays
  Clone ID: MRT4577_93613C.1
tcggcaaattccactttcccaggccccaagttcaggttggctattccccttaacagggccgcaagaagatcgcgcttggcccggcgtcttacgaggaggcattgatcggcgccgtggcatttaagaagaggaaggggaggctggaccctggtgaccgggtcttaattaggccgggagccgccagattagcattttccggagggacccctggggcgggccggttgagatattccacgacttggccacggaccacgaccggagcccgaacctggacattgaccggggcg

SEQ ID NO: 177660 - DNA, 1176 bp, Zea mays
  Clone ID: MRT4577_93614C.1
ttgggtacctcgaggccggccgggtatgcatgtatggttgcttcagcagtcgttggtcgtcgtcgtccatcatggtcatcatcaccacttcaccggtcaccgccatggcatggatcccacccctcatcacatgcattggtttctgtcagcatccatccaatcccaatccatcgccgggcatcccggcgcttttagttcattaggtcttctttctcatcgggggctagtgttattttacctttcttcttttctgtctattggttaattggttccccctgaatgtttttttgtttgtatagagagagaaagagagaggagggtgagaggagaggcaggagaaatagatgaatcagagtggttgctgcattgcagttgcagttgcttgcaggttaggtactaggtgagaaggagagctaaaccagcagcagagggagacagatctagagaggaaactttgcagctagtcagtcagtcagtcaatcaattagaagaaagcatggagagtgcttttaagcaaatgaaaggggaatttgttggtttgctaattagaagggaggttatgcagggcaggtcagtagtagctatcatcgtccatgatgattttcaaacttaagaagagggggacagccatcatccatcatagtctgtatccggagcttggtgtactgaactctgaaacttctttttgcagttcatctatgtttagggatttgataagtgttgtttggtttcttctatactagtagtgctacctcttagccagtaattaattatatatgcttttgctctcgttcttttctcctgccttgttgcttccatggctccccatccatacagaagctgtgagctgagggctttatccttttcaagctcctcactcggttgcgcctcagaaatggtttcagtaatcctaatgagctgagggctttggctgcttttgcagctgcaagatgactaacaagcaacatgaactggactatgaaaaagtaccttagcatgaacgagcgaataattatcgtggcatttgttgctatggtatacagtatacttcctctattctatctaaaaaatgtcgattagtgtatgaatagagaagtagatatatcaatgatattgaaacccaaaaaaaaaaaaaaaaaaaaaaaaaaaaaagtactctgcgttgttaccactgct

SEQ ID NO: 177661 - DNA, 1904 bp, Zea mays
  Clone ID: MRT4577_93615C.1
cggccggaaaaacccaatgcctcgcgcctggcggcatgagctcggccacatgccgccgcggcttcaatggcaagttccgtcgcatcgcatccgcgccgtcgccgcttctccaccgcaccggcctgtcgccacccgccgactgtggcgcgcgggctgcggagcagcactgcctccgccttctagagcgctcctccgcgccggccgccgtcctgcagtccctcgccttcctcctcaagtccggcctccacgccaacccgctcgtcctcaccaggctcttcgcgtcctccgctgctgcggcgcccgcgctgcttgagccccttgtcgctgcgctcctcgtgccctccgtccccatcgacgcgttcctcgccaacactctcatccgcgcgcacgccgcctccccgctcccttcggcccgcctccgcgccgcctccttcttcccgctcatgctccgcagcgccacgttgccgaacaagttcaccttcccgttcctcctcaaggcctgcgccgcgttcccggggtgcccgggcgttggggtccaggcgcacgccgccgctctcaagttcgggttcaccaccgaccagtatgtttccaatactctcatacacatgtactcgtgcttcggcggtgagtttcttggggacgcgcggaatgtgttcgacagaatggccaaatcgagcgcggttacttggagcgcgatgatcggcgggtatgtgcgtagcgggctgtcgagtgatgcagttgggttgttcagggagatgcaggccagcggggtgaggccagatgaggtcacaatgattggtgttctggcagcagctgcagatttgggagcgctcgagcttgctcggtgggttggccggtttgtggagaaggaggggattgggaaatctgtgacgctgtgcaatgcgctgattgacgctctcgccaagtgcggtgatttggatggggctatggcagtgttccaggggatgaaggagcggactattgtttcttggacgtcagtgattgacgcacttgcaatggagggtcgtgggaaggaggctgtggcggtgttcgaggagatgaagactgctggcgtgcggcctgatgatgttgcgttcattggggtgctcactgcgtgtagccatgctggaatggttgatgaaggttatggctactttgagtcaatgaggatggcatatggcattgatcctaagatcgagcattatggctgcatggtagacatgttcggtcgtgctggcatggtcgagcgggcaatggagtttgttcataagatgcccatgaaaccaaacccaataatatggcggacgcttgttgctgcctgccgtgcccatggcaggcttgagctcggagaaaccatcaccaggaaccttctaaatgagtacccggcacatgaggccaactacgtcatgctctccaatgtctatgcgctgacacggaggtggaaggagaaatcagagattaggagagagatgagcaagagagggatcaagaaggtgccaggttgcagccttgttgagctcgatggggaggtccatgagttcatagctggtgacgagtcgcatccacagtggaaagagatatacatgatggtcgaggagatggcgagggagctcaggcgtgctgggcacatctcagctacatcagaggttctccttgaccttgatgaggaggataaggaggttgcgcttcagtggcacagcgagaagctggcgattgcatttgtgctactgaggactcctcctggtacacaggtccgcgtggtcaagaatctccgagtatgctctgactgccatgcagcaataaagtgcatttcgctggtttataaccgggagatcattgtgcgtgatcgcagcaggttccatcgcttcaagaatggctcctgctcgtgcaatgatttctggtga

SEQ ID NO: 177662 - DNA, 430 bp, Zea mays
  Clone ID: MRT4577_93616C.1
gatgcattggacggacaacacagggggagtctcgaacgacacgcagatgcatgaatacaggagatctgtagctcatagagagagacacggatcgaggcctgtgtatggcatctttacgagcataaatatcatcgatccaagacaaccatggaaggaatgatgacgcatacactcactgctgacacatgaaatcagggcctatagcataaacatcaatatgcccgacgcacgcatggcataggctactaccacggcctgacaaggcggctgaagagggtgacttgctaccagtctgacggaatgacctggactcgcccatggacttgacgcactcgtccttgactcgcagccagcaagggcccttgcagcggccggagggtgaccatcctccatatggcagccccaggactcgcgcatgggctcccagacc

SEQ ID NO: 177663 - DNA, 205 bp, Zea mays
  Clone ID: MRT4577_93617C.1
ggccagcccaacctcggcagccaaggcgcggtgggagtggctcccctggcggcgcggtaggagcggttccacaggcggcgtgggcgctgcccgccccatccccccggcactgggcgcgaacgcggctgctgcggcggcccgatcccagcctcaacacgcgctgaaatgacttgactgacttgcatgcagacatcgacccggaagg

SEQ ID NO: 177664 - DNA, 381 bp, Zea mays
  unsure (1)..(381): unsure at all n locations
  Clone ID: MRT4577_93618C.1
aacctagtgatgggtggctatattatgttgaagtgagatgtaactagatacttggtaactatagcaagcctgaagctgaagctttacaacgggcttttggggctcaaaagaggcggcggttgaatcgtgtctttgatgttatcgtcttcttttatcttgactatcccatcatggtttaggattcgaagaagagaaagaagaaagtaactacaaggcagagcaaagttctgaaggtgcaatctaaatcaactccccaagcctcagaggaaattctggtaaatatgctttttgtctttggtatactggttatgtattatttttatattttcttgnttntcatattttaggctacacccaaagccaggtagcaactgagattga

SEQ ID NO: 177665 - DNA, 390 bp, Zea mays
  Clone ID: MRT4577_93619C.1
ctgggtcttaaaaccattagctttatctactccagagcgcagaagaacccgagcgacaccatgagggtgttgctcgctgccctcactatactggctctcgctgcgagcgccacctgcacgcatacaagcgggggctgcagatgccagccaccgacaacggatcatataccgccgacgtggcatatgccacctgcaggtcacctgccacctgcagtgcatttcccacctcctggccacttacctgcgtctggccaactgccaccgccatggcatgtaccgccgctgtgtcatctgccgcatccaccatgccagtactctactcaaacaccccggcctgaggctgatagccagacacacccatgcccgtgacaacagtcgcatgcaagcccg

SEQ ID NO: 177666 - DNA, 564 bp, Zea mays
  unsure (1)..(564): unsure at all n locations
  Clone ID: MRT4577_9361C.1
tttttcttttcttttgtttttatttttgtttttttttttttttttttttttttttttttttttttttttttttttttttttttttctttttttttttttttttttttttttttttttttttttttttttttttttttttttttttttttttttttttttgaaaaaaaaaaaaattttttttttggaaaaggggggccacaaaaaaaaaaaaaaccctttttttttttgagttttgtaaaaaaaaaaaaacaagggggctaaaaaaaaaattttttttttttatgctgccccccccattttaatcaaaaagctgcgtaggaaatccctttttttatatccctgcaaaaaagaacaccatctaggttttttgtttaaaaaaagccccattttttatattcttagtttcttggacctaatagttttaccggttttttttgccccaccttacagttggnttccattctgggtaccacaattttttcaattttttttctctttaccccttggccanctcttgccccagaggccactgtccttctagnactcatcattcttggaggaaca

SEQ ID NO: 177667 - DNA, 1161 bp, Zea mays
  unsure (1)..(1161): unsure at all n locations
  Clone ID: MRT4577_93620C.1
nnnnnnnnnnnnnnnnnnnnnnnnnccctccaaaacttcttctctatcggctctacagatatgtacacagttagcaatttatttcagtttgacatggatcacactaatacaaagcgatgtacaaatgccaagagaggagagatctcgcccttcacagggggttaaaaaaaacacagaacatctacaaagagaaccgcccggtcacaatgccaaactagctgcaaaactgctgatgtaaggcctactcgcttcctcagagataacctcacctcttccctgagtaatgaatcatttcttctgctctcctatgcggaaccgcgcaggtatccagcgacgccattgatatttgaactgtctttgattccacttcaccgtgattactatcaaattcatcacgctgatttggtttgaggacaaagtgggatgaggcagggcaacaccgtcccctcgattttttggatcacgccgccacctaaaactactccggtgttcacctcgcccctacgcgactctcatccaaacactattgaaactgtggccaccttcttccatggcttcatgtacatcacgccagacacaccctaagtctctcaggtttcctgtgatacgtaccttcgactgaatatttccaagccaagtaaatttctacaaaggcaaagcataatgctgatgcccagatattatcagccttgacaagaagcagtcacatgttatgagagtaaaacagctactcatttgaataggcgtccgtaaaatcgttgattctttccttaataatctgcagttcctcatgaagcaaaacgaagaccttcttcatcaatttatgtcttgttcctgattcatgatacatgtctctgagtctttctaaggtgttataatactgttccttgcctctttcttttccaacattgagatcatcctgaacctttaaaaattctgacatagttttgtctatctgactattcaagtaagaataaaccccatacttctcattgtactcctgcacataatccttgtattgtgaaaaatcttttattggatctttaagttccggagcatctttatcatacttggagaaaaacaaattatcatcatctgaagaactgccccttctcttcctacctgtctttgtctcaatcaaagagtcgttcctattctttc

SEQ ID NO: 177668 - DNA, 485 bp, Zea mays
  Clone ID: MRT4577_93621C.1
ggtgtttttttttttttttttttttttttttttttttttttttttttttttttttttttttttttttttttttttttttttttttttttttttttggggagaaaaacaggcacacaggggtcctttattaaaagaacacaacaaggtggggaagggggggggaaccaccacgggattaaatcaagcagggaccccaccccgctaggggaagggcccaaagggcgctgaccccctcttttgagaaaaaaaagaaaacgggggtttaaaaaaaaattggggaggataaagaggggcacacacggtactccaaaaaataaaacggggaaccccccccggaaaaccaaccggggttggggcttgggtaaagaaggccgccccccccccccctttggtccggggaaaaaagggggaatatcgggggcccgaggaaaatgaaaaaaagaggggggtgaacggaggggggcaagttttgaaattgggtaaaa

SEQ ID NO: 177669 - DNA, 307 bp, Zea mays
  Clone ID: MRT4577_93622C.1
cgaacccgtgggcggactcgtgggcactcgtacccatatcacggcgcctgcagtcgacagcggggggaggcggaggctgagcagttgaagagggctgtccgctagttctacatggacacgcgctacgggccatgcctcggcgtgacccgtacctaagctgtgcatccgtgccgccggtgctcggtctcgcaccgtctacagtgctcttcggcttttgcgccgacgaacagctctgcctatgggagggccgcgtttaggctactggcgggatgcacattcattgctcgcgtttagccgacatgctcca

SEQ ID NO: 177670 - DNA, 315 bp, Zea mays
  Clone ID: MRT4577_93623C.1
ctgaaaaaaaaaaaaaaaaaaaaaaaaaaaaaaaaaaaaaaaaaaaaaaaaaaaaaaaaaaaaaaaaaaaaaaaaaaaaaaaaaaaaaaaaaaaaaaaaaaaaaaaaaaaaaaaaaaaaaaaaaaaaaagggggcgggccgtttttaggggaacccaagctttctttcccctgtccttggcaacgttaaatactttttttttggtggcccccaaaatttaaattaattgggccggctttttaacaccgtaggggatttgggaaaacccttgggggttccccacattaaatctgctttgaagcacactcccctttt

SEQ ID NO: 177671 - DNA, 356 bp, Zea mays
  Clone ID: MRT4577_93625C.1
gcttccgttttttggtgttgtgttttatgggcatttttttttttttttttggggggaaaccgtgaggcatgctcataatttctacggacgggaaaacgggaacggcggggagtacaaacaccggccggcgagggtgcccccggcaagtcaaaaagtgcattttgtttaaggggaagggctaaacgccaaaaaagaggtgagctccactcattcgtgcttggcgggccaaagctgggggcatccttctctggggtggcatcgactgggttttatacagtgtgccaaagaagaaggacccaccgatgccgatacagagtaatcggggataaatgccctttgagaatgccttaggggct

SEQ ID NO: 177672 - DNA, 255 bp, Zea mays
  Clone ID: MRT4577_93626C.1
ggccgcttttttttttttttttttcaactcaactgcgctcttgcgtacattttatctgagattacaatgcccccaaaacacgtctagaatcaaagaaaacccgcttttaaaatattttaaaagggacccatatataccccaaggcaccttataacaagtcttatacaaatgtcatctctatttagagaatggcgagcatacaccactacatcgctaggccccggataacactgctatacacttcttgttccacaa

SEQ ID NO: 177673 - DNA, 398 bp, Zea mays
  Clone ID: MRT4577_93627C.1
ccgcggaaggaagcagagcacggggaaagatcaaaggaaggtggcctcgtcagactctgcagcttttgtctggaaacgacagactagacgacctaggccgtcatacatgcttcaatgtgttccgggagggaagctgtgcttacgtccataccgctgcaggccttagaaatctgcaatctaggactggaaaaatacggaagatgggaatgtgtcacggagatggaggcccccaaaggtactgttggcctccccagattgctgtgtcacgatgctttggagatgttgctaccctgaatggggaacggtagatccgctgatggtcaaatataaatttttgcccaagaagacacactgatacactgaactcctgggctacgagctggggaaaattgtcttga

SEQ ID NO: 177674 - DNA, 278 bp, Zea mays
  Clone ID: MRT4577_93628C.1
tgagcttactctgggtgtaaagatcacggagctgctcacggaggccagtgctgtgctaacgccctctacatttgcgcaagcggcaaaaatgaagcgggtggctgcttctatagatacagacctgccaaaaagtcagccttgaattcctcagacatcgcatggcttcttgcgtgctatagtttgggccgattcgggttgctgcactttctctttggaacattttataacgcaagatgtggacattaaatgtaatcagtctttatctctcacatacccaa

SEQ ID NO: 177675 - DNA, 308 bp, Zea mays
  Clone ID: MRT4577_93629C.1
atgaattttagtttcttattccataagttttgtgaaagcccccaagtaactccaggagaacctatctaataaaaatgtttagtgatcctagcacttggaagatgggacaggagaatgaggaagttaaggccatcttttactacagtgtgacttaaaggtagcctgggctagatgagatgctacctcaaaaaaccagaaagtttggtaagaagaaatctggggccttggccttcacagactcgctatctcgtttttatcacactctcatttcctttgtgttcgtttacagtcatgcctttccttgatgt

SEQ ID NO: 177676 - DNA, 491 bp, Zea mays
  unsure (1)..(491): unsure at all n locations
  Clone ID: MRT4577_9362C.1
agtttctccttcccctcgcagccgccgcctcctcggatcgtccctgccggagagacgccagagagagcgagcaaaccctaacctccgacgatggtgctgcagaacgacatcgacctcctgaacccgccggcggagctcgagaagctcaagcacaagaagaagcgcctcgtccagtcccccaactccttcttcatggacgttaagtgccagggctgcttcaacatcactactgtgttcagccactcccagactgtcgtggtgtgcccaggctgccaaacagtgctctgccagccaacgggtggcaaggccaggctaaccgagggttgctccttccgccgcaagggcgactaaacctccgaagtctatctgaaaaagcaagncgttgttgaactttgagtttttccagggtgttagtntgaagattttgnaatgtntggnaaattgaacccatctttggtaatgtgatatctagnttgagtagtattatgatg

SEQ ID NO: 177677 - DNA, 309 bp, Zea mays
  Clone ID: MRT4577_93630C.1
gttcatgacggtcctaaagcccaatttggcggcggggttgtccacccgccattctccgccgccggggccaggggcccccctttttttttaataaagttacttatataaatgggggcaaaataattggcattttttttgacggaaaaaattgtgtacctccagaattaaagaccaaaataacccttgaaagatatagttataaccccgggggggcccgagggggttttttcccccaatttgagggggggttttttattccctttttccggggggaaaatatttttctcccacgagaaaaaaaaagtttgc

SEQ ID NO: 177678 - DNA, 302 bp, Zea mays
  Clone ID: MRT4577_93631C.1
cacttcacaacagaggcatcttgcactcagccccccatatctcccctgccgcgcattcttatttagggagtctctacttaccaaatgatcttgcggaccacaactctcagcagagcggccttctccgtacggcagcgctcgggtgcccaccagggcattcaccgcgtgtgccgcgccccagaaaaggagcagttccgatccagccccagccaaaggctggagacaaggcaggcctcctgggaggtgtctccaccatttgagcaccccatggtcctagctggagctccccatgattgaagggg

SEQ ID NO: 177679 - DNA, 1217 bp, Zea mays
  Clone ID: MRT4577_93632C.1
gcctccatggctgccgcttcgcagctcctctctctgttcttcctcctcctcctccctgcttgtgatgccatctactgcgacgaagacgactgctacgacctcctaggggttaagcaggacgcgaacgcgtcagacatcaagaaagcgtactacaagctctctctcaaacaccacccggacaagaatcccgatccggagtcgcggaagctcttcgtcaagatcgccaatgcttacgagattctgaaggatgaatccactagggcgcagtatgactttgccattgaacatccggaggagtttggattataggagattttaaaagctagcttatagaatcagcttggaccccaaacacacaaagcttctggttttctataacacagctcagtactatagggcatactatggacataaaacggatcctcgtgcagtgttgattggtcttcttctaattgtttcagcatttcaatacattaatcagctaacgaggtataaccaggccatgaaaagtgtcaagcaaactcctgcttacaaaaataggttaaaagctttggagtatgagcgaacaggaggaattgctagcaaaaagaagggcatcaagcaggtggataagaaagttgaagaagagctaagtaatgaagttgaattgcaaattcatggggttgaaaaaccgtctgtttggaggctgtttggtgtccaatttatactttggccttactctgttggcaaggcgcttacttggaagatttgttggttttggagataccgggtaaagaaattaccatatacatgggaggatgcttgctacttgacctggatttcactccaaatacctgcgaatgcatggaaaaatatggatgagtccaggaaggaggaccttgtgagaagacacctctgggaaaagagcaacatggagaggtatacttcagggacgaggaaggaaccaaagcgtaggaggtagctgtgcaacatttttgacctgagactacagcaactttaaacaatacaacatactcctatattggagtgaaaagttattgaccaggcttgagttcaccgatagctaattgctaggatccccgggaagtggcatggctaaggaatcatgtttggaggacaattcatgtaataaagtgatcaaggcgacttttgtaggtgtttcttaatcttaatttctgagtagctaataactgtaaaaaaaaaaaaaaaaagcggcc

SEQ ID NO: 177680 - DNA, 573 bp, Zea mays
  Clone ID: MRT4577_93633C.1
ttttttttttttttttttttttttttttttttttttttttttttttttttttttttttttttttttttttaagcaaaaaagggttattttattttttaaaaaaaaaagaaaaaaaaacaggaaggggcttttttaaaaacccccaacaatttggggccggaaagaaaaaaaaacaattttttaaaaaaaaaaaaccccggggcaaccccttttataaaaacaaattggggggaacccctttggaagaccaaaccggcccagggcccgcacattgggtaaaacaaaaaaagggccgggagggggactaccccagtttttgttttttaaaaagccgggggggccccccccctcgggcaaaaaacggggggggggggggcccttcttttaaggggaacgacaccttaagggaaatttgggaccctttttcacgggggggggggcttccggagggcaggggggtttttacaaattaaaacaacggcccgttttagggggggatatttttggttttttaaaacgccggttctaatttttaaggggggggccctttgggaaaatcccccaattgggggg

SEQ ID NO: 177681 - DNA, 1358 bp, Zea mays
  unsure (1)..(1358): unsure at all n locations
  Clone ID: MRT4577_93634C.1
cttcatacagaactcctcctgtcgcgcgcccagagtcctagtagcactagctagaacgaagctagctatacatatatatcaagattcaacaatggcgtcctcctcctccaaggtgctcgcacttggtgcgctcatcttctccttccttatcacgtatggctcgtgcgctagaccggtcaacttcaccgcctcagacttcaccgccgatcccaactgggaggctgccagagccacctggtacggcgcgcccaccggcgccggccctgacgacgatggtgagtgaatagacgacgtcgacgtcgttgcattgcaaaggcgcaggatcgcgtcttttgcttttgggatgtatatactctactctctctgctgcatgcatgtcgtgctgttggcctaacgcacggtgtccgccgcgtgcattgatgtgcaggtggcgcgtgcgggttcaagaacgtgaacctgccgcccttctccgccatgacgtcgtgcggcaaccagcccctgttcaaagacggcaagggatgtggctcctgctaccaggtacgtagctagctacattaattgtggccagacgaagatcccttcctttaatttggtgccggctggacttaggccttgttcgtttctatcggattgcacccggaatcgtttcacctaatcaaagtttatataaattagagaagcaatccggttaggaatcgttccgacccactaatccggcacaaacgaacaagcccttataacatcatcaatcagccgcgcattgactactgtgtgcatgcagcagccgaccgatagaccgcgatcaaacgatcaagtacacctagctggctagctatagctacaagcaaccaacgacgatgacaatcgtcgctaagattaacattatccttttgttgatccctcggcctcgctagctctctctccccaggcccggccctaactggcttagtagctattacctgcaaagccctattcttgtccggtcttccttgaaccgatgacgaacgacgcacgacggggacacacacgcaccatgcatgactcatatatgcatgaatggacacatgcgtgcgccggcgtcgcatgcggccggcggtcgtcaccactcgtcagggccgccgccgccgccgctagctgtggccctgctgctcctgtggcgccctggggcgtgtgacccagagcgagctgagcgtccggaggcggtggaagtagtccgacacggccagcagcgagcgcgccatctgtcgcgccgtcaggatctggtgcagccggtggagcgtctgctgccgaaggttctcagccgtatatatacaccattgtcagttntcctgtttgacatttatgccaccgttcacacc

SEQ ID NO: 177682 - DNA, 448 bp, Zea mays
  Clone ID: MRT4577_93635C.1
ggtaccctcgggtctggccggacaggcctgtatcttcaggcgatgcgcatcatcctcgtattcgaattccaggaagctttccctcttgcaccaacactcgctctcatcatcgagaaacttgagcacggcacgaaagacgagaacgaggggcaggcatcggagcgcgatgaggacgactttgctcttttgagttcaatatccaaatgcatggaggatcacaagctatctccctcagaattcactacctttgctgccaagattgcgctgctggaagagcgtgttgggaaggcaagacgacaagcctgcagtacaggagctaagcggaagaggccagaggagtgtgtcgagtagaatgctccctgaagcgaagttcagtttcactgtcacgtagaatcttcctcacaaaatagttgtaactctccagattgtatgcagactaaccttcact

SEQ ID NO: 177683 - DNA, 358 bp, Zea mays
  Clone ID: MRT4577_93636C.1
gggaaacggggaacaattccatttaaaacaaaaactgggaaaacagccccttccacggggcccaggcccaaaggggaaaaatgggtattatcccctgggagggaaaaaaaagggcccgcccatttggcacccaacccaacaggttatccgccggccagttcaacagggtaggacctgtaccccccccccaaagcagggccaaaaggggggccaaacccccccccgggggtggggccctttgggggctgggaaaaagaaagctgtttaccaaaaaaaaaaacccctttttccccggggggaatgcctttttttttttatacaccccccttggtcccggaaaaagggaaggggggaaaag

SEQ ID NO: 177684 - DNA, 627 bp, Zea mays
  Clone ID: MRT4577_93637C.1
tcgagccggccgttcttcgatacagtttcaagagagcagatgactgtgtggatttgggggagcttcttcactggagagtggagagctccggtagcgaggcgaaggaaggaagagggaggccgccttcttctcccccctccttttttccccctccctttcctcccctgccctttcatcttctgtcgcttcctctctccccctcttttctccatccttttcttttccccacccccccaggctccccaagccaccccccgcccccccccccctccttttctttcttcttttttcttttttttcttctgcagctctcccgcgcattcccctccccaccccccccccccccctctccttttcttccctctccccctcccctttctccctcccctccctctttccccctccccccccccctcctcccccccctcccctctctccctccccctcttctcccccccctccctccccctccctccccccctctctcccccctccccttctctccctccccttccctctccccaccctccccccccctcctccccccccccgcccctctccctccccctccctctctctccccctcccctccccctccccctccccccctctcccttcccttctctt

SEQ ID NO: 177685 - DNA, 464 bp, Zea mays
  unsure (1)..(464): unsure at all n locations
  Clone ID: MRT4577_93638C.1
ggcagccacaaggcaggcagcaattaggggaacacccaaacttctgattcctaaaaagggtacaaaggggggctaatggcaccgggcataggggatccagggggttcacaaaggaccaaggggggggggggggtaacaacattgaaaacaatcaaccagaatcatgggactccaatttgggtggtacaaaaaatttacgccgggaaggaataaaggaggttccttggggccaaaactccaccctaaaagagggttcaataatccttccttgggggaaaagagggcccttttggtcctccccaggggatttaattggccatgccaaaactactagggcaggcagggtgcccattgggaggggttnccattggccgnattggaatggaaggtggctgataatattggtgaaggaaaattgggtggttatgaagaggacgggcattttggtgaggaaaaatttgggg

SEQ ID NO: 177686 - DNA, 440 bp, Zea mays
  Clone ID: MRT4577_93639C.1
ctcacgcgtccgaccactcgtgcgaacgaacttaaacgagatgacataagaaatgctctcttggtaacgaatgcagggtgttataccacatatattcaacttacgcttgatcctttggtgaaggcacaactgatcaagctaaccagcattattattgatgcaaaatctggagtcactggtgcaagacgtggcgctaaggaagcaaatatttacactgacatcgctgatggtattcatgcttatgggataacaagccatcggtatgtgcctgacattgaccaaggaattacagatgctgctgaatcaaacgctactatcagctttactccacatttgatgtgtctgaaacgcgggatgctatctaatgtgtatgatgaactgggatctggagcgaactgcacagatttgtatgaccagctaactgctactcacgagaatga

SEQ ID NO: 177687 - DNA, 1309 bp, Zea mays
  unsure (1)..(1309): unsure at all n locations
  Clone ID: MRT4577_9363C.1
aaatgaaatgttgataaggtagtttgtctcagaaaggatagcaatggcatcttacatggactaacagctagatgctaatttacatacagtagatctnnnnnnnnnnnnnnnnnnnnnntggtgcttcctgatgcttcattagtcctctcgtctcagaactaacagtctcggaccccatccatggcttaaatttcctaaacaatggccatcgccaggcaggaagtaatatgattccatgcataggtcgagagctattgatgtcatatcacaataaacatgatgttcataaaactgatatctttgctgattagagtacttgctcagttgctgctgtcttgcgggccttcggccttgctataatgtgcaaatnnnnncacagaggccttggtgctctagtctccatgtcgaatcctcgcacacagacaaatcccctccagaagcattgttgtatttcttctgttcttagacctttgaatatggtgggtactgaagtcccgnnnnngaccatgcgcctttgcaagttccatagcatctccctttccacatggattgggttgtggctagatctgtggtcagcaaatacctcattgacttgaaagtaagtgccattaagtgggaaactacccctcatagctgttcgacaaggaaccagaattgtgcctctgacatatctagattggttttctttctctgcagtacaattgtggcacatttcattattgcataaatcgcctcccatttgagggtcacagcatggttttggtgtcttagttatttcctttattccatctggtgtccatatggccaataagtatggggtaggatcatcatgttcccgttggtcaagtcctagctgttgtaaaagtggatgtgcatctggaagctcatacacatagtgttctgttcgaagcctaagcacattctttagtttcggtacaggaatcgaagctgcttcagtgctaatagcaaccaatgcttttgcaatatcatcagactggagttcgttattgctttctttaatgcaattctccaagttttgtgcaaaagcttccatgttaagctttattgttgggatttcaccatcttcatnnnnntcttcaatatcattttccatggtttctggaggtctttcctctcttggacttgcaggctcctcgattattggctctgaattcttaggaagaaactcccttgaatggatactcccctcaaggcgaggtaggtgagtcgannnnnnnnnnnnnnnnnnnatttggctgtcttttggtacaaaagacctttccaaatgtaatcatctgataatgcagct

SEQ ID NO: 177688 - DNA, 458 bp, Zea mays
  Clone ID: MRT4577_93640C.1
ttacctacgatgtggagatattgattctgctgttaagatgtttgaagagtattcaagctcgaggtccccacccgctgagttgtatgcggtgagttacacctaatttacaacagatctgctcatcaaggaactggcaaaacttaaccaggcttgtctactgccaaatactgtgaaaatgtgctaagtgagctagtaaattaaaaaatgagttaacaagcaagaactgggctgtttggtttgctgcctaaggcgccacaacgtgcctaacttttctgcctaagtttagttcctcaattcgagcgactaagcttaggcacattgtggcaccttaggtaggaaaccaaacagacctaattctgccaaccaaaaagaaaccagatgtacaagtgttgctgcatcaagtgttgctgcatacctttgcctgaagtatgcatcaatgaaatgcagacacttgctga

SEQ ID NO: 177689 - DNA, 1800 bp, Zea mays
  unsure (1)..(1800): unsure at all n locations
  Clone ID: MRT4577_93641C.1
catagtgctaacagaacccgacgggattcaggttgacgacgtgacggcggaacccccttcgacccctgctccacggggagacgtggagatgatgaccgaggacgagaaggagaaggccagattgtttctgcctgatttgaggcgaagccccacttctagttcgcggggtccggctgtggaggagatgacttcgaatgaatctgttagcagtaatagcatctcanactttaaatggggtgcaaccaataggcggtctcggacgcagtttagaggacaaggagacactgagatttcggctccagccttaattggaagctcagacaaagggatttctggcctctctgctggcacctcanaggagaagaaaggcaccgaagaaactcgtagtgcacagaacacaggagatttagggcttattagttcttcatcaagtccagtaacaagcgcacaacggccactcccaagctccagcgtaggctcgaactcaagagaatcaaaaaagagggataccgctttgcatccactgattttcaaggaagctggccttccagataatactttgttgacttacaagttgaagaacggagaggcactactgcaagggtataagcagggagcaggtattgtctgcaattgttgcaatcaagaggtttccccttcggaatttgaaaaacacgctggcatggggaaaagacgacaaccgtatcaaaacatttatacatcacaaggattaacactccatgatgtagctctgcaactgcatcatttgaatttgaatttcaaatggatttagcaatgctagtgtttccagcttcagtgactacccaaaccttacttcttcaggttgtggcaaagaaccttctgtcagtggacctattgtccccctgaaacggactttacaagaaagagtggtccaaacagagagttgctatttctgtgggtatggccacacagagcttggaaaaattgatccaaacatgattgtcttctgtaaccagtgtgagagaccatgccacgtgaaatgttacaatagtagagttgtaaaaaagaaggtgcctctggaaattttgaaagactacttgtgttttcacttcttgtgctgccaagaatgtcagtcacttcgtgtccgtctagaaggaatggagaagtgtgaagagattgccttccttggacggataagatccaatatttgttggcggcttttaagtagcgctgacgcaagtagggatgttaaactctacttgtctcaggtcatcgacatcttcaaagatgcatttttggaatctactgatgcgcacagtgacatctcagatatggtttatggaaaaaatagagaaggagagaaggattttcgaggaatgtattgtgtagtgttaactgcaagtacgcatgttgtgtctgctgcgattctgaaagtgcgcgtggaacatgctgcagaactggtccttattgctactcgtagcgagtgcagaaaaaagggctacttcagacttctcctagagtcaatcgagacaaatttgagagcctgtaatgtaagccttcttatggcacctgttgaccctgaaatggcacaaatctggtcagataaactcgggttcaccattttatcagccgatgagaagaagtccatgctggagtcgcaccctttggtgatgttcaagaacctagtcttggtgcagaaaccacttgcttgagccaatttaattaatgtttgattatactactctttccatcctgaaatataattcgttttaggctaaacatacattcattatttaaattatacattcatttatttct

SEQ ID NO: 177690 - DNA, 234 bp, Zea mays
  Clone ID: MRT4577_93642C.1
cgggggacatgaaagcccaaaatgctctcaccgatgcgcatggaaccctggtttaccgatgacaagattctcatcactaacgtgtgcctctctcagctgtataatctaagcgaccttgattactcgaaacagaagatctaatatgcagaaactcactcacatctataggcactagcaggagcacatgtctctgaactgtgcattcaacctgggcagtgtgacaagaattgcccc

SEQ ID NO: 177691 - DNA, 421 bp, Zea mays
  Clone ID: MRT4577_93643C.1
gctgcaaaactgcatagcttacatgcttatatatatctgtgtatctgaatatgatgagtatgcgccactaacaaaaaacaagcactctgcttcaaccattacgcacatgctgggattactgactacggttccaccggcgcgcataaaaagaagactacagaacagagcttatttcttcttgcgacaaaagcggctgaaatttgaatttcttttcccgctgaacactgtgagcgcctttctcactggaggcttcaatggggcctccttatcaccaccatgcaaaaatatatcaaccactcccaaaaaaccatcatccttgattgacttcttcaattaacgattaagaaccttctgaggaagatcatcctcacgaacgacggagttcttagaaattgcatgcatctcaccttgaagcattcga

SEQ ID NO: 177692 - DNA, 1452 bp, Zea mays
  unsure (1)..(1452): unsure at all n locations
  Clone ID: MRT4577_93644C.1
gcgttgtcggccgcctgcttttggcatctcacggtcacgggcctcctaccctccctcgcgcggggaccggtccagtcgccgacttgttactgtagcgacggaggaacgactgggcggccgtcgtggtgggctccaccgcggtctggttcgtcttcgatcgtgtgggatacagcttcctctccgtcctcttgaaagctagcagagcaagcaagccagccactttacctagctagtgttccggctgattccactggcgacgattcgagaaccttgtcctgtgtccgccactggtccgcgctgcagtttgagaagcacgtgggggcggagtcgaagaaccagaacggtaacatcctcctcaccaacgacaagttgctctacgacctgttccacgagctcagaaattggcccccttgtgcggaggagtttcgggcgaccgccggggtactcatgactgtgcctgccaccgaagcctcatctgcgccgcaggggcagcaagcaggcgcgcccgctagctgggaacccaacggggttcaggttgacggcgtgacggtggatcccccttcgcctggtacggggagccatggtgatgctgaccgaggaggagaaagccagcttgtttctgcttggtttgaagcaaagcagccacgtctgagttggacactatatgcggcattgaagggcctgctgcggaacagatcaaagatgaagcaggtggtgaccatgtgatgcacgatgctctagagtgacagaaacagagtatcagctagacagaccttgatgttagaggactgctgtccactggacttcttgaagtcaggggacctacaagaagttcgcggggtccggctgtggaggagatgacttcgaatgaaatctgttagcagtaatagcatctcaaactttaaatggggtgcaaccaataggcggtctcggacgcagtttagaggacaaggagacactgagatttcggctccagccttaattggaagctcagacaaagggatttctggcctctctgctggcacctcaaaggagaagaaaggcactgaagaaactcgtagtgcacagaacacaggaggtcctctcagtctcaacatcatcgatggtgttacgtcaggttctccagtacctagtgcagtaacccctaactactcaaaacatgattccacagatttagggcttattagttcttcatcaagtccagtaacaagcgcacaacggccactcccaagctccagcgtaggctcaaactcaagagaatcaaaaaagagggataccgctttgcatccactgattttcaaggaagctggccttccagaaatactntgttgacttacaagttgaagaacggagaggcactactgcaagggtataagcagggagcaggtattgtctgcaattgttgcatcaaagaagtttcccctttcgaatttgaaaaaacgctggcatggg

SEQ ID NO: 177693 - DNA, 729 bp, Zea mays
  unsure (1)..(729): unsure at all n locations
  Clone ID: MRT4577_93645C.1
ttttttttttttttttcgacaaggaagtgaattgactattacgagctactgtactagcccagtgactaccatcgccacatgtcctattgacactgagactacccaaaatccgataagttacgcaaggaaaaggttacaaaaagaaaagatccacgcaggcgaaaactttgctgtctctctcctaaccatactatgatttaccattacttagccaagctagctgaggtggggaagaaaagtgcattgttgagacagctcacaacagcgtcaacgctaccctgagcaacgctcaagcaattctccgccgccccttctccgaatggtccaagagcactgttgcaggcaccaaggttcaaggcaagttgaacggtattctggcctgccaggctggtacaagccgctggaagcgccgagatacacgtgccagaaagggcattgttaagacaattggtgacaaccgttccggatgtgaagagaccgacgccattggtaaagcaattcgacacggtgcctgtgttgtaattaccgagtgctgttctacaagcaggagcagatatagcaatagcgacggaaccagtcaaagtgctaaggaatgtgcaatcttcaggcattgtgaaacagactgcctgaggggttggcgtangcgtaggcgtaggcgtgggcgtagtcgcaggctcatcgcagaatggaacgccagtaacggtacttgagccagacgcactcgtgccg

SEQ ID NO: 177694 - DNA, 366 bp, Zea mays
  Clone ID: MRT4577_93646C.1
attcggctcgagggaaaaactgcatctgagattctgccgtgccatcacagattgacacacgagagatgggtctgatgagacgaattggagagagctgcagctctgttcctgcaaagcatctgcttatggtgtttgttctctgagaggttggcacaagctacgccatgtaaccctggagggctgggcacgtgctgccgtttgttgggaggctatctctgctcttgctttgatgtctttgccgaatttgagtccgggtgacctgtccaacgagggccgtgagagcttgaagggtcttacaaaattgggcgctctgagaatagggctcaaccaagttacagatgcgtgccaaagagactggcaagattt

SEQ ID NO: 177695 - DNA, 298 bp, Zea mays
  unsure (1)..(298): unsure at all n locations
  Clone ID: MRT4577_93647C.1
aggttttatggagactttattccgtgggccggggggaaaaacaaattattggggccaaaaaatttnattgggggttaaaaatgtctatccccctacttattttattttaaaagtgccatattctaaatttacctcctctttagaagatttttaggacacaatgaatacaacaactgcgttgccatgttttgtacacccatgatggtagcaagctgaatataattactgctttttctgctcgctcacaaactttatagtatttgtatatacgacggggggtggagctgtctaacatcac

SEQ ID NO: 177696 - DNA, 483 bp, Zea mays
  Clone ID: MRT4577_93648C.1
atttcataggtgccgatcaaaaagacagagatagtgcatactcgatcatgaagggagataagaaagaagtgaccgtcgatccgctgaccatactggtggaactgcaactcatgccacctccaccgcatgcgcatggcgcgcctcgctctccgcacgccaggcgcgccgcatggatccctcgacactagcaccaaggcgaccacgctgactaccactctgcgctacacgtgaacagacatgcaaagacattggatgtctcactcctgctagttcctgtaactatagtgaacgaatatcctacatcacatttactcctggtgcttgaggccattccgcgaaaacacgaatcatacatggatgcggcacacgatgaccaccctccctctcgggatctactattcaactgatgcatgtaacacggcatacatgcatgctttatgcatataaaatgtctactatcaattagccacgctagagaaccgt

SEQ ID NO: 177697 - DNA, 976 bp, Zea mays
  Clone ID: MRT4577_93649C.1
ggccgcttttttttttttttttttcgtcaaacagttcttgctaccaagaaaacaagactttcagctgccaaatgtagatgctctctgggagtttcaggcatctgtttctgaattctgaagagtaataatgggcaagaagagcagtgcgatagccagccgataggccgtgcccagctccgcgagattctatccctccctctttcgctctgcacagcccaacccgtgagacgagcgacgcatcacacacggacacggatgtgaaggcggtgcgtgcacatgacatgctgcatgcatgccgcatgcgtgtgtgctgctgtgcttaccagcagaaaggcgaggggctgcgttggctcagcaccagcacggacgcctccagcttcttcacctggctgaggatggtcggcagcttgggcccctggatcacaagcgcctccacctcgacctcaggcttgcaggccttgcaaagcgcgccgagggagttggcgagcgcggaggcgtcctccgcagcaccgcggctgctgtggccgctctccggcggcaggacgtggagcagggtgaggaagtcgcccttgttggccacgtgggtgagcgcccacaacatggcgtgcttggcgccggagctctggtccaccaccaccattacccgcttccgccccggcgcagcctcctccgccctgcagaacccgccgccgcggcggcggtgtccccgcgccctggtcttcttccgcgacccgcgcctgctgccgctgccggtgacgccgccgcactcccactctcgctgcagcagatggtgcggcgcgctgccgccgtcgctcgaactcagctgccgcaggaagtgctcgctgctgcccccgctgctccccatcggtccactcctccactcccgcagctcggtgtgcgtgcgcgtggctgcgcgctgtggtggtgtcgagtgctgggcttgggcgcttggctttggtgcgcgtgtcccggccgg

SEQ ID NO: 177698 - DNA, 1592 bp, Zea mays
  Clone ID: MRT4577_9364C.1
cgggcgggctcccccctcctcgtttttttattacttttgttaaccaaatgaaatgttgataaggtagtttgtctcagaaaggatagcaatggcatcttacatggactaacagctagatgataatttacatacagtagatctgaaacaaaaaagtgaaaattattggtgcttcctgatgcttcattagtcctctcgtctcagaactaacagtctcggaccccatccatggcttaaattccctaaacaatggccatcgccaggcaggaagtaatatgattccatgcacaggtcgagagctattgatgtcatatcacaataaacatgatgttcataaaactgatatctttgctgattagagtacttgctcagttgctgctgtcttgcgggccttcggccttgctataatgtgcaaatgggggcacagaggccttggtgctctagtctccatgtcgaatcctcgcacacagacaaatcccctccagaagcattgttgtatttcttctgttcttaaacctttgaatatggtgggtactgaagtcccgaaaaagaccatgcgcctttgcaagttccatagcatctccctttccacatggattgggttgtggctagatctgtggtcagcaaatacctcattgacttgaaagtaagtgccattaagtgggaaactacccctcatagctgttcgacaaggaaccagaattgtgcctctgacatatctagattggttttctttctctgcagtacaattgtggcacatttcattattgcataaatcgcctcccatttgagggtcacagcatggttttggtgtcttagttatttcctttattccatctggtgtccatatggccaataagtatggggtaggatcatcatgttcccgttggtcaagtcctagctgttgtaaaagtggatgtgcatctggaagctcatacacatagtgttctgttcgaagcctaagcacattctttagtttcggtacaggaatcgaagctgcttcagtgctaatagcaaccaatgcttttgcaatatcatcagactggagttcgttattgctttctttaatgcaattctccaagttttgtgcaaaagcttccatgttaagctttattgttgggatttcaccatcttcataaaaatcttcaatatcattttccatggtttctggaggtctttcctctcttggacttgcaggctcctcgattattggctctgagttcttaggaagaaactcccttgaatggatactcccctcaaggcgaggtaggtgagtcgaattcatagcatgcatgctgctattctggaaagcaaatggattgctcaacttcactaagctttcctcctggggagcaggaagtgcaagccttgcacttgcaaatgcacttgcaaaatgcttgcactcactcctcattgggcatgcattgcaatttggctgtcttttggtacaaaagacctttccaaatgtaatcatctgataatgcagctcatacagtgtctgctgatcgagtttacaaaggcgaggccaaagatacttttgtatagtttccaagataggatatagctccaagagatgtagctgtactcgaccgaat

SEQ ID NO: 177699 - DNA, 1265 bp, Zea mays
  Clone ID: MRT4577_93650C.1
aacttactcacggtggaggcaacgataagctgaattcggcacagtagtatcttcaaggcttcagcgccacagcagccagctggaccagcaggctccgctgcactgcacggccaatttccgatatcatggcgagagcttgcaaccacgcgctgagactgctgcccaattccatcgccacgcagctggcatgcagcggaggcagcaccagatgcagaaacctcagcgtccacgcgcagctttccacccaagacgatgcttacacgaccgagccgccactgaagaaagcgcaagtcacacagagcctccggaggacccgccggagggcacccggcggcgcgcggcagagcctgatctccgtcgggacgtcgtgcggcggaggtgatcagtggagcagcgacatcgcactgacgttgcggcagctgcgactagacgacctggtcgaagacgggcagagggacgctgatgtgctcgtgcaccttcttgtccagcagcatactcagtttgggatgtcgatcaaagggcgagtcctgacatccttcagaaagatatgcgattcctgctccttgccctactgcacaaacatcgatgagcacttcaatctcacggtgctgtcttcaaccaggcgagaccagagtggactgcttgatctcgtttccacttctaaaccggtcatctatgtcagaccaggagacgaagtcgatctcgactcggtaatccaagagaccgtacgattaactgcgtccacgaagagttcatgttcggagacctgcgagaagtctacagttgtatggcaatatggtggtagccagaagaagaagacttccagccaaaggtggtcaaaacttcttgatctaaagaaaaccctggataaagcgcctaagtgaattacttagtatgcatcagtcaactgccaatgctgcatgcagagcaagagaatagtgctgtatcatgatgctggaatggaagtggcgacaacttgaacttgttcaaccaagatggaaggttggtggtttgtaactcattggctgttggctatccttttcttttgaacagaagagagaggattgaccatcttatctgaatggtatatacaatgcgactccatgcccagggactggtcatgttgagaacctagatacaggatcatacattataagcacatcatcagagaataaatgtgtgtgtgaacataactactatttgactgtttgtataaagcatttcatctttttttaaagttttaatataaaacatttcttgttggc

SEQ ID NO: 177700 - DNA, 149 bp, Zea mays
  Clone ID: MRT4577_93651C.1
cccacgcttacactaacgcatgaactcctacctaaatcaaaggctcctggagggggtgctttctttcgtttcatcaaaaatgcaaacatacctttgcttgtgctccaatgtcaccaaataaacttttaatgttttattcttgtataaag

SEQ ID NO: 177701 - DNA, 1473 bp, Zea mays
  unsure (1)..(1473): unsure at all n locations
  Clone ID: MRT4577_93652C.1
actaagcacacgctacagtatgatctgatcctgcaggctcgggtcttcacgctgaaagggagccgtatcaccctcggcatcgcacgacgtcttcagcaaagcccgacccagcctggggcggtgctgcggtccatggactcctccgggaatccggcccgagcaggcggctcaaccggttacccctggggcctcggtcaaccggcttccaagggcgccagcccgacccgaggcctcgactgatcgacttcggcgctcgatccaacgacggacaacacggttaggccccggccgaccaggttcccattttcgagccaactccgcctctgttcatactgatattgctacccctgtcctgagtccaccgaaagacggccgatgggtctcttcaactaacctagaggagccccagacaacaaggcccaacgggccgagggattcctacacctccgggatacggatacctcacccgtcacgcttgacatggtggcaactcatgcttgataaagcggctcagatagtcgacagacgagtcttagtgctcgaaatgaagaaaaaacacggccccatgccgaaattactacatgttcaggccccgacagccacaatgaacaaaagaccggcacaaaaggtgccaatacaaatggaaccccggttccacctccgcaggtacgaacaaccccacacgattggggggcctgcggagcaacagaaggccgactggtggctcgccgtcgcccgctccggcagcagcgacaacgacccccgctccgggtggctgaactgcagcagcgatggcctcagggcggacgccgctgcaaccttgccctcgcccacgccgcgctcgaagggcgaggacaagtacaagagccggaggcccgagcgtggatggtggncggtgatcccgtcagcgacggggacttctcgagccgcatccacctcggcaccaacgaccggagccgtcagcccatcggcagatccccactcaaatcctcccggatgagtggggcaccgacctccgcgcgaaggcgccataccggtgcaaacaggaaccccagaacacgaacgccgccctagaagcgtgcggcatcttgggctcctccgtcacacggcgcggcgccccttccgaggagggccaccgggagccagcgacgagctcgacacgctgggctgacgaccccgcgtcgacagccccgcgttcgaagtccgacccacctgcagggcagcgagcgcctctccctcgaacgccaaggggagggtaacacgaacccgcggagtagagctccggctcagcctggcctccaccccagcaggatgagaacatcctgaagctaagggtgggccaagatcgcagcccggcttgcttctccccacccagggctggtggtcgccgtctcgggtgaccgccggtgaaggggtgcagtcgcgctgcctccacttttgcccagaccagcggggaaaggggcgggcggccat

SEQ ID NO: 177702 - DNA, 191 bp, Zea mays
  Clone ID: MRT4577_93653C.1
ggaagcacaacgtaaacagccataattattctcaataacccgggagcaatgcagggggaattaacaactcttacaacatcaggggttgtgaaaccacatcaatactttcaggaacaggacaccaccataacacggatgggggagggggcgaactcacgggcgagatcacgggggataagggggcaggcaca

SEQ ID NO: 177703 - DNA, 1034 bp, Zea mays
  Clone ID: MRT4577_93654C.1
gcacgagcccacaccggcgaccaccagaccacccaaatcagttgcccttgcccacacggccacacgcctctcctctccttttctccttcccccttcaggctccccgatccgacgaccccagcggcggcgatgggcggcaaggacctgacagaggagcagatcgcctcgatgcgggaggccttcacgctgttcgacacggacggggacggccgcatcgctcccacggagctgggcgtcctcatgcgctccctcggcgggaacccaacccaggcgcagctccgggacatcgccgcgcaggagaagctcacggcgcccttcgacttcccgcgcttcctcggcctcatgcgcgcccacctcaagcccgagcccttcgaccgcccgctccgcgacgccttccgcgtcctcgacaaggacggctccggcaccgtcgccgtcgccgacctccgccacgtcctcacctccatcggcgagaagctcgaggcccacgagttcgacgagtggatccgcgaggtcgacgtcgcgcccgacggcaccatccgctacgacgacttcatccgccgcatcgtcgccaaatgatcccgtcccttctccctcgagtctccgattccgccgatccaccctcgcgcgctcttcgtctgtaataacttcgtcttccatccgccgtgatttcattttgtttcccttctatggctggctcatttgaattcaatctggcctcctcttcgttccgagactgcaacctagggtctggataaacacataatggttggtgtgtgagtgtgtgtgattatcgcccaaacaatggatcgattaattaatggatctggctagtgatgttgcttttgcttagctacctgtaatgtactactattactactgcaatgtaaagtgtggatctgcttcctcttcactgcttatggcttgccttatcaagaatcacttctatgacctgcactgggttatgtattcatgatgatctagcgctgcttttgtttggatcatagcataccttatgtcttggcctgttggtcatc

SEQ ID NO: 177704 - DNA, 1070 bp, Zea mays
  Clone ID: MRT4577_93655C.1
tgggtacctcgaggccggccgggattaaatatctcggaggagaaaaacttacgaggattcccctagtaacggcgggcggaccgagaccacccaaagcagttgcccttgcccacacggccacacgcctctcctctccttttctccttcccccttcaggctccccgatccgacgaccccagcggcggcgatgggcggcaaggacctgacagaggagcagatcgcctcgatgcgggaggccttcacgctgttcgacacggacggggacggccgcatcgctcccacggagctgggcgtcctcatgcgctccctcggcgggaacccaacccaggcgcagctccgggacatcgccgcgcaggagaagctcacggcgcccttcgacttcccgcgcttcctcggcctcatgcgcgcccacctcaggcccgagcccttcgaccgcccgctccgcgacgccttccgcgtcctcgacaaggacggctccggcaccgtcgccgtcgccgacctccgccacgtcctcacgtccatcggagagaagctcgaggtgcacgagttcgacgagtggatccgcgaggtcgacgtcgcgcccgacggcaccatccgctacgacgacttcatccgccgcatcgtcgccaaatgatcccgtcccctccgagtctccattccgccgatccaccctcgcgcgctcttcgtctgtaataacttcgtctcccatccccgtgatttcattttgtttcccttctatggctggctcatttgaattcaatctggcctcctcttcgttccgagactgctcggataaaacggataatggttgctgtgtgattatcaaccaatcaacgattaattattagtagatctggctgatggtgcttttgcttagctacctgtaatgtaaagtgtgggtctgcctcctttgtcactgattttggcttgcctggtaacgaatctctgctatggtctgcactggcttatgtattcatgctgatctagtgctacttttgtttgggtcataggttgtattggaatctggaaatttcattgacctgctttaggatttctaatgtttgttgcct

SEQ ID NO: 177705 - DNA, 1308 bp, Zea mays
  unsure (1)..(1308): unsure at all n locations
  Clone ID: MRT4577_93656C.1
gaccccactagattgaaacccgaacggccggtccgaccggcccggcagccagccgcccaccaccacaccacccatagcagccagtcgcccgcacgactctttcccggctacccacaccgcgcgagatctccgatccccgcccaaatcccacgacgccggcggcggccatgggcggcaaggacctgacggaggaccagatcgcctcgatgcgggaggccttctcgctgttcgacacggacggggacggccgcatcgcgccctcggagctgggcgtcctcatgcgctccctcggcgggaaccccacgcaggcgcagctccgggacatcgcggcgcaggagaagctcaccgcacccttcgacttcccgcgctttctcgacctcatgcgcgcccacctcaagcccgagcccttcgaccgcccgctccgcgacgccttccgcgtcctcgacaaggacggctccggcaccgtcgccgtcgccgacctccgccacgtcctcacctccatcggcgagaagctcgaggcccacgagttcgacgagtggatccgcgaggtcgacgtcgcgcccgacggcaccatccgctacgacgacttcatcctccgcatcgtcgccaaatgatcccgtcccttctccctcgagtctccgattcgccgatccaccacccccgcgctcttcgtctgtaatgacttcgtctcccgtccgccgtgatttcattttgtttacccgctagctcatttgaattcagtttggcctcttcgttccgggactgcaacctagggtctggataaacacataatggttggtgtgtgagtgtgtgtgattatcgcccaaacaatggatcgattaattaatggatctggctagtgatgttgcttttgcttagctacctgtaatgtactactattactactgcaatgtaaagtgtggatctgcttcctcttcaaaaaaaaaaaaaaaaaaagcggccctggaaatgtcattggcctgctgtagaacttttgggagcggaagggaangagcgggcggtacctgtgccgctgtgcgttgccggagaaggacacgacgaagacctggacatctggaggcgacacaggtagtataccgctagatatatagggagagagcacgcaagcggagaaagaagcccagtcggagcagctccaaaccaagaggcaccgcaccaggcgtcagtccgagaagggtgagagaatataagtgtcttcccagccctggacccgccaaagcgacacaacaccaccaccaactttgtagcatatgccgactgctgtcatgctacgtgccttagttgtcc

SEQ ID NO: 177706 - DNA, 362 bp, Zea mays
  Clone ID: MRT4577_93657C.1
cgggatctcgatctccggggagttggtgtgttcgctcccttctcgccctccaacggctaggtagggctgacggcgccggcgccagcaaacgccaggtgctgagggcttgatcagcgtcttagacggtgacaagcacgtaccatcaccaagcgatcatgtgaggaaagaggtgcgactggcaggacgatgtgattgataaccgctacacagggtaccatggagtccctctagttgaggatcccacaggccatcctgaagtcctcgaacatagggatcgcacgggctactctgacattcatcgggtgcaccatcgtgggagctaccctgagacccatctgcttgaggaacctaggggctaccct

SEQ ID NO: 177707 - DNA, 383 bp, Zea mays
  Clone ID: MRT4577_93658C.1
acggctatttaatatactagctagaacggggagggtactggggtgggttctctggtggtgccatgagcgacgctgcagaccatcccgggcttaggagccatttagtaggacccaacaatgagagtttctcacggtaccacctgccgtcttcttgtccacagagcagcaagcgaaggtgtaacctgagatttactccacgatctggaagagtaggcagcctaaatggaggccaaatgttgagcccgtctgcaataccacaaagggactgggttccctctgacttcaccttgggtgccgacagttcagcgcaccaaattgaaggtgcttgtaatgaaaatggaaagggggaaagcaactgggattacttctgccacaatgattcc

SEQ ID NO: 177708 - DNA, 833 bp, Zea mays
  Clone ID: MRT4577_93659C.1
gatatccgctggccttagcaagctcagttatctaatttttcttgatatgagcaagaacaagttgtcagggcagataccagatgatcttggcaatcttgttcagctgcagaggcttcttgatctgagcagtaactcattgtcaggtgcgatcccctcgaatcttcagaagctgacgaatttgcagaaactgaacctgtcacacaacgatctcagtggttcaataccagcagggttttctcgcatgtcaagccttgatacagttgatttctcttacaatcgactcaccggtaagataccatcagggaatgctttccagaacacatcagctgatgcctacattgggaatttggggctctgtggtaatgtgcaaggtataacttcttgtgacctcggttctggcggtgcatcttcagggcatcgcaagagaatagtcattgcaacagttgtgtcagttgttggggttgtgttacttgcagcccttgctgcttgcctcatactgatatgcagaaggaggcctcgtgagaagaaagtgctggaggctaacaccaatgatacttttgagtccatgatctgggaaaaggagggaaagttcacattctttgatatcgtgaatgccacagacaacttcaacgaaaccttctgcattggtaaaggagggttcggggccgtgtacagggccgagcttgcaagtgggcaggttgtggccgtgaagcgattccatgtcgccgagacaggcgacatatcagagattagcaaaaagagctttgagaatgagataaaggcgctgactgaggtccgccaccggaatatcgtcaagctccatggcttctgca

SEQ ID NO: 177709 - DNA, 313 bp, Zea mays
  unsure (1)..(313): unsure at all n locations
  Clone ID: MRT4577_9365C.1
atgacaatgtcgcaggaacgcggcctaagcgtttttttttcttttgttctatttttttatttactgtaccagcccatgagagacatcaagtggcctttcgatttactaaaaccaaaactttattaggaacatgcatattttataggtcataccacacatgaaagtgggggtgcgagttagagcatacattacatatatgtgatggtatagaagaagaatataggaaaggtncataataaagttaaggatttaatgaatgtattggccgctggaagtctataagggttggagcggaagatgggaagatggtaat

SEQ ID NO: 177710 - DNA, 460 bp, Zea mays
  Clone ID: MRT4577_93660C.1
actaggaagcacgcacccggaggagggtctcgatgaggccattgttgacaggacgtatagtcctacgtgatgaatacgaaggagcgctcgcacatcctctatgaggaggttgtggggtacaaggtccagaccaagaagatctggcgtgttggacctgacaccactgaccctaacatggttggcgatatattcactggagagcacaatctcaatgaactcaatgattctagagtgtctgaactccagcgggcatcaaatgacggtgcactggctgacgacaacatgcgaataatttgctttgaggacagcaacgttgtcattgatgctcatgctatgcacaggggtggtgatcacgtcattgccactgtcaagagggtcatctatgcttctcagctcacggccaacccaaggctgctggagccagactacctggtggagatccaggctccagaaaatgcac

SEQ ID NO: 177711 - DNA, 1660 bp, Zea mays
  Clone ID: MRT4577_93661C.1
cctcgaggccggccggggagtacctcgacgaggcaccgcatgtccactcagatctgaaatgtcaatggaatccgttgccgttgccgtcgtggcggtgccgttcccggcgcagggccacctcaacggcatgctgcacttgtctctgctactcgcgtcccgagggctttccgtgcactacgcggcgccggggccgcacgtccgccaggcgcgcgcgcgcgtgcacggctggggcgacgacgcccaccgccgcatcgagttccacgagctcgaggtccccgcgtacgccaccccgccgccggacccggtcgcgccctcgccgttcccgacccacctcatccccatgagcgaggccttcctcgcgggcgcgcgcgccccagtcgccagcctcatcgggagggtctccgcgcgccaccgccgcgtggtggtcctgtacgatcgcctcagctccttcgccgcccccgaggcggcgcggatccccaacggcgaagcgttctgcctgcagtgcgtggccgcgtgcttcgacgccgcgtggacggacgccgggcagcggctcctgcgcaagcacggcctcgacgccccgcaccccggcgcctgcatgccgagggagttcgtggagtacattgtcaggacgcaggaggacagccggagtccggcgttcgctggggtagtggcgaacacgtgccgcgcgatcgagagcgagttcatcgacgtggtggccggggaccctgagaaccgaggaaagagagtcttcgcagtcgggccgatgaatccgctgcttaacgtgaccgcgccgacagcgggacagagtgcacggcacgagtgcttggactggctcgacaagcaaccgccggcgtcggtgctgtacgtgtcgttcggcacgacgtcgtcgctgcgggcggagcagatcgcggaactcgccgcggcgctgcgcgacagcaaacagcggttcgtctgggttctgcgcgacgctgatcgcggtgtggtacacgaggaggaagccgtggagagtaggcacgccaggttcctatccgagttcaccgaggaaactcaaggcatcgggttggtgatcaccgggtgggcgccgcagctggagatcctggcccacggcgccacggcagcgttcatgagtcactgcggctggaactcgaccatggagagcctgagccacgggaagccgatgctcgcctggcccatgcactccgaccagccgctggtggcggagctcgtgtgcaagtgcctcaaggccgggctcctcgtaaggccatgggagcaacacagtgctgtgacacctgcggaaaccatccgcgaggtgatcgagaaggtgatggcacgcgatgaaggtttggcggtgcgggagagggccaaggagctcatggagtttattcgccgctctgtggccgagggcgggtcttcgcgcaaggaccttgacgacttcgttgcttacatagcaagatgaaatgcgtcctgtatttgactatttctactagtttcaattttgagttctcgtgatgaaaaccatattagggcaaataatataaacaatatctctgtgcaaattttttttacgtgatccgatgtagcggacaacctaagagcttagaggagatttagggctatataatagaatttataagagaaagtgtacctccaacgtttgttt

SEQ ID NO: 177712 - DNA, 397 bp, Zea mays
  Clone ID: MRT4577_93662C.1
ggcgcacagcggtgtgtttgcggtactgatctgtgggggtttcgttcttgctgctcgcttcatcttgtctggttcctatttcggtcgcgccctgtgtgttctgtatactgcagctgctgtccgtctttcatttgtgggggggccgtgactctttcttttgcgtggttgcggctccctggctgcccagggctgcgctctggtttcgctgcggccctgatgcgttcttttgcttgtttgctggttccagtcttggtcgcttctggcccctcaccttttttggtacgccgggttctgcgccaagcttacgcattgtcgcccggccagattggtaattggggccgcctcggcgggcatgattgtgcattcttgaagctctgaactggggtttcttcttcct

SEQ ID NO: 177713 - DNA, 384 bp, Zea mays
  unsure (1)..(384): unsure at all n locations
  Clone ID: MRT4577_93663C.1
cggccgctcgagcgccggccgggtagtgagnaaaannngagagaanttgtgcccaacaagcaacgaccaaccctcgccgcgccaccaccccccgccccgccccgccgcggctggactccgactccgactcctgctccgctctgctccgcaagccgccgccgatctcgcgccgcatgaggccgacgcgccctcgctactcctcctccttgtcgttgcggcgttagggctcggcatggacggcgcctcggccggcgccggcgacggcgggtcggcgtcggggggcgggaggtggnacacgggcatgtcgtcggacaacatcaagggggtggagctgatcatctcctccagcctcttcatcgttgccagatttatgatgaataagaa

SEQ ID NO: 177714 - DNA, 211 bp, Zea mays
  unsure (1)..(211): unsure at all n locations
  Clone ID: MRT4577_93664C.1
gacacgtggcgcgnatagatcggcaggntatcctcgacggatggtcgacggcggcgtgcagaacgggtgggcgctgtaggtctccctcctcacgccctacgtgcagactctgcggttctcacatgccctcacttcattcctgtggctaggtgggactattgctgagttacgggttcacccgatgctaggactgcccaccgataggtgcaca

SEQ ID NO: 177715 - DNA, 170 bp, Zea mays
  Clone ID: MRT4577_93665C.1
aattgttggacccacgagctcaataggctctagacgcggagcgctcggggttttttacacccacccaatccccctacggcgaagggagcgtggagctgatctaagcacctcgttcatgaccatgtaccgctggttctagatgaactgtggactaatgatattttcctttg

SEQ ID NO: 177716 - DNA, 601 bp, Zea mays
  Clone ID: MRT4577_93666C.1
gattcccctggtcgcctcccccccacgcccgtcgccgccagcccgaaaccctagctccctccctcgcgcgctcagatccgaccaccctccctcactcttcgcactcagatccgccctccctccctcactcttcgcgctggaaaccctagccgccgggccatggtgacagacggcaacgacgacggccgtggctaccttgacgacggcggtgcggccagcagcagaagcaccaccatgccctcccttcctccaaccctagcgattcggccatgttggcggcagccaaatccgcgccgggacaggacctgcttgtgctcgtgaggagaggcacgccatggagcagctcgtcaaggacatgtccgacccttcccttcccttcgttcttaatccaagggttatatgttctatattggagtactttgcattcaaattatttcctgtgttatattatgagtttgatgttcttaaaatatgtattctcaataatagtacaaaatacatgtctatgctcccatggatccagtaagtataagatgaactcgataatctccaattggtttccattattggttgtcccggtcctcatgagcggataatcttt

SEQ ID NO: 177717 - DNA, 2779 bp, Zea mays
  Clone ID: MRT4577_93667C.1
ggaaagcgagacgatcagcagttccccaggatgttggcatggaaagccatgcagcatgtcgcctcttatgattctgcagtgtcagaatggttgtggaagcaatcaaataaaggtagtgtttcagcaacagactgaatagttgaattcattattgtaaataggactattggatttagtggcagccttcggaaaacggtgatagcgtcgctatagtctgctattttcttagcagtggttacaacaacagctctcagaagctgctataacaccactatttacaacacagattgaatttttaagtgacatttgactgcatgcatgttattttggtactcgagcggccgggacaattagaaatagaaaaaattcttcgcagccgttctttcctgtaccctgcacctgccttttactccattcccctcggtgcgccgccgccagtccgccccgccccgccccgcccagcagacagcgcagccatgccgctccacctccacctgctgtcgtccccggccaccgctgccaagctcgcggcaggtctgcgtgcggcgcctctccgccggtgccacagcttggccccggcgccgcgccacacggatcgcgtggcccttgcgtcgtccctctcggcggtggcgcggtctgctggccccgccgtggcagcggcgcagaccaagcccagcgtttcaggaaagaaacaagtattgatatccttgtcggataaaacggatttggcttatcttggcaatggtcttcagggtttggggtattccatcgtttccactggtggaacagcatccagtctggaagcagcaggagtcagtgtaacaaaagttgaagaaatcacacacttccctgaaatgcttgatggacgagtgaaaacattgcacccaagtatacatggtggtattcttgccaggagagaccaggagcatcatttgaaggcactaaaagatcatggaattgggacatttgatgtggttgtggtgaatttgtatcccttttatgacaaagtcacctctggtaacatctcttttgaggatggcattgaaaatattgatattggtgggcccacgatgatcagagctgcagccaagaaccataaggatgttcttattgtggtggatcataatgattatcctgctttactggagtaccttaaaggaaagcgagacgatcagcagttccccaggatgttggcatggaaagccatgcagcatgtcgcctcttatgattctgcagtgtcagaatggttgtggaagcaatcaaataaaggagagatgttccccccaagctttactgtgccactggagctgaagtctacactccggtatggcgaaaatcctcatcagagtgctgcattctatgctgacaagagcctttctcttgtcggtgctggtggtattgccactgctattcaacaccatggaaaggaaatgtcttacaacaactacttggatgcggatgctgcatggaactgtgtatcggagtttgatagtcctacttgtgttgtggtgaagcacacaaatccatgtggtgttgcctcacgaaaggatattcttgaagcttacaggttagctgtaaggggagatgctgtcagtgcatttggtgggatagttgcattcaacacgactattgacgaggatcttgcgaaggaaattcgtgagttcaggagtcctacagatggtgagacgcggatgttctatgagatagtggttgctcccggctatacggagaagggtcttgaggttctcagaggcaagtccaaggcactgaggatactcgaggcgaagagaagtggaaaagggatgctttcacttaggcaggtgagtggtgggtggttagctcaggagtctgatgatctaacccctgaagagatcacctttaccacaaagtctgagaggtctccgcaagaaaacgagcttgccgatgccaaatttgcctggctttgcgcaaaacatgtcaagagcaacgcaattgtgatagccaagaacaactgcatgctgggaatgggcagtggtcagccgaacaggcgagagagcgttcgaatcgccttcaggaaggcaggagaggaggccaagggagccgcattggccagcgacgccttctttccctttgcctggaatgatgccgtcgaggaggcgtgccagaacggcatcggcatcatcgcccagccaggaggcagtaagaaggacgaggacgccgtcgcgtgctgcaacaagtatggtgtgtcgctcgtcctcaccggcgtcaggcacttcaagcattagccgtcatgccccatggctggtcatcttagcttagggagttacggaaaaaaaaacaagcttcgaaggctgcagcttgtggagctgccctgatgtttagctttctgcaaagtgcaaaactgcaaattttggtttctgtagggcgtaggctttggtgggtgagctcgtggggaaggtaatgtttctcctggagtcgaataagctgatgggtgtaccgcgagtgacaattgaacccaacctaaggacttgcaggttggtacttttatctgtcaaaatcagccgtgcgcctatgcaccaggagaatcatcgatgtgacctacaatcttcggactacaaaccattgaaaaataaaaagagaaaaggtgcctgggaaaaaaaaaaaaaaaaaaaatatgagcgttaaaaaaaaaaaaaaaaagcggcccaaaaaaaaaaaaaaaaaaaaaaaaaaaaaaaaaaaaaaaaaaaaaaagggcggccgccgactagtgagctcgtcgacccgggaattaattccg

SEQ ID NO: 177718 - DNA, 504 bp, Zea mays
  Clone ID: MRT4577_93668C.1
agcagttatgacgcatgctgcccgccgacagcagctaattcggctggaggagatcgccatgggcttctccggcggcgacccggcctgctaggaggacggggagggttgcatgtgcgctgtgcaactggcgtgagcatccatcctgcccatgacgctgcagaacgccatcgagctgcgcctactggaggtgctgcagaatagaggcccgctgactaaggcggcactgtcgcccaacgaggtggtcgcgcggatgcccggggcgaccagagagctcaggagctgcgcgggcattgcggaccgcatgcttcggctggtctgctcctacgacggcctacgatgccagatggcggaccatgacagcccgatcgagcgccgctactaaggctggccctgatccaagagaatcacccgcaactaggactgcgtgtgcaccgccagccccgcaatcatgaaccaggacacgcgcctcatggagagctggtactataaagacgacgccgtaga

SEQ ID NO: 177719 - DNA, 681 bp, Zea mays
  Clone ID: MRT4577_93669C.1
tgggaccctcgaggccggccgggccgggctttcctgtaccctgcacctgccttttactccattcccctcggtgcgccgccgccagtccgccccgccccgccccgcccagcagacagcgcagccatgccgctccacctccacctgctgtcgtccccggccaccgctgccaagctcgcggcaggtctgcgcgcggcgcttctccgccggtgccacagcttggccccggcgccgcgccacacggatcgcgtggcccttgcgtcgtccctctcggcggtggcgcggtctgctggccccgccgtggcagcggcgcagaccaagcccagcgtttcaggaaagaaacaagtattgatatcgttgtcggataaaacggacttggcttatcttggcaatggtcttcagggtttggggtattccatcgtttccactggtggaacagcatccagcctggaagcagcaggagtcagtgtaacaaaagttgaagaaatcacacatttccctgaaatgcttgatggacgagtgaaaacattgcacccaagtatacatggtggtattcttgccaggagagaccaggagcatcatttgaaggcactaaaagatcatgggaatgggacatttgatgtgggtgtgggtgaatttgtatcccttttatgaccaagtcacctctggtaacatctcttttga

SEQ ID NO: 177720 - DNA, 1411 bp, Zea mays
  Clone ID: MRT4577_9366C.1
agactcctcccgatattcctccacttcgatcagcagctgcccgcacccgcgctgatggggaagccggccgagtcgtcgtcgacgtcgtggtctgcgctgttcggtttcggttgcttcagctcttcccatgccgaccgctctggtgacggcccgggcaaggtggcctccgccggttccaggcctcccgcgccaccagcaccgctgctttcgccggatgacctatcactgtcgctggcgggatctgacgtgctggctttcacggtggaggagctccgggtggcgacgcgggacttctcgatgagcaacttcgtcggcgagggcgggttcgggcccgtgtacaagggccgcgtcgacgagcgggtcaggcccggcttgcggcagccgcaggccgtcgccgtcaagctgctcgacctcgagggctcccagggccacaaggagtggctggctgaggtcattttccttgggcagctgaggcatccgcaccttgtcaagctcatcggctactgctaccaggacgagcacaggcttctcgtgtacgagttcatggccaggggcagcttggagaagcatctcttcaaaaggcactctgcttcccttccgtggtcaacgcgaatgaggatcgccattggagccgccaaaggtttggctttcctccacgacgctgccaaacccgtcatctaccgcgacttcaagacgtccaacatcctgctggactcggactacacggcgaagctgtcggatttcgggctagcgaaggctggacctggagaagacgagacccacgtgtcgacccgagtcatgggcacgcagggctacgccgcacccgagtacatcatgacagggcatctaacgaccaagagcgacgtgtacagcttcggcgtcgtgctcctggagctgctaacggggcggaaggcgttggacaagaaccggccgccgcgagagcagagcctggtggaatgggcgcggccatgcctgcgcgacgctcgccggctggagcgcgtcatggaccggaggctgccgcgccccaccacgcccacccgagcagcccaaaaggccgccgggatagcccaccagtgcctcagtgtcagccccaaatcccggccccaaatgtcccacgttgtacaggccctggagtcgctgcttgctctagacgatgccgccgtggagccgtttgtgtacacggcgccgccggagagcagatgacctgtgtcatcttgtgtaaaaagcaagcgccggtgagtcaacaatccgaaggtgttttgcccacagtagtccactatatatatattttctattgtaaaaaacattagttcacgcgtgagacgcgtacctctgtttttctcgcccctgggaaacttggtggctgcctctatatttacactgatctaatctaggcgacagatcacacata

SEQ ID NO: 177721 - DNA, 1200 bp, Zea mays
  Clone ID: MRT4577_93670C.1
ccacgcgtccggctgtcagtgcatttggtgggatagttgcattcaacacgactattgacgaggtattcagcatgctgcatcttactaaatcactagttactggcgtaacatcattgggcacttctatttatatatgccactatatgtttaggatcttgcgaaggaaattcgtgagttcaggagtcctacagatggtgagacgcggatgttctatgagatagtggttgctcccggctatacggagaagggtcttgaggttctcagaggcaagtccaaggcactgaggatactcgaggcgaagagaagtggaaaagggatgctttcacttaggcaggtgagtggtgggtggttagctcaggagtctgatgatctaacccctgaagagatcacctttaccacaaagtctgagaggtctccgcaagaaaacgagcttgccgatgccaaatttgcctggctttgcgcaaaacatgtcaagagcaacgcaattgtgatagccaagaacaactgcatgctgggaatgggcagtggtcagccgaacaggcgagagagcgtccgaatcgcctttaggaaggcaggagaggaggccaagggagccgcattggccagcgacgccttctttccttttgcctggaatgatgctgtcgaggaggcgtgccagaacggcatcggcatcatcgcccagccaggaggcagtaagaaggacgaggacgccgttgcgtgctgcaacaagtatggtgtgtcgcttcgtcctcaccggcgtcaggcacttcaagcattagccgtcatgccccatggctggtcatcttagcttagggagttacgaaaaaaaaaaaaacaagcttcgaaggctgcagcttgtggagctgccctgatgtttagctttctgcaaagtgcaaaaactgcaaattttggtttctgtagggcgtaggctttgctgggtgagctcgtggggaaggtaatgtttctcctggagtcgaataagctgatgggtgtaccgcgagtgacaattgaacccaacctaaggactttcaggttggtacttttttctgtcacaaaatcagccgtgcgcctatgcaccaggagaatcatcgatgtgtgacctacacctcaacggccatcgatgtgacctacaatctttggactacaaaccattgaaaaataaaaagagaaaaggtgcctggtaaaaaaaaaaaaaaaaaa

SEQ ID NO: 177722 - DNA, 423 bp, Zea mays
  Clone ID: MRT4577_93671C.1
tacgtcgtcggccgtcctccaccgccctccaggtacgtcgccggccccctcctccctcctccctccgccgccacccccaaagccgccgctgccgccagctactgcctctcccgtaccgccgccgccgtcgtacgagcaggccgtagggtttcgagtttggagttctgcctcttcctactgcctctccccaaggtccccactcgcatccaaggttgtacgagcaggccgccagctactgcctctccccaagtgtatttgctctctgctgcatataaacaagatttttgaagtaggaatatcagagcatctggcaattaagttgcaacatatgaacattgatttgattggaaaggcaaattcttctattacagcagagctggattacatgtcagacctggttcatatggcctgtgtaatgcaagg

SEQ ID NO: 177723 - DNA, 620 bp, Zea mays
  Clone ID: MRT4577_93672C.1
ggaaagcgagacgatcagcagttccccaggatgttggcatggaaagccatgcagcatgtcgcctcttatgattctgcagtgtcagaatggttgtggaagcaatcaaataaaggtagtgtttcagcaacagactgaatagttgaattcattattgtaaataggactattggatttagtggcagccttcggaaaacggtgatagcgtcgctatagtctgctattttcttagcagtggttacaacaacagctctcagaagctgctataacaccactatttacaacacagattgaatttttaagtgacatttgactgcatgcatgttattttggtaggagagatgttccccccaagctttactgtgccactggagctgaagtctacactccggtatggcgaaaatcctcatcagagtgctgcattctatgctgacaagagcctttctcttgttggtgctggtggtattgccactgctattcaacaccatggaaaggaaatgtcttacaacaactacttggatgcggatgctgcatggaactgtgtatcggagtttgatagcctacttgtgttgtggggaagcacacaaatccatgtggtgttggctcacgaaaggacattcttg

SEQ ID NO: 177724 - DNA, 378 bp, Zea mays
  Clone ID: MRT4577_93673C.1
acttatcgagttgatggtcttattaggctgatgaacggattcaagactggaccgattaacttctttaaccgaggtaagttccatctgcattgtaactcttgttgctatacaatgagctacctacccaatctgtgtcatttctgatatatacattctactggacccagctaactaagttggttctcatcttcctcacttgaatatatcattctgaaacttgctgagtatatcaatgacgttatttcaattatataatcacactccttttctcttccaaagctctgcaaaactctactgattactgacgcgactacttcaactcatcagttgattcacccatatataacactgactatgacttagtacactcctgacgat

SEQ ID NO: 177725 - DNA, 262 bp, Zea mays
  Clone ID: MRT4577_93674C.1
gggccgtggaccgcacacacatacacaagcacaagcactctagcaatggcttctgaggttgtccgccctagcgacgccgagctactgcaggcacaagccgacatatggcggctcagcctctcctacctcacgcccctgtcactgaagtgcgccgtggcgcttggcatccctgcggcaatctatcgccatggcgtggctgtctcacctcgctgtatatgatcacggcgctgtctctcccctccgctaaactaacgttactccg

SEQ ID NO: 177726 - DNA, 371 bp, Zea mays
  Clone ID: MRT4577_93675C.1
ggcacaaaaaccaaatggcattggcattggcattgttgtttgcaaacagaatttaagttttgggttacagttccagacttattataactttccttccgttttttatctccaaaaaaaccccctttttggaattattaactggccccgttttttttgggatctccggtggtcggtaataattaaccaaaaaaaaacaggggcccaagaccaaaaccaaggggttccaacgggggggggcccacggcccaaacggggggggggaatgcttcccatcccctgaggacgggggccccccccacccggtttacccccaacgggaaggcccccatgcggggggcgcaattggggtttcggcacatttgttttaagtt

SEQ ID NO: 177727 - DNA, 410 bp, Zea mays
  Clone ID: MRT4577_93676C.1
ctttaggaattggcacgaggccatagatcctgactgccgctagctaggaccgcgcgcgcgtgcgtcgagtctagctagaagtcactccggttcgtaacacgcacgcaagcgcattgcctgggtgatctctcagcggcccgacgatgccccggagcagcaagtaagcttatggcgcctagccgcatccttcctgcctgagcgctgctggccaccgctacagcagcgctcccggcggcttcccgaggcagtgtggtactgaccaacacggtctaggtgcggcgtgtctctcgccgatatcttgtcgtcgcctaggtcacatgagccgcagaggaggcgccccctgtgaggatcgaagacgtggacctcagctctcatcaaggcgcggccgatgacgggggagctcgcggcgc

SEQ ID NO: 177728 - DNA, 356 bp, Zea mays
  Clone ID: MRT4577_93677C.1
aaaacaaaaaccccccggtttttattggataaagaactcagttttgggcaggaaactgcccgttcaaaaagattacaagcttaacaaaacagggggggataaaggaaaccggtcaattggttggggggggttatacaaagcaaaccccagtaatgcgttttcgcaaaacttgtcacaacaccctagaagggtctaaagatgggccaatgttatgaaaggcctaaaatattatggggcccaaacaaagaagggaaaattccatggcaaaccaaggggcaggggaccggatcaaatgctgggccacagggtaaccaatgcctttttggactccaggggggcaggcaattaggaacctt

SEQ ID NO: 177729 - DNA, 438 bp, Zea mays
  Clone ID: MRT4577_93678C.1
ggcaaccagaaaagggtattttgggggggaagggaaaaaattatgcaaattcactgggggaaagagaggggaaactaaaatttaaaaaaaacaacccctaaaactcaacaaaaaaaaacaactacggagcatttcgttttgagaaaaaaaggaaaattccggggggggaaatgaaaaatccaggtaaccaaaagattttgggggggaaaccagcaccaaaaggtttaccaccctaaggggaggaaaaccctaaaccctgttaaaaaacaaaagggggggagaactgaaaaaccattttgatacggaaaccaggaatgcaaattttggcctccctattttgggcattaaaaaagacaggcacattccctgttaaatggggggcgccgggggggccccggaaattcggggaccgggacccgaaagagaaccaactttccc

SEQ ID NO: 177730 - DNA, 595 bp, Zea mays
  unsure (1)..(595): unsure at all n locations
  Clone ID: MRT4577_93679C.1
acaggcatacaggnaaagtgaagagcctgatgtagacaagcaaaaggaaccaattctagagcatgtcacagctgcacttgtcaatcgttnatcacctaaaatttacaactcgcgatgtttcttccctctggtttctttatgatttggagggttttgttctaaaaggctatggtgagtcaattaactacaggatgggaccgccattgctcaaggatgttgtccagtcaatggaagaagcaatcatagctagagaagaaaaccgtgctgatggtacgtttgaaaaggcaaggctccgatttgcacatgcagaaactgttgttcctttcagctgccttcttggtctttttcttgaaggtccagaaattgagaagatacagagagaggaagcattggacctaccccctttgccgccacagggaagaaactggaagggcagtgttgttgcgccttttgctggtaacaatatgctggttttatatcaatgtccaagcaaaatttcggatggcagcacaatctctggaggccgaaacaactcttacttagttcaagttctacacaacgaagtcccagtttcaatgcctgggtgcggcaacaa

SEQ ID NO: 177731 - DNA, 177 bp, Zea mays
  Clone ID: MRT4577_93680C.1
ccgacgcgtccgcggacgcgtggggaataactttactaatcaaattcttattgtgatgtattcctccaaatgctgttctacttccaacaaggcaacaacaatctgatcctgactacaaacaaaacccaaataaaaacacacttaacccaataatccgatcccacagaaacttttctt

SEQ ID NO: 177732 - DNA, 1995 bp, Zea mays
  Clone ID: MRT4577_93681C.1
attgggtacctcgaggccggccgggattgcattcaaccggctcgaaccggttagcccccacacccaacccaacccaaccgcgctttctctcacctggaaagggaaggcaagtcgagattcgagaaggcaaatcgaattcgccatgggcatggctgctccgcgcgcgccgctgcctctcccccaactgctgctcctcctcgttgccgcgctcctcgccgccgctcccctccctagggcggccagggcggacgagttcgacgtccgccgccacctctccaccgtcaccaggtatgatgtggccagggagtccagtagtgtcatctccatgccgtcaatcccagacgggtgccgtgtcattcacctcaatttagtggcaagacatgggactcgcgctcctaccaagaagcgcatcaaggagctggatagattggcagttcgactggaagcccttctgaaagaggcaaatcaggtccttgatagtgattctctgaagaaaattccatcctggattaaaggctgggaatcacgctggaagggtaggactaaaggtggtgagctgattagtgaaggggaagaggagctttacaatttagctaccagaatgagggagaggtttcaagatctatttgatgacgaatatcaccctgatgtatattcaataagagcaacccaggttcctcgagcatcagctagtgcagtggcatttgggttgggactactttctgggaaaggaaagcttggacaagggaagaaccgagccttttctgttctgagtgagagtcgtgcaagtgatatttgtctgagattctttgacagctgtgagacatacaaggcatacaggaaaaggaaggagcctgatgtagacaagcaaaaggaaccaattctagagcatgtcacagctgcacttgtcaatcgttatcacctaaaatttacaactcgcgatgtttcttccctctggtttctttgtaagcaggaagcatctttgttgaatacaacaaatcaagcttgtgggctttttaatgaagctgaggttcgttttctggagtggacagatgatttggagggttttgttctaaaaggctatggtgagtcaattaactacaggatgggactgccattgctcaaggatgttgtccagtcaatggaagaagcaatcatagctagagaagaaaaccgtgctgatggtacgtttgaaaaggcaaggctccgatttgcacatgcagaaactgttgttcctttcagctgccttcttggtctttttcttgaaggtccagaaattgagaagatacagagagaggaagcattggacctaccccctttgccgccacagggaagaaactggaagggcagtgttgttgcgccttttgctggtaacaatatgctggttttatatcaatgtccaagcaaaatttcggatggcagcacaatctctggaggccgaaacaactcttacttagttcaagttctacacaacgaagtcccagtttcaatgcctgggtgcggcaacaaagatttctgtccgttcgaggagttcaaggagaaaattgtgaaaccgcacctgaagcacgactacaacatgatatgcaaggtcaaatccccagcggcaagcgaggagcctgcctcgttcgcctccagggtgtccagtttcttcctaggactcctctcgcaaaaagggtaccgcggtgtgggcgccgagggcgtcaagactgagctgtaggcgtcaagacctagcttagcacggtgccgtctcttctcaccgtctgcgagcacgatcaaggaaccagactaacccatgcactaacccgcagtgtttttgtacggagcgagtcgaatgtgtgggacaccaccacaggaggcgccagttcggttggctccagggccagacgcctctgatactgtagtagcaataacataaataataaatgtgtttcgattcggactcaaaaaaaaaaaaaaaaaaaaaaaaaaaaaaaaaaaaaaaaaaaaaaaaaaaaa

SEQ ID NO: 177733 - DNA, 391 bp, Zea mays
  Clone ID: MRT4577_93682C.1
ttgttttttcttttttttcttttttttttttttttttttttttttttttttgttttgttttttttttttttggcaaaaccaaaaagctaaaatttttttacccttgggaaaagcgtttcaaaactggtgacggtaaaaatggccatgataatttttttgcaaaaaaaacccccccctttttacaagaaacgggggtttttcaaaatggcttttttaaaggtttcaaaccccgtgactgcttttttggcaccctatcccaattcctttggcttcgggaaatatgcccattgtacagcccccgcttgggaaaggccttttcccaatgaaaagcatttgccttttgggcctacccatatttgttccggaccaaggggaaaaaaggccccccccg

SEQ ID NO: 177734 - DNA, 451 bp, Zea mays
  Clone ID: MRT4577_93683C.1
aattcggcacgaggaactagtctcgagtttttttttttttttttttttttattttttttttttttttttttttttttttttttttttttttttttccgcccaaaggaccaaggaccggcccgaaggggcccaaaaaaccaagccaaaaaggcggaagtcctggaaaggcggggtaaccccaccgaggggaacaggggggccagaaccagggccccaggaaaaaaacccccaggggccttttttggccaaacaattaaaaaaaacccccggccccaagggaaaacccgccctggaaaaggagtgggaccgaaacccattttcccaaaagcgggacccccccaaaagggcccctaaaaagcccaccccgctcatgggggggaaacggggggctattcgggactggggggccgggaccccgaaaacagggacccccggggggcccacggggggg

SEQ ID NO: 177735 - DNA, 302 bp, Zea mays
  Clone ID: MRT4577_93684C.1
ttttgatccacaaatagtatgtgaccgatctactgacggcgatccctgaacaaagccacgaaaacgacagggttccagagactgtttcacggtgctaccggccggctgcctgcaaagctcactgaactcgccgagggggtgagattctcggaggggtcagcttcagctagtatctcagctcacggtaaaaaaaagagcatcaggttgcgtagtaaagcttactttcgttcattccttccttgcgccgccattgctaagcaataaatcctgcctgccgcgcgtggtcagcaaaagcagcttcg

SEQ ID NO: 177736 - DNA, 264 bp, Zea mays
  Clone ID: MRT4577_93685C.1
cctcgaggccggccgggccggggtcgttgctggtgcaagctgcagctgggctcgcagttgttaccgcacatgtcgcatggccgcatctgtgctaatccaagaacacagctcatactaacttactcttaccggtaagacaaatacgaattaggagacgccaaaatatttcagttctgcgcacatgtatttgcatctacatattgatataataccaaccatgttatgagttgcagaaaaactagactaaaaaacgcccctaggttc

SEQ ID NO: 177737 - DNA, 550 bp, Zea mays
  Clone ID: MRT4577_93686C.1
gggagagcctccatagcattctgatgaacagacactcaacaaaacgtctttttttttgttagcagcaaagcaaagaaaatgaggcaggtgcagaagcaaattgtgatcctgcaaaagaagaagaagaagaacagactattcaaccttccacgcatgcaggataagggagaaaccaaggccttgcagctgggactccctaaaattctgcgagtaggaccatggcagcgacttctcaggggcctggcgtgtctggaacatgaacaccgcgttgcttgccgttgacccaaagagccaactgtgaacatcccaaaacacctccacgggcaagccatccacgagaatcgcctggtttcccctgaacttccacgccaggcgcttcacctgcatcacgggcttcttatcgactcgtatctcgagacacggatccttgaagccgacggtatcgcactctatggcgatgtcgtggaactggccgttgtcgcagaactgcgccttggcagagtagatcttcttgccatatatgtgctcccttctcgccacgaacgcgggg

SEQ ID NO: 177738 - DNA, 324 bp, Zea mays
  Clone ID: MRT4577_93687C.1
cccacgcgtccgccctttcgtccgttatttcaacagctatcaccaccgccagcacgatggctgttaccagcacgcgtcgggtcgacacactccaggagctcctggcagcggcttcaccgctgctgagcgcagctcacaacgacgcccctaaggctacggctgcggggaaagctgctccagggacggctgcaccctcacattccgtcgcatgcgctgccgacgctgaccctctcacaaacttgaacaaagcgctcaatgacgaccagatcagcgagttcaaacatgctgctgcacgacacgcgcgtggacacgcagctcaacact

SEQ ID NO: 177739 - DNA, 298 bp, Zea mays
  Clone ID: MRT4577_93688C.1
gtccatgtgatgcctttgtttttttcaaaaccagtatcttaggtaagatgcacaaccggggcagcagaacagagaacacgagacacggaacggcagaaagccaacggaggaggcatctaggctacagactagacacctacccacaccacagacaaagactggagagataaatggatggagaccaccaggtagcacgcagggcacaaggctcttatgcaaacacctcgggcgcccatgccgcaaacacgtgctccacggatggctaaatcccgacaaaagatccacggccgaaaagagc

SEQ ID NO: 177740 - DNA, 228 bp, Zea mays
  Clone ID: MRT4577_93689C.1
aagtattcayattctaagatataaaatagcataaaagtggaacgagggcgtccacactgtccgtctcgtgggcctcgctcctgccgctcaagcacgaaagaagcctcgacgttgcgttctggccctcgacgccatccgcgatatgaccttccacttcctctaccgagcgtgctcattcctagcttccctcctgcctccgcatcggattctcgtgctgaggctggaaag

SEQ ID NO: 177741 - DNA, 431 bp, Zea mays
  Clone ID: MRT4577_9368C.1
gacgggcgggcagataccgcgccccggcaatcgattgcaggccagcacacatacctaccggctggacgtataggcggcttggtgtaacagttaacaacagcacagcacggcacagctacacctacctacgagcacacgcaggtgaacgcgacacgcccatcccactacgcgcgcctcctcgtgaaaccacgagggtacaacatatatctcgacttttaaagtacttaatccagaggactttatattaacatggagaaggttatctattatatcgagaagataaggaccaaaagttagataataattatcaaaatcttagtctactacatggagaaactggaggttactttaaaggaacttctctcgaagttcgacgtactggaagacaacgagaagatgcataattatgtaatcaacaaggtccgttatat

SEQ ID NO: 177742 - DNA, 170 bp, Zea mays
  Clone ID: MRT4577_93690C.1
caccaatccgtacacccgtcagtccgtccgtcgtcggccccggcaaacgattaaagatggaggaaacggcggcagcggcaccggttgaaaaggcttcttcttccagttcctggttgcggaaggccaccgggaacgccgggccgttcccgttccggggcaggtctaacccc

SEQ ID NO: 177743 - DNA, 517 bp, Zea mays
  Clone ID: MRT4577_93691C.1
cgctgctgcagttactctggatggaagcgcgtatttaatcggtggcctgaagtccaatgtgcagatcctggataccgtggaggtttacaacgcgagctccggctggtcagctctcggtttcagttcactcggcaagaggacctttgcatctgccgtggtcatgtagttactgatcagatcaggaggttaactagtgttaataacatcaggtttaacatagttgctctgcctttcgcaaggaatagtagttagggtaaagtgggtgccgatgtgtattgtgtttggatcttcatcagggtaaatcatccgaatggtatgggagactgggtacgtggcccgtggattgaccgttgaaccctcgctgactgtcagtcttgagaacccatgcatgcattcgctgttgtatgcgtgccactgccacgccgttgaacttagctgtactatcagatagatagtgatacccaaactcacggagtttaatggaacaggatagaatgctgtgcatggggtttgttgc

SEQ ID NO: 177744 - DNA, 490 bp, Zea mays
  Clone ID: MRT4577_93692C.1
cgggcacttcaccagagctgcctagggtgtgtggaaagccggtgcttcacacctacctgatccattagtgcatctgatgctggcgtgggacattgatgacccttgttgctcctacattcaatggtgcctactacagcactatcctctggggcatttgttgcaacttcctgtgctggcacagcaactacaaccgccttgagctagcagagcttgctgtctactctcaccatcagtaagttcttcgctctaacctactagatcagttgaactctgtgtcttatttgcagcatcaacaactaccattcaggcagctacctgttgcctacccccagcaattactaccattctaccatctggaagcattgaactctcctgcttatttacagcagaaacatctactaccattcagcctgctagctgatgtgagccctgctaccttctttacacatcacagttgttgccgatctaccagcacgctgagcctaacgct

SEQ ID NO: 177745 - DNA, 489 bp, Zea mays
  Clone ID: MRT4577_93693C.1
attttctagcgcattgtcagtaatgctagtgtttcatggtacagcagtatgactgattctagtagcaaagaaaaggatgtttctttagacttttgatgtggatctgaaattctgaacctgattataggagctgttgtttattatcgctgttgcattgtgcgcacagcctgaatacgacacaaacatgaacttcgatacatcattaatttatccccatctgaatgacccttcatacccaggctcatgttggtggtttattttgcggtttttgattgtgctgtatgttgggtggcctgacagaagggaggaatcggtcacggtggcttgcggatcgagtgcatccgtattggtggtgttgagattccaaaccacaagagggtggagtactcgctgcagtacatacatggcattggacgctcacgctcacgccagatcctcctggacctcaatttcgataacaagatcaccaaggacctctccgaggaggag

SEQ ID NO: 177746 - DNA, 774 bp, Zea mays
  Clone ID: MRT4577_93694C.1
attgggtacctcgaggccggccgggatagaccgttgacgcacaggcctctcgccctccgcgcggctccacaggagagcaaaaatggcgaccctctccatggtctccgtccccatcgcaccctcctccttgtccctttccacccggggccgcagctcctccgcatccttccccgctaagaagggaggaatcggtcacggtggcttgcggatcgagtgcatccgtattggtggtgttgagattccaaaccacaagagggtggagtactcgctgcagtacatacatggcattggacgctcacgctcaccctccgtaaggaggttggcaagtacatgattgagggagaccttaaacgtttcaaccgtgtggcgattgagaggctgaaggagattaggtgctacaagggcatccggcacaagcttggactcccagttcgtggccagaggacaaagaacaactgccggacacttaagggaaagagggcttcagttgccaagaagaagtcacccgcctcccaggatgaataaatcgtattgccatgtattgaagttctctctctctctctctctctctctctctgtgtgtgtgtgtgtgtgtgtgtgtgtagcgctactactgctgggtgttttgtttcgagcttttatgctgccattgacaaatcatggggtagccatcagctgctgcagattttgtagcaatgacatactagctcatatgggtcggttctataaatgaagatcaaatttttgtctaaaaaaaaaaaaaaaaaagcggcc

SEQ ID NO: 177747 - DNA, 1329 bp, Zea mays
  Clone ID: MRT4577_93695C.1
attttctagcgcattgtcagtaatgctagtgtttcatggtacagcagtatgactgattctagtagcaaagaaaaggatgtttctttagacttttgatgtggatctgaaattctgaacctgattataggagctgttgtttattatcgctgttgcattgtgcgcacagcctgaatacgacacaaacatgaacttcgatacatcattaatttatccccatctgaatgacccttcatacccaggctcatgttggtggtttattttgcggtttttgattgtgctgtatgttgggtggcctgacaattgggaccctcgaggccggccgggaataggtcatcgagactacgcatacgcaaccttatcatcatccgcccttgggttttctatccgatagaccggggacgcacaggcctctcgccctccgcgcggctccacaggagagcaaaaatggcgaccctctccatggtctccgtccccatcgcaccctcctccttgtccctttccacccggggccgcagctcctccgcatccttccccgctaagaagggaggaatcggtcacggtggcttgcggatcgagtgcatccgtattggtggtgttgagattccaaaccacaagagggtggagtactcgctgcagtacatacatggcattggacgctcacgctcacgccagatcctcctggacctcaatttcgataacaagatcaccaaggacctctccgaggaggaggtcatcaccctccgtaaggaggttggcaagtacatgattgagggagaccttaaacgtttcaaccgtgtggcgattgagaggctgaaggagattaggtgctacaagggcatccggcacaagcttggactcccagttcgtggccagaggacaaagaacaactgccggacacttaagggaaagagggcttcagttgccaagaagaagtcacccgcctcccaggatgaataaatcgtattgccatgtattgaagttctctctctctctctctctctctctctctctctctgtgtgtgtgtgtgtgtgtgtgtgtgtgtgtgtgtagcgctactactgctgggtgttttgtttcgagcttttatgctgccattgacaaatcatggggtagccatcagctgctgcagattttgtagcaatgacatactagctcatatgggtcggttctataaatgaagatcaaattcttgtttaaaaaaaaaaaaaaaaaaaaaaggggcctatcaaattcttgtttagaccaaataaaaaaaaaatgtcgaaatcaaaaaaagaaagaaacaaaaaaagtcacctctgctcgatgcaaggagtccagactgctcc

SEQ ID NO: 177748 - DNA, 639 bp, Zea mays
  Clone ID: MRT4577_93696C.1
ctcaaacccaactttaccaccatcctttggctgataaaagtagtggaactgcctgaatctatcaacatcaccaacacttgatcctggatcagagactgcaccctcatacacccatcacactctgttcccttaatagcattctaagacaggtgatacagttccccagctatcttctcctgctccaatttttgcagcacctgatcactcaacactgagcttatatcttccactgtcaaattatgcaactgagtcaccaccctctttggacacttggcttgatgacctggttcagacttgtctccacatatgaaacaaagtccattggccctcctgtaatctctcagctggctttccttgttcaactcaggatacaaaattcctattctattgtcacctcttccaccacctgagttttgttccctactattcctttttgatgcttcatcctgttcttctcagctatctcctggtacatcttaaccagtttcatggctttgtccacggtctttggcatgtgagtcatgacctgagactgcaattctgtcctcagacctctgatgtagtgggaccataagtgttaaggcggtaaggcgagataagtcgactgaccccctatttaccttttaagccgataagcgt

SEQ ID NO: 177749 - DNA, 439 bp, Zea mays
  Clone ID: MRT4577_93697C.1
gaacgcaatcttttttttttatttttttttttgctttgggagggggggggccaaatccaaaatacacaaacacccgtacgccaacgtggggaaggggccaagggggggggaaaaagacaaacacaaacggaaatggtacaacgaccgcggcgggccagaaccacacccccccgagccctcctcaaacacggggggagaagaaaaaacccccacccccagccccaaaatctttatgaacgccaaaaacacagtggcacacacggaaaaggccacggcgatcgggtccccaaaagcaagagcaaaccaaaagcccatgggcatgggcttaagcttaaacggaaacccggagctgccttgccttttgtaggcccttgccccttaaactggagcattgggatggcaacgagaccaaggaccccaacaaggggaagtggggggg

SEQ ID NO: 177750 - DNA, 690 bp, Zea mays
  Clone ID: MRT4577_93698C.1
cgacgtctgcaacggcctcctcggtggcttcgcggcgatcaccgcgggctgctccgtggtcgacccctgggcggccgtcatctgcgggttcgtgtcggcgtgggtgctcatcgggctcaacgcgctggccgcgaggctccggttcgacgacccgctggaggccgcgcagttgcacggtgggtgcggcgcgtggggggtcctcttcacgggcctgttcgcgcgcagggagtacgtggagcagatctacggcacgccggggcgtccgtacggcttgttcatgggcggcggcgggaggctgctggccgcgaacgtggtgatgatcctggtgatcgccacgtgggtgagcgtcaccatggccccgctgttcctggcgctcaacaagatggggctgctccgagtctcggccgaggacgagatggccggcatggaccagacgcggcacggcgggttcgcgtacgcgtaccacgacgacgacttgagcttgagcagcaggcccaaggggatgcagagcacgcagatcgcggacgcggccagcggcgagttctagtgtgttggatcacaaatctcagtatgctagtcctacatcatgattgtacaataacaaccatgagatatactcccttcgttctaaggattcctttgacgaagtatctagttaatttaaagataaagaaaatttccacgttttat

SEQ ID NO: 177751 - DNA, 211 bp, Zea mays
  Clone ID: MRT4577_93699C.1
gcggccgctttagaagcaccacactcacttccgagtgcataccacgtcacaacaatggtatcgaagattgtacttgcacttcagtggctggccttttacaacgcctagactacgaaaaccctgtggggcagcaacacaataccgttgcatctaatgcctctgttgtctgtgcacgctatactgtataggccggcgcagatcgagctgcaca

SEQ ID NO: 177752 - DNA, 369 bp, Zea mays
  unsure (1)..(369): unsure at all n locations
  Clone ID: MRT4577_9369C.1
actcctatgggcgattgggatcctcgagggcggncaaaaaaaaaaaaaaaccggcaccaanccagcgcggcgacaccggcgacccgtaccncctcccccggagagcgatggcgacggagctgacggcggcgnagatgcgcgcgtacgacggnagcgacccgaccaagtccatctaccgctccgtccggggcaaggcntacgcacggacntncggccgcggnttntacggtcccggcggcgcctacgncgcctccgcgggccgcgaggncagccgcgnnntcggcaagatgtccaaggacgaggncgacgtntncggggacntctncgggntnancgacaaggagntcggcgnnntcgncgactgggaga

SEQ ID NO: 177753 - DNA, 2163 bp, Zea mays
  Clone ID: MRT4577_936C.1
aacggccgcttttttttttcaagaactctagcaaatgtgctggagtgaattatcacaaaagcaagacgtataatggttgtacgtagcggtactgccaaggaaaaaacatcaaataaagaaaaaaaaacaaatggtgcctgcaatccacctggatttatagtcaggtgaaattattatcagcatttacaaccttattcgtactcgcgtccgtccatacaaatcaaacctaataaagcacaatgccgttttcgcccaactaaaacccagccaaatacacaccacagaagaagcctaacggcagttggcagactgactacgagcgtcagatgttcctagaatgtacgtcatccgcaagctacgcctgttccttcggatatacaaagaactagaagaactagccaaccccctacaaggaacaacaagtcacttcagatcttgaatctatgcccgtcttaactactttcgaccgaactccaccttggcctcctcatgagcaaccttcatcctccggtactcctgctgcgcccgatgagaacggaacaaagcttggacacgtaccactgatctattgaacctgtcctcggcttgttgccgaccaacctggtagtagtcctcctctgcagtgcttgctgcttctgcgtctgtggccattgctactggcattccagttgcaatgccacgcaggccttttctcttcttcctccaccgcaagatagctttttccactactccaacggaccataataccttgcggtactgccttctcacttggtgacctctgtatgcagcttgtattttgatagcttgtcttcgcatgttcatgaagttcctcctaatctgccatgttcggaaatgactctgtattcttgcagcagctctcatcattttctttctgttgtagttccggtatgcgtgctgaatcctcatagcagcaactattgcagatgcatcattctcgggattggccaactgaattgcttttgtttgaagcttaagagttcgctccctgagtgcggcttgtatgttgctagcagcatcagcagcattgcggtaggctgctaaagattctcgtaagcacaattcttgttcactaaggttttcaaattccttggtattccgttttagtgactctgtccttgatgttgatcgcttacccttggacagtgacatagcctcaaaatgagcagtcagccctttctcagaaagatatgcagctaagccatgataaccttgtccagcagccagatcaccagcagtttgtccaccagggacatcatgagtaggatctgtaaccaagcttggatttgctccagcagacaaaagagcagcaaccattttttcccttccacagtatgcggcccaatgcaaagctgtccaaccagaagaatcacggaaatccaaggagaatcctgacaaagaaaataagtgaatggcccaagtatagcccaagcaagaacacagatggataggcccttgtcctagatcatcgcggccagtcgacttgtggccttcaattaatttttcaacaagccactcttgcaatctattacgcagtactagttcaagcaatccctcagtggccggaacataagtgcctttagaatcagtaacaaattttgacagatccatccattccttctctgtcgatgctgataagagattggaaaccttgcttccttctacaagtaacttgggtgctatctttttcttgtttgtggtgaacaacaatcgagctagtctcatctgcatctgaagctttgacttttggggctcatcctcagccaagttttgactgtcaggcaccatacgatagtgaaaactcaaaacctcactgattggtgttttcccatccaaagtcaaataaagattgactcgtccaggagcatgtggtctagcaatgaaacggtaaacgccagtttgaacaatatttgcatcaacacactggtcaccaatgacacagaagagattggtcccagccagatgtctgtagttctcatggaaacatccaaccacaaggacctttgtgtcctcagtacaataagcccattctgaggatatctcagtgatctgaaagggtatttcgccagtcacctgttcagtggggagtatgcccgagcttggaatatcatctaaactaatatcatcatccaagtatttcccccg

SEQ ID NO: 177754 - DNA, 170 bp, Zea mays
  Clone ID: MRT4577_93700C.1
caccacaacgacgacgacgattctgggggtacccctgcgaacgacggtggatcctgtactattccgacccagccattgccgacccactctctcgttttcctaggtgaaacgacagaagacgtagaagaagactaatcttactttgaaacagatcactgaaccaaattgtt

SEQ ID NO: 177755 - DNA, 449 bp, Zea mays
  Clone ID: MRT4577_93701C.1
gctccttctccctgctgcgcgcgtcggatcccagcttgtggagctcccttccgctcccagcttcctctgccggcgcccaagcttctagtccttcaatccgtgtcgcgcccctctctgcttgcctcaccctgctccctggtgccagagcttcctttgcgcggcatggccgctgcgcccgaggtcgcgtgctccaccgtgtcgagctcgcccctgcgtgcagctgcccatctccatgggcataggtgcccctgcttttctctctctctctctcctccatggccgatcgtgcccctgcttttctctctctctcctccatggccgcgtcttgccgaggaccctgctgcagcttgctcgccgtgtgctgccctgcgcgctcgcagtgggcatttcccgtcgtgcccgtggtctccccgcccgcgacgcccggtgttttccccagctcggatctt

SEQ ID NO: 177756 - DNA, 281 bp, Zea mays
  Clone ID: MRT4577_93702C.1
cgcacaaaaataatcttttaattctctcctaaccaagggcaaaaccctataagcagtaaattcttcaggttacccccccaaaacataaaacgaaggctttcaattccaacacataatacttgtgtcggttttcaacaacgaaacaggtcccctcctatagctccccagaatgaaatttgggccaagagcaccaacctggcctccaaactaagcttaaacaaataaaagggggtaatctttttgggtggcgaaatatatccttttacctttttggttaaaat

SEQ ID NO: 177757 - DNA, 246 bp, Zea mays
  Clone ID: MRT4577_93703C.1
aagtaatggggtttctttttgatataaattttttttaattctttttttattttagagtacatgaaggggactggttacatataatatgggggcggaggtaggggagacaacgatggcgggaccaggtgcacggccctgcaaagctggggcaacgtgcaccgtagggcttacaagacctgagcaccacaatacgagtccgggatcatatatcgcataaagggtctcggggaaccgatgggggggggg

SEQ ID NO: 177758 - DNA, 973 bp, Zea mays
  Clone ID: MRT4577_93704C.1
gaatcgatcaaaagtctgccacattttatatgagtacccaactttaattaatcaatctaccgtaatcacaactttgataaaatttcttcctactgataaccattttatgtcacattccaatgaaccaccctccagttccagttacttactcttatcgggatgggactggacaccaatggagaattcctaatggctatgcaacaacagcttgtccatgaaattcgtgaagtatggacaacttcagttgagaatctactttatatcaaggaagaccttatcatccctcatggatgtgttcattctcttgtaatctacgaagttctgttaaagttagttgaaccattttctgattctatgttctctctactatttgacaacaacacatcttttatgaattaattattaaacaaaacgaggcgcaagactggattggtaattcatatattcttttgtggtgcgaatatattctggtaaagacatgttattttgttctaaagcacatgccataaaagaggttcccgaaaatgattatcatgttttcaaagaaatataaaattgcgtacagtaaggaacattttgaataggcagaggatatttttaagtgagacatacaattcggccagttgacttaaataagaattttcttcgtaccaccttcttatcaattttatctttttctatgatttttattacatataacataattagcaaaacattattatttatgattaccattagctatctctttctacaagttatggacatgtggagaaatttgtagtagtgaaacaattaaattaaaatagcccacaatagattatgaaatatttttctcataacaatataacacacattttgtatataagttatcgtggtattatatgttcccgttgcaacaatgcactgtcaatattgtatgagtctttaagtgtagtagcaaaagtcttggcacgttatgttttagttatagtat

SEQ ID NO: 177759 - DNA, 208 bp, Zea mays
  unsure (1)..(208): unsure at all n locations
  Clone ID: MRT4577_93705C.1
atggagtactactgtacttgagtgtactngagggctacttaaacgtttttcagcttcctactttagatacagaatgatttaatattgagttgaaccacttgtgcaaaaaaaaaaaaaaaaaaaaaccctactaagatgttgcttgtccagtgtttcttaactgtaataccatgaagtcgtcgaaagaaaacgggccattgtttaaaaa

SEQ ID NO: 177760 - DNA, 351 bp, Zea mays
  Clone ID: MRT4577_93706C.1
acctttctggacgtacaccctggctgctacagggcgggcatctactgtgtttgtggggagctgacaccaatcaccgacgtgctgccgctggtgttcatgctgggttgatgaactcggagcacgtgtttctgatctcgccgcccctccccttgagaacctcgagggcgctgagcttatccatgggctcggcgaatatggggaccaaagctgatgtattggtccacaaggccttcactatacactccgacattattgcatgctcagcggcggtcacaggataggggcatcttgttcttcagcaccaggaccgagtagctccccatcatgtaggtgggcaaggaggagatcatg

SEQ ID NO: 177761 - DNA, 124 bp, Zea mays
  Clone ID: MRT4577_93707C.1
atatgccccggctcagtgaggcctccgcccctccctctcaggctctcaccaccgtctgctggcgcgtgccgcggcgacactcctccctcgcggtggcggtggaggactacggccggggatccga

SEQ ID NO: 177762 - DNA, 592 bp, Zea mays
  Clone ID: MRT4577_93708C.1
gttccccgatctttaaatattaatagagctcctcagagatctggggggggggggggggggggggggttcatgtacaacgggcgactcctcccttttacaccggaggcacaactacgactacccgggaccttctggttactaagttcacttactagagtattcgacgttgggcggcttgctcggcgcgcccacgaacccacgcgtactagggtgtagacacgtcgtgtcgaaagcttcttccccctgagtagatcccttgtcctcacacgattacatctcgttgcccagcttacgtagatggaccttggacaggaagtgggtagaactcggacaggaacaaaggagattcttcgagctagtacttgcttgcgctttagattggttggaagaaaacttggggtctatacgtacggtaactcctctaggcccgtttaagttccagtgaggtccgtttggaaaggaccctacctaagttcatcatgaagattatattgatggtactattgtctaaggtttagtaatttgtgataaagacttcctcaaaacgtttagagaaataattttacaattaagagaagatagacgaagaaaa

SEQ ID NO: 177763 - DNA, 250 bp, Zea mays
  Clone ID: MRT4577_93709C.1
agcctttcattttttttattacctactattgcggtttgaaagaagaaatccggattttaattatttgaaaggattgcgtggctcaaaaaactacgcgcgcgcgcacacactcacagactgattcaacgcccaactcctgttctgaaccattacaacgaaaaagaaaccgacgcccaccactatacacataacttggtgactgcacaaaccgtgcagggagtgaaaaacacacgggttcttaaccttcttg

SEQ ID NO: 177764 - DNA, 271 bp, Zea mays
  unsure (1)..(271): unsure at all n locations
  Clone ID: MRT4577_9370C.1
agaatggtgtcgtgccctgggtccaagaaggggcagggggctggaggagngatgagctgctcgatggcgatgcgcggacgacgaggaagggcccctgatgcagcgagaacgagaaggtcgtgttcatcagcatcgtggtccatgcgtggntattgtgtggaaattttcatgacaagaaagctaatataaaggggatttacttgcctagtccagatctgccagctttccttgatatggtttactgaaagatctgacgtgccttgtcaaacat

SEQ ID NO: 177765 - DNA, 173 bp, Zea mays
  unsure (1)..(173): unsure at all n locations
  Clone ID: MRT4577_93710C.1
ccttaccagcacacagtggagctagctagctagtagaggtcaatcaccaagatggcgaggcagctcgttgtacttgcgctgcttttcgagatcgctggtgtggcgcatgtcgtgaagggagtgcgggagagcctccgccgnacaggtggcgctgaggatggcgctatacatct

SEQ ID NO: 177766 - DNA, 325 bp, Zea mays
  Clone ID: MRT4577_93711C.1
ttttggttttttttttgatctgggctcgtggcagtcacggataaagtaggagctaaataaatcaacatacagcttgcatgcagatggagatgaacatgtcaacgtgtatatataggggcatatgcctccgcaccacgcagaacctaatccagccacccagattgatgtccaataaagccaggccgggccgggccaacgctcgccagcagttagccttgctcaccccgtctgggatcggctatgcctaggctaatgtggacgccgacagcaaggaggaagatcgcgacgcaggctaagtaaataaccgcgttgatgaggatggcca

SEQ ID NO: 177767 - DNA, 3836 bp, Zea mays
  Clone ID: MRT4577_93712C.1
gccggccgggttgggatggatagtcagactgccagccacaatagtagtgaatcactatgttcttctggaatacagtatggtctaaatcgtggacctggaactattggaggcctgcactctagcaatagtttacggagcttggatgaaattccgaacaatgatctgccaccaaatacatttgcttctcttttagggtcatctctttctaggagtgcatctccagatcctgagcttgtgaggagggcccctagtccatccctgcctccaattggtgtgaaagttggcaacactgataagaagaatggtggttcctcttctttccgtcgtagctcatccgcaatcggtggatctgatgatttggtggctgctttatctgggatgaacttatcatctagggcaatgagtgggcaaactatggaccagtctcagctctatcaggatgttgataatgtccagaagtttctttttgatcgacagggtgaccaaccaactggaaatcagcagcactacatgaggcgtcctgagcatggacaatctaagttacccgatggatattctgccaatttggccaattcatccacaatgagaaaccagattaatgctggcagtttcacatcttttgacagtttgtctcttggatctgggtttgcttcccctaggattggttctagatcccctggagggactgtatcttctcgacaaaatttagctggtatgtctaacatgctaaactataatggaattggaagtccaactgcctcaccttctcttcagacttctattgatccggcatatatccagtaccttgctcagcttgcagctacctgtgatgatcctctaatggacaggggccatctaggaaattcttacatggacttacttggtactcataaagctaacattggccctttactccagtctcaaaaacaatatggttactatggcaatcttggatttaaccttggttatcctggaagtccattggcgagtcctgttcttccctcttcacctattgcaccaggcagtccacttaggcatggtgaccgcaacatgcgctttccatcaggcatgagaaacttcggtaattcctttggttcatggaattcaggcatgagtggaaagatggatgctaatttgatgccctctctcctggaggaattcaagagcaacaaaagtaaatcatatgagctctccgaaatagctggccatgttgttgagtttagtgctgatcaatatggaagccggttcatacaacagaagctagaaacagccagtactgaagaaaaggacatggttttttcagaaataatgcctcaagctctcacattgatgactgatgtatttggaaattatgttgtccaaaagttttttgagcatggaagcactgcccagataaaggaattggctggtcagcttattggacgtgtccttgctcttagtcttcagatgtatgggtgccgggttatacagaaggctatagaagttgttgatttggatctgcagactaaaatggttgcggagctggagggccatgtcatgcgctgtgtacgtgatcaaaatgggaaccatgttatacagaaatgcatagagtgcattcctcagcatgctatcgagttcattgtctcgacattctatggccaagttgtaatgctatccactcatccatatggttgtcgagttattcagagggttctagagcattgtgatgatcctaaaacacagcaaataatgatggatgagattctccagtctgtttgcttgctggctcaggaccagtatggcaactatgttgttcagcatgttctggaacatggcaaaccccatgagagatcagctattattgagaagctaattggccaaattgtgcaaatgagccagcaaaaatttgcctcaaatgtcatcgagaagtgcttagtctttggaaatcctgtagaacgtcaggttctgattggtgagatgcttggatccactagcgaaagcgaacctcttgaggtaatgatgaaagaccagtttggaaactatgtggtgcagaaggtgttagaaacttgtgacgatcagcagagggagatgatcttaacaaggataaagacacacttgaacacactcaagaagtacacatacgggaagcacatagtagcgcgtgtagagaagcttgttgctgctggagagaagcgccttgggcttcaaccagcatgcaccgccgcctgaagggcaaactctctaagttgtacagctaacagttgctaggtttgcctcatgtttttttctctactaaaaaccttatatgaaggccccttttggcctcgccaggaaaaaaaataaatactgtatgtttgcggggaagagtgtacattaattctgtagcagaaagaccccctacccatgtggcggaatcaagggaggagtgatgcgtgtgagtccgatcgatctgaaggctgctgtaaagaggaagatggaaggggaaggagtgagaagcatgtcagttactctgctgctgtacaaattaaacttagctcttagagtgaggagaaagtaagctgttagctgtctgcctaaaggaaagaaaggaaaaaaaaaagaagctggaggccattggcaccctgtttcatgtgttggtatagctgctgtggctctcctgttgtctgtctggcctttgttgtaacataaagctgaggcgcactagcctgccttcgttttcacagttaagctgaagttattagtatcagctttcctgaactgcttggtatgtaatgtgactctgtttcttccttgtactaatgcttgtctcatgtaatccattcccctaatgtctgaatgttttacaatctttccctgaaatgtttttgagaagtgcttagcctttggaaatccaggtaatgatgaaagaccagtttggaaactatgtggtgcagaaggtgttagaaacttgtgacgatcagcagagagagatgatcctaacaaggataaagacacacctgaacacactcaagaagtacacatatgggaagcacatagtagcacgcgtagagaagcttgttgctgctggagagaagcgccttgggcttcaaccagcatgcaccgccgcctgaagggcaaactctctagttgtacagctaacagttgctaggtttgcactcacatttttttctctctactaaaaaccctatatgaaggccccttttggcctcgccggaaaataaacactgtatgtttgcgcgaagagtgtacattaattctgtagcacaagacccatggggcggaatcaatggaggagtgatgcgtgtgagtccgaaggctgctgtaaagaggaagaagatggatggaaggagtgagaagcatgtcggttactctgccgctgtacaaattaaacttagctcttagagtgaggagaaagtaagctgttagctgtctgtctaaaaggaaaaaaaagaaggaaatggtgaggccatcagctccctcctgtggcttttcctgttgtctgtctggcctttgttgtaacataaagctgaggcgcactagcctgccttcgttttcacagttaagctgaagttattagtatcagctttcttgaactgtttggtatgtaatccaggtccctgatgtctgactgttttaattgcaatattcatcaccctgataaacttactttttgtttgttaaaaaaaaagatgttccgggggccccccgaataggggcccctgccccccgggatttatttcgggccgggaacctgggggggtacaagtttccccaaaagggggccttttaaaactttggggaaatcagggcaaaagtttttccctgatgtctgaaatgtttaatctcaaattttcacc

SEQ ID NO: 177768 - DNA, 391 bp, Zea mays
  Clone ID: MRT4577_93713C.1
tcagtcctacaacccatactcctaaacctacacattctcaatattcatccacatctgacaacaataccgtatccgactacattcacacatcattcaaaccaacacttaacctactaacaacctacctttgttcataacactagatcaacctacacataatcctatactataacctacatatcctttcacatatattatccactatcctacaacattcactatacaatcaaacttaatacatactgctcaccaccttccatttcatcaacgaataattatcacaatatgcaactcaagcttacatgtcacacattatcaactaataatatacctctctaaacctttatttctacattaccacctcttttacttcaactctttataccttatt

SEQ ID NO: 177769 - DNA, 256 bp, Zea mays
  Clone ID: MRT4577_93714C.1
cggcgcccaagacgtctagcatcgggtcgtcgcgaatgtcctagagttgcattactgcttggctgcgtgcgatgtccccattcgcgcgaaggcgagggttgttgacgtggccaccgacggtacacgttgtgatcgggttggaggtgtgccggcacggtggcctgcagcgaggtcagcgtcgttcttgacagccagggacgagtctaggggcgcggcggcagtggggaaaccagaagcctgaggctttcggaatgtc

SEQ ID NO: 177770 - DNA, 355 bp, Zea mays
  Clone ID: MRT4577_93715C.1
atgggggctaaaaattatataaggggggctaaactttacataaccctttaaatctattggttatagagcctcaaaaaaaaaaggggtttaaaaattactgggttccttttagaccatataagggacaccccgttccccgggggtttttattttggtcccaacatagtaattaagggcccccccaaatcatgatggggcgttgcattgaacaggcctcggcgcctgcggtgtcagcactgggagcaatagcggaagcggcagtattttgatttttaacgggggcaaccatcctcggtggttcgttcttattcttgatgcccagcttttgtatggcggggatcacagcggggggggg

SEQ ID NO: 177771 - DNA, 207 bp, Zea mays
  Clone ID: MRT4577_93716C.1
aaaaaaccacgaatcaccaccaaatacggatacagtactgttctcatgtcaaggaaaaaaacaagcaggagtctatagaggaaccgcatcacatttgcgtgagtagtacaaaacaaacagacaggtcaacaagcgagctctccgaaggatggaggacctcatttcctcaaacaacgcccaaacttcactctctctattcacccaact

SEQ ID NO: 177772 - DNA, 291 bp, Zea mays
  Clone ID: MRT4577_93717C.1
ttcgtggccgcccgggggccgtagcccaagcgcccccgcggaaaatgtcgttgtgaaagccggcctcggaacgccgcctggggccggggctcttcccgttcgagcacgcggacgccgcctaggccacggtttcccgccgcaagcgccggagggacacgttcgtggggacgcccccaatccccgcgccttccccgagggcagggcgcctgggggagcggttccccacgctggcgccgtcacgcctggcgttccacaaccggatcccgggccctctctaggggccccaggccg

SEQ ID NO: 177773 - DNA, 275 bp, Zea mays
  Clone ID: MRT4577_93718C.1
tgactgtgaacaggctgacttagctgttgatgtatactcagaacctccatctgctgccagatactgcacttttccttctctgcagtctgattctctagtgactgtcactggacaaaccccagttttatgctcgcttattaaaaataagtttaaacatttcatggtggttgacagaactttgtccccaaacatgcggattcaattctttaaaactcgttgaacgtttataccaaaggtcccgccccgcaggtgtgtatgtggtgcacagtaggtga

SEQ ID NO: 177774 - DNA, 319 bp, Zea mays
  Clone ID: MRT4577_93719C.1
agggggggttcgttttttcccggaaaaaagacccttaatttagacaccaaacggtaggttggacaaaaacaagcgcaaggtttttaacagccttttacaggggcggcaaactgggaccaacaccttaaggctgggaaaacccttaagttggggaaaaagagggggttatggggggccggccatacaagtttaaaccagttccaggttccaggggaatggcggttacgggaaaacctaattaacgaggccccaaaggacttggcaactggggggggccacgggggaatccgaggcttttaacggggggccctacaaggtt

SEQ ID NO: 177775 - DNA, 506 bp, Zea mays
  Clone ID: MRT4577_9371C.1
gtgccttcggtcaagacacaacacaggctgtggattgcccgcccactgcacccgccggcgcctcctcccaaaacccaacaaaccctatattcgacgtcctcagctccggtcagaccctccccctttaggatcatgctcgaacctcagaatgccaggatgtatgatcactgcattactaaaggatggatgccagggctatgatccaggggaagcacatcgctgacatgggcgcgtatcatgtccctgctcgactaaacaacatctagggcatgatcctcttgatcgagctctacggccgtcggattcaatccatctgctgcatcatcaagggtggtcgccaggagcccggcatagggctacgaggataacgacacaagggctacatgggacttaaaaagcgccgacaatacggcgaggaggcacacgcatgccaggacaggtgcaacattgtcaagctcgggcactgcatcatgctccacgcttacgagacgctaaacgtggaacta

SEQ ID NO: 177776 - DNA, 376 bp, Zea mays
  Clone ID: MRT4577_93720C.1
ctcgaggccggccgggataccctatcccgaacagcccacgtacagcgcatacgaccgcgacgaatatctggcctctcaccgccgccaacacaaatctctgtgctcccactgccgccgcaacgaacagctctgctctgctccgaggaacatatctccctcgtggccctccgcgcgaactccgcgctactggagctctgggtggttcgtacggcagctctagcgggcacagagacccatgacatccactgctcgccatccgcgctattgcatctatggcttgacggcctcagcgcgacgccaccatctctgacctcgagtacgttaagtgctagcaatatgtgaaccgaaaatagagacgacacccggcctgaaacta

SEQ ID NO: 177777 - DNA, 325 bp, Zea mays
  Clone ID: MRT4577_93721C.1
gggcggaaccctaatttttttttaacggtttaaatttttaacatttttttaaatttgcctgggggaactccaaaaacggggggggctttgccatgggggcctgaccaactccgaatgatgacctggttcatttaaattggtcaattgcccccaccttagcgcattgcccgggggtggtccttttggtttttttctctgcaccattgggggtgatgggaatacccctgttaccccttggccctaaaagggtgggcttcatttttccatcatctgaaaaagccattcttttttgaatgaaaaaaaatgatggaagctttttcccaaa

SEQ ID NO: 177778 - DNA, 254 bp, Zea mays
  Clone ID: MRT4577_93722C.1
cgcgagcggcccttttcttcgtgctcccagatggttatctgaagttccaaaacccgcctctcaaagggatatacaggaagatctccagagctgcatagggatgcactcgatccttctgcggtgagctcaagaagctgcatttcagaatgctcgctccagatcccagaaccaggatatccatttccacgatcaagagagggacttggtacagggaacctatcggggcaaacgcggcaaagtcaagcacggcaagc

SEQ ID NO: 177779 - DNA, 587 bp, Zea mays
  Clone ID: MRT4577_93723C.1
cccacgcgtccggaggcattgtcagtagtgagcaaggccagcagcacagcagagcatcgactcaccagggagcagcacggcgacggcgcggcgtggctgaacctgacgctgggcgcgagcgaatcgccgtcgccgtctccgtccccggacgccgcgagctgctccgcggactccgagtccgggtccgggtccgggtccgggcccgccgccaagccgcccccgcacaaggtgttctcctgcaacttctgcctgcgcaagttcttcagctcgcaggcgctgggcgggcaccagaacgcgcacaagagggagcgcagcgccgccaagcgatcctcgtaccacgcgcagcgggtggtcgtgggcggcctgccgctgcacgcgcacgccgccctcatgcgctccctccgagccaacccggcgccggcgccggcggtcaggacggcggcgaggttcctcgagggcggcgtggcggcggcggcctgggcaacggtcccgtgcgaggaggcgccgagctctgcctggcctgggagcttcaggctgagagcgccgcactcggagtatgagcaagcgtgtgagccgattcagccgag

SEQ ID NO: 177780 - DNA, 1973 bp, Zea mays
  Clone ID: MRT4577_93724C.1
aacgaaacctcggggcgaggccgggaaaaacccccgcccgaacaatggttcgtaaaattccccagcaggggaatggcctgcatccgccctccccaaaccctagcatcccgaattcgccagtcgccatggcgccgttccggcgctgggctgacctgccggcagatctactgtgccgcatcggagaccggctcgatctcaagtggtatgccagcgcgcggggcgcctgcacggcgtggcgctgcgcgctcgcgccgccgtcgcccgcgctcctcgtggtcgccaacgacgcccgctggtgcccctatgccgcctccctccccacgcggaggtcgttcgagctcaccgccatcgtttcgggaagccgctgcgtcggctccagcaacggctggctcgcactctccgttgtcctcttcagcggtgggaccattttcgtgctcctcaaccccatcgccgccgtggagatcctcctcccaccgctgatctacgagagccgctgggtttccaaggtcgtcttcactccgagccccgccaaggacgacttcgccgctgcggcaatctgcgatatcgataggatcgcgtacgtcaccgccggagccaggaggtgggccgtcatagaccccgtccgtctcaccaacggggaccagctcaccgatgtcgtctacactgacaaaggtagggtctactgcctcaccaagtgcggggacgtgcatgtgctccgtctccccgagcgacggtgccgaaagcctgccaacgccgatgaagcagggccatcggagccaccattctctgttctccagccgccacagcctgctgaacgcacaaataattgccgtccactgcgttggcaacatctgcgcaattttcggatgatgcgccatgaacaggcccaaacaagagatcaggatccaactattccactgagggtaacgttctgtgcagagacattcatcccatataagaaatttccacctgaatcgcaaggaccacacctaaatgcgccagccactgttgagcccctgttgtgtgaggccaacctcccgttcgaccctgccactgtcttccctccaccttatgacacagtgtcgtcgttcactagtgcaaagaacttggtgttctgtgagggcaatctgtaccaagtttggaggaacgcaagttgcactgttactctgcagctgcctacaggaggtcagcgtcgcgttgcggaaaatgagatattggtgctgaggtattatcctcgacggcagccttgctgggatgtggtgaagaacctgggaggtcactcactttttgttggaaggaacaatgcagtgtcaatgtatgcagagggtgtgccaggattgaggggcaactgtgtatactggataggtgggcgcggtagggatcaaggcatggtctttgacatggaatctgggagctccacgccgtgcagggctcctcctgttagccttttacctgggcatccacatagcacaatctgctggtacttcttgagcgatttaatgagcatcaacaacagctacaacagtagctgcagcagcagcagcggaggaagaaaagtttatcagactcgagcaagagcacgagcagatcttggacaagacatggaagaatgattgcatcgctgaacttctcggcgacatagtgaggaccaccaagcaccttggtggaaattgagtttattgtttgtagtcttgggagtcagagcttgatttcaaggcgaaacaaaatcttgtagagaaggctgaggaactgcctcgtgtagcctgtttcctaaaatagtgttcagtttgtttacttgcctgtagcttctttattttttatttgcttattccatgtaaccggataataattattgtatttctatactcagtttttcatgttggtgtgttgacataattcaatggatcatgtatatttttggagttggtaatgctccgaattttcctacgcctcgcaggcgctctagatcgcga

SEQ ID NO: 177781 - DNA, 690 bp, Zea mays
  Clone ID: MRT4577_93725C.1
atgtcaagatcaacaggcttttcaccattcaagttactgtttggtgatgaagcaataactccggaagaagctaaagcaggatcaataagaacagtggcctcggcagaggacgaagctgattgttctgtggcaaaggatgccttagaagggatcaggcttcaggttgtggagaacatcaataagtatcaagctgaaacaataaagtggcgagacagaaaagttcggttaaaaaatatcaggccaggtcacttggtacttcggagagtcgccaacctagatacagtaggcaagctacagttgaaatgggaaggaccttttctgctctacaagagcaatatcccccaaagatgtaaatgtaaaactgagttcgcaccatcgagtgcaaagaaaaaagaagaaacagggagaagcttgaaagacgtccctaaggggatgcagagcatgacgaagctacaaaaagtcgttcctaagggagcgcagcgtaagttttctgctcaaaagtcgttcctaagggaatgcagagcttacagcgaaaagtcaacgctgattctgccgaaatataaggcgaagcgcgaaaaatcaacgcgataccgccaaaatagaaggcgaagaagttcaaaagacgttcctaagggaatgcagaacttacagcgaaaagtcagcgctgatacaccgaaaaataaacggtga

SEQ ID NO: 177782 - DNA, 327 bp, Zea mays
  Clone ID: MRT4577_93726C.1
ggacaaaaaacaacaggggggatttattaaaaaaaaggggttcccctacctgcccaagtggggccacacaagaaagggcctggccagacaaccagggacaacaggacattgttgggggggaaaagcaagcctcccacccctgaaataatgcccgatagaaaccccgccggggcaggccaaaaaaaaaaacactggtgacaatcccacaacctgtttcccaaaggagttataaaaagggggggggggccccacaaacttttacacatgcgagataaccttttgcacttgaccgccccacacaagatctaaaaacattacttaaatcct

SEQ ID NO: 177783 - DNA, 120 bp, Zea mays
  Clone ID: MRT4577_93727C.1
agagccagaaaacttgtctgtttattaagggcgacgcccatacaagcgggaaggtaaactaagcatgcagcaaagcttaacagacgacacaacgaacacacgtacatagttttttggggg

SEQ ID NO: 177784 - DNA, 1231 bp, Zea mays
  unsure (1)..(1231): unsure at all n locations
  Clone ID: MRT4577_93728C.1
ccgggacagacaccgattccgactcctcgcggttactctctctctctaatttccccgtccaaccccaagttcaatctactccatgggagacgatcgatttggttcccttctctctctctttcggggtgctcgccagaatggggatcgcatttctgctagcgcgcgctgttgctgttgtggggaatgattttgctctttccttgttgcaggtgcagcgaggcaagcacatgggattctcaagtgttaagcaggcatgctgaatgtctggagctggaggagttgactgcaatatcagtcaatcccagtctgcttccagctttgaatcagttgcttctcgaggcgtatgccattctacgtcccaagccgcttgactatgaccagcgcaacaccttggttgatgtcttcaggaagatgcctagatgtaaaccaggattcctacagctcatcgtaaacaggagagtaggcctcatatgcagcagcagcaacagcaaccagaacgctattctgtaacagctggtggacttgcacgtagcaacagtgggtctccggttgtggaaccatttggatcattcacgatggatttatttactcctcacagtgacctggacctctctatcaattntagtgctaatactgatgagcaatatactcgcaagcaaatgatctctattatcaagaaattttccaaggttctattttcttatcagaggagtggaattttctgtggggttttacctattgtaagtgctagggtgcctatactgaaggttattgatcgtggcacaggggtcgaatgtgatatttcggttgaaaacaaagatggcatgacaaggtcaatgatcattaaatttgtttcctcacttgatgaaaggtttcagatactaagttacttggttaagttctgggctaaggtacatgatctgaataccccaagacacctaactatgagctccatgtcaattatttcactagttgctttccatttgcagtgcagacccggcatcctccaatattgcctgcgttctctgacttgttaaaagatgggttagattgcgaaagcattgagaggaatgctttacggtttagggattttgggagtagaaataaagaatctgtcgctgaactgtttgtatcattgataagtaaagtgagtaactataaggttcatcttctacttatgtttgcggttgaggtcacttgtcataactgaatatatataaacatgttttat

SEQ ID NO: 177785 - DNA, 531 bp, Zea mays
  unsure (1)..(531): unsure at all n locations
  Clone ID: MRT4577_93729C.1
ctttttgagccagcttattgtagaagacgggcgggactacgccaacatctgctttagggagtttggggacagagtcaggcactggataacattcaatgagccttggagtttcagtattaatggttatgccagtggtatattagcacctggaagatgctctgcttgggaaaattgaggggggggggcgggagactctggaagggaaccttatattgtagctcataaccaacttctagctcatgcagcagcagttcaggtgtacaaaggcaaataccaggagaagcaaaaagggagcataggaatcactctagtcagcaattggatgattccctacacaaattccaagggagataaggatgctgccaagcgcgcactagaatttatgtatgggtggttcatggatcctctaactaagggagattacccactcgggatgagaacacttggtggtnatagattaccaagatttacaaatgaacagtgaaaagccatgcatggtatcatttggacttgattggggctggaactgct

SEQ ID NO: 177786 - DNA, 252 bp, Zea mays
  Clone ID: MRT4577_9372C.1
atccttaacccccctttttttttttttttttttttttttggtgggcttttaatatactatccaagaacaacaaccctccgttaaatgagccgccacccaccgtatccctctttcctctcgttgttacacacaaaatttaaaactttcacagcgtaacctccttcatgcaaaaggccctaatcccgaaatcttaagctttcccatctgcccttaacgggcaccttattattctagcctgcctggtcccccccc

SEQ ID NO: 177787 - DNA, 794 bp, Zea mays
  Clone ID: MRT4577_93730C.1
gccctggctactctggcggccatctcctccgtgtcttatgacacagacaccgattccgactcctcgcggttactctctctctctaatttccccgtccaaccccaagttcaatctactccatgggagacgatcgatttggttcccttctctctctctttcggggtgctcgccagaatggggatcgcatttctgctagcgcgcgctgttgctgttgtggggaatgattttgctctttccttgttgcaggtgcagcgaggcaagcacatgggattctcaagtgttaagcaggcatgctgaatgtctggagctggaggagttgactgcaatatcagtcaatcccagtctgcttccagctttgaatcagttgcttctcgaggcgtatgccattctacgtcccaagccgcttgactatgaccagcgcaacaccttggttgatgtcttcaggaagatggtgaatcaaagatttggtagcaacagtgggtctccggttgtggaaccatttggatcattcacgatggatttatttactcctcacagtgacctggacctctctatcaattttagtgctaatacttatgagcaatatactcgcaagcaaatgatctctattatcaagaaattttccaaggttctattttcttatcagaggagtggaatttttctgtggggttttacctattgtaagtgctagggtgcctatactgaaggttattgatcgtgccacagggtgtcgatgtgatatttcggttgaaaacaaagatggcatgacatggtcaatgatcattaacattgtt

SEQ ID NO: 177788 - DNA, 3373 bp, Zea mays
  unsure (1)..(3373): unsure at all n locations
  Clone ID: MRT4577_93731C.1
ggccatctnctncgtgtcttatgacacagacaccgattccgactcctcgcggttcaatctactccatgggagacgatcgatttgtcccttcttctctttcggggtgctcgccagaatggggatcgcatttctgctagcacgcgctgttgcttggggaatgattttgcctttgcaggtgcagcgaggcaagcacatgggattctcaagtgctaagcaagcatgctgaatgtctggagctggaggagttgactgcaatatcagtcaatcccagtctgcttccagctttgatcagttgcttctcgaggcgtatgccattctacgtcccaagccgcttgactatgaccagcgcaacaccttggttgatgtcttcaggaagatggtgaatcaaagatttgcctagatgtaaaccaggattcctacagctcatcgtaaacaggagagtaggcctcatatgcagcagcagcaacagcaaccagaacgctattctgtaacagctggtggacttgcacgtgggacctattctccagtttgtgaggggctgcaaagatcccggtttgcatttggtctgcaaataattttttccattgatttgacctttatctaacacaaatttcaggtagcaacagtgggtctccggttgtggaaccatttggatcattcacgatggatttatttactcctcacagtgacctggacctctctatcaattttagtgctaatacttatgagcaatatactcgcaagcaaatgatctctattatcaagaaattttccaaggttctattttcttttattaacagtggatttttctgtggggctctatctcttgtaagtgcctatcactttttactgaaatactctgaagcaattaacccgcatgaacatgatattttccatgaaaatattttcggcatgacaaggtcaatgatcattaagtttgtttcctcacttgatgaaaggtttcagatactatgttacttggttaagttctgggctaaggtacatgatctgaataccccaagacaactaactatgagctccatgctcaattatttcactagttgctttccatttgcaggtaccatgggttaattattattttggtttggttattaaattgcaagtaactgtcccattaccttttgttttaattaattgacctactaaccaatctgcatttgaagacacaaactttggattcatttgtatagaaaataagacgatacttattggggaaattatgaattatcttctttactatcgacaaattctggatatgctttatgccagttcagaaaacatgatagatacccttcttctacacttcctcagtctaaattcctacacttcatgctattgcattctatgtaccagaaaaaatggattttactccattttccttaatggtagtgtttgagtagcaactcattagatgcatggctaagaagataagcatcaatgtgcagtgcagacccggcatcctccaatattgcctgcgttctctgacttgttaaaagatgggttagattgcgaaagcattgagaggaatgctttacggtttagggattttgggagtagaaataaagaatctgtcgctgaactgtttgtatcattgataagtaaactattgtcagcagagagtttatgggagcatgggctgtgcgcaagcaattttgaagcgtcatggatctcaaagacctggaagaaaggagtaggcaatttaagtgttgaagatttcttggaccggtcgcaaaattttgcaaggtcagtgggaaaggtgcagatgcagaagatttgcaaatgccttagagaatgtgctttgaatttgttagatttcatgagagggaaaatggacacaacgaagctgaagacccttttatttgggcggcttagcccagacgaattagtcagcaaacctcgtctgaagcacctcgcggtccgaaggaattgggaacggaccccgcaagggggaagatgtgtgctccagaagagtgcaaagcatgctggtagtgctactggcagtgattcattacccactcctaacaaggtcttgcatcatgcactccattatcgagttgctggccatcagtctagcattcatcagtttgtgcccattattcgatggccacgaatcattccttctggttttggctatggattatcgcttgggattccatcagttgctcctcaccttggcaagggaatactgggcaagccaccaatcattccttctggttttggctacggattgtcgcttgagattccatcagttgctcctcaccttggtaacggaatactgggcaagccaccaagtaatataacacccttagatcaacggagctcaactcaactagtgcacgtacggaatccacaccagcatacatgtcagcaatcatgtggcggagctatggagccgagcagctccggcgtggcttaatgataaggtccggtgatgagcagctctagtagcggttaggagtttgaggttagatttagggtgtgtttggtttgacttttggctttggcttttgccccctaaaagttaaaagccaaccaaagggctggatacaggaagcagctttttttctaaaagccgactttctcgtagtgtaaatctgaaagcacccctgaacctgcttttagtggcttttcggatggaactatgaaaacatatatcaaagaatttttaacgacttttagtggttttcaacaaacggttttttgctttttaacagcttacaacctacaacagctttttccacagctcacatcaacttttttcacagtcacaacccaaccaaacggatcctaagacaaccgagtagtgcaattaaggaccactcatattcaaaaagtcaagagagagaaaacagtttacaatttttttctatagtcaaaccgatcacgaatgggctgaatttcatcaaaatccgtccatttcggtagggtccgacacagtaagaaatccggacaaacaagaattaagcccattttgaattccttgtccatctaaaggttcgatctagcccacaatttagagacccctaccacccatatagattgagatgagactgaatgaaagaaatttttaaatccatccaatttatatggactggatgggattaaaagaatttttttgatttaatagatatttaaattcatttaatcttccctacccgcatagattgagattacaacgaacgacctggtggccggcggctagcaattggctcccaaagtggaggagcacctggacctctaacttcagtagcgtcttttttttcccacgtcattcctcctctacttcagagctggctttcagatttagtcaaatcttggccaaattttatcaaattatattttttccagtcgg

SEQ ID NO: 177789 - DNA, 662 bp, Zea mays
  Clone ID: MRT4577_93732C.1
ctcctccgtgtcttatgacacagacaccgattccgactcctcgcggtgcagcgaggcaagcacatgggattctcaagtgttaagcaggcatgctgaatgtctggagctggaggagttgactgcaatatcagtcaatcccagtctgcttccagctttgaatcagttgcttctcgaggcgtatgccattctacgtcccaagccgcttgactatgaccagcgcaacaccttggttgatgtcttcaggaagatgcctagatgtaaaccaggattcctacagctcatcgtaaacaggagagtaggcctcatatgcagcagcagcaacagcaaccagaacgctattctgtaacagctggtggacttgcacgtgggacctattctccagtttgtagcaacagtgggtctccggttgtggaaccatttggatcattcacgatggatttatttactcctcacagtgacctggacctctctatcaattttagtgctaatactgatgagcaatatactcgcaagcaaatgatctctattatcaagaaattttccaaggttctattttcttatcagaggagtggaattttctgtggggttctacctattgtaagtgctagggtgcctatactgaaggttattgatcgtggcacaggggtcgaatgtgatatttc

SEQ ID NO: 177790 - DNA, 386 bp, Zea mays
  Clone ID: MRT4577_93733C.1
cgacacacgcccgcgtacgtaatgctcggaattcggctcgagctctccatgcctctgttgacgcagaacccactgcagagtcgaggggggcttctaaagacacatgggcggaacccacaacatcctctgcagagccatcaggactcaacagctcctcgcagaattgaatgccacagccgctcccacatatccagaaactgccaatctaacaagcacacagaccacactcattcagtaaccggtttcaggcttcacaaggacataggcctctagcttcacaaggtcaaactcccgagcatacaagagtccatgcaagtgacagagtcaaacatgctgttcggtaaattccgtctccctccatgtccatagccatcacggccagtctc

SEQ ID NO: 177791 - DNA, 677 bp, Zea mays
  unsure (1)..(677): unsure at all n locations
  Clone ID: MRT4577_93734C.1
gatcgatttggttcccttctctctctctttcggggtgctcgccagaatggggatcgcatttctgctagcgcgcgctgttgctgttgtggggaatgattttgctctttccttgttgcaggtgcagcgaggcaagcacatgggattctcaagtgttaagcaggcatgctgaatgtctggagctggaggagttgactgcaatatcagtcaatcccagtctgcttccagctttgaatcagttgcttctcgaggcgtatgccattctacgtcccaagccgcttgactatgaccagcgcaacaccttggttgatgtcttcaggaagatggtgaatcaaagatttgcctagatgtaaaccaggattcctacagctcatcgtaaacaggagagtaggcctcatatgcagcagcagcaacagcaaccagaacgctattctgtaacagctggtggacttgcacgtagcaacagtgggtctccggttgtggaaccatttggatcattcacgatggatttatttactcctcacagtgacctggacctctctatcaattttagtgctaatactgatgagcaatatactcgcaagcaaatgatctctattatcaagaaattttccaaggttctattttcttatcagaggagtggaatnttctgtggggttttacctattgtaagtgctagg

SEQ ID NO: 177792 - DNA, 324 bp, Zea mays
  Clone ID: MRT4577_93735C.1
aagctcggaattcggctcgaggagaattgcaactgtagatgtgttgggaaaactgtacccggtggtgggagggacgtcctaaaccgaccgtgtggaccaagtttcaggcggccaacccagaaccaaccctggttggattgaggagcctgtagtcggaaaacctgcaattgctgaaggactttgctaaggcatttttacgggcgagtgcccggaaacaatagaggggaaaaaggttttaccccttgacatgggacttcttgtagctggcacaaagtaccgtggagaatttcaaaaaagaataaagaatctggtgggggaaaaacc

SEQ ID NO: 177793 - DNA, 581 bp, Zea mays
  unsure (1)..(581): unsure at all n locations
  Clone ID: MRT4577_93736C.1
aacccccgccctgtggggtttttttttttttttttttttttttgggtttttttttttttttttttttttttttttttttttttttttttttttttttttttttttttttttttttttttttttttctttttttttttttttttttttcctctttttgggggtttgtttgggggtttttttttttttgcctctttgttaattcctcttttagtgaatcccccgttctgccgcngccccgcggccnactttgtccacgtcgcnccatggntctgccgggaaccctngnnccccccactttctcttccgaaaacttgccgggcctcctctggggcaaccttcttcacctccncccnttgcccatctgacccttccttccgnggggtctcttggtccccccaccngccttggntnctttgtcccccgtccnggccccggacaccctccngacggggaaccnaaggcacgcctgagcttccggtcccccttggctccatcctttcccctggnccagatgacaaccttcccgncttgcgaagcgctggcnntggtcggtttggcccctccccaaactggcgcccacg

SEQ ID NO: 177794 - DNA, 316 bp, Zea mays
  Clone ID: MRT4577_93737C.1
attggggtcgagtcgggagcctgcgcttttgtttttggaactgcggcccgaaacccggaggcgcaccctcttcccgaatagcgtggcgacccagagcttgctgtactcatggtcaccgctccttccggaccgaaacccatatccgctgagactctccaacaacctgccctacctgggcataaactctaaggccagggacgcccaatgagcgctctaaatcacccacattggctacacctcaccggccactggtaacggccgaaccggggtggacctgctgcgggcaccaatcatgctactgcacctgagaggccag

SEQ ID NO: 177795 - DNA, 777 bp, Zea mays
  unsure (1)..(777): unsure at all n locations
  Clone ID: MRT4577_93738C.1
cccacgcgtccgcaacaggtgaggcaactggctcgggagaaccagctgaaacagatactcaggtctaaaagagagctaaaatggaatcagatgcaggtgatggtaattgggagaagtccagcactcttgacacaacaaagaacaatgacccatcagaaaatacatgggacaaaagaaaaggagatggaggtgatggtgcgtgggggaacaggtctgatgatggccatggcaattgggagcatcccagcaattggaatgggcagagtttggatgtagatcaggacacatggggaaacgccaggggaaaaaagaaggcagatggtaactactgtcaatgggaggagcagccaagcaattacaaacagaagaagacaaatgctgatcatgattcctcctataacaatgtgatgccgtcatcagaaattgcttggaatgctggagagggaactggaagaccaaatgccaagtctaatgcagaatccagttggggtgaggaagataagatggagtctgataccagatcgaaagtcccaaaagaatcagacacatggaatacagggagatcaaatgaaagtccatggggataacactgatgcactgcaggattcctggggttaagagcgcagtcgccaataaccacactccaggatgggttcatgggatnaagtagtatctatgaaggatcttgnttcactcccaagattccatggagtaaggcgacaatccagacgaatgntgcaccagaatgnttcttgggacaatgttggcaaaaaatgc

SEQ ID NO: 177796 - DNA, 465 bp, Zea mays
  Clone ID: MRT4577_93739C.1
ggggttaaaaactttatggccttaaattgggccggccccggttgaattttagcatttaaaaaaggggggccggccttttttgggatgtcatttttacaacttttatttcctaaaaaagttttacccttgaagtttttgattcccccttaaaattatccaacacttggcaaaattttgtttttttttgcttttcattctaaaactcaacctgaaaatcctgaacctataaaaaaacataacttatttacttttgaacaaacacttgtaaatgcctccaaacttgtaaatcaaggggccaggggggggccacttgccaaaatccacatggccaataaccacaatgttgaaatgggacttttttttacccatgactagaggggaagcttaaacttggaacaattagccccactcatttttgcaaaaataaaccccaaactggccctggggtaaattgctgcaacccct

SEQ ID NO: 177797 - DNA, 517 bp, Zea mays
  Clone ID: MRT4577_9373C.1
aaccccggaaaaaaaaaaaatttggggggggatggggggaagcaggtttcctttggggtccccgtttttccccaaaaaaccaagggggggccaaggttcttacaggccacccccaaccttggggggggattttttttttcccggcttctcccaaatataaaaaacccccgggggccttaaaaaggcctccaccggggggggctaaaacccggggccctccaggaatcccgaaggccccccccccctttttttttaggaaattttccccccaggccccgcgggggccccccccccatacattttggggggaaaattttttgggttggcccgggggcattctccgggatagacttcgagggcaacccgggccccaaattccttggggaatttgttttccctgacccctgtttgggggaaaagccccccccattttttttaatccttcggccgcccttttgggaggggcatcaggccgagggccatgggggggggggtttccagcataggcccagggggg

SEQ ID NO: 177798 - DNA, 159 bp, Zea mays
  Clone ID: MRT4577_93740C.1
attcggctcgaggtgatctgcgcttttatatcgcatcgggtgtgttgctgtatcccgggggcatgtaaaagctatacgggccctaaaaaccaagggacctgcgattcaacaccgcgcacgactggtcttgcagacctaaatggatgaaaggacgggatc

SEQ ID NO: 177799 - DNA, 276 bp, Zea mays
  Clone ID: MRT4577_93741C.1
cgcgttctaacagttgtagccgttctacctgcactcttaatctaatgttggcaccctcttacggctgggcatttgctgccattcaaccaacatgctttgacaaacccatcagtgttctaccaacatcccaccattggtggtgcccttcttttagattgcttcattgtagtatagatcaaatataaagtttttttgctgatttttgtggcttcccaaaaataagatagtgcttgtctagttccttaaaataaaaaatagagggcggttgttcttata

SEQ ID NO: 177800 - DNA, 306 bp, Zea mays
  Clone ID: MRT4577_93742C.1
gtgatcaacacgcaacatcacatgcacattccaggcccagcaagggaacacgaagtatctttcctccatgagcaccgagatctagctgcaagtgctgctacggcgaccattttcccgcaatgctcgcaagctcctatagcttcccttcttcccccgtacctctcaccagcggtgacttcggtatgtgaaaacccaatgcctcaaccctacaggagccaccaggcaatcacaggtggcatcttacctttattaccctcgttcctccaacactactgagacctaatacaccagtagcctctggcgcat

SEQ ID NO: 177801 - DNA, 590 bp, Zea mays
  Clone ID: MRT4577_93743C.1
cccgggatctaaaaacctaacctaaattatccacatcaggtggcaactaggtaccatggcctcagaatcttctggggctcacgcgctattcaaatcagaaaatctgaaatggctgctagcggatcatgagatcgattctctgatacgctttaaatccttctttccctctggggacgaaggactcccacttctggtaaaatatcagaagcaggacgagaaggttctagatgtaccataccttctcacggatgggaccatagccccactccgtacgatcctgaacgatggactatccatcgacagggaaatgcaacttatgcgggaaatccgcaaagttgtactctccaaatatccagaggatgatggagagggagaagactacgagatcgaagaaatcgacctcgaagtaacggcaacggaggtgaattcccccgagccgcatgtgtgctccgccgagtcacacatgtctcagccctgcccactggggcaggtcgagactggatcagggtttctccggaaagacaagatccaatttggttctaccctcccagcggaggatgagcctatccttgtaaaggataaaggtcccc

SEQ ID NO: 177802 - DNA, 611 bp, Zea mays
  Clone ID: MRT4577_93744C.1
ggtacacggcgccccttctcgagtttttttttttttttttttttttttttttttttttttttttttttttttttttttttttttttttttttttttttttttttaatggaaaaaaggttaaacccttgtttcccccccataaaaaaggggttaaattttcccaggccccctaggttttggacaaaaattttgaaaaaaacccgaaaaaaaagttaactttccccggatgagggggggcctcaggggaccctttttttgctaccattcctaaggttttatggaaaaaacccttttttggccactaaatttcactaagttttggaaactttttgttttttttatcaaaaactaaagtttttaaagggttttcccgaaccgttgtgttttttgtgttaaaaaaaccccgggatgaaaattttttattttaccactgaaaaggggggcccccggggttttaaaaaaaagggcttttgaaatcccccccttttgacaaaaaaaaaaattttggaaaactttggaataaaacgctgaaccccctcttttaaaatctctcaatgggcgggggggaatgccaaaacccagggggtggaaaaactttttttaaatttttt

SEQ ID NO: 177803 - DNA, 390 bp, Zea mays
  unsure (1)..(390): unsure at all n locations
  Clone ID: MRT4577_93745C.1
gacggttatatcccaaagcaatcttattaaagcgaccacagggagaacaatgtaggcggacaggacaatgagccagatgctggatgctggcnctcccgcccaactcattggaagcatcagtcgggccagacttagcgcaggatagactacttttgcgcttagaagaacacaccactgtgcacacgagggttatgaccaacatgggcctgtctgaggcatcgacacctatctgcttctatggagaatggaagattacttgcacctgatctaggacaaatgtcatgaaggcactctcatctgctcggtgtgcaccaaaacattcttcgagcactgggcgaagatttatgctcacttacacaattgccatgtgaagagcagaagcatgcatgc

SEQ ID NO: 177804 - DNA, 448 bp, Zea mays
  Clone ID: MRT4577_93746C.1
tgagcacgcgtccgcccacgcgtccggaggaagttcatccccatttatctggctcatggcatactgcagcatggggcattctaggatctcgaccagagaggagttgtctagctgtttaagctcgctacagagaggggccgaaaagttaggcctaacttgaaggtggacatatgtggagaacatggtggacagccttcatcggatgcttagttagccaatactgagatggattacgtaatcttgctccgctttcaggaaacccgatcgttatgctagctgcagctaatgtgcttgactgaggggctgcctgctagttggcaatctgctgttgtacaaatggagattaataatactactattacagaaccatatgctctgtgaagagtattataatcaaaatctcataaaaagctacagttccatctatttacttagattatgaaaaact

SEQ ID NO: 177805 - DNA, 224 bp, Zea mays
  Clone ID: MRT4577_93747C.1
ccggccggggcataataccattcactattctaagacagcaactcgtgtctgtcgagtgccgcgatccatgtgcgtcgtcgatgccgccacatgacgcgatggatgtggcattgatgttcttgtcgatgggggcatggagcagttctcccaatgtccccccacccaagaacacctcggccacctatggcaacgactgagtgtatcctcaatcgacatgcgatgcc

SEQ ID NO: 177806 - DNA, 345 bp, Zea mays
  Clone ID: MRT4577_93748C.1
accatgcgtgcgaagatcatgtagtctgggatctttgcatcctgcataccgtcgagcgttgataatgtccgcgactgaggaaagaacatggatgagtttacgatgaaagctgtatacatgggtacctctgggaagggtatgccttcatttgatcatggcactggacccactggcactcgcgtttaaagaatcaatgaagagaacgtttgggacaaccgttcaccaatctaacagctactatgccgatgctgtggcgctcatcattccatcaacagtgggatcctgatccatgctacaaatgcttatagaacctggggggggtagcgttgttactaatgacggaaa

SEQ ID NO: 177807 - DNA, 612 bp, Zea mays
  Clone ID: MRT4577_93749C.1
gggtacctcgaggccggccgggccgggagtaccagaagcatcgctcacacagtcagatcgacgcactcactaacacacacacacacacacacacggacacacaacttctccatacacgccgtagccatggcttccgctgcgcagaagaagatgacaattgtttgcttgatgctgctggccgtcgtcggccaaatcctcgctgatgctgatgttaccgtagaacatcccagccgcatctgcgccgaaacggtgattgatcctcgtgttcccaacaacgtgtgcatctgctccaagaactgcgcctgtgccggcaagtgcatccttgagtcgcctgatgctgtccagacctgctttgtcgactgcgtcctcaagaacgactgcatctgcagcagcaagatcatccccggcgctgacgacccaaaggctaatgccaagtgaagtagtactgctatcatcccgaatagtacctgctgaataaacctcccatgcaccaacagggagagagtctgtacgtcttctttgtaatcatgaaccgcttgtacgtgtaatatataataaaccactgtcccccttacacatacaaaaaaaaaaaaaaaaaaggcccctagggcc

SEQ ID NO: 177808 - DNA, 759 bp, Zea mays
  Clone ID: MRT4577_9374C.1
tattatcggtatagcaaatacaatggatcttccagaaaaactgttgcctcgtatctcaagtaggatgggtattcaacggctgtgttttggcccctataattatcggcaactgcaggaaatcataacaagccgtcttaagggtatcaatgcctttgaagatcaagctattgagtttgcttctagaaaggtagctgctatgtccggtgatgctaggcgggccttagaaatttgtagacgcgcagcagagtttgcagactaccgtgttaaacaatttcaacaggttgaacagactccctcttctgcaaatacaggaaatggttttgtttgcatgggtgacatagaagacgctattcaagaagtctttcaggcaccacatattcaagtaatgaagaattgcccaaaatttggaaaagttatactggctgctatggtccacgaattatacagaagtggcctaggtgaagtattgtttgataagctggcagcgactgttttctcttggtgccacgtcaacagagaactattgcccggatacgacactctcctgaaaatctgttgcaagcttggtgagagcaagatcgttctctgcgaggaaggcaccaaacataagttgcagaagctgcagctcaactacccaagcgacgatgtgacctttgcactcaaggagtccccagatcttccttggctgtccaagtacctctagatctcatacctgcagtggccaaatttcccagcgctcgcattgcattcctgcttctc

SEQ ID NO: 177809 - DNA, 235 bp, Zea mays
  Clone ID: MRT4577_93750C.1
gctcgagcgacccgtcagagcaagtactgtgcatagaggtatactacttgtcattgagacagtggtacctacacggcgggtgagcagatttcgccggctgccctcgtgatcatgcgatcaacctactatgggcgagctgtgacctatagcgacagcgaatagtagaccatgagagttccggtgctatcctgcacacgttcaacgcctgccttcaaaaatgcatagatgtgagtta

SEQ ID NO: 177810 - DNA, 318 bp, Zea mays
  Clone ID: MRT4577_93751C.1
gtccggaatcccagcaggcatgtcggcgagtacggcaggaagaccgaataccaagccttagagaatctcgggacgggaacgggacaggaccccaaaatctcagatccttcctgcccgcccgcccgtgcccgtcgacgcgtcgttcttgccggccgcgccccacctccgccctctcctcctccagggggatcggatacgccacagtctgcgcgatggtgctgtgggtcttcggctactgatccctcatctggaaccccggcttcaactatttctacaatatcctcggctatatcaatggctacaagcgcacctttaatc

SEQ ID NO: 177811 - DNA, 744 bp, Zea mays
  Clone ID: MRT4577_93752C.1
ggcccgggaagagccacctcgagccggccgggccggggacacagcaaccagtaagccatcgctcacacagtcagaccgacggactcattaacacacacacggacacacaacttctccatacacgccgtagccatggcttccgctgcgcagaagaagatggcaattgtttgcttgatgctgctggccgtcgtcggccaaatcgtcgctgatgctgatgttaccgtagaacatcccagccgcatctgcaccgaaacggtgattgatcctcgtgttcccaacaacgagtgcatctgctccaagaactgcgcctgtgccggcaagtgcatccttgagtcgcctgatgctgtccagacctgctttgtcgactgcgtcctcaagaacgactgcatctgcagcagcaagatcatccccggcgctgacgacccaaaggctaatgccaagtgaagtagtactgctatcatcatccccaataatggcgtacgtacctaaataaacgacctcccatgcatgcaccaacggggagagttaagtgtgtaataattaacggccggtatgtctgtacgacgacgcgtcttgtttgtaataataaaccccttgttttgtacgtgtaataataaaccactgtccacgcgccttacacgtaaaaaaaaaaaaaaaaaaaaaaaaaaaggcccctagggccgaaaaagcaagaaccaaaaaaaaaaaaaaaagcgggcctcgagctcccacttttgccccctt

SEQ ID NO: 177812 - DNA, 478 bp, Zea mays
  Clone ID: MRT4577_93753C.1
aaaagcactgacttgattctgaaggctgcatacaatgtgggtgggcattcagtgaactcccaaactatccagaactcgattctaggatgccagtcccaccgcccttcactgtgggttcggacactatttacgccgacgaaaaaatctgggagctccatacatccatatgcgcttcagtacgcagagccaattgcgcactttgcgctctcgaccggcgcgttttcagacccacctgtgaggctgtacacagccaagaaactgtaccatcagctggagcaagccagggccgagttcatccaagcaaatgtcatggtccggaggcagaccatcttcctgcccaaggttctccacttctatgcgaaggatgcttccctggagctacctgaccttgttgacatagtgtgcgagagcatgcctgagctgcagcgaaaagagatcaggcagtatcttaggaggaggatcgacaagtgtgttcagt

SEQ ID NO: 177813 - DNA, 736 bp, Zea mays
  unsure (1)..(736): unsure at all n locations
  Clone ID: MRT4577_93754C.1
gccggccggtccctagaaaaaaaaaaagaaacctcgaggccgggcgggaaaacagcaaccagtaagccatcgctcacacagtcagaccgacgcactcactaacacacacacacggacacacaacttctccatacacgccttagccatggcttccgctgcgcagaagaagatgacaattgtttgcttgatgctgctggccgtcgtcggccaaatcgtcgctgatgatgatgttaccgtagaacatcccagccgcatctgcaccgaaacggtgattgatcctcgtgttcccaacaacgtgtgcatctgctccaagaactgcgcctgtgccggcaagtgtatccttgagtcggctgatgctgtccagacctgctttgtcgactgcgtcctcaagaacgactgcatctgcagcaacaagatcatccccggcgctgacgacccaaaggctaatgccaagtgaagtagtactgctatcatcatctccaataatggcgtacgtacctaaataaacgacctcccatgcatgcaccaacggggagagttaagtgtgtaataattaacggccggtatgtctgtacgacgtgtcttgtttgtaataataaaccccttgttttgtacgtggaaaaaaaaaaaaaaaaaacggccctagggccaaaaaaaaaaaaaaaaaaaaaaaaaaaaaaannnnnnnnnnnnnnnnnnnnnnnnnnnnnnnnnnnnnnnnnnnnnnnnnnnnnnn

SEQ ID NO: 177814 - DNA, 871 bp, Zea mays
  Clone ID: MRT4577_93755C.1
ctcgaggccggccgggccgggtaaaaaaaaaaaaaaaaaaaaaaaaaaaaaaaaaaaaaaaaaaacccggcaaccagtaagccatcgctcacacagtcagaccgacggactcactaacacacacacgcacacaacttctccatacacgccttagccatggcttccgctgcgcaaaaaaagatgacaattgtttgcttgatgctgctggccgtcgtcggccaaatcgtcgctgatgctgatgttaccgtaaaacatcccagccgcatctgcaccgaaacggggattgatcctcgtgttcccaacaacgagtgcatctgctccaagaactgcgcctgtgccggcaagtgcatccttgagtcgcctgatgctgtccagacctgctttgtcgactgcgtcctcaagaacgactgcatctgcagcaacaagatcatccccggcgctgacgacccaaaggctaatgccaagtgaagtagtactgctatcagcctatcatcatccccaataatggcgtacgtacctaaataaacgacctcccatgcatgcaccaacggggagagttaagtgtgtaataattaacggccggtatgtctgtacgacgtgtcttgtttgtaataataaaccccttgttttgtacgtgtaaaaataaaccaaaaaaaacgcgccttacacgtaaaaaaaaaaaaaaaaaaaaaaaaaaaaaaaaaaaaaaaaaaaaaaaaaaaaaaaaaataaaaaaaaaaaaaaaaaaaaaaaaaaaaaaaaaaaaaaaaaaaaaaaaaaaaataaaaaaaaaaaaaaaaaaaaaaaaaggggggggctgttttaaaagaaaaaaatttttcagaggggggtaggcaagtaataatctttt

SEQ ID NO: 177815 - DNA, 599 bp, Zea mays
  Clone ID: MRT4577_93756C.1
ggccggccggccgcgaacagcaactcgcagaaacgagtagccatctatcgctcacacagttatacaaaacccgtcggccgtcgccatggcttcccgtgcacagaggaagatgacaattgtttgcttgatgctgctggccgtcgtcggccaaatcatcgtcggaatggccgtagaacatcccaatcccagcaacatctgcaccgaaacggtgattgatcctcgtgttcccaacaacgagtgcatctgctccaagaactgcgcctgtgccggtaagtgcatccttgagtcggctgatgctgtccagacctgctttgtcgactgcgtcctcaagaacgactgcatctgcagcagcaagatcatccccggcgctgacgacccaaaggctaatgccaagtgaagtagtactatcatcccaaataatgtcctacgtatagtacctgctgaataaacctcccatgcaccaacagggagagagtctgtacgtcttctttgtaatcatgaaccgcttgtacgtgtaatatataataaaccactctccaccttacacataaaaaaaaaaaaaaaaaaggcccctaaaacaaaaccaaaaaaaaggcccc

SEQ ID NO: 177816 - DNA, 342 bp, Zea mays
  unsure (1)..(342): unsure at all n locations
  Clone ID: MRT4577_93757C.1
ccgggctgnataggggaaggaccggattaagttttgcagcgattttaccgcaagggatgggaaacaacatgcattgcttgataatcttaatcaggaattggcccaaaagtctgtactattgggtgatgggtttaaactggcagctgctgataatgatgtgtttgcaaccggtcatccctttgggaacccgggtagggacaggggggtgcaaaaatattcacatggaccggggggggtggaccacattcaaaacactggtggggctggtacaaccttgcaaaagataaaagggacccaatctgacctttaaccaccttcttattcaaaggaaggttgtaaaaa

SEQ ID NO: 177817 - DNA, 571 bp, Zea mays
  Clone ID: MRT4577_93758C.1
aaaaccgggggcttgtaaaaactttggggaaaacttgtccttttcctggggggggtttgcaaagaaaatttttgacccggggtcttttttttgacaggggggccgtcaaacccaacgcaagggggggcaacctaaccccttggaaacccccgaaaggcccctgaaaaatgttggagggccccaatcaggggttggggggccccaaaatgcctaaacctataaacccccgagggggggtttccagaaacggtcctttccagggtcaaaaagtttttggggctaattttcaacggtttcaaccatttgaagcgtagggaccattcgtcgtcttttaaggcagaaacccagttgttggtgccgtccattttttaaaaaagcgcaaacgtgccgtccgaaaaaaggtctttcctcggcccccccaagaaaaatgtagggttcacaaccctgcccttcctaaaagttgaccttggggggacctttgaactgacatttccaaactccacccaaggggggggggagtcaaacacaaccccggggaggagtcctttttgtttgcccaacatgtcggggg

SEQ ID NO: 177818 - DNA, 441 bp, Zea mays
  Clone ID: MRT4577_93759C.1
ccggccggggacaagcggacgatagcggactttactgcgctcctcccgagcatagctatgctcgctcccgcctcctcctcgtcctcgccgcctccgggatgagcgtctgcgccttacgctaagccgatggtgcattaaacccatccctgactacgtactttccgcctggggatcctccccaagggttgtggacggctacacggtcgacaacggcacggcgagcctttactggcactgtcgacggctccgctgccgaaagcgatgccgccggatgagaagtctccatccagggctcctactgactcgggtaccagatccagattgccgcacagatcgaccccgaacgcctcaccgacctcgagggaggatacgataagggcctgttcttctggctcccatagatgaggacacccgtcgcatataccactacgagaatgccga

SEQ ID NO: 177819 - DNA, 607 bp, Zea mays
  Clone ID: MRT4577_9375C.1
ggcgctgggccacggtggccagcacaggaccgggtcgtccaccgacggcggcatggcggcctcctcgtcgtgcacccccaccataacgttcgcgttccagcagccgtcccctgcccctactgcgacggcgacgagctccctcgccctcgtccacccctaccaccatggcgtgctaggttacggctccacctgccttctactggaccaccatcacccaaccaccgtcacctcctaggactctccctcgcacgcaggtccatccagcgtccacccggcctgcacccttcaccaccactttcatggccatgcaaaactgagcgccgcacgtttacctgtactctaccacgagggcgtggactgctcctggtactcatccatagacaacggaagcggtctgctaagaacagccggaaccggatcacgagcatcgccaacaagcatgccaaggcggcagaccgtctagggggaagggagcggtggtgagccaggggtcagcagcagcgctggcggtggacaccatgcagatgaacaaagccggccgtggaagaggatgcaaggcgcatcggaaggtgcacgagccgcggatctgcttcaagacgatgagcga

SEQ ID NO: 177820 - DNA, 472 bp, Zea mays
  unsure (1)..(472): unsure at all n locations
  Clone ID: MRT4577_93760C.1
cagacaggtgctagtagtaaaagaagattcatgctttggttgcttacttcatatcaaatgaaakaaaagaagaagatgatgaagatgcagggtggccgggtgtgggtgactcgtcggttattcggcggagtggagaactggatcggccaacgcaagaagaacacgtgctagttatgttatgaactagcgctgcttcttgttgagcccgaagcggttggcaaagaaggcgtcgcgcacccacgcaggcgacacggcgagcgcggcgaacagcagcctcatgttgccgtagacgatctccctgggcggccgcscgcycatgacccggcgcgccacgtgccttgcgaagacggcggcgtccgttgccttccccgtctgcnacgccctcgcgcgcycctcgatggccggtgcsaagtcccggtacatgcgccactcctggtgggaggcgaggkgcgcggcgttggcgcgtcccarc

SEQ ID NO: 177821 - DNA, 220 bp, Zea mays
  Clone ID: MRT4577_93761C.1
gccgcgcatgcctttagcgacggctctgtcgttggctggctccaagctactcgccggggctagtcgcgtcatcgcgcaacacggcgcgtagagcatcatcacccggcccatgttccagaacatgctgaaccacaatgtctacagccggtgccagggcgccttctacacctacttcgactccatcgaagcctccatcaagttcctcagcttcagcaccacc

SEQ ID NO: 177822 - DNA, 463 bp, Zea mays
  Clone ID: MRT4577_93762C.1
aaaacaacaaacttattcatgattggccatagttcggggtagtccccacacacaacaaaaccggcccatttttaaaccaacgggggcgcgaacagcaaatccttcgacaccctccatttggagggggccccaaacgacccaggcccatgggcggttaaaacgacccatgacttactgcccaccacggaaacggaccacaagggggaggggggcctcctttgggatgttgaagtctgctagggggcggccatcctccagctgtttgccggcaaaaatcaaaccctgctggcccggggggatgccctccttgccctggatcttcgccttcacattggcgagggggcccgagctctaaacctccagggttatggtttttccagtcagggtcttcacaaagatctgcataccacccctgaggcggagaacaaggtgaagggggctctccttctggatgttgaagccc

SEQ ID NO: 177823 - DNA, 120 bp, Zea mays
  Clone ID: MRT4577_93763C.1
ggggcggccccacgcgtccgactggttttggatcgcgggcggccgtttttttggttccaagctaacgtcccctggcttgcgaggggtttgttttctaatagggggacctaaatccaatta

SEQ ID NO: 177824 - DNA, 387 bp, Zea mays
  Clone ID: MRT4577_93764C.1
caaacaacaaacttattcatgatttgccatagttctggggaggacgcacacacaacacaaccggtccattattaaaccaacactgacacgaacagcagatacttcgatatcctccatagggagagggcaccagacgacgcaggcacattggcaggttaaacgacccatgacttactggccaccacggatacggagcacaagggggagggtgctctccttttggatgttagaatctgctagggtgcggccatcctccagctgtttgccggcgaaaatcagacgctggtggtccggggggatgccctccttgtcctggatcttcgccttcacattgacaatggtgtccgagctctcaacctccagggttatggtttttccaggcagggt

SEQ ID NO: 177825 - DNA, 691 bp, Zea mays
  unsure (1)..(691): unsure at all n locations
  Clone ID: MRT4577_93765C.1
ccggccggtttttccaccctaaccaccctcgaaatcgagcagcgccattacgaatccgcggcgaagctcaaactacggacctcacgctgccgtagtgattttctcggaggcgggacgtcgtcgttgctgtcgctcgggtctcggcgcgtcacggcaactcgtggtggtcctcggggtgtggcaatccccgccgtcgtcaaaccaccgccgcggacccgtcgctccgcggaatcgtgaacctgtcgccgtatcggcctcgggttgcaatcggggaccccaattccggatcagggtgcttcgccaggactcggggaggtgtgggcgcggttcctccaagctgggggatcaagccgggtgcaggcaattgcttgccgtcgacgcgctccgccgtgacccgcctagcagcgtggaccgaggcgcccacgccattacctttgaagagcccgttgctgaggatcctggtgagcagcaggttgaagtagctgagcaggagctcattgaaggagaagagcaggtggttcaggaggagccacaaggcgaggagtatgatctgatctaggtggcgattctcagttgacatctgcgccgacgatccttagttcgttntatactcattattttgtaataagtcttccgctatgtaataaatactctgatgttttacaaaaaaaanaaaaaaaaatttgcggcc

SEQ ID NO: 177826 - DNA, 718 bp, Zea mays
  unsure (1)..(718): unsure at all n locations
  Clone ID: MRT4577_93766C.1
agggttgggctctagacctctaccagtgaaaatgcgctggatgcgaccggtgcactgttccttgtcggcgacgacgacaacggcaacgagttcgaacgggcaagagcagacctcgacaaggcgggcagaaggacgggcctccgctcgaggttcgtcttcgagtcgaagaccaggggcaaagcggacaccattgccgcagagctctcgacgcagctcggagcgtcagctggccatcatctggggagacccgtcgagctaaccaggctgcagtacagcgcccgggtcaacaggtggctgtccctgaccttggtcccgtttggagcccggtgcaccaacttcttgcatagttcaagcatgatccagaatctacgggctcaagcctctctcgacggcccaccgtcaaccttcgagcaccatgactgcggcgctggcttgaggatccaaggatccaagctcaccgcctccttggctgggctgatcctgggttcaggaggactagacagtgggggcggcggaggaggaacaactnaccgcgtgacgacgttcgggcaagtgacctgcagaccagccaacgatgtgaagctcagcttgtcgggactttggcaggtccactcaccgtcgtcgtcgtcgtcccggctcaaccatgttggaatcgtcgccatcccacggggcagcctgagaccagaacaccccaccggaggcggcactacagaaggac

SEQ ID NO: 177827 - DNA, 1210 bp, Zea mays
  Clone ID: MRT4577_93767C.1
ggccgggaaagtttctccgcgctagcgatttgctgttgctttctcgcgctgggtcccgcggacgcaggtggcaccttgattcttctcaaatctcaacacacacgaaggctacggatcacgctagaagtaacaagctaaaaacttgagctctcggtagcacgagaatctacagatatgaatcaagttagataaggagacgacggtgcggggaggcaaggcaaagggggcgacgaagaggaaagcgaagaaagcgtcatggggcttggccttggcgtgcgggcggcgcccttcacgtacgcggcgcacgcgctggccgtcgcggcggcggccatggtgttggtctgggccatctacttccgcggtgggctcgccatcgaggccaccaacaagaacctcatcttcaacgttcaccctgttcttatgcttatcggttatattatcatcggcggcgaagctataatggtatacagggtacttccaacatcgaaccacgagacaaataagctgatccatctagttctccacgggattgcacttgtccttggtgcggttggaatatatttcgccttcaaaaatcataatgagagtgggattgccaatctttacagtttgcactcttggattgggatagggacgattactttgtatggtattcagtggatagttggattcgttacattcttcttccctggtgctgcgccaaacgtgaagaagggtgttcttccttggcacatactctttgggctctttgtctacatcttagcactggctaatgcggaactcggctttcttgagaagctcactttcctcgagagctcgggtctcgacaaatacggcacagaggcattcttggtgaacttcacagcgttggttgtcgtgttgtttggtgcctctgttgtggtggctgctatagctccagttcgccttgaagaaccacagggttatgttccaattccagaaaactagtacaaatgaaatgtacatcatatgcagttgccaagattggctgttaccacatggagataagatattcatgtctctttattgacggagaagaaggtgatggaattatcacaataaagatgtagacataaatgtgtgtgtatatacattctgtgacacttcaaaatttcagtatatgcaaaacgtgaatatcctgcttcataaatgtgtgtgtttgctttcatgaaaaaaaaaaaaaaaagcggcc

SEQ ID NO: 177828 - DNA, 182 bp, Zea mays
  Clone ID: MRT4577_93768C.1
gctcacttgtttctaacagaaactttgttgatctaccaatactaataacttttgatacttactcaatttcctttcaatgccactttcaaataaataaaaatgaaggagagactggaatgaaactgtatttaggctgaggttatagtcaaaggaggaggcatcatatgtctactaactgttag

SEQ ID NO: 177829 - DNA, 562 bp, Zea mays
  Clone ID: MRT4577_93769C.1
gaaacatcaaacttattcatgatttgtcatagttctgggtagtacgcacacacaacacaaccggtccatttttaaaccaacactgacacgactcatgacacgaacagcagatactttggcgggggcggggggagagagggcaccagacgacgcaggcacatcggcggcttaaacgacccatgacttactgaccaccacggagacggagcacaagggggagggggctctccttttggatgttgtagtctgctagggtgcggccatcctccagctgtttgccggcgaaaatcaaacgctgctggtccggggggatgccctccttgtcctggatcttcgccttcacattgtcgatggtgtccgagctctcaacctccagggttatggtttttccagtcagggtctttacaaagatctgcataccacctctgaggcggagaacaaggtgaagggtgctctccttctggatgttggagtccgcgagagtgcggccatcctccagctgcttgcccgcaaagatcaaaccctgctggtctgggggaaagccctccttgtcctggatctt

SEQ ID NO: 177830 - DNA, 420 bp, Zea mays
  Clone ID: MRT4577_9376C.1
cttccgatgatgattgaagcctttggcaatggtctacctaatggcttactggcattccttaatgggaggtatcctggctagccctggcttaattaactgaatggggtacctttgaaaggttggagggttaaaaggaaggaagagaggaattatatggagtgattagatatgaaggctattaatatctaacctagtaacctgtatgaggattagacacaaacggggattagaaggaaaactcttctttcttgttcggttgcgggcaaggcccccagtcggcctcctctctccttctaaaccctagctactgccataacatctggtataggagattgccaggttccaatgagggcggcaaacagtcgaaggtgcccacccctgccgccgtggcatgtatctatgcgtgcttggaatcctggc

SEQ ID NO: 177831 - DNA, 1190 bp, Zea mays
  Clone ID: MRT4577_93770C.1
ccacgcgtccgctaaaaacaacaacaaatcgacgaaataaactgtcatctataggagacggtccgccggggcccgacgctcccgcactctctctctctccctccctccaactcattggcagcagcaaccgcagccgcgagggccaagcaggggggacaaggaaaagggccgacgaagaggaaaaaggaagaacgcgtcgcggagccatggggcttggccttggcgtgcgggcggcgcccttcacgtacgcggcgcacgcactggccgtcgcggcggcggccatggttctcgtctggtccatccagttccgcggcgggctcgccatcgagtccaccaacaagaacctcatcttcaacgttcaccctgttcttatgcttatcggttatgttattatcggcggtgaagctataatggtgtacagggtacttccaacatcgaatcatgacacaactaagctgatccatctaattctccacgggattgcacttgtccttggtgcggttggaatatactttgctttcaaaaatcacaatgagagtgggattgccaatctttacagcctgcactcttggattgggataggaacaattactttgtatggtattcagtggataattggattcgtcacgttcttcttccctggtgctgcgccaaacgtgaagaagggtgttcttccttggcacgtactctttgggctctttgtctacatcttagcactggctaatgcagaactcggctttcttgagaagctcactttcctcgagagctcaggtctcgacaaatatggcacagaggcattcttagtgaacttcacagcattggttgtcgtgttatttggtgcctctgttgtggtggctgctatagctccagttcgccttgaagaaccacagggttatgatccaattccagaaaactagtgcaaatgaaatgtacagcgtatgcagttgccaagattggctgttaccacatggagataagatattcatgtctctttattgacggagaagaaggtgatggaattatcacaataaagatgtagacataaatgtgtgtgtatatacattctgtgacacttcaaaatttcagtatatgcaaaactgaatatgctgcttcataaaaaaagaaaagtgtgtgtatttgctttcatgaatatcctgcttcaaaaaaaaaaataaaatctattctctagt

SEQ ID NO: 177832 - DNA, 576 bp, Zea mays
  Clone ID: MRT4577_93771C.1
aaattccaaacaacaaacttattcatgatttgaaaaagttctgggtagaacccacacacaacacaaccggcccattattaaaccaacactgacccaaacagcaaatacttcgacaacctccatatggagagggccccaaacaacccaggcccatgggcagtttaaacaacccatgacttactgaccaccacggaaacggagcacaagggggggggggctctccttttggatgttgaagcctgctagggggcggccatcctccagctgtttgccggcaaaaaacaaaccctgctggcccggggggatgccctccttggcctggatcttcgccttcacattggcgagggggcccgagctctcaacctccagggttatggtttttccaggcagggtcttcacaaaaatctgcataccacccctgaggcggaaaacaaggggaagggggctctccttctggatgttgaagcccggaagagggcggccatcctccagctgtttgcccgaaaaaatcaaaccctgctggtctgggggaatgccctccttgtcctgaatcttggccttcacattggcaagggg

SEQ ID NO: 177833 - DNA, 770 bp, Zea mays
  Clone ID: MRT4577_93772C.1
cattgggtacctcgaggccggccgggaacctcgtgttcgttcggagcgcacacacacacaaccagatctcccccaaatccacccgtcggcacctccgcttcaagatgcagatctttgtgaaaaccctgaccggcaagactatcaccctcgaggtggagtcgtctgacaccattgacaacgttaaggccaagatccaggacaaggagggcatccccccagaccagcagcggctcatcttcgctggcaaacagctggaggatggccgcaccttagcagactacaacatccaaaaggagagcaccctccaccttgtgctccgtctccgtggtggtcagtaagtcatgggtcgtttaagctgccgatgtgcctgcgtcgtctggtgccctctccatatggaggttgtcaaagtatctgctgttcgtgtcatgagtcgtgtcagtgttggtttaataatggaccggttgtgttgtgtgtgcgtactacccagaactatgacaaatcatgaataagtttgttgtttgaaaaaaaaaaaaaaaaaaaaaaaaaaaaaaaaaaaaaaaaaaaaaaaaaaaaaaaaaaaaaaaaaaaaaaaaaaaaaaatttcgccttcacctcgccgtttcctccttgaccgccacgcgttgacgtcgtctttccggcgaggtagctcgccggaaaacctcacctggatttttccgagcaccctccaacattctttaaccctccggaagggccgcctgcttctagttcgtcaacgccccaatctccgt

SEQ ID NO: 177834 - DNA, 118 bp, Zea mays
  Clone ID: MRT4577_93773C.1
acgcgtccgactggaactatacacatagttcagacatcagtgctatgaggatgctaatctgatgaagctggttgcggaaatcattggaacactgtatgaccatcattcgtcacattcg

SEQ ID NO: 177835 - DNA, 588 bp, Zea mays
  Clone ID: MRT4577_93774C.1
ggaaaaaaaaaacataaggagcccgggctttaatttcaaacaacaaacttattcatgatttgccatagttcgggggagtacccacacacaacacaaccggtccttttttaaaccaaccctgacccgaacaggaaatacttcgacaacctccatatggggggggccccaaacgacccaggcccatggggggtttaaacgacccatgacttactgcccaccacggaaacggagcacaagggggggggggctctccttttggatgttgaagcctgctagggggcggccatcctccacctgtttgccggcaaaaatcaaaccctgttggcccggggggatgccctccttggcctggatcttcgccttcacattggcgagggggcccgacctctcaacctccagggttatggtttttccagccagggtcttcacaaaaatctgcataccacccctgagggggaaaacaaggggaagggggctctccttctggatgttgaaacccgcgagagggcggccatcctccagttgtttgcccgaaaaaatcaaacactgctggtctgggggaatgccctccttgtcctggatcttggc

SEQ ID NO: 177836 - DNA, 422 bp, Zea mays
  Clone ID: MRT4577_93775C.1
cacgcgtacggccaagcatggatcttgtacaattaattgatctcagtatacctttttaattatttatcgccgggatgataattttgagggtttacgtgagacccctccctcttacaatatatacatcgcccgggcttatattttttttgaacaccgaattagattttttggctggcgcctacaggacccaagcttactggcgccggcatgcgacatcagaacttttctatagagtcggcttaaatcactacactggacttttctcgccaacgtaatgactggcaagtcccaaacgaaacccaccttaattaggtttcagaacattcccctttccacaactgtcataatgccttataagaccccacccttcatacttgccaacagcttgggcccaccccaggaattatatggaacgcgccctt

SEQ ID NO: 177837 - DNA, 458 bp, Zea mays
  Clone ID: MRT4577_93776C.1
gaacataatgagcacaggttgttaattttaaacatcaaacttattcatgatttgtcatagttctgggtagtacgcacacacaacacaaccggtccattattaaaccaacactgacacgattcatgacacgaacaggagatactttgacaacctccatatggagagagggcaccagacgacgcaggcacatcggcgggttaaacgacccatgacttactgaccaccacggagacggagcacaagggggagggtgctctccttttggatgttgaagtctgctagggtgcggccattctccagctgtttgccggcgaagatcacacgctgctggtccggggggatgccctttttgtcctggatcttggacttcacattgtcgatggagcccgagctctcaacctccaggggtatgggttttccaggcagggtctttacagagatctgtataccacctctga

SEQ ID NO: 177838 - DNA, 358 bp, Zea mays
  Clone ID: MRT4577_93777C.1
gtgtggttttttttttttttttttttttttttttttttttttataaaaaacatttgtttatttgtttgggcagaattaaagccttttttgaactccagtacacgttaacgcacgggaaaagttcacgaacactgagcttggtgttacagggttgcgggtacagggatcagtaaccagcaggtggggaccgtttagccagaaattccttgttgtggttcaacagactttcggggttcgggattaccttctttacggggttcactggcaagaagggctttgtccacgccgttaagggcgggaacttggtcttgttcaaaagctttatgtcgggcggcttgttgaccactttttttcacac

SEQ ID NO: 177839 - DNA, 485 bp, Zea mays
  Clone ID: MRT4577_93778C.1
ggaacataatgagccccggctttaatttcaaacatcaaacttattcatgatttgccatagttgtgggtagaacccacacacaacacaaccggtccttttttaaaccaacactgacccgacttatgacacgaacagcatattttttgacaacctccttatggagagagggccccagacgacgcaggcacattgggggtttaaacgacccatgatttactgaccaccacggaaacggagcccaagggggggggggctctccttttggatgttgtaacctgctagggggcggccatcctccagctgtttgccggcaaaaatcaaaccctgttggtccggggggatgccctccttgtcctggatcttcgccttcacattgtcgatggggtccgagctctcaacctccagggttttggtttttccagtcagggtctttacaaagatctgcataccacctttgaggcggaaaacaaggtgaagggggctct

SEQ ID NO: 177840 - DNA, 362 bp, Zea mays
  Clone ID: MRT4577_93779C.1
aattccaaactttaaaggtgttcatgaggtgtcatagctctgggtagtacgcacacacaggagaaccggtcctttattaaaccaacactgagacgactcatgacacgaaccgcaggaactttgacaacctccttaggagagagagggcaccagacgacgcaggcacatcggcagtttaaacgacccatgacttactgaccaccacggagacggagcacaaggtggagggtgctctccttttggatgttgcagtctgcctagggtgcggccatcctccagctgttcgccggggaagaacataacgctgctggtccggggggatgccctccttgtactggatcttcgccttcacattgacgatg

SEQ ID NO: 177841 - DNA, 508 bp, Zea mays
  Clone ID: MRT4577_9377C.1
agacaagctggcactgcggaggagggttgttgggttggacctggtgtggctggagccgagctgctcgccgtggctggcggtgccggcgcgcagcatgccgtgtggagactgatgaccggacccatgtttacataggatgcatgagccaccgcggggacatggctagccagtggcgcattctacactctacgacgccttcatggagggcgtcagccggagagccaggcttgggcgccaccggtgacgtgcaccactcgcacagcggaagctagccggcttcttcggtcacacgtattacgtaaccaccggtggctggtcgagtgctccggacggaccagaggactggggatactgccggatgaaggaacagaaagcggacggacccgccctactatggccgacagcccatgcagctcactgtggacaactctggctcgacgcgcatgcgctgaaactgaacctggtgggcgagccggacctggtgtatagagaccgagtggtggcctta

SEQ ID NO: 177842 - DNA, 504 bp, Zea mays
  Clone ID: MRT4577_93780C.1
gacccacccgtggcgatattacaccagaaaccacaataaagacgttcattgaacaattcgatactgctatgaagctcaggtctgatcgagaagcctatgatgatttccgttcatttcaacaaaggccacaagtcctgtctggtcttctgtttgaggagcaatttgcaaatgtttatacaataaatatgttccagaaattccaggatcagttgaagcagctgatgaatgtgaattgcactgaagtcagtaggaatggttcaatagtgacatacacggtgacagtaattggaaaggagaggaagtttgactacagagtgatgtataacagtgctgagaaagaagtgtggtgcatctgcaggtcattccagtttaaaggtattttatgtagccatgctcttgctgtcttgaagcaagagcttgtgatgctaatacctcccaaatatattcttgatcgaatggctaaaggactacaaatgccctcaggaacctattgaaacccccatt

SEQ ID NO: 177843 - DNA, 345 bp, Zea mays
  Clone ID: MRT4577_93781C.1
atggggaacacaaaaaacgggggatatctttttactccccctggctataaagaaatggccattttccataaagcaaacatttttatgaatttggctttacagccatttaatatgggaactggggtaggggaaatgcaaaatgcaatgtctgtcagaatggtcttccaaaggcagagcagggcccaacaaattcggccctactactacattatttataataaactcacagattggatgcttcagtttcctgcggggcacatcgaaatgggatattgaatttggatatagggggctaggctatggctatgggggactatttctccccccttgggtatgctaaactct

SEQ ID NO: 177844 - DNA, 421 bp, Zea mays
  Clone ID: MRT4577_93782C.1
aaaacaacaaactgattcatgattggccatagttctgggtagtacgcacacacaacacaaccggtccattattaaaccaacactgacacgactcatgacacgaacagcagatcctttgacaccctccatatggggggggcaccagacgacgcaggcccatgggcagtttaaacgacccatgacttactgcccaccacggagacggagcacaggggggggggggctctcctttgggatgttgaagtctgttaaggggcggccatcctccagctgtttgccggcaaagatcaaaccctgctggtccggggggatgccctccttgtccgggatcttcgccttcacattggcgatggtgtccgagctctcaacctccagggttatggtttttccagtcagggtcttcacaaagattctgatacca

SEQ ID NO: 177845 - DNA, 227 bp, Zea mays
  Clone ID: MRT4577_93783C.1
acagccaaaacttcttgattctggcagcacgggccgctggggcccatggggggcccaattcggaggcttaatcacaaggagcggcaataattttctaaggggggggttttgcaaacaccccatttttatatctaataattagggacacaaggaatgggggggttggttttcaaggggggtgatctaatgggggtttttactgggtccttacatgggcctacattgac

SEQ ID NO: 177846 - DNA, 253 bp, Zea mays
  unsure (1)..(253): unsure at all n locations
  Clone ID: MRT4577_93784C.1
ggtctcgaacagcgcggacaccanacgtgcgcgttcggccccaccctcccttgtatgcggggggcccccgaggtgcctcgggctccccctggcgcggctctcgcgtccttgcgcggcaggcgggggagggactaaggcggtactacccagacggcccggaggcgagacatcgcctaacaggtagacggcgccacgcatgccaccacttccctcctcatcaccgggagagacgactgcttcgacaacgggggcg

SEQ ID NO: 177847 - DNA, 647 bp, Zea mays
  Clone ID: MRT4577_93785C.1
actccttagggcgattgggtttctcgaggccggccgagaattccgcattatagccgtgaatgaatctggtcgaggtggaggggtcccgactcctgcagaaacgtacatactcgctcgacgtccacgtcggccactgcctctccgtgctcgtcgacgccgaccataattccggagactactagatgtgggtctctcacgcggttcatcgacgaagactagtccgcgtgcgccgtcatgcgctaattcggctccagcgtcccgacgacgacgaaagtgaccgatccaccggacgtctgggactggactatgatgatctacaggacggtccgctggaacctgacggacagcgtgcgcgcaggccataccgttagagtcctaccactacgagaagatcgacatgaccagcaccatcatggacatgatcgcccgtgtccacgtcctatgtgagctccgatactgcttctgcggaatgtcgctcacgaacgccgagatcgccagcgatgatcgtcaagtacttcaacgccaccgatggagccattatgcaccaccagatgggcgaggtgccgcctgtcgtgaacgggcccctccatgtcatcgccgatgtcatcaccgctgaggttcgcaccttcgtcgagatcgtgttcgat

SEQ ID NO: 177848 - DNA, 475 bp, Zea mays
  unsure (1)..(475): unsure at all n locations
  Clone ID: MRT4577_93786C.1
aaaaaaaaaaaaaaaaaacggagacaggagagccaaccaactaacttatctttttcaattttaggcccccaaaaaaaaattaaattaggtttaaaaaaacaaagggaacnncnnaagcccccccaaaaaaaaaaaaaaaatatattcnncctcagcgacacccatgcataaaatcgttattgggttgcttttgatttattccaaaaatttttcacggatccaaacacaaaatttattcggccttcatatttttgcccacacttcattcacccaggtacaccttaacacttcaaagaaaaccccaacttcctttttttaaaaatgctttttctttaaaaaccatttcctgaattattttggaaaacatnaaaatattttcagggcaatggcaacaattttcaatttcatttaaagaaaaaggctcaaaagggttcttccaaatggccttttttaaaaaaaaaaaaaccctttttta

SEQ ID NO: 177849 - DNA, 715 bp, Zea mays
  Clone ID: MRT4577_93787C.1
cgcgttcgggtttaccgaaccatctctctcttcgcctagcgtgtatgtagccaagctacgctagcgtctgaagcggtggaaggaaagacgaacgaagctacagctgccgaggtccccgttcccgcccaccgaggcgtcgcgcatgcggccacccgcacccagacccaggcactggcccgggggagcgaggcgtggaggcggagcaatggcgggcggtctggaccgatccgtgcaactgtaggcgcggtgcgtgatgggatctgggagcagcaaggcaaccacctcctccacgtcgcccacggcggcggaggcgggcggcgaggttaagaggccaaatggtagcgagaaggcgaggagggggaggagcctgctgccgctgccgcgacgccttgcgattgcgacgtttccgcagtggcggtggacgtcgagtctaacaagggaggggagactgcaagcctaccttcactcactcacactacaaaatctgatgaagatgttcttgcaacgcctaagtctcatcccggtgaagagatagcactaccttcatcagatagcgaaagagatcaagatgatggcgtgctacagaatgctgctgccactaacacttcaacagcagccagtcaattgacagatccttctgggaggtcaaggccacgttttggtatcaactttgggttgagtagagctgtcagcttgggatcatcagtagcctgct

SEQ ID NO: 177850 - DNA, 936 bp, Zea mays
  Clone ID: MRT4577_93788C.1
cccagcgtccgagattattcttgaggtctaatcaggaaattaaacagaagcacgttccatgtgcctggtagccctgtagacaccagtggctgcagtcgcaatatgttagtggtggttgttactgctctttgtaagtggtttccctttgctgagtaactcggtaaattgatgggtgtgcattaattcgtagcttgtagagatgatgttcatatgtatggtagtcgtttctgtcctctcgatgtttttctcgataatgattaccaaacttattggaaatgatggagcgatggttctcttagatggaaacaatttggttgtagcaccaatttgcgctgcataatactactagaagggacgtggtaagtgataatttagttggatgtgtcttttcaattattattgttcgaaatgtgcacttgttcaggtgagacacttggttctatattgtagtcgactgtcgatccacctagcccaggacatcaatgctccatcgaaagttttctcacctgccgtctgcgccacctttccgtcccactcgagatgaccccaactgcctacagatgagtaggctgtgggctgtggcaagtgaaacttgacattttggagctagtgtacatacggcctgagtttggcggtgagcccagtgcccggtgttgaagatgaggtcgtcaagtccactgcaacataggccctgagtttgatgcgttcgtcttttgtttccaacttcacgaggaaggggcaccagaagaaccctgcggattctgtgttttttttaattgggtgtgtcagaacaaaatgtgttaattgattttaggtgcaagattgtagtcaattaaaagataaatagagagcgttgggactctaggatatgattattggtaattaatttgttgccatgctcaagaaggcatgaaatttgaaaaaaaaaaaaaaaaa

SEQ ID NO: 177851 - DNA, 1096 bp, Zea mays
  unsure (1)..(1096): unsure at all n locations
  Clone ID: MRT4577_93789C.1
gcacaatacacgccattattcggacgagtaaccactcaatcaaacaacactccaatcaacgcaaggacgcatcgtatcgggtagttttaccgaacaatctctctcttcgcctagcgtgtatgtagccaaactacgctagcgtctgaagcggtggaaggaaagacgaacgaagctacagctgccgaggtccccgttcccgcccaccgaggcgtcgcgcatgcggccacccgcacccaggcactggcccgggggagcgaggcgtggaggcggagcaatggcgggcggtctggaccgatccgtgcgactgtaggcgcggcgcggggggtgttggctggtgcgtgatgggatctgggagcagcaaggccaccacctcctcctcgtcgcccacggcgtcggaggcaggcggcgagtttaagaggccaaatggtagcgagaaggcgaggnaggggggaggagcctgctgccgctgccgagttcctcctgcttccgtggctccacgacgccttgccgattgcgacgtttccgcagcgggcggtgggacgtcgagtgtaaccaaggggagggggagactgcaagcctaccttcactcactcacactacaaaantcttgatgaagatgttcttgcaacgcctaagtctcatccccggtgaagagatagcactaccttcatcaggatagggaaagagatcaagatgatggcgtgctacagaatgctgctgccactaacacttcaacagcagccagtcaattgacagatccctttctgggaggtcaaggccaacgttttggtgtcaacttttgggtttgagtagagctgtcagcttgggatcatcagtagcctgctctattctgtcatctggcctcccgacttctgctaacccaggtgaaggtcggggtgatgtggatgactcttctgatacagtcatctcccagcagggtagcgcaccaactgctgggatcgattcgactctagacatgcttagagatagtgtcacggcacaagctagagcagctcgtcaggctagaagaaatctgctagaatctgaagatgctatcttgaggaactcctacagaaggatgggatctcaggaacct

SEQ ID NO: 177852 - DNA, 949 bp, Zea mays
  Clone ID: MRT4577_9378C.1
gtagatctagctatggctcagtgggtacaaccgccgcttcgtcatcgccgtcgtcgccttggaaactaattttgttttttttttttttttttagaggggaaaaccatgtctttgggttttggactcccacctcgtctctagtccgaacagcacgtcgcggatgacgtgtttgcaataaaaaacgctgcagaacagcgccttcaccgcttttcgggatattcgattgtctaagaggaaaggggaaaaaagggtagtactacgaagtatgaactatgaaaggccagccaccgggcgacgccgctacaaggacggctgcgcggccgcctggcgcatcctgctgccccaagtctccccgccggcgcgcccgcgccgccccgccgcgcgccactgcagcccggtcagctgcgcctcccagtcggcgaacccggcgcggcgtgccgcgcggtacccggcgtcgccgaagtgggcgccgcagcggagctggatgtcgtagccgcgcctgcgctcggggtcggacagcacctcgtaggcctcccgcgccgccatgaagcggtcggcgccgccggggcacgcgtccgggtgccaccgccgcgcggcgcgccggtacgccgccttgatctcgtcgggccccgccgtctcctcgacggcgagcagctcgtacatcgtcgccgccatcgcgggcgcgggcgcggtcactgccgaggccgcggccgaaacccgcacccgcgaccgtggctggcacctcgccccgccgaagcagtaccccacgccaacgggcctcgcgctcacggaggtcatcttcttccttccccgctctgctgagctaaaccaccggagacggcccggaaagcgatgcgtgaacgtgtaagctagctagctaccaatgtggatgaagcagaaaagcagtcgcgtctcgctctggccgaggacgcggggggccggggccggc

SEQ ID NO: 177853 - DNA, 234 bp, Zea mays
  Clone ID: MRT4577_93790C.1
gccacatgggtgttttaccatgtgactcgaagggtccatccctgggggagagacgcgcagacctactagttcatgccaagcaggcgttgagaccatgatcaccgttcccgatggagctaaaaccacttgacgtacagctgaagcatcgatctagagaagagcgcatcctatgcttccttcttttgtagatccgcctcgcggggccaacccggcggacgttgttgtcctcagccc

SEQ ID NO: 177854 - DNA, 339 bp, Zea mays
  unsure (1)..(339): unsure at all n locations
  Clone ID: MRT4577_93791C.1
cgggctagcgtggncncanccnaccacgctaagcagcattccnncnccatggccatcgctgctggctgcccgaacatgcgttccgatcgcaatgtcacgcagcacacgagtcttttttttttgncgcaagccccccgtgctgtgtggggggggtaactaacattaatcccgtggcgcccactgagcggggtccagtcggttaaccggctggccctcactgcccaatgtacagtccggagccctgtgggggcagctgtgttaatggagcgcccttccgcctcgagagtgctgccgcgcttggcgcgctctttcggctgctcgctgcctgactatctctct

SEQ ID NO: 177855 - DNA, 244 bp, Zea mays
  Clone ID: MRT4577_93792C.1
ctgatctcctaacatcgattgtactccggaggggcaacctcagaaagccaaatctcattctccagcgctcaagcccacccaagcgtccactctccccatccaatcggtacctcctagttactcgccggcggtagcggcgtccttcgaacagctgtgacttggcgaggacgcttacctccctacaatcatccactacgatggaaggtgaggcacagaccgccggtgcgactggttctaaaccatg

SEQ ID NO: 177856 - DNA, 189 bp, Zea mays
  Clone ID: MRT4577_93793C.1
gtccactcgttttttttttttggaccaaacacaaaatacaaacgggcttggatccaacttaaaaaaaccaccccacccttattcattccctggtatacatgtgcattatacctatccttttgtatagattgtcaataatgtccctaactacaaaactgtgggaaaatggcaactgttcctaaactttat

SEQ ID NO: 177857 - DNA, 683 bp, Zea mays
  Clone ID: MRT4577_93794C.1
tttcaacaccatggctgacataagcgcctttgagcaatcaaggctgctatgggaaccaaactggaatcctcttatttttgaaacctttttaattatgttctaattgaggtggttttgtccgtggatggtcatgccattcttcatgggtgataaccagggcaggtccacttatcagaacaaattgaaccggtgatcagagttgatgaggatacagtcgaatgaatgagcaaaggcgaagctgagcccccccacaccccacccaaaaaaagatcatgaaagaaaaggaaaggaaaaatgaagtccgatatgttgtttcatgttttgttgtataacatgtattcaaaaagtttcccccttttgttgcgtttgtcttaacataatgtattcgcacttgaattttgttcatttttaggccgaaacgtttcctaatttccgccgttgattctgctgagtgtttgtgttggccttggtttgcatgatggatacttttggttattgttcgtcccagaatttatcgcagtaatttcatgagatgttagatcatgtactcctgttggatcagggtgagtttgaacttaggagggcattgtgttttcacaattactacctttggggccatcgcagctataatcgccattcagggtgcagcactgatccattttggtagttctatacatttgtgt

SEQ ID NO: 177858 - DNA, 613 bp, Zea mays
  Clone ID: MRT4577_93795C.1
ttgggaccctcgaggccggccggggacttattctctatgttcttagcctccatgatgtctatacagagcagaaacgaccttcaactttctcgacttgtaggtatcgcgacgcgctagcgaccgaggcagagaagaacgatgcagagaacaaacagggaaccgagaagaaggcagtggacacacgaccacatggtatagaagagaattatcgcaataccatatagcatccttcttacatgctgcctattcaagagggggcgctagactgctacatactattctcactctatggggaaaacttacaacatctcttcttgatcgcggctgatactcgcggagcttgacttctggatatgcgtacaacgtcatgtgcgcatcgatgactatccttcgttgccgacatgtaatgaaatctatgatgacaggaccagcagtgtggaacgttgacatgaatagatgcacagtctctcgctgggatatacaaaactgattgatgcttgttctgccgggctatttacttaactgctgctgcatggatcgaaccatggacatttccacgcttaccactagatgatggttaccttctagccgctgaactgtgctaaagtctaat

SEQ ID NO: 177859 - DNA, 258 bp, Zea mays
  unsure (1)..(258): unsure at all n locations
  Clone ID: MRT4577_93796C.1
aagctcacatttactcattcttttcngcctcctctctttttgcaccctacgtctacagcggcgccgcttttatctactactcgctcaagaactttctacatatcaccctctctttccaaacccacctaaagctcgtctaccttaccctgtgcgcggcgcttgcctattatttctgtagacgcttaccttcacatattctgtaacatcttctgttctctgacaatgctttattgcctcagcaacatctactatctcttt

SEQ ID NO: 177860 - DNA, 270 bp, Zea mays
  unsure (1)..(270): unsure at all n locations
  Clone ID: MRT4577_93797C.1
aaggaaactcaaaattaattctccggtcgtaaagaaaactgtatctgatcatgacctttatagcggaggcgagaaacagtacttggacgagctgttactattatactagtacacagtggcatagataccatgcatagacgatatatatagctctaataatagaatcacctancgtagcctatcctgtccaagtgggacaaatatacatccaagcaaagcatgccacgagctagaaggacatccgctagggctactgngacagcttgctca

SEQ ID NO: 177861 - DNA, 713 bp, Zea mays
  Clone ID: MRT4577_93798C.1
cattgggacctcgagcggggcggctgtgaacgctaaacagtgtctcttttccagacctgaagaaactccgaccggtggcggcaggtgcgccacccccgaggatctgtgccgcgatggcgacgtcgaataccgcgcggatggaggacggcggcggcgacctgcggagcaccatcaagaagtggaacatcatctaccctgtctacctcaactccaagaagacggtcgccgagggccgccgcatcgccgctgccaaggcctgcccggaccccacctgcatcgagatcgccgactgctgttcgcacctcaagatcccccacgccatcgagttggataaggcgtaccctcgggatttcttccaggtggggagggtcagggtgcagcttaagaaagatgacggctcccccgtcaatcctgcgattaaaacgaagaagcagctgatgatccaagtagcagagctagttcccaagcatcacggaaggacaaagaagcaggagccagcgcccaatcccggtggcagttcaaagaacacaaaaggcgggaaaaagaaaaagtgatgcagtatcattgtgttgttttttattctgttcgtcatcatacactaagcttctgtgaaaaagaaaaagtcttggacgttgttgttatgttgccattatgccatttctcatgtataagaacttactaagaatcagaaaaaaaaaaaaaaaaaagcggcc

SEQ ID NO: 177862 - DNA, 338 bp, Zea mays
  unsure (1)..(338): unsure at all n locations
  Clone ID: MRT4577_93799C.1
gatcgcgagcggccgcctctttttattcccngnnnnnngttgtatccaagctttttttctaaaaaatacccgtttggaacggttcctccagatccttgcttaaaatcaggagctggagctgtgccaaacgggccctttcttgtattatatacccaccaatggaagaattgatccttgcttctacctactcctatatcacaggtatggggcttatgaaccatgaggaatacccctttgtgtggccggttttacacccgaaccggactaatcaccctttcgatttaaatgaacaatccaagacacggggcacaagtgacgaagaaatgagctggtggtcc

SEQ ID NO: 177863 - DNA, 123 bp, Zea mays
  Clone ID: MRT4577_9379C.1
cccactcgtccggcactccgaccgtttcttatggagcttcgaggccgcccgtcgcgtcgcgtttttcaaacaggctgaggcaatggcacgggcccttcgtggcgcgaacgccctaacatgtct

SEQ ID NO: 177864 - DNA, 387 bp, Zea mays
  unsure (1)..(387): unsure at all n locations
  Clone ID: MRT4577_937C.1
ctggngagaaataagtacagcccttgccctcttcttgttcagtatgaagttgggcacgaatcacccgatgggccctctgcagcttgccgatttcattgggttggatgtgtgcctttcagtacttcgggtacttcatagtggcctgggagataataagtacagcccttgccctcttcttgttcagtatgttgatgctggccggcttggaaagaagcgtggagtaggtgtatattcatatggacagaagtcttcatcagtcaggccaaagtcatctatgtaaacatgaaagtaactgttgagcaaataaaacaagatgtagcaatagtatgtatgttacattgcacatcagagaacaaggagcacaacttaattcagaggttgctgctc

SEQ ID NO: 177865 - DNA, 323 bp, Zea mays
  unsure (1)..(323): unsure at all n locations
  Clone ID: MRT4577_93800C.1
aatttcaaacctcaaacttattcctgatttgtcactagctctgggtagtacgcacacacaacacaaccggtccattattaaaccaacactgacacgacccatgacacgaaccgcagatactttgacaacctccctctggagagagggcaccagacgacgcaggcacatcggcagcttaaacgacccatgacttactgaccaccacggagacggagcacaaggtggagggcgcctccctttaggatgttgtagtctgctaaggtgcggccatcctncagctgtttgccggcgaagatcagacgctgctggtccagggggatgcc

SEQ ID NO: 177866 - DNA, 587 bp, Zea mays
  unsure (1)..(587): unsure at all n locations
  Clone ID: MRT4577_93801C.1
gggaaaaaaaaaaaaaatccttccagaaattactactacgtatacctcacctctgtccccataagggcgtcctctcaaacggtctggctccagcgagggcaacggcgacgccggagaccagcggtcgtgcatcctcgctcctcgtgcactgcgttcgcctccacagcttgtacagaccagccagtattgatattactgatgcagaaaatgatggtatcaacgagggaaacataaagcatgatgcaatacttgacgacaaaggaaaaggtccaacaactacaattgaatctccacccaaaaggttcaaacatggacctctgcgtatcaaagaaagttccgacacaagatctttcaacaattgaagattttctaaaattatcagcatctttttaggttgtagaatgccctctatataattatatatannactgcttaactcttantgaagatatnttcatgtaaatataacaagnngtagcttgaaatggttgcannacaaacatatganaccttctgccagnnntgctcacttannactctattttaacctttatataannatctgctatggnnntttaaactggcga

SEQ ID NO: 177867 - DNA, 382 bp, Zea mays
  Clone ID: MRT4577_93802C.1
ggtaattgcaaacatcaaacttattcatgatttgtcatagttctgggtagtacgcacacacaacacaaccggtgcattattaaaccaacactgacacgactcatgacacgaacagaaaatactttgacaacctccatatggagagagggcaccagacgacgcaggcacatcggcagcttaaacgacccatgacttactgaccaccacggagacggagcacaagggggagggggctctccttttggatgttgtagtctggtagggtgcggccatcctccagatgtttgccggcgaagatcaaacccttgctggccggggggatgccctacatgacctggatcttgggctttacattgtcgatggtggacgagctctcaacccc

SEQ ID NO: 177868 - DNA, 291 bp, Zea mays
  Clone ID: MRT4577_93803C.1
gtcgaccaggcgtccgcccacgcgtacgcccacgcgtccgactagttctagatcgcgagcgggcgctcgcggccgcccgggaatcttttttctgtgttttagaacgaggcgtcatttaagttaaatcaagtgcagaaccagacttagttgccacccaattcggagcttatcagcgtccgttataaggtgcgcggaactgatctatatgaacctcagagaggaatagacggtctgacgcgttcccggggctgcagggatgtactcagggacatggggcacaggggacgtctt

SEQ ID NO: 177869 - DNA, 494 bp, Zea mays
  Clone ID: MRT4577_93804C.1
gggggggtgtggagaaaaaacattatttttttttgcttcaatttcaaacaacaaacttattcatgatttgtcatagttctgggtagtacgcacacacaacacaaccggtccatttttaaaccaacactgacacgactcatgacacgaacagcagattctttgacaacctccatatggagagggggcaccagacgacgcaggcacattggcagtttaaacgacccatgacttactgaccaccacggggacggagcacaagggggggggggctctccttttggatgttgtagtctgctaaggggcggccatcctccagctgtttgccggcgaaaatcaaaccctgctggtccggggggatgccctccttgtcctggatcttccccttcacattgtcgatggtgtccgagctctcaacctccagggttatgggttttccagtcagggtgtttacaaagatctggataccacctttgaggcggagaacaaggggaagg

SEQ ID NO: 177870 - DNA, 656 bp, Zea mays
  Clone ID: MRT4577_93805C.1
cccctcctcgagttttttttttttttttttttttttttttttttttaaaacaacaaacttattcttgattggtcatagttctgggtagaacccacacacaacacaaccggtccattattaaaccaacactgacacgaacagcaaatacttcgacaacctccatatggagagggcaccaaacgacgcaggcacatcggcagtttaaacgacccatgacttactgaccaccacggaaacggagcacaagggggagggggctctccttttggatgttgaagtctgctagggggcggccatcctccagctgtttgccggcaaaaatcaaacgctgctggtccggggggatgccctccttgtcctggatcttcgccttcacattggcgagggggtccgagctctcaacctccagggttatggtttttccagtcagggtcttcacaaagatctgcataccacccctgaggcggaaaacaaggggaagggggctctccttctggatgttgaagcccgcgagagtgcggccatcctccagctgtttgcccgaaaagatcaaacgctgctggtctgggggaatgccctccttgtcctgaatcttggccttcacattgtcaatggtgtaagagctctcccctccaaggtgatcctcgtgccgaatt

SEQ ID NO: 177871 - DNA, 327 bp, Zea mays
  Clone ID: MRT4577_93806C.1
gtggatgggttttttttggcagaacataatgggcacaggctttaatttcaaacatcaaacttattcatgatttgtcatagttgggggtagtacgcacacacaacacaaccggtccattattaaaccaacactgacacgactcatgacacgaacagcatatcctttgacaacctccatatggagagagggcaccagacgacgcaggcacattggccgtttaaacgacccatgacttactgaccaccacggagacggagcacatggtggagggtgctctccttttgaatgttgtagcctgatagggtgcggccatcctccagttgtttg

SEQ ID NO: 177872 - DNA, 355 bp, Zea mays
  unsure (1)..(355): unsure at all n locations
  Clone ID: MRT4577_93807C.1
nnnnggtggggtttttttgagattttttttttttaatcccaaacatgaaacttattcatgatttgtcataggtctgggtagtacgcacacacaacacaaccgggccattattaaaccaacactgacccgactcatgacccgaacaggagatactttgaccacctccattttgagagagggcaccagacgacgcaggctcatcggcagcttaaacgccccaagacttactgtccaccacggagacggagcacaaggtggagggtgctctccttttggatgttggagcctgctagggtgcggccatcctccagctgtttgtcggcgaagatcaaacgctgttggtccggggggatgc

SEQ ID NO: 177873 - DNA, 670 bp, Zea mays
  unsure (1)..(670): unsure at all n locations
  Clone ID: MRT4577_93808C.1
cccacgccgtccgggnacaaggnagggcatgcccaccgggaccagcagcgtttggatctttcgctggcaangcagctggagggatggccgcacccccttgcggattacaancatccagaagggagagcaccctccacnnctggtgctccgtctcaggnnggtggcatgcagatctttgtngaagacactcactggcaagacaatcacccttgaggtggagtcttcggataccattgacaatgtcaaggccaagatccaggacaaggagggcatcccaccggaagcgcagcgcctcatcttcgccggcaagcagctggaggatggccgcaccctggcggattacaacatccagaaggagagcactctccacctggtgctccgcctcaggggtggcatgcagatttttgtgaagacattgactggcaagacaatcacctttgaggtggagagctcggataccattgacaatgtgaaggccaagatccaggacaaggagggcattcccccggaccagcagcgtctcatctttgcgggcaagcagctggaggatggccgcactctcgcggactacaacatccagaaggagagcacccttcacctggtgctccgcctcaggggtggcatgcagatttttgtgaagacattgactggcaagaccatcaccttggag

SEQ ID NO: 177874 - DNA, 430 bp, Zea mays
  Clone ID: MRT4577_93809C.1
caaacaacaaacttattgaggggttgttataattctgggtgggtcgcacacacaacacaaccgggccattattaaaccaacactgacacgactcatgacacgaacagcagatactttgacaacctccgtatggagagggcaccagacgacgcaggcacatcggcaggttaaacgacccatgacttactgaccaccacggagacggagcacaaggtggagggtgctctccttttggatgttggagtctgctaaggtgcggccatcctccaggtgtttgccggcgaagatcatacgctgctggtccggggggatgccctccttgccctggatcttcgccttgacattgtggatggcggccgagctatcaacctccaggggtatggtttttccagtcaggggcttacaaagatctgcataccacccctgaggc

SEQ ID NO: 177875 - DNA, 381 bp, Zea mays
  Clone ID: MRT4577_9380C.1
ataaaaaaggaacccgaaatttgcaaacccccaagggcccgaggcccaaacatgctacataaaaattccatggtgagctccatagcctgaggggaacaattcggacacaccccaacaaatgcacaacaagggttttatttattggctactttaacaacgggaatcagggggcttctataaccaatgggagggccccatgaatccatacatctgtggataaaaatccccgttgggaaaaacccgctaattgctaaatcccccaaaaaaacagatccgtggtcttaaaaactgcctgttaattcattaaaccttgcactgtagaagcttcttgcaaaaaggggggcacaaatggcactagcacccacgatctgtgatcaaaaa

SEQ ID NO: 177876 - DNA, 841 bp, Zea mays
  Clone ID: MRT4577_93810C.1
gccggccgggtccgggaacctcgcgctgttcgcagcgcactcacacacaacccgatctcccccaaatccacccgacggcacctccgcttcaagatgaagatctttgtgaaaatcctgagtggcaagactatcaccctcgaggtggagtcgtctgacaccattgacaacgttatggccagagatccacggacacaggaggcgcatgccgcccgcagaccaggcacgacgccctcatgcatttgcctgccaaaacatggttgcaagacaggtggcaccgtcttgcactgactacacacagtcacagagagagaggagctagccgtccacccttgggttccgtactcagggcaaggcatgtagatctcttgtgataacctctgttcgtcacgactatcaccctcgaggtggagtcactctgacaccattgacaacgtcaagggctagatccaggacaaggaggcgatccctccagatcaggatggattcatctttgctgcgaagcagcttgaggacggacgcacgcttggcgactacaacatccagaaggagagcaccctccacttggtgctgcgcctcaggagaggcatgcagatcttcatgaagaccctgaccggcaagactatcaccctcgaggtggagtcttcagacaccatcgacaacgtcaaggccaagatccaggactaggagggcattcccccagaccagcagcggctcatctttgctggaaagcagcttgaggacggccgcacgcttgccgactacaacatccagaaggagagcaccctccacttggtgctgcgccctcagggagggatgcagatcttcgtgaagaccctgaccg

SEQ ID NO: 177877 - DNA, 328 bp, Zea mays
  Clone ID: MRT4577_93811C.1
aatcccaaacaagagacggattcatgattggggataggtctggtacgcacgcacacacaacacaaccggtccattattaaaccaacactgacacgactcatgacacgaacaggatatactttgacaacctcgatatggagagagggcacctgacgacgcacgcacattgggggtttaaacgacccatgacttactggccaccacggagacggagcacaaggtggagggtgctctccttttggatgttgaagtgtgctagggggcggccatactccagctgtttgccggcgaagatcaaacgctgttggtgcggggggatgccctcctt

SEQ ID NO: 177878 - DNA, 620 bp, Zea mays
  Clone ID: MRT4577_93812C.1
ccggccgggaccaccgcatcccacaccccccgagctcaggttaactccactccagtctccaatgcgcagccgcgaccagtagtgaccagccatctatttagcagctcgctaaaatgccgatcaatcggatggcgcaggggagccaccagaaggtgtacctgctggacgccctcaaggcggcgttcgctgagttcatttcctccctaattttcgtcttcggcgagccagcgctccgtgatggtcttcatcagctgaccgtcggcgtgccgacgaccaccgcgggcctgatcgcgtcgggggtgacgcacgcgtacttgctgttcgtggcggcgtcacagaccgcaaccatcttcgtgggacacgggaacccgttcgcgtcctttggagccttgacggctccggactgctgcctgatcccaaggctcgtgtactgcttgacccaatctgctgagagcacgcgtggcgtgcgtcctgctaggctagtcgatggtcgcgtagggcacagagacttcgtcttcgacacgtgtgacggccgcaccatccgctaccctgaaccgctcatcaaggccaactacaccatcaagatcgatctggagaccaacaaaattgtggacttcatc

SEQ ID NO: 177879 - DNA, 268 bp, Zea mays
  Clone ID: MRT4577_93813C.1
ttcatttttggtgcgtctaccaccctattcgcatggcgctgacagacaggagaacatcctaagactggtgccattacgttgactgctcatagggcacaggaacggagggataccacgaggcattttggcaccatggactcccacgacaggggtcttccccattcactgcgtgaggaggcactctccattgccgagctggaactgccggacctcgttggatccgcagagaggataaaagcactaggctcgcctacaggagagttgccta

SEQ ID NO: 177880 - DNA, 457 bp, Zea mays
  Clone ID: MRT4577_93814C.1
aaggcaacccttttttttttcactttttacgggaaaagacccccttttggccaaagaaacacggttggttacatgggaagcagcctccgacttcgatctttcaaaaaaattatcccctccctcgcaaacaggaaaaaacttcccccccttacttttttgaatggggggaccccagtccccccccccccccccaattagggggctcagggggggggccaggttttcaggcccagcccgcctgaaaaaaaagaaaaaaaccctccgttttataggcgggggcaaacaaatttttgggcagagggggtcgttttcgagccagttggggagccccctacggccccgggggcgctaacaaagggggcttgctttaagctttgggctagccccccaaacgggggcccggggagggggcccgccttttttggttttttggagacctggccaaaaaccggttttg

SEQ ID NO: 177881 - DNA, 192 bp, Zea mays
  Clone ID: MRT4577_93815C.1
aaggaatcaaacctgttacctttgaacttggaggacgatctgcactcatcatcttcacagactgtgatatgaacaatgctgtaaagtgggcgctgatggccatacttcctgacacaaggccaggtttgctggaatggcacaagagtatttgtgcagaacgaaattcttgatagattacagaggaagtggtga

SEQ ID NO: 177882 - DNA, 492 bp, Zea mays
  Clone ID: MRT4577_93816C.1
cgcgggccgccggcgagtacaggctttataatgttttgtatccgttgagttgctacctatagctagttcactcgtttagcggcgatgagtaacggagtgtcacccatcaccatgggtggcagtgtgagcaatgacctgactgaaccatcggaatggaaaggagttatctatagcggaaaaagggtgtggcggatgctaactgcggcgaccgagagccatagctgcaaatctgtggtttcacgtcgaactaggacacaacagatgaactggggtgcctaatgcagcacttaaatgatgcccatttggccggccccctctagggcgtcatagtggggagtcagcttcacttaagcctccttcggcccgtcctgcctggtccaggtggcgcccttttttgcctgggtggtatgcatcttcttgacggcggccttgatcttatttttggctgcctgtgggcacccttgaagaccagagggtggtttcttcaatctt

SEQ ID NO: 177883 - DNA, 1114 bp, Zea mays
  Clone ID: MRT4577_93817C.1
cgaggccggactccgaaaaaagaaaattcgcgattgggaccgggcccggccgggccgcgcaatttacctaacagaataaactatggggcaagcctacccacggcttgtcctcctcgccctcgtggcgttgttgtctgccggcctcttcccgcaggcgttagggaacggcaagggcaaggtgcatggcggcggtgccgtcaacccgctggttgccggcatctgctctcgcgccccattcccagaggtttgcacggccacagccgggcgccatgcatccaagtacccggtcatcgacaatttggccgtgctgaacatgcaggtggccgcgttcgccaagcgcacagcgcaggcgcggaagcacgtcgcggtggcggcccgcactattccaccgccgcaggcacaggccctcaggacctgcgacacgatgtacatgaacacgcaggacgccatcggcgcggcgcagcgagccatcgcgttcaaggacacgggcaccgcgaagatcatgctgcagctcgctgtccaggacttcgactcgtgtgaccgtccgttcacccatgccggtgtccccaaccccatgggtaagttcgataaggagctcagccagatggccaacaactgcatgacgcttgcaaacatgatatgaatcatatatatgcggccggggacaactgtttggcatgtgcttacactccagcatgaggtggcggcgcgccgcatgcagggaatgcttggacatgatgagcacttggttttcatttaagaattcattgaaattacgagttacgttgagcaaactctgtgtaattgtccctgacctgcatttattctgttgctcatgaaatgagggagatggccattgattgctagcggttgcttcattcattggtcctttttttaaaaaattttaaaaaccacgcctttgcaattatcagcagttcgagtatgtatggtttaatggccgtgccttcgagtgttccattgatccatccgctttcggcatgtatgtaatcgttctgattttaacccaaattgcattcgtgtcagagacgactctacccaatatggatcaggaaaaaatgtatcagtgatcgcatagaccacgcaagtttgtttg

SEQ ID NO: 177884 - DNA, 382 bp, Zea mays
  Clone ID: MRT4577_93818C.1
gttcccgttataggcgccgaatcccttgccgtgtcggcgacgagaccatcaatgacgctatgcacagtcgagaaacttggaagttggtcccttcttgccgtctgcttcgcatagcacggcagcgaggagctggcctaacaactagtttagtgtctgcccactgcggacctggagtacatgaaggatatgtatcgcaccagcacgatgacgcagtgatggtacttctaacccttgtactatggagtactccagtaatctccacgacagctttgactcctatttacgtagtccatacacggtacaatttattggtcggtggggcaacccccgaaatgaagcccaagttgcggcgacaaccaagaaccaacacgatgggggatga

SEQ ID NO: 177885 - DNA, 313 bp, Zea mays
  Clone ID: MRT4577_93819C.1
cccgcataaccgcacaaaaccctagggatggacccaccctaaaccccttgctccccagaatgggatggtcggcgtccccttcttcctgcgcattgcgcgaaaccccatcgcgcctacggcttcttccggtctccgctgatcgcttcacccgactagacatgaagaccacgccgacgacgggggactaccatatccgtcgagtatgccaagtacgggggggggaattgcaaggggtgcagcggggtcatggcctgcggggcgcaccggctcagagcctctgagcacgacccccgtggatggggggcgcaccaag

SEQ ID NO: 177886 - DNA, 478 bp, Zea mays
  Clone ID: MRT4577_9381C.1
ggggcggggcaaacaatctactatcaagggaaattcatgaggacccccgccggggttcctcagggtaacgagcacataaattgaacaggggggaaaaaattaagggaaccgactaagctctagctaggaaactaggacgaggggaactttttcataccccatacaacagatattacctaccaaagagggaaaaagggtaaactggggggagccccccaatcaaattaaaatattggggcaacccgctagcttcattttagggggcttcagctaaattcaacccccttcttttattctgagggggggccccaccatccacatccaaaaaacctaaggggtcacttcctttttttttcagggggcttgaaaaccctgcattactagggtctccaacacttccagaaaaagctgcattttcctgaaaacggccatggggctcaaattaaaaacttgatctgcagccagggccggggcaatt

SEQ ID NO: 177887 - DNA, 556 bp, Zea mays
  Clone ID: MRT4577_93820C.1
gcatgtcttggagcatgataagccacgcgcgttgactgctggtgccagggcgtcttctacacctactacgccttagtacgggcgggactcacgtgtcccgattcttgcaccactggcgactggcagacgcgcaggcgggagctagcttgcttctttggccatacgtgccacgaaaccaaaggtggatgggcgactggtcccgatggaccgttagactggggatactgcctggtgagagaacagaatcttacggacccaccctattaatggacgaggacccttactgctatctacataactacagatactggctggcctgccaagcagctagcacctgatacactgctggcgcgacccgtgactctgacgtgtagagaccgcatggtatccttaaagacgccatcttgttgtggatgacatctctgttgcctaagccattgttccatgctgtgatgacctgctattggaggccataactcaccgtactcgccgagcggaggctgcgcgtatactgtctgaccaccatcatgatcagctgtggtctagagtgcggcga

SEQ ID NO: 177888 - DNA, 248 bp, Zea mays
  Clone ID: MRT4577_93821C.1
ctagatgacggcgcaggctgcggaggagctggtcgtctagatcgagcagcagaagctagcggagcacaagaccgaggcagaagaggtcgtagtggaggaggatgacgaggatgatgaggacgcctgggagacagcttttgcgctttacatgctgcctttgaccaaggctcagcgattcctttgaggatgttattgttcacaagcaggcaattacctttcggagatactgcgtaggtgttgttcgctac

SEQ ID NO: 177889 - DNA, 136 bp, Zea mays
  Clone ID: MRT4577_93822C.1
cttacgcgtttgcttccttgaagtgatcggtttctgattcaactatgaacagctggtggaagatcagcggctggatttctatcttaaggatggatgtaaagctagaatgctggctgtaggctgaataaagtggtgt

SEQ ID NO: 177890 - DNA, 238 bp, Zea mays
  Clone ID: MRT4577_93823C.1
gtttatttttttactcatttagcggtggagactaacattgtggtctcttgtcttcattttatttccagcataatattgagagagactggtgatgcacacaacggacattattccaactgaattacatgtatagtcctcaggaagtgacatgttgactgctgcatgccaatacgacataaatagagtcgatcatatggcggaatagacgcctgcgggcatagcagcatttatatcatca

SEQ ID NO: 177891 - DNA, 268 bp, Zea mays
  Clone ID: MRT4577_93824C.1
cttaggcgttatctgtcgccctctcatacatttatggaacgaaaggtgtgcactttatttgcacatgtgagtatgacaccgcctttaacacccttaagcaagatgttaccaggcctccggggatatgattaccagaatatgcttcttcattcagaggggaatcggacaccacagcagtctgatttagacctgttttgatgcagcatgggcacgcagttgcatgccttattaaggctttatgacttaagacccgtggtgtgcgcactta

SEQ ID NO: 177892 - DNA, 356 bp, Zea mays
  Clone ID: MRT4577_93825C.1
attcggctcgagtgcggcgagaaggcctacatcctgttgatgaggggcaccgtcaagccgctgggcctccgcgggctgaacaggatggcatgctaccccaccacggacctttgctggctcatggacgactgccaccatcattatcactctttgcctatgatgcgactgtatcgacttacatcgtttgcccccttttcctgaatgtgtggggtgcttcctatgcgcctcacgagctaaggatttgatcgagggttcggcccaggattaacggcccacatgcactctagcactagcccacaaagggcatatttctctatatttggcgacgtggaacgacgaacaagaacaattgttgc

SEQ ID NO: 177893 - DNA, 409 bp, Zea mays
  Clone ID: MRT4577_93826C.1
cggacgcgtgggttttgtttgagcatgtataacctctcctataaaagaccagtatgatgtttgtgtatgagttcaatgttatgtcgactaaggtagactgttgtgttcgaggtcctcttttattactgttttcatagtttgtgagatgatcatgatttcatattttggtttttaaatttgtacagtcacagcaattgtccttttgcctacctgtatcattctgtcatactatctgcaattcagctatgcacagaactatcaaaagcaagcaaagatgctctagagtacctgaggaaggtaagggcatctatttcttaccacaaggcccaaaccaatataagtataatgttttcatcaattggtctatgtaaacctgtgtatgtgtattttttaatgcaatctaattcat

SEQ ID NO: 177894 - DNA, 224 bp, Zea mays
  Clone ID: MRT4577_93827C.1
gggggccaaggccaacgttcaaattattcattagatttatgattcaacatccatttttctcaaaaaattggttgtccatcatcataatacacgaaggggggggccaccactttttttagttattaagattttgcaaagccaattgaaaaaaaccgtgccctctcttataagacacccaagggcctttaatggcccccccttaaaaataggatggggggcaaaaa

SEQ ID NO: 177895 - DNA, 429 bp, Zea mays
  Clone ID: MRT4577_93828C.1
caaaaggcaaaatcatttaaatccccacccccctccataatccaacctccaaaataaagaaaaatgccagggaaaaggggtttgggaaaaccagcccctttttgtccccaatcaactcctttcctaagaattttaaatgggcccctgaaacccaaacccccttttgggtctaaaaaacctttaaactttggaaaaaaaggacccgttccaactgccaaaaaaaaaaaatttcccagcccaaaggcccccaaaatccaacccccgttaaacggtgggccttggaaaccccctaaatctcgcccttttttttgagggcgaacctgtgggataaccccttggcagcgttaatcacctaatttgaaaggccctcggaaatggttttgatttcccaaaaaccctctccctgcccccagggggaaggaggaaaat

SEQ ID NO: 177896 - DNA, 156 bp, Zea mays
  unsure (1)..(156): unsure at all n locations
  Clone ID: MRT4577_93829C.1
cccgattcaaatatctggcccccggtgcctggagtgcaggactgtactgggcgcctncggcatactgcgacgccgccgtgcatcgcttcacgcagagcagtgatggaaatcccatcacgggcggcgacggggaagggcgcgggacaaagttctcgg

SEQ ID NO: 177897 - DNA, 606 bp, Zea mays
  Clone ID: MRT4577_9382C.1
ccggccgggacaccccgcatctactagccccaggtagcggagcattgcaacacagtacccgaaacaggctcgtgtagcgtagcggcgcatggccaatctaaccgtggcttgcgggatggcttacaagcagatcgagagccttgatcctgcattattgcgcataccgttgtcgccttccgtacctgcgcatgcagagcgcccatggacggcggctgttcgaacggaggcgccactctgaaacgggcccgacaagggcgctggacccgccggtggcgcgtgtggataccaaggagccgacgacaacctccagactcgggcatgatcaccgacggaagtcaatccatattacacgacggctggggctgcggaacctgattccagttgaagcgcaccgaacactagatacgctccggcagacagggtgcaggggaactgaccgaactgcgccccggcgcataagtgccatgcaagagaccgagcacttggacctgagcgggaccgaggatcagaggcataggttaacaccggtcaggccgaccaggttcggaacgccatccggctgaacggacactcaattggttgatgggcaactggaacggcatggac

SEQ ID NO: 177898 - DNA, 833 bp, Zea mays
  Clone ID: MRT4577_93830C.1
acctataaaccgagacatttttacttatatttgttatacccatgtggatactaaaacagaaaagtcaagaaaaaaaataagaacgcattgggagagcatatgtgtttgagctcaactttatctttgtcaaaaaaaaaagaggaatttacagcgggaacaaccatctacaaacaagtccgtcctaagagaacaaagtgacgcaagaacaccgaagtcctctaatcagatcatccgcccgtagtcatcaagctctgtttcctgcgccgtcttgtagcccacgctactgctgcttctgatgtgggtggcttcgctgcgagctcggcgtcgggtccacggcaacggcgtcgccggccacgagctccatctggtcctcgaggtacttgtgcagcagcgcggcgcggtggccctccgcctcgtgcaacgatcgctcaccgggacagcaactcctgctcttcgccgccgtcaccagcagcctgcgccggcggcggcggaagcgggcgaaggcgacgacgacgcagagcagcgggaggcagagcagcagcagcggcagcgcgacgggcagcaggcacagcgctaggcacgacgaccgccaggccggcgccggcgccgcgcggcgggaggcggcccccatgcatctatcaggagactagcgcgacgacgacggctggtgggcagccagcggggctgctgccatggacagggtcggactcgagcgggaggtggttgcccgtgcggacaagcagaaagatggtggtctgcttagtgaggctctgggcctgaattgggcccgatgtgcagcggcctgtatccccggccggcctcgagggtcccaa

SEQ ID NO: 177899 - DNA, 328 bp, Zea mays
  Clone ID: MRT4577_93831C.1
ggtcgaccactgtgctttttgttcgacacgggtgacatgaggagacgatgctttctggaggcgacaacgttgttgattttgttgtctgctcgggattcgtgacccgacacttcttgatcatcgggaccacgatcattgcgacttatatgatattgaggcatctcgagctccatgctaagctgcatggcatccttaacaaccgaagtcaatgtatgcaaggaagaaaatgagtttaaagataaaattgtgtgcataggaaagcaaaaaaaagaaagagagatgtaatgttattttctctcatggctctaaactccaggtttacatatga

SEQ ID NO: 177900 - DNA, 434 bp, Zea mays
  Clone ID: MRT4577_93832C.1
aaaaaaaaaaaaaaaaaaaaaaaaaaaaaaaaaaaaaaaaaaaaaaaaaaaaaaaaaaaaaaaaaaaaaaaaaaaaaaaaaaaaaaaaaaaaaaaaaaaaaaaaaaaaaaaaaaaggggcgggccggttttaagaggaaccacaagcttcacgtcccgcgtgcttcgcaacgtaataaccttttttttatagggcccccgtaaaatcaaattcaactggcccgccggtttacacaaacgtcgggaactggggaaaaaacccttggcgtttccccaaacttaaatccgcctttggcagccacaatcccctctttcggccgagctggcgtaaataaccaaaagaggccccccaccgaaccgcccttcccaaacagttggcccaaccctgaaagtggcaaatgggaaccgcccccttgtaaccggccctataaagcc

SEQ ID NO: 177901 - DNA, 369 bp, Zea mays
  Clone ID: MRT4577_93833C.1
gcgagcccccccgcctcgagccgcagccgcatcgggagacccgcagccgccgatggcgaagaagcacagggacccagcctctgaggccgcgagcggcgactccccggccgcgtccatccgctccctcttctccgcggacaacccgttccgccggaaggcctctacggaggagccccccgcgactcctgcacccgccacgacgcccctccccatgcaacccagccgtgacgccagggatgccgagccgtcctcgaagaagaataagaagagcaaggaggagggcccgcggcgcaagcggaagcgggacgagttggaggccggccgggagcggcggcgaggcgcggagaatacgtcgagagttggggagaa

SEQ ID NO: 177902 - DNA, 319 bp, Zea mays
  Clone ID: MRT4577_93834C.1
ccaaacatcaaacttattcatgatttgtcatagttctgggtagtacgcacacacaatacaaccggtccattattaaaccaacactgacacgactcatgacacgaacagccgatactttggcaaccttcatttggagggggggcaccagacgactcaggcccattggcaggttaaacgacccatgacttactgaccaccacggagacggagcacaaggtggagggtgctctccttttggaagttgtactcctgctagggtgcggccattctccagttgtttgcccgccaagatcatacgctttttgtgccgggggatgcc

SEQ ID NO: 177903 - DNA, 1377 bp, Zea mays
  unsure (1)..(1377): unsure at all n locations
  Clone ID: MRT4577_93835C.1
ggccctaggggccttttttttttttttttttaaacaacaaacttattcatgatttgtcatagttctgggtagtacgcacacacaacacaaccggtccattattaaaccaacactgacacgaacagcagatacttcgacaacctccatatggagagggcaccagacgacgcaggcacatcggcagcttaaacgacccatgacttactgaccaccacggagacggagcacaaggtggagggtgctctccttttggatgttgtagtctgctagggtgcggccatcctccagctgtttgccggcgaagatcagacgctgctggtccggggggatgccctccttgtcctggatcttcgccttcacattgtcgatggtgtccgagctctcaacctccagggttatggtttttccagtcagggtcttcacaaagatctgcataccacccctgaggcggagaacaaggtgaagggtgctctccttctggatgttgtagtccgcgagagtgcggccatcctccagctgcttgcccgcaaagatcagacgctgctggtctgggggaatgccctccttgtcctggatcttagccttgacattgtcaatggtgtctgaggactccacctcaagggtgattgtcttgccagtcaaggtcttgacaaagatctgcatgcctcccctaaggcgcagcaccaaatgaagggttgactccttctggatgntgtaatccgccagggtgcggccatcctccagctgcttgccagcgaagatcagacgctgctggtctggggggatgccctctttgtcctggatctttgctggcaagcagctggaggatggccgcaccctagcagactacaacatccagaaggagagcactctccacctggtgctccgcctccgtggtggtcagtaagccatggttcatttaagctgctgctgtacctgggtatctgcgtcgtctggtgccctctggtgtacctctatatggatgtcgtcgtctaataaacatctgtggtttgtgtgtcatgaatcgtggttgtggcttcgttggtttaatggacctgttgtgtcctctatgttgtacccaaaactcttctgcagcagtatggcttgaatccttatgaagtttgatatttgaacttaaaaaaaaaaaaaaaaaaaaaaaaaaaaaaaaaaaaaaaaaaaaaaaaaaaaaaaaaaaaaaaaaaaaaaaaaaaaaaaaaaaaaaaaaaaaaaaaaaaaaaaaaaagaaaaaaaaaaaaaaaaaaggcccctagggccccggcccctctaaaaaaaagggatccccccggttgcaggaattccaaatcaagtttttcaaaacccccgaccccaagggggggcccggaacccaattccccc

SEQ ID NO: 177904 - DNA, 321 bp, Zea mays
  unsure (1)..(321): unsure at all n locations
  Clone ID: MRT4577_93836C.1
ggtgtttttaaattgtgcctncactcaggggagggacatattgtttgtgtgtggtaanccagagncccacgagaccagccaggatgctaagggcgaaatgagcacaaagggggccgcaattgacgtgggagcaccggaaccgggccacatggaaaacccaccgtgccacacgaaccttaggcatactaagaggggagagcagagatacagggcacaacggcgcacatttgggacgggggggtaaatcaaaaaaccgcgggggggaagggagaatccgggggccacacagaccagcagggtaaacactcaccggatccgggc

SEQ ID NO: 177905 - DNA, 1885 bp, Zea mays
  Clone ID: MRT4577_93837C.1
gaaagacagaacataatgggcccaggctttaatttcaaacatcaaacttattcatgatttgtcatagttctgggtagtacgcacacacaacacaaccggtccattattaaaccaacactgacacgactcatgacacgaacggcagatacttcgacaacctccacatggagagggcaccagacgacgcaggcacatcggcagcttaaacgactcatgacttactgaccaccacggagacggagcacaaggtggagggtgctctccttttggatgttgtagtctgctagggtgcggccatcctccagctgtttgccggcgaagatcagacgctgctggtccggggggatgccctccttgtcctggatcttcgccttcacattgtcgatggtgtccgagctctcaacctccagggttatggtttttccagtcagggtcttcacaaagatctgcataccacccctgaggcggagaacaaggtgaagggtgctctccttctggatgttgtagtccgcgagggtgcggccatcctccagctgcttgcccgcaaagatcagacgctgctggtctgggggaatgccttccttgtcctggatcttggccttcacattgtcaatggtgtcagagctctccacctccaaggtgatggtcttgccagtcaatgtcttcacaaaaatctgcatgccaccccttaggcggagcaccaggtggagagtgctctccttctggatgttgtaatccgccagggtgcggccatcctccagctgcttgccggcgaagatgaggcgctgctggtccggtgggatgccctccttgtcctggatcttggccttgacattgtcaatggtatccgaagactccacctcaagggtgattgtcttgccagtgagtgtcttcacaaagatctgcatgccacccctgagacggagcaccaggtggagggtgctctccttctggatgttgtaatccgcaagggtgcggccatcctccagctgcttgccagcgaagatcaaacgctgctggtccggtgggattccctccttgtcctggatcttggccttgacgttgtcgatggtgtctgaagactccacctcgagggtgatagtcttgccggtcagggtcttcacgaagatctgcatgcctcccctgaggcgcagcaccaagtggagggtgctctccttctggatgttgtagtcggcaagcgtgcgcccgtcctcaagctgcttcccagcaaagatgagccgctgctggtctgggggaatgccctccttgtcctggatcttggccttgacgttgtcgatggtgtctgaagactccacctcaagggtgatagtcttgccggtcagggtcttcacgaagatctgcatgcctcccctgaggcgcagcaccaagtggagggtgctctccttctggatgttgtagtcggcaagcgtgcgcccgtcctcaagctgcttcccagcaaagatgagccgctgctggtctggagggatgccctccttgtcctggatcttggccttgacgttgtcaatggtgtctgaagactccacctcgagggtgatagtcttgccggtcagggtcttcacaaagatctgcatgcctcccctgaggcggagcacaaggtggagggtgctctccttctggatgttgtagtcagcaagcgtgcgcccgtcctcaagctgtttgccagcgaagatgagccgctgctggtctggggggatgccctccttgtcctggatcttggccttaacgttgtcaatggtgtcagacgactccacctcgagggtgatagtcttgccagtcagggttttcacaaagatctgcatcttgaagcggaggtgccgacgggtggatttgggggagatctggttgtgtgtgtgtgcgctccgac

SEQ ID NO: 177906 - DNA, 1981 bp, Zea mays
  Clone ID: MRT4577_93838C.1
ctgtaagccaggccagtgtcaaaacccgagcttgacaaaaccacgttgacattaagtaagaaacggttgatagccagaacctgcaggcaaatattaggagacaactgaaagataaaacataatgagcacaggctttaatttcaaacaacaaacttattcatgatttgtcatagttctgggtagtacgcacacacaacacaaccggtccattattaaaccaacactgacacgaacagcagatacttcgacaacctccatatggagagggcaccagacgacgcaggcacatcggcagcttaaacgacccatgacttactgaccaccacggagacggagcacaaggtggagggtgctctccttttggatgttgtagtctgctagggtgcggccatcctccagctgtttgccggcgaagatcagacgctgctggtccggggggatgccctccttgtcctggatcttcgccttcacattgtcgatggtgtccgagctctcaacctccagggttatggtttttccagtcagggtcttcacaaagatctgcataccacccctgaggcggagaacaaggtgaagggtgctctccttctggatgttgtagtccgcgagagtgcggccatcctccagctgcttgcccgcaaagatcagacgctgctggtctgggggaatgccctccttgtcctggatcttggccttcacattgtcaatggtgtcagagctctccacctccaaggtgatagtcttgccagtcaatgtcttcacaaaaatctgcatgccacccctgaggcggagcaccaggtggagagtgctctccttctggatgttgtaatccgccagggtgcggccatcctccagctgcttgccggcgaagatgaggcgctgctggtccggtgggatgccctccttgtcctggatcttggccttgacattgtcaatggtatccgaagactccacctcaagggtgattgtcttgccagtgagtgtcttcacaaagatctgcatgccacccctgagacggagcaccaggtggagggtgctctccttctggatgttgtaatccgcaagggtgcggccatcctccagctgcttgccagcgaagatcaaacgctgctggtccggtgggatgccctccttgtcctggatcttggccttgacgttgtcgatggtgtctgaagactccacctcaagggtgatagtcttgccggtcagggtcttcacgaagatctgcatgcctcccctgaggcgcagcaccaagtggagggtgctctccttctggatgttgtagtcggcaagcgtgcgcccgtcctcaagctgcttcccagcaaagatgagccgctgctggtctgggggaatgccctccttgtcctggatcttggccttgacgttgtcgatggtgtctgaagactctacctcgagggtgatagtcttgccggtcagggtcttcacgaagatctgcatgcctcctctgaggcgcagcaccaagtggagggtgctctccttctggatgttgtagtcggcaagcgtgcgcccgtcctcaagctgcttcccagcaaagatgagccgctgctggtctggagggatgccctccttgtcctggatcttggccttgacgttgtcaatggtgtcggaggactccacctcgagggtgatagtcttgccggtcagggtcttcacgaagatctgcatgcctcccctgaggcggagcacaaggtggagggtgctctccttctggatgttgtagtcagcaagcgtgcgcccgtcctcaagctgtttgccagcgaagatgagccgctgctggtctggggggatgccctccttgtcctggatcttggccttaacgttgtcaatggtgtcagacgactccacctcgagggtgatagtcttgccagtcagggttttcacaaagatctgcatcttgaagcggaggtgccgacggctggatttgggggagatctggttgcgtgtgtgtgcgctccgaacg

SEQ ID NO: 177907 - DNA, 372 bp, Zea mays
  Clone ID: MRT4577_93839C.1
atgacaaggggctggggtccaaaggaaaaaagttaacaagggggaggggcgggaaaaacaaaaaacaaatttccttggaaagaaggcaaaaagccactgaaaagggggccccaaaaaggggggaaaaaaaaaaaaagaatgttggtttagggggggagaaaagagggggaaacaaaataaaccgcaaaaagggaacttttgggaaaaaagagggctaaaattgttcggaaaaaaagggggggaaaaccttattttgggaaaaaaggtttttaagagcccggggggttttaaaagggaacctaagaaacccacggttgttgggaaggccaaaaaaaaggggctaaaaaaaaacggggggtagcccccgacaaa

SEQ ID NO: 177908 - DNA, 399 bp, Zea mays
  Clone ID: MRT4577_9383C.1
ctgtacgcaggcagcctaaatgacaatgtgctgtgtttaattgttgtatgaagtcgttcaaccttgttcctggggggggggggcggcgtccgtgaagtgtgattagtcataggtggcctggcgggggaacccgccggctatggggttgtcgttcttgactattttgtggaggttctggccgtcgccctgcctggcggggttgaccttgttctgagcgacgccgttcttggggtgggggtactggaccttgcctttggggaagacgcggttgaactggtgggcgatcttgcccttggagcgtaccctggtgccgaccgcgattcactgctctttgctcgccctctacaggaggttggggccctcccgcatgatggcggctccctccggtggggatttgga

SEQ ID NO: 177909 - DNA, 1909 bp, Zea mays
  Clone ID: MRT4577_93840C.1
ggaggcacacacacacaaccagatctcccccaaatccacccgtcggcacctccgcttcaagatgcagatctttgtgaaaaccctgaccggcaagactatcaccctcgaggtggagtcgtctgacaccattgacaacgttaaggccaagatccaggacaaggagggcatccccccagaccagcagcggctcatcttcgctggcaaacagcttgaggacgggcgcacgcttgctgactacaacatccagaaggagagcaccctccaccttgtgctccgcctcaggggaggcatgcagatctttgtgaaaaccctgaccggcaagactatcaccctcgaggtggagtcctctgacaccattgacaacgtcaaggccaagatccaggacaaggagggcatccctccagaccagcagcggctcatctttgctgggaagcagcttgaggacgggcgcacgcttgccgactacaacatccagaaggagagcaccctccacttggtgctgcgcctcaggggaggcatgcagatcttcgtgaagaccctgaccggcaaaactatcaccctcgaggtggagtcttcagacaccatcgacaacgtcaaggccaagatccaggacaaggagggcattcccccagaccagcagcggctcatctttgctggaaagcagcttgaggacgggcgcacgctggccgactacaacatccagaaggagagcaccctccacttggtgctgcgcctcaggggaggcatgcagatcttcgtgaagaccctgactggcaagactatcaccctcgaggtggagtcttcagacaccatcgacaacgtcaaggccaagatccaggacaaggagggcatcccaccggaccagcagcgtttgatcttcgctggcaagcagctggaggatggccgcacccttgcggattacaacatccagaaggagagcaccctccacctggtgctccgtctcaggggtggcatgcagatctttgtgaagacactcactggcaagacaatcacccttgaggtggagtcttcggataccattgacaatgtcaaggccaagatccaggacaaggagggcatcccaccggaccagcagcgcctcatcttcgccggcaagcagctggaggatggccgcaccctggcggactacaacatccagaaggagagcaccctccacctggtgctccgcctcaggggtggcatgcagatttttgtgaagacattgactggcaagaccatcaccttggaggtggagagctctgacaccattgacaatgtgaaggccaagatccaggacaaggagggcattcccccagaccagcagcgtctgatctttgctggcaagcagctggaggatggtcgcaccctcgcggactacaacatccagaaggagagtacccttcaccttgttctccgcctcaggggtggtatgcagatctttgtgaagaccctgactggaaaaaccataaccctggaggttgagagctcggacaccatcgacaatgtgaaggcgaagatccaggacaaggagggcatccccccggaccagcagcgtctgatcttcgccggcaaacagctggaggatggccgcaccttagcagactacaacatccaaaaggagagcaccctccaccttgtgctccgtctccgtggtggtcagtaagtcatgggtcgtttaagctgccgatgtgcctgcgtcgtctggtgccctctccatatggaggttgtcaaagtatctgctgttcgtgtcatgagtcgtgtcagtgttggtttaataatggaccggttgtgttgtgtgtgcgtactacccagaactatgacaaatcatgaataagtttgttgtttgaaattgaagcctgtgctcattatgttttatctttcgtaaaaaaaaaaaaaaaaaaggccccta

SEQ ID NO: 177910 - DNA, 585 bp, Zea mays
  Clone ID: MRT4577_93841C.1
ggccgcttttttttttttttttttatttttttttttttttttttttttttttttttttttttttcttttatgtttttttgttttttgttgtttcaaacgcattttttttttaacccacgataaaacagaggaaacaccgagggggagcatgggttgggggggcgcacacccaagcccccgggaagggggggggattccgggaacgccagggggggatgaaaacgcggaaaatgggcccacaaggggcaaggggatggggaaggggttaacgaagcgccaacaaggggtttaaaggaaaaattggggaccaaaggggggttggagcaaacaaacccccccgcttgggctttggaggaggggcaaggaaagccgtttcgaacaaacttactaggggagcaaggggaaccgcccggattagcaaaggaaaagggcgcccataggaggatttccaaaaaacaccggggagggggaaggaccggcaaggggcacctacaccaaagacaggcccgtgggaggcaccggggcgacaagggggggggggaccctccgagccggggggataccagctgcaccaggatggggggg

SEQ ID NO: 177911 - DNA, 1956 bp, Zea mays
  Clone ID: MRT4577_93842C.1
aacatcgaggtcgttgcatcgctcacactcaacaccttatctcctcttctctggctctcctgcacctccgcttcaagatgcagatctttgtgaaaaccctgactggcaagactatcaccctcgaggtggagtcgtctgacaccattgacaacgttaaggccaagatccaggacaaggagggcatccccccagaccagcagcggctcatctttgctggcaaacagcttgaggacgggcgcacgcttgctgactacaacatccagaaggagagcaccctccaccttgtgctccgtctcaggggaggcatgcagatctttgtgaaaaccctgaccggcaagactatcaccctcgaggtggagtcctctgacaccattgacaacgtcaaggccaagatccaggacaaggagggcatccctccagaccagcagcggctcatctttgctgggaagcagcttgaggacgggcgcacgcttgccgactacaacatccagaaggagagcaccctccacttggtgctgcgcctcaggggaggcatgcagatcttcgtgaagaccctgaccggcaagactatcaccctcgaggtggagtcttcagacaccatcgacaacgtcaaggccaagatccaggacaaggagggcattcccccagaccagcagcggctcatctttgctggaaagcagcttgaggacgggcgcacgcttgccgactacaacatccagaaggagagcaccctccacttggtgctgcgcctcaggggaggcatgcagatcttcgtgaagaccctgaccggcaagactatcaccctcgaggtggagtcttcagacaccatcgacaatgtcaaggccaagatccaggacaaggagggcatcccaccggaccagcagcgtttgatcttcgctggcaagcagctggaggatggccgcacccttgcggattacaacatccagaaggagagcaccctccacctggtgctccgtctcaggggtggtatgcagatctttgtgaagacactcactggcaagacaatcacccttgaggtggagtcttcggataccattgacaatgtcaaggccaagatccaggacaaggagggcatcccacccgaccagcagcgcctcatcttcgccggcaagcagctggaggatggccgcaccctggcggattacaacatccagaaggagagcactctccacctggtgctccgcctcaggggtggcatgcagatttttgtgaagacattgactggcaagaccatcaccttggaggtggagagctctgacaccattgacaatgtgaaggccaagatccaggacaaggagggcattcccccagaccagcagcgtctgatctttgcgggcaagcagctggaggatggccgcactctcgcggactacaacatccagaaggagagcacccttcaccttgttctccgcctcagaggtggtatgcagatctttgtaaagaccctgactggaaaaaccataaccctggaggttgagagctcggacaccatcgacaatgtgaaggcgaagatccaggacaaggagggcatccccccggaccagcagcgtctgatcttcgccggcaaacagctggaggatggccgcaccctagcagactacaacatccaaaaggagagcaccctccaccttgtgctccgtctccgtggtggtcagtaagtcatgggtcgtttaagctgccgatgtgcctgcgtcgtctggtgccctctctccatatggaggttgtcaaagtatctgctgttcgtgtcatgagtcgtgtcagtgttggtttaataatggaccggttgtgttgtgtgtgcgtactacccagaactatgacaaatcatgaataagtttgatgtttgaaattaaagcctgtgctcattatgttctgtcaaaaaaaaaaaaaaaaaaaaaaaaaaaaaaaaaaaaaaaaaaaaaaaactcgagggggggc

SEQ ID NO: 177912 - DNA, 576 bp, Zea mays
  Clone ID: MRT4577_93843C.1
cccggggggggaggaagccgccaccagagagtttgtgatgttggacgcaatccatcccctcgtcggtggccgtaacgggaacccctgcggtagctagcattagcagtagtaatagtagactgttggttacatcatcctgttagatctcaggtctctgtcggtaccgcatcatctaggcagtgttgctgcttagcttttgggctctcttattaccaagggttgcatgcatgccattgtattgtactctccaattggaaaaaaaagaaaaaaaatcatttgttcataaacaaaaaaaaaaaaaaaaaaaaaaaaaaaaaaaaaaaaaaaaaaaaaaaaaaaaaaaaaaaaaaaaaaaaaaaaaaaaaaaaaaaaaaaaaaaaaaaaaaaaaaaaggggggggcccgttttaaaggacccaagtttactacccggggcttgcaaattaaaagtttttttatggggcccccaaatttaatttccggggccggggtttaaaaaggggggggggggaaaaacctgggggtaccccaattaaatggcttggaaaaaaatccccttttccccagggggggaaaa

SEQ ID NO: 177913 - DNA, 322 bp, Zea mays
  Clone ID: MRT4577_93844C.1
aacacactagagtgagtcgtattaatagccactctagacccccgcttccagaaccttctcgagactctgaggcgcggcctcagctgcaagccgtaggcgacggaaccgatgcgcgtgctcgtcactggcgccgcagggcaaattggatatgcgcctgttcccaagattgctaggggagttatgcctggtgcaggccagcctgttactctgcacatgcttgatactccgcgagcagctgaagcccctaatggcgttaagatggagttggttgatgctgcaattcctcgtctgaacggagtcgttgccacaactgaggttgtgg

SEQ ID NO: 177914 - DNA, 783 bp, Zea mays
  Clone ID: MRT4577_93845C.1
cccttccaagatccacctcctcagcgtcgcgtggtgggaagaccctaacctcccaaaggccacaccccataacccctaacctagggtttcgccgccatgggatccgccgcctccgccgcctccgacgcagcgccgccaccgccttctccagcgcaaccacacggggccccgccgccgtatggggctgggctcgccggcatcctccctcagaagccggatggggatgataagaaggaggagaaggtggactacctcaacctcccctgccccgtgccgtacgaggagatccagcgcgaggccctcatgtctctgaagcctgaactttttgaaggtttgaggtttgacttcacaaagatgttaacccagaagttcgctcttagccatagtgtccttatgggctccctggaagttccgtctcagtcagctgatgttataaaagtcccaacatcacagtatgaatttggtgccaattttttagatccaaagttaatgcttatcggaaggttgatgactgatggaaggctgaatgctcgtgtgaaatgtgatctgacagagaatctcgcgctgaaaataaatgcgcagcttactagtgagcctcattactctcaagggatgttcaactttgactacaagggcaccgactatcgagcacagtttcaaattggaaacaatgcgttctatggggcaaattatatccagagtgttacgccaaatttgtcgatgggaacagagatattctggcttggtcagcaaaggaagtcaggaattggatttaattctcgc

SEQ ID NO: 177915 - DNA, 1693 bp, Zea mays
  Clone ID: MRT4577_93846C.1
caactccaagatagcttttgggactgggaactttcaagtctgaatctgccgttaacttctccacatagatattgtacttgctgaatggtggttgtggttgatcagggttcttcagcttccagctgattttcagattcacgagttcagatccgttagagcattttgaccacgagatgtaatctccttcagttatccaagattctgctggagggaactctgtgtttttgtcagtatttcgaatactgaggtggcctagtgatgcctgatacagtgaagttccatcgacatcttctaccaagatgctaccatcttctgattctggactgatttcgccagtaaatttcaatgtgcagacaatgttgataccagttaatgtgtgcccagcactggaagaaacagttgctttgtaaaggacccaaccgtggttatctggagcgtgtagctccaccttatcggctttaacatatgatccatacttgtgattttgtttctttctggtgaatgttgctatgtcctctgcaaccagaatttttgaagtaccctgcttgtttctagaagacagatccagggacaaccctaaagcagaacttgcattggctcttatcgaataaaatagatgaacaggtccatcttccatggcaagtcctccattaaaaagctgttctgagaaaataatgttctgctgaagagatcctttgactgtcaaacaattccctccactgtaaggttcagccttgaaatccgtataggcttgcagatgaacttgatctctggtgtatttaagcataggacatagcaacattcaccagaaagaaacaaaatcacaagtatggatcatatgttaaagccgataaggtggagctacacgctccagataaccacggttgggtcctttacaaagcaactgtttcttccagtgctgggcacacattaactggtatcaacattgtctgcacattgaaatttactggcgaaatcagtccagaatcagaagatgtcgatggaacttcactgtatcaggcatcactaggccacctcagtattcgaaatactgacaaaaatacagagttccctccagcagaatcttggataactgaaggagattacatctcgtggtcaaaatgctctaacggatctgaactcgtgaatctgaaaatcagctggaagctgaagaaccctgatcaaccacaaccaccattcagcaagtacaatatctatgtggagaagttaacggcagattcagacttgaaagttcccagtcccaaaagctatcttggagttgctagtgtcgatgccttctatgtgtcgggcttagaggtctccaacgaagtcaccggtctgaaattctttatccaagcgtttgcacacgatggaagctggcaagaacttgaggaatgtccaaagttctttttattccctgttcactctgaatgagtgacattcatttactctggtgcgcttcattctgttacctttgacatatgttaaaggctcccacagaataatctaatgttatcattacagaaataagaagggaaaaacaaataatattgcattttttctctgctcatgttgtttatgtacacccattattttttttctttcatctgagtacaaaagatctgtaaatttggtggtactagttggagaggttcttctttcttgtcaacacatgcaaccgcagattctccgg

SEQ ID NO: 177916 - DNA, 1308 bp, Zea mays
  Clone ID: MRT4577_93847C.1
tcgaggccggctccgaccgggctccgtcccgtcccgccgcctgcatcacccaagggaagtacagccgagcccccactcgcgttccctgccgcgcgacctgatcgtacggccggggaggctgccgcgcctcctgacctcgcttccgcctcgcctccccgaccggaccagcggcctccgtctgaagatgcagggcggcgtctccggattccagaacgcgccctcggcatctcataccaggacactataacgaattttcgtttatggaagatattcccatctgtatttgcttttcagtcaacaccagagttaatgtttggactgtaccttctgtattacttccgtgtgtttgagaggcagataggctctaacaaatactcggttttttgtctcttcactatcacagcatcatcgctcctcgagatcctgtcattggttatcttgaaagatacaaattacatcagcacgcttgcatcagggccttatggtctcatatttgcctcttttgttcccttctttcttgacattccaatcacatcacggttccgtatttttggtctgaatttcagtgacaaatcattcatttacttagctggttttcagcttcttttatcttcttggaagcgctcccttattcctggtatatttggtctggttgctggttctctctatcgtctaaatgtgctcggcatccgcaagatgaagcttccacaggttatttcatcattttttgcaagatatttcgccccttccccaggaagcacatctcgcccctccaggagtcttgttggaaacacaccgtcccatagaggccgtgctgttcagaatcagccatcaactggatttgcacctatcatggagcctccagagtcctccgttgctatgctggtctcaatgggctttgatggcaataacgcaaggcaggcactcgtgagggctagaaatgacatcaacgtggcaacgaacatcctactggaagcacagtctcattgaactaacgcactgcaactttctggtggtaaattagagggaagaactggttatattccaagatgaacaaacaatatgagcacattggactacagatcggtagattagtgcctcatttcatctaccttgaactgcaggccgacagtttagtaaatcagcgtatacatttgcggcagttagttttatcgtgtcaatacttagatgccttacatacagagaatgtaatattccaatttcagcttgtaggatagatgatataagcattcatagtgtacaattcatccgatgttttacagctttagaacttgttccagcaaaaag

SEQ ID NO: 177917 - DNA, 595 bp, Zea mays
  unsure (1)..(595): unsure at all n locations
  Clone ID: MRT4577_93848C.1
gggtacctcgaggccggccgggaagccttatccctcagctcggctcgcaccaacaaccctcgccgttaaatcaacatctagtactattagcaatggccgcgcaggtcgtcgtagcaggcggcggcggcagctggcctcagcaatggcggctcacgctcgtgctggcggctctcgtccctctgctcagcctctgcctcctcctagcgagaacaacaagaagagcaaggagctggagcagcagcagcaaaggcgggcgcctcgacgtccaccgcctaccgccggggccaccgaggttgccgctcctcggcaacctgcaccagctgggctcgctgccgcaccggagcctgcgcgagctggcgcgccgccacgggcccgtcatgctgctgcgcctgggcagcgtgcccacgctggtggggtgtcgtcgnngnacncnncncnnnangncntganngcgcgcgacgccgactgctgcngccgccccgacacgcccggggccaggcgtctctcgtacggccacaaggacgtcgccttcgcgccctacaacgactactggagccagatgcgcaacctcttcgtcgacaagctcctcggcgcg

SEQ ID NO: 177918 - DNA, 1542 bp, Zea mays
  Clone ID: MRT4577_93849C.1
ctcgagggcggccgggccgggaaacccgtctggccgtctcgccacgctcgtccggcagtctcctaccgggctccgtcccgtcccgccgcctgcatcacccaagggaagtacagccgagcccccactcgcgttccctgccgcgcgacctgatcgtacggccggggaggctgccgcgcctcctgacctcgcttccgcctcgcctccccgaccggaccagcggcctccgtctgaagatgcagggcggcgtctccggattccagaacgcgccggtgacgcgggcggtcgtcgtcgcgagcggcctcctgtccgtcgtcttcagcgcgcagcggcgcgcccgcgccctcggcatctcataccaggacactataacgaattttcgtttatggaagatattcccatctgtatttgcttttcagtcaacaccagagttaatgtttggactgtaccttctgtattacttccgtgtgtttgagaggcagataggctctaacaaatactcggtttttttgtctcttcactatcacagcatcatcgctcctcgagatcctgtcattggttatcttgaaagatacaaattacatcagcacgcttgcatcagggccttatggtctcatatttgcctcttttgttcccttctttcttgacattccaatcacatcacggttccgtatttttggtctgaatttcagtgacaaatcattcatttacttagctggttttcagcttcttttatcttcttggaagcgctcccttattcctggtatatttggtctggttgctggttctctctatcgtctaaatgtgctcggcatccgcaagatgaagcttccacaggttatttcatcattttttgcaagatatttcgccccttccccaggaagcacatctcgcccctccaggagtcttgttggaaacacaccgtcccatagaggccgtgctgttcagaatcagccatcaactggatttgcacctatcgtggagcctccagagtcctccgttgctatgctggtctcaatgggctttgatggcaataacgcaaggcaggcactcgtgagggctagaaatgacatcaacgtggcaacgaacatcctactggaagcacagtctcattgaactaacgcactgcaactttctggtggtaaattagagggaagaactggttatattccaagatgaacaaacaatatgagcacattggactacagatcggtagattagtgcctcatttcatctaccttgaactgcaggccgacagtttagtaaatcagcgtatacatttgcggcagttagttttatcgtgtcaatacttagatgccttacatacagagaatgtaatattccaatttcagcttgtaggatagatgatataagcattcatagtgtacaattcatccgatgttttacagctttagaacttgttccagcacgatatgtggatcgtgctgagttccttgatgttgcaaagaaaacgaggaaggacatcagggatcggtaaaatttaagcttgttttagggcggaaaaaaaaaaaaaaaaaagcggcc

SEQ ID NO: 177919 - DNA, 849 bp, Zea mays
  Clone ID: MRT4577_9384C.1
cgaaacgcagctagaagagcttggcaacgggctgtacagttctggcaaaccattcatttgggttgtgaggtcgaatgaagaacacaagctgtccgatgagcttcgcgacaagtgcaaggagcgcggccttgttgtctcttggtgcccacagctcgaagttctagcacataaagctacaggttgtttctacacgcactgtggatggaactcgacactggaagcgattgttaatggcgtgccaatggtggcagtaccacactgggctgaccagccgaccatatcgaaatacatggagagcgtgtggggcttgggtgtcaaggtgcgcaaggatgagaaaggcttggtgacgagagacgaggtggcgaggtgcatcaaggatgtcatggatggggatagaaaagatgagtacaggatgaatgccaatgtgtggatgaaaaaggccaaggaagctgcacagtacggagggagctcggacaagaatattgctgaattcgtcgccaagtattcatcaagttagttgtcaaacagattttttgtgtatctacaagagcctattttcacgacccagaatctgcgtcataagttagcagctttaccgctgcgctcccgcctttgaaacgttgtcataagttagtactccaataaaaattacacacacacatatatatatatatatataatactgttatgcaccctttgaaacgttgtaagcatacagaattgcacatttgggactcaacgtagtgcttcacaatattgccatccgaaatatttacttagtaaaaaagagattacaaacatcttctaattgatgatactaccatttactgtataaaaaaaaaaaaaaaa

SEQ ID NO: 177920 - DNA, 393 bp, Zea mays
  Clone ID: MRT4577_93850C.1
aaaatgtacatgtttcatatattcctgtcataccctacctatataataccctgttagatatgggcagtacagaacagatcgattaaagtggaaataacacgaatcgggggatactatacggacgggagacacgttaggaataaaaaaggatcatcttttatttggatctgaaagcgctcctacttcagaccggaagaacgcggatctacaaaacccgatgtactaagttcaaaacctacatagcgcgaacccctatattgtatgtccacactaacaaatcttaccgctaaactaatagaattgcggcttcaaattgacctccttcaaaccacagaggaggtcaatcttagttgaaggggtactcaatcaaagatcctgctgagccgcacgcct

SEQ ID NO: 177921 - DNA, 344 bp, Zea mays
  Clone ID: MRT4577_93851C.1
gcaaaaaaacccactataaactatattattaaactgggttttacacagacccattttgcacacattaatttattgatcagggcggggcacaccccgcacacctggtaataaaggtttgctgaaaaaaaaaaaccggtctttaaagtcccaaaccatcacataggcccattcattcaggggctgtagttcattatcaacacttgaacagtagtttgcaggtgcagcaacaagtaaaatgttctgacccacccgtacccgtacacatttttggtggaagtagacacatttggggtcccccacccacgcgcccggaactccggaggaatgcttccctattttttttt

SEQ ID NO: 177922 - DNA, 663 bp, Zea mays
  Clone ID: MRT4577_93852C.1
atggagtgggaatctctgcctcgcccgaccccagggctcggactcaacctcgactccggaagatggtctccgcctcgcccgacccagggctcggactcgacctcgcctccgaaagacagtctccgcctcgcccgaccccagggctcggactcgacctcgcctcggacgacggtctccgcctcgcccgaccctcgggctcggactcaaccccgacctcggacaacgatctccgcctcgcccaaccccagggctcggactcaacctcgactccggaagacggtctccgcctcgcccgaccctagggctcggactcgacctcgcctccggaagacagtctccgcctcgcccgacccccgggctcggactcagcctcgacctcggaggagccaccgcctcgcccgaccttgggctcggactgaccacgccgcaggggggtacatcattaccctacccctagccagctcaggctacggggaacaagaccggcgtcccatctggcttgccccggtaaaacaagtaattatggcaccccgcgtgctccatgacgacggcggttctcagccccctacggaagcaaggatacgccagcaaggatccgacagccccgacagctgtacttctacagggctcaagcgctcctccgacgaccacgacgccacatga

SEQ ID NO: 177923 - DNA, 843 bp, Zea mays
  Clone ID: MRT4577_93853C.1
acaacgccgccacctcgggctcggcgccggacgcttccccgccccggcgcccatgtcgaccccgtaccacggcatccctctccgcgcgctcctcctcgcggtgcccctgatttccatcttcatcgtctttcacctcctctaccgtcccgctcccctgccctcgacgttccggacctacgccgatggggcggcgtcgcaccgtgcggaggagctgagttgccctccgctctcctccaacttaccgcccccggcgccgaagccggaggagacattggagccgacgtccctgcgccacgtagtgttcgggatcgcctcctcccggcgcacgctgccgctccggctccccctgctccggctctggctgcgcgcccccgcgcgcgccttcctcttcctcgacgcgccggcgccggcgccggacgcccgcgacctcccgccgggcctcgctctccgcgtctccgccgacgcatcccgcttcccctacacgcacccgcgcggcctttcctcggccgtccgcgtcgcgcgcatcgccggggagctcgtctccgggctcaagcagggggagggggaggatgtgcggtggctcgtgctcgccgatgacgacaccgccttcgtcctcccgaacctgctccacacgctccgcaggtacgaccaccgcgagcactggtacctcggcgcgcgctccgagtccgcggcgcagaacgcgtggcacgccttcgccatggcatacggcggcggcggcatcgccgtcaggtggccgctcgcgcgccgcctcgcgcgcgtggtcgactcctgcgtcctgaggtacccgcacctctacggcagcgacgccaggatctacgcctg

SEQ ID NO: 177924 - DNA, 224 bp, Zea mays
  Clone ID: MRT4577_93854C.1
ataggtcgcgggaaacaagagaatgtctccaatgatgcacatgacgctggccgtgcttgcctgttggatgtacatgacgaggtctgcaggaaaggatgccttccaccttcaggggctagttcagtccttacgattccatcgattacaaggccatgctttagtgtgctggggtcgattagctccagtcgggaatgatgggtgcctttggaaaacctcagggtatc

SEQ ID NO: 177925 - DNA, 434 bp, Zea mays
  Clone ID: MRT4577_93855C.1
atcagcgtctgccttcttgctgttacatttcgcactctgtcccttgttattccaatctcagctccaaccatgttctaaagaaaactcccacgatcaacattgtacgttatgtggacatgcctactttgacaacgccaccatcccaggacaacttaactaccagcttggactgatcgactagcctgtgatcgagacgctttaaaaagaggctgataaaatgaacaaacggcactacaaccatacccgtcagtctctaaaccatcaaggctgagcgcaatacatcaatcaccatagatattgctgtgtggaatgttgataccaccaggcactactggacgcgcattcatgccaatgtacatcgtcaacttaatcaacaacatgatcactggctaactccccgtgtgactgtgcagctcctaccatgggctccacca

SEQ ID NO: 177926 - DNA, 858 bp, Zea mays
  Clone ID: MRT4577_93856C.1
gtacctcgaggccggccgggaaccaaactcctggtcttctcttctccactacccacccgcccgcccccgccttcttctccaccactgccccgccgctaaccaaccactcgtgcgccacaagtctcccgtcgtggaatagggcaaaggccaggcatctcgcttctgtcctctgtcgaggggatcggacccgatcggagaaagaatgggctcggaggcggactgcgacaggatcaggggcccgtggagccccgaggaggacgacgcgctgcggcggctcgtggagcggcacggtgcgcgcaactggacggcgatcgggcgcgagatcccggggcggtcggggaagtcgtgccggctgcggtggtgcaaccagctgtcgccgcaggtggagcgccgccccttcacgcccgaggaggacgccgcgatcctggccgcgcacgcccggctgggcaaccggtgggccgccatcgcgcgccttctcccggggcgcaccgacaacgccgttaagaaccacgacagcgcccggagccacttccaggagctctccccctcgtcgtccccgtcgccgcagtctactccacccgccttccctccgcaggcggctccgtctcagtcgtcgtacgcgttcagcggcgagctggttgccgcgatgcaggagatgatccgcgccgaggtgcgcaagtacatgtccggcgcggggctccgcgccggatgcgggcccggggccgtgggcgaggtgtgcatgccgcagctggtggagggtgtgatgcgcgccgccgcggagcgcgtcggcgtcgtcacacggccgtagaaacccggaaacggaccaaatcagatctgatcaatgcgaagcattgtgtt

SEQ ID NO: 177927 - DNA, 869 bp, Zea mays
  Clone ID: MRT4577_93857C.1
gacgtcccaatcgagccgagctaatcggaatctcatctcatctcacaccgccattgccagtgccattgccatcggcggcaccagcagcagcagcaacagcaggccaatccatccggtgccgtgttcgtgtgtgtccggcagccaacaatatgggagtggagtcgtcggagtgcgacaggataaaggggccgtggagccccgaggaggacgaggcgctgcggcggctcgtggagcgccggcggcttcgacgccatcagctgcaccgccgacgtgcgccctcctccgcccccgccagcagcagcagcagaagactacgaggacccgctcacctcgctctcgctttcgctgccggggctggaccaccagtcggcgtcgtcggggttccaccacgacagcgcgcggagccacttccaggagctgtccccctcgcgctccccgtcgccgcagtctactcctccacccgccgcccttctttcgccgccggcggcggcggctccctctcagtcgtcgtcgtcgtcgtcgtcgtacccgttcagcggcgagctggtggccgcgatgcaggagatgatccgtgccgaggtgcgcaagtacatgtccggcgcgggcctacgcgccggctgcggtcccggcgccgtcggcgaggcgggcatgccgcagctggtggagggcgtcatgcgcgccgccgcggagcgcgtcggcgtcgtcacacggccgtagaagaagaaaatcccaaaccaaaccaaaccaaatcagatcgaatcaatgcgaagcattgtgttaattaagatcccgtccgtcctgtgtagcagcaactacgtagactactactactacaactgctagtcgttcttgtttgtaaaacacaaaac

SEQ ID NO: 177928 - DNA, 1409 bp, Zea mays
  Clone ID: MRT4577_93859C.1
aattcggcacgagggacgtcccaatcgagctaatctcacaccgccagtgccagtgccagcggcagctgctaatccgtgccgtgttccagcagcgatgggagtggagtcggagtgcgacaggataaagggcccctggagccccgaggaggacgaggcgctgcggcgtctcgtggagcgccacggcgcgcggaactggacggcgatcgggcgcggcatcccggggcggtcggggaagtcgtgccggctgcggtggtgcaaccagctgtcgccgcaggtggagcgccgccccttcacgcccgaggaggacgccgcgatcctggccgcgcacgcccggctgggcaaccggtgggccgccatcgcgcgccttctcccggggcgcaccgacaacgccgttaagaaccactggaactcgtcgctcaagcggaagctcgccaccgccacggcgacctccagcggcagcgatgctgagcgggcgtgcaagcgcgcaagccctggcccggggagcccgacggcgtcggaccgcagcgacctcagccacggctgcggcgccgcgcaggtgttccgtcccgtcccgcgcgccggaggcttcgacgccatcagcgccgcagacgtgcgccctccgcccccgccagcagtcgcagacgaggacccgctcacctcgctctccctctcgctgccggggctggaccagtcgccgtcgggcttccaccacgacagcgcccggagccacttccaggagctctccccctcgtcgtccccgtcgccgcagtctactccacccgccttccctccgcaggcggctccgtctcagtcgtcgtacgcgttcagcggcgagctggttgccgcgatgcaggagatgatccgcgccgaggtgcgcaagtacatgtccggcgcggggctccgcgccggatgcgggcccggggccgtgggcgaggtgtgcatgccgcagctggtggagggtgtgatgcgcgccgccgcggagcgcgtcggcgtcgtcacacggccgtagaaacccggaaacggaccaaatcagatctgatcaatgcgaagcattgtgttaattaagatcccgtccgtcctgtgtagcagcgctacgtagactactactactactagtcgttctctggccgttgtatttagcagaggagctcgcgtttgtttattcttcggcggctgtcgctctgaatccagaaaggaacagagcggcggtgtaaagccgggagcggaagcggaggttggcaataatcgagatcgagcctgccatttctataaccggatgtgaccgcaacttgatccaaaaaaaaaaaaagcaaaaaaaaaaaaaaaaaaaaaaaaaaaagcctcctctcggccgctctgtacgggaattaatcggattggaccggaatgcaccgaaaagagggggcccg

SEQ ID NO: 177929 - DNA, 525 bp, Zea mays
  unsure (1)..(525): unsure at all n locations
  Clone ID: MRT4577_9385C.1
caaccangggnaaggagaagncccacancaacanngnggncatgggccatgncgacnctggcaagncgaccaccaccggacaccngancnacaagcnnggaggcanngacaagcgngngagggagaggnnngagaaggaggcggcngagattaacaagcgggccnncaagnangcgngggngcncgacaagcgcaaggcggagcgngagagggcagcaccanngagaangcncngnggaagnnngagaccaccaagnaccacagcaccaaaaaagaagccccnggacaccgngacnncancaagaacangancacnggnaccncccaggcngacggggcngnccnnnancanngacnccaccacnggnggnnnngaggcnggnancnccaagganggccagacccgngagcangcncnccnngcgnncaccccnggagngaagcagangaaaagcngcngcaacaaganggangcaacgacncccaaanacnccaaggcacgnnnangaagaganngngaaggaa

SEQ ID NO: 177930 - DNA, 355 bp, Zea mays
  unsure (1)..(355): unsure at all n locations
  Clone ID: MRT4577_93860C.1
tgcttgaaaaaaaaaaaaaaaaaaaacaaaaaaaaccaccccccccncaaaaaaaaaaaaaaacaccgtgggacccaaaaaacaaagagggcgacaaaaaaaaaaaggggtggttgccccaaagaactaaagcccatcaatttgcgtacgtaatccaaaagtctccccacagcgctattcaaaccaaacctatcggttgttgcccaaaaatgctcgaatcggaaaaattccggtgccattaaatcaaactgtcccgaaaaaaacttttcccctgttagccggtcaaaaaataaaaaggtttgaattaactgttcccttaaatacccgtttaattcgaacggtaaacggaattttt

SEQ ID NO: 177931 - DNA, 374 bp, Zea mays
  unsure (1)..(374): unsure at all n locations
  Clone ID: MRT4577_93861C.1
ccccgcccccccggccncccccccccatgcggcccaccgcggcgccgccgcccccgccgcccactgggccgctccgcacccgccggaggaggcgagcaccgagaggcgccccagccagagcaggccaaaccctaccctagcggcgaggagagaggcctgagcgacgatgccggctgctacctgcaccgctcgcaccgccgcgctcggcgacgaggagccgcaccgccctcactgccgttctgagtggcaccgccctctcctccagcgccaggcggcccgcgcccctggtgccacagaggctccgtttctggctaggctcgccgctttggcggggggcaccacgcccgctagcaccccgatgcttgacagctgcg

SEQ ID NO: 177932 - DNA, 577 bp, Zea mays
  Clone ID: MRT4577_93862C.1
ggtacacgcggccctccctcgagttttttttttttttttttttttttttttttttttttttttttttttttttttttttttttttttttttttttttttttttttgggcccccgggaaaagcttacccctttttgatcccccccatggggggcggggcccaaaaaaaatataccgggattgggaacccccaaaaaccaggaaggggggggttttttaaaccccaacggcggacgggggggggttatgcaagggggttaaaatccacaattccacccccggctaaacttcacaaaagtttccggggactccccttgcaaaggggttacgaaaaccggggctaccctgcccgggggggggggggcaaaatccccgggccccgggtcaccagggaggggggtttttaaacttccccccgcctgggaaaaatcaggccaggggggataaagaggaccccccgggccccccccggccggagcggctaaggtttttcgggggcgagttttggccctgcgggaccacccaagtcttcaccctcacggtttttttaaaccagggccttttaaaaattccccccct

SEQ ID NO: 177933 - DNA, 142 bp, Zea mays
  Clone ID: MRT4577_93863C.1
ttagctctctcatcacgtaaatgcaaaaggcgtgttttttttgtaattaatacatagaactgcatcttgatcgacggacagtacatccactacttgataatgtatgaagaactattttaactgatgatacgaatggtttatt

SEQ ID NO: 177934 - DNA, 375 bp, Zea mays
  Clone ID: MRT4577_93864C.1
acgcaaacacaggaagcagatccttcagggacccaaacaactggcaacaacacaggaaagccaactcagacaaacagacccggggttacaggatacccgaggattttacaggaggggggggcgaaaaaaatgggttcaaatcacggaaaaaaagggggcagagcactggccagctccaaaatcagacaatagcccccgaggggggggggggaccccgggtaccgggacccaagggggtttccttgaaacgatttttgaaccaaaacctgggaaagaagaaaaaaccagcgggttatttaaccaccctaaaaaacaactccggccaggctttttagggagaaaggggagacccgggattttgggtttcccgggggg

SEQ ID NO: 177935 - DNA, 721 bp, Zea mays
  unsure (1)..(721): unsure at all n locations
  Clone ID: MRT4577_93865C.1
ttttttnnnnnnnnnnnnnnnnnnnnnnnnnngtactcttaagcatgataacaggacaggcagatggctgtccacattcaaggcaatctggagctggaatgacagcaatctatttgttgggagcatgaaaagagcaatagatgttatctcagttgatcgcagacagaagagcatctcagcttcgtacatggcatttcttgagagtgaacacatgacagccatcccatgccgctttacgctgcacccgtgcaaagttggccatctggctggtgcaagctctagtggtaaggtgtttctctggaccagagcttgaagcaggctgatcatcgactgactgggatgtcctcggcctgttgctggccctgtcctgcccaagttcctgaccacggagatcctcatctcgcggttctgtactaatgatcgttagcattatcctgcttttaatgtataagggctagtttgagaactctattttttcaagggatttctgtttttttaatagaaaatgaactaatttctattggaaaaataaaaaaaatcccttaaaaaaatgaggtggctaaactagccctaatagtttgcactgcataaccatttggtatcgtgatgcatgtggttgttcggtccagtagaattagaaattagttttctaaaccaatgttagatcaggattgttatgaaaaatgtttgataaggttgttaatttgctatgtttgaggtt

SEQ ID NO: 177936 - DNA, 288 bp, Zea mays
  Clone ID: MRT4577_93866C.1
gtgaactatgcctgaacggtgcgtaaccagtacaagactgtgttcggactgcttgagcaatgctgtcgtccaagtcgtgggcctgactcgggtatagggggaaaggagttatatgaccatctaggaggtggctcgctgggaagttaacttcacgatagctggaccccacacgagcaatatcttgtaaagccactgattctacgcattgggggcgcaacgccctcaagatattctgaaacttcaaataggcaggacggcgcggctgcttcggtaaaccatgccatgcat

SEQ ID NO: 177937 - DNA, 361 bp, Zea mays
  Clone ID: MRT4577_93867C.1
ctcacatgcgagtgtattctcctactatgacaccgcctccgtcgcttgcggggtctccgacacgatctgccatgccctcccacaagaccttgcggatctagaagaagctcgccaagcagatgcgccacaaccggcccatcccattctggatccgcatgcgcagagacaacacctttaggtacaacgccaagcgtgggcactggcgctgcaccaaactcggattctgagcggcggaagaaacgctggctaaccacgcctaggctgttatggctctccaagttaagaagctcgtgttgaattctgttctgggtggcattatttgcgatagccacaccatggtctgtctgatggttaaagaacc

SEQ ID NO: 177938 - DNA, 2503 bp, Zea mays
  Clone ID: MRT4577_93868C.1
ctcacttcgcgcatctcccccctccctgcgcacagccgcacaccaccaacacctttcaccagacgccgccgccgccgccgccgccaccccccatccctgtcccgtcccgcgcgcggccgccacatccgtccgggcctcctcgtctccccagccccgctgccgcagggttcatcagcagaagttgcttgctccgccgccgccgccctcttcctcctctactgattttgcttcggggttcggctaaatttcgtcggatggatatcgatgccagcgccagcgtcatgtgccagctgctgagccccgagggagaccctttaggctctgcgctctatctgccccagaacgtcgggcccccgcagctccaggagattgtcaatcagctcctccacaatgaggagaaattgccctatgcattctacgttggagacgaggagctctctgtccacctgggtgcttacatgcggcagaagaacgccaatgttgaggttactctgcgcatagtatgccaaccacaagcacttttccggatcaggccggtcaaccgatgctctgccacgattgctggccacacggaagctgtaattgctgtttcttttagccctgatggaaagagtttggcgagcggttcaggtgacaccactgttcgcttttgggacctgagtacacagactccattgttcacatgcaaaggacacaaaaattgggttctctgcattgcatggtcacctgatggaaaacatcttgttagtggaagcaagtcgggagaacttatattatgggaccaaaaactgggaaccaattgggcactccacttatgggacacaggaaatggattactgctgtatcatgggagccagttcatttgcagtctccgtgccgccgctttgtaagtgcaagcaaggacggtgatgctcgcatttgggacatcaccacaaggaaatgtgttatttcccttacaggtcacactagttcagtgacctgtgtcaagtggggtggagatggtttgatttatactggttcccaagattgtttaatcaaagtatgggaaacttctcagggaaagttggtcaaaacattgaagggtcatgggcactgggtgaattcgcttgctttgagcacggaatatgttctccgtactggagcatatgaccacactggcaagacattttcaactgcagaggaaatgaaagaggctgctcttgcgagatacaagaagatgaggggtaatgctccggagagactagtttctggttctgatgattttacaatgtttctttgggaaccaacaattagtaaacaacctaaagctcgcatgactggtcatcagaagcttgtaaaccatgtttacttttcccctgatggacaatggttggcaagtgcatcctttgataaatctgtcaagttgtggaatggtatcacaggtaaatttgttgcagcattcagagggcacgttgcagatgtctaccagatcagctggtctgccgacagtaggcttctactaagtggaagcaaggattccactctaaagatttgggatattcgaacacacaagttgaaaatggacttgccgggccacgcggatgaggtgtacaccgtggattggagccctgacggtgaaaaggtggcgtctggtggcaaggatcgggtcctcaagctatggatgaactgactgacgaatattctatggatgaactgattgattattatatatctatgcttgggcgaattatatattgtagtgatgataattttgaaagtatactgagatcaattaattgtacaagatccatgcttggctcaaaactggaagaagctagctggaaatcatgagttcagttggtggtgctgatcgactcctccttgccccaccagaagacggcctccttggcggtggcgttccagtcgtcgtggctcctgaacaggctctcgccgtacttgtggccgctgtggacgagctcgcagtccttgcgcatgcggttggaccagcgccgcgcctgccgcgccagcttcctgtcccacttcatgggcggcacgccgtagcgcgcgcggagctcgttgtgggcgtccacgaactcccgggcgatgcccttgtaccaccccgtgccgttggtcggtgacacgatgcccttctccttggcgtacttgagcagctcctgctgggcagccttctccgccgcgaccgccttctccatctcctgctccttctccttctccttctcgccggcctcttccgacgacgacgacgaagaagattctccgctgctactgtcggtctcagtctcactctcagacggagacgactggtgcagcagagacgacgacgaggaggccagggcgcccgaggaggggacgttggagaggacgacggcgacgacgaggagcagcagtactgctatgctgctgctgggcgccatgctggctagctatggttcaagatcgagctaggcacgccgacgccggccctcctctcttgccaacgtcgtcgggcgcctgggcgaccgta

SEQ ID NO: 177939 - DNA, 1094 bp, Zea mays
  Clone ID: MRT4577_93869C.1
ggccgcaaattttttttttttttttttggatgaactgattgattattatatatctatgcttgggcgaattatatattgtagtgatgataattttgaaggtatactgagatcaattaattgtacaagatccatgcttggctcaaaactggaagaagctagctggaaatcatgagttcagttagtggtgctcttcttcttcttcttgttcttcttcttgaggtccgtggcatagtagttgcatgtgatgaagacgcctcccttgaagcactctgctcgtgcgcatcccaccttggtgctcctcttgccgaccatgagcgcgaagtggccgcactccttgtacgccctgccgcctgtgcactgctccgtgtccctgtcgtagatggactcctccttgccccaccagaagacggcctccttggcggtggcgttccagtcgtcgtggctcctgaacaggctctcgccgtacttgtggccgctgtggacgagctccccggccggccttgcgcactggcgttggaccagcgccgcgcctgccgcgccagctggttgtcccacttcatgggcggcacgccgtagagcgcgcggagctcgttgtgggcgtccacgaactcccgggcgatgcccctgtaccaccccgtgccgttggtcggggacaccagacccttctccttggcgtacttgagcatctcctgctggacgaccttctccgccgcgtacgccttctccttggccagctgccgctctttctccttgttctcgtcttccggcggggcttgctgctcgctgccgccgcttgtctcatcactctcaggaggtgagtgcagaagcgaggacgaggaggacagggcggcggaggggaggacgacgaaggcgacgaggaggagcagtgctgccatgccgctgctggtgggcaggcgggccatgctgcaggttatggtggttaggaacgccctcctctcttgccaacgttggagttgggaaggagggggccggggtccgtccgatccggcgtgacgggagagcgcgagggtgaccgcgggcggccggcggggaggacccggccggcctcgaggatcccaatcgccctatggagt

SEQ ID NO: 177940 - DNA, 154 bp, Zea mays
  Clone ID: MRT4577_9386C.1
ttcgttacgcgcgggcggacgcgtgggcggacgcgggggcagacgcgtgggcaaggatcatagaagagcgggcgcggacaccttctgctgcacgcgtacactcacggcactggtgccggcgccggaagactgcgtgagggtcgggctcaaaagg

SEQ ID NO: 177941 - DNA, 472 bp, Zea mays
  Clone ID: MRT4577_93870C.1
gcggccgctattttttttttttgttttttttttttcaacagatttgaaatactggttattgcagactttccaggtgacttatgtgaaaaaggcactatgaaaattaatgaatctagataatttctctaaatgatttatgttaaaatatacaacattcttacataacatctgttttatatatgtgaaataatataacatttaatgacaaaaattgtgtttccaaaaataacatttgttgaaggttaggtatctttcttttctctatggggaatctttcacaggattaaaatatgtgtaaattaagcgcttcttattaccagaaatacttgacacagataaacacataaaatggccccacttccttttaactacttatatcaacatttagaactgaggctttttattaagcaaaaatactgtaatgcacacccaatgcaaactacttgctttgcttgattttgagaagacatga

SEQ ID NO: 177942 - DNA, 2105 bp, Zea mays
  unsure (1)..(2105): unsure at all n locations
  Clone ID: MRT4577_93871C.1
ggccgcaaattttttttttttttttttggaatgaactgaattcttggctgtctgctgtactcgatcgtgtgtatatatatagatatagatacaatctgcttgactgattgggctcaaaattggaagaacaaaattaaaaaacaaaaaagaagaagagggaggaggatcctctcgtacgtagcagtcgtcgtcttcttcatcatcatcatctccaacctcggaatcaggcaattgcttcagtagtaattaattaacaatccaatcatcactcagtaaataagtcagcgctactacgtacgtacgtagataggaacgaacagatgggtggatggagtcagttattgtttggtgttttgttcttgttcttgtccaggtccgttgcatagtagttgcaggtgatgaagacgccgcccttgaagcactcggctcgtgcgcagccgaccttggtgctcctcttgccgaccatgagcgcgaagtggccgcactccttgaagaccttgccgtacttgcacttctccttgtccttgtcgtagatggcctcctccttgccccaccagaagacggcctccctggcggtggcgttccagtcgtcgtagctcctgaacacgctctcgccgtactcgtggccgctgtggaggatctggcagtccttgcgcatggcgttggaccagcgccgcgcctgccgcgccagctggttgtcccacttcatgggcggcacgccgtagcgcgcgcggagctcgttgtgggcgtccacgaactcccgggcgatgcccctgtaccaccccgtgccgttggtcggggacaccagacccttctccttggcgtacttgagcatctcctgctggacgaccttctccgccgcgtacgccttctccttggccagctgccgctctttctccttgttctcgtcttccggcggggcttgctgctcgctgccgccgcttgtctcatcactctcaggaggtgagtgcagaagcgaggacgaggaggacagggcggcggaggggaggacgacgaaggcgacgaggaggagcagtgctgccatgccgctgctggtgggcaggcgggccatgctgcaggttatggtggttaggaacgccctcctctcttgccaacgttggagttgggaaggagggggccggggtccgtccgatccggcgtgacgggagagcgcgagggtgaccgcgggcggccggcggggagtttaattaatagaaattctctatagcaaattactgtggtgtgtaaaatacacatcgaggaaataacaaaaaagaaaaaagtatcctagggttaatctatttctgctaggtgaacgggaaaatacgaattaagagccttaggtcgatttagttcggggaaaggggaaggggaaaaaaattctatgaacctttccttttttcgttaagttcaagtctggcgagaataatattctacaactaacaactcatttattttgagaccgacccacttcctatctagaattttttttactagtcctttatattgcaatgtgtcaaccgtcaaatgctttggtaatttgcccggatcggatgaagcaatataattttgaaccaaacgttttgatcgttggttatccttcgtagtaataatatctcggggttgcaacgaaagcttggtatatcaactatacgaccattaactaaaatatgtctatggttaactaattgtcgggccccaggaatggttgaagccatacccaatcgaaaaaggatattatccaaacgcatttcaagtaattgtagtaaaacctgacctgtggatcttttcgcttttccagcgatatgtacatatctaagtaattgtcgttctgtcagaccataatgaaaacgcaatttctgtttttcttgaagacgaatacgatattgctcttttttcccagaatggaatttctttttctgattacttccggatttaggcgtttttctagtgagtcctggtaaagctcccagacggcgtattttttttaaacgaggccctcgataacgggacatgaagactccttttttattttattgaaatttcattttacacaataaatttcgttnctatttacgattacgagnaatacgagtgnatgaact

SEQ ID NO: 177943 - DNA, 394 bp, Zea mays
  Clone ID: MRT4577_93872C.1
aattcggcacgagggagagaacgagtgcgcgagtttttttttttttttttttttttttttttttttttttttttttttataagttctaaacacggaaaagcggcactcatatattactgggtgacagtggcttaaagggggccaacccaacaaccggtaacaaaaaacactagggagggggggggggcgaaacttagcctccatccaaaaaacccccgattccttgaccccgacccaagactgtagccacggcccccagcggcggtagcgcctctcagccgcccaatccggaaagggtgccaccccggcccttgagggcgtagaccacttccatggcggtaacagtcatggggcggccccgctccttgtagggtacggccccggggatgacgtt

SEQ ID NO: 177944 - DNA, 2147 bp, Zea mays
  unsure (1)..(2147): unsure at all n locations
  Clone ID: MRT4577_93873C.1
cctcctctcctctcccctacagaaaagaaaagaaaaggagagagatggacgccgccggcggcaacggaagcagtagcagcgtgatgtgccagctggtgagcgcggagggggagcagctgggcgcggcgctctacctgccgcacaacgtcggaccgccgcagctccaggacatcgtcaaccaactactgcacaacgaggacaagcttccctacgccttctacgtcggcgatgaggagctctccctccagctcggcgccttcatgcaacgcaacaacgccaccgccgaggtcaccctgcgcatcgtctaccagccgcaggccgtcttccgcatcaggcccgtcaaccgctgctcagccacaatcgcaggccacacggaggctgtattggccgtttctttcagccccgacgggagatgcctggctagcggttcaggcgacaccaccgttcgcttctgggacctcagcacacagaccccattgtacacatgcaaaggccacaaaaattgggttctctgcattgcatggtcacctgatgggaaacatcttgttagtggtagcaagtcgggagaacttatattatgggacccaaaaactgggaaccaattgggcactccacttatgggacacaggaaatggattactgctgtatcatgggagccagttcatttgcagtctccgtgccgccgctttgtaagtgcaagcaaggacggtgatgctcgcatttgggacatcaccacaaggaaatgtgttatttcccttacaggtcacactagttcagtgacctgtgtcaagtggggtggagatggtttgatttatactggttcccaagattgtttaatcaaagtatgggaaacttctcagggaaagttggtcaaaacattgaagggtcatgggcactgggtgaattcgcttgctttgagcacggaatatgttctccgtactggagcatatgaccacactggcaagacattttcgactgcagaggaaatgaaagaggctgctcttgcgagatacaagaagatgaggggtaatgctccggagagactagtttctggttctgatgattttacaatgtttctttgggaaccaacaattagtaaacaacctaaagctcgcatgactggtcatcagaagcttgtaaaccatgtttacttttcccctgatggacaatggttggcaagtgcatcctttgataaatctgtcaagttgtggaatggtatcacaggtaaatttgttgcagcattcagagggcacgttgcagatgtctaccagatcagctggtctgccgacagtaggcttctactaagtggaagcaaggattccactctaaagatctgggatattcgaacacacaagttgaaaatggacttgccgggccacgcggatgaggtgtacaccgtggattggagccctgacggtgaaaaggtggcgtctggtggcaaggatcgggtcctcaagctatggatgaactgattgattattatatatctatnnnnnnnnnnnnattatagcggcctgcttgggcgaattatatattgtagtgatgataattttgaaggtatactgagatcaattaattgtacaagatccatgcttggctcaaaactggaagaagctagctggaaatcatgagttcagttggtggtgctcttcttcttcttcttgttcttcttcttgaggtccgtggcatagtagttgcatgtgatgaagacgcctcccttgaagcactctgctcgtgcgcatcccaccttggtgctcctcttgccgaccatgagcgcgaagtggccgcactccttgtacgccctgccgcctgtgcactgctccgtgttcctgtcgtagatggactcctccttgccccaccagaagacggcctccttggcggtggcgttccagtcgtcgtggctcctgaacaggctctcgccgtacttgtggccgctgtggacgagctcgcagtccttgcgcatgcggttggaccagcgccgcgcctgccgcgccagcttcctgtcccacttcatgggcggcacgccgtagcgcgcgcggagctcgttgtgggcgtccacgaactcccgggcgatgcccttgtaccaccccgtgccgttggtcgggacacgatgcccttctccttggcggacttgagctcctccgaat

SEQ ID NO: 177945 - DNA, 425 bp, Zea mays
  Clone ID: MRT4577_93874C.1
acgagatcttcccccgatcgacctcgtgatccttgcggccatgtcgtcgtcggcagccatgggcaattgatgaattcgtctagctctctgagtccatgcggctagacgcctcgctacctgcggatgatgacccatccaatgagaccgcctcgcatcgcccctccatcattctcaacgccgtcgcgctcggcaatatcgatgctggcaagtcggctgtgtggaacagcctcatcggccaccctgtgctgcccacggaaggggaaaaccacgcgtcgcagaccgccgggaacctgggcgcggcggaatcttgcgcggtggtctgctggtgaggccggaatcgctcactagagccaactcgtcgccttgcgcccgccgtatatcgtggccagcagcttctgctctacaatcgctggaaataccgcctt

SEQ ID NO: 177946 - DNA, 2929 bp, Zea mays
  Clone ID: MRT4577_93875C.1
cgatctcccctcgaagctctcgcggcgccccgcgacgcgggcggtcctcgctagtgcctcctctcggctcgtcgccgacgaggtgagcggcaccccgtcctcccctttgccttcggcgactccgtggtcgtccattgccagcaccctccctgtgacgtccgcattattcacgtgcaccgtcgcgccgtcgcgcagggtgaggacctccccgtcggatgctaggagtcctccgcacagcagattcgtctccttcccgattcgatatggagtgcaacagagatgacgcggtgcgatcaaaggatattgctgaaacaaagttcagggagaatgacattacgggtgcgaagaagtttgccctcaaagcaaaggctctttttgagacgcttgagggcattgatcagatgattgtagccttagatgtccacgtaagggcacagacaaagattgcaggggaaaatgactggtatgggatcttagaggtgccacccatggctgatgaggaggcaatcaagaagaaatacaagaagttggccttccaaactcatcctgacaaaaatagctctgtttgtgctaaagccgcttttaatctcatctcggatgcttggaatgtgttgtccaatactgccaagaggacggtgtatgaccacaggaggcgtgtgcatgccctaggagtgcatcagaataacttcaaagcaactgcccgtaagaattccaactcctctatgtcaagtgtggatagattctgtgccagacgtagggaagtggcgccccacctcgcccatgaaggaatagaaacattctggacactctgctggtcatgtcttatgaacttccagtactccagggaatacttcaaccaccatctgaagtgtcataattgtcatgcagtgtttgttgctgctgaagttcgaccaccaagtgttcagatttacccgactgagccgatgcctatgtctactaataataacattggtggcaatacagttcctggcatggtggctccaggagtacaggcaggagtgtcacagggcaatcaaaattgtgatccaacagtgttcaaatctgcaacatgtgcaaaaagtactaaacatacggtccaacagacacatgatagtattagaaaagatgatgcagctggagctagtatacccgctaatgaagaagcaaattgcacaaaagttctgcagcatgctgcaaggaaacatgcacatgcagtctcttctgccagacgagcaaatgcagcaacaagggagcatgaagctgcaaagagaaaacacgccaatgctggcaagcaaggaacctggcagtcagcagcctcctaccctgatggtgatggatgcaaaccggtgttcccagtaaaaagaaagcctcgctcaacctctgaaacatcaggtgccaagaaacacaaggtgtcttctggtgattttaattgtgaatcttctagtgatgttggaaggaccagctttggcagagtgctcatgaagttagatgtccgtagcatcctaattgaaaaggggaaacttcaagctcagaaattgcaggagctcagtagcaagaaagccaatgtgaaaaagaaacaaaagatgcagaatggtaagaaaagcagcagaaaaggtgtttgcaacatagaaaatgaggtcaataaaattgagatgaagcaaagcagcagttcagttgatccaaaaaaagatgtcttggagttggttagcagaagggttgattctgaagaaaaggagaggcagaagagcagtaaacaggttgggttgaaagaaaagctgaagtcatggcctgtacctgaagtgcgcatagtatacacgaggagaaaccgcaagcaacacaagaaggaactgggagatgaagtaactggtgctactccgggaacagagcaccatatgcctgccagatatggctgtttgaaccaagtatgtcctgatgcaggctctgacaaaattcctgttcctgatgcagatttctacagtgttcctgatgcagatttttccagttttggtgatcattctgaaagttcatttcaaaatgatcaagtctgggccatgtatgatgaagaagatggtatgcctcgctattatgctttgatcagaaaagtcatttccactcgcccttttaaagttagactggtccacctcaaagcaaacgactctaatgagttcggagcctccagttggctctcgtgtggatactccaagacctgtggtgagttcaagtttgatgtgtccaaacatactgaccaagtgaatatcttctcacataaggtcaagtatgacaaaggtccaggaggcattatcagaatttttcctaagaaaggtgatatctgggctctgtaccagaattggtcccctgactgggatcaattcacagctgatgatatgatttacaagtatgaactggtcgagattcttgacagctacagtccttccagaggcatttctgtgatgcctattgtgaaggttcctgggtttgtgtcagtgtttaagcctgttcacaacgcaacgagaagctggaggataccaagggaagagatgatgtgtttttcacaccaagtgccattccatgtccttactggagaagaagctcataatgctcccaaggggtgctatgaattggatccaggctcaactccacaggagcttcttcatgtagttccaccatctggcgatgctaaataagtttgcacttgaagctggagcttgctctgtacttaaatttttgtgtttgaaactttttaatcctttgacctagcagcagttggcgtaagatgtttccttttgaagtgtaaattatataccttgttttgtgctgatgtagcagcttactgtcaggattatgcagacttatattgtcatgttcaatgtgctcagttctcgttctcgatgcaagcattgagagctgtagaaaaaaaaaaaaaaaaaaa

SEQ ID NO: 177947 - DNA, 314 bp, Zea mays
  Clone ID: MRT4577_93876C.1
gaaccatacaatgagctatggtgaagtgatttatgtacatgatctcattcaggaggcactgaagggacagacacttgtcattgccaagtaagtcacatttaaattccctcaagccttgagaaataatgtgcgggacagtgcaactatagcacagtgatccctttggaccaggtcaactcctatgcctcctgggagcactgtagctgtgtgttcatctctatgcaaagagaagtatctagcgtcagctagatatgtcacagggtactatcctatataccagcgtacacctctatcaatacgtggtatgctgagac

SEQ ID NO: 177948 - DNA, 675 bp, Zea mays
  Clone ID: MRT4577_93877C.1
gtcgggacgacgccgcggctggtcgtgagctcgccggagctgatccgggaggtgctgctgtcgcggtcgcagcattttgaccggtacgaggcgcacccgctgatccgccagttcgagggcctcggcctcagcaacatccacggcgacgagtgggcgcgccgccgcaagatcctggcgcccgccttccacgccgagaacctcaagctgctcgcgcccttcgtcgccggcaccgtgcagcggatgctggaggagcgcgtgctgctgccgggcgggcccggcgaggtggagctggacgtcgcggaatggtaccggcggctgccgcaggaggtcatcaccgtcgccacgttcggccgcaacaacagcgacgagggcagcgccgtgttccggctgcaggccgagcacgccagctacgccaccgaggcgcacagcaaggtcttcttcccgggctacaggttcctgcccaccaggaggaacaggcgcgtgtggcagctggacagggagatcaggagactgctggccaagctcgtcgccggactgcagagcggcggcagcggtgatcaccgacaccagggccgggaccacgggcgcgccggcggcggcatgagggacttcatgagcttcatggccccggccatggcggcggacgagatcatcgaggaatccaagaacttcttc

SEQ ID NO: 177949 - DNA, 163 bp, Zea mays
  Clone ID: MRT4577_93878C.1
acgcttacgcgagagcccatgatgatgacaggatggtgccggatgctccggcatatattgcttacctgctataatcgacgcgcgaatactacgaactgatgaggcgctatgactctcacaacaatgaatacttggaaatctgccgtcggtacaaggctagaaa

SEQ ID NO: 177950 - DNA, 240 bp, Zea mays
  unsure (1)..(240): unsure at all n locations
  Clone ID: MRT4577_93879C.1
cgcatagagaccgattgcccatcaaattccccgttgtgccgttgtcgtcgtcntccctcgcccgtgggcccggctcgccctccctggcctagcttgtcacctgtgcgcgcgcgcgcggctcccgttcgtcgtgcttttttgtctcgngggcgcgcccggggggggggggccgcgcctctttttttgctttccgcccgctccgccgcggtttctccggccgttcgctgccggcttttgccc

SEQ ID NO: 177951 - DNA, 1566 bp, Zea mays
  Clone ID: MRT4577_9387C.1
ccggccgagatcctgagccgcatcgttctggaggatttccaagcgccttctccctgctcgctctattccccatcgtgccccttgagcttggagctcgagcgccaccagggtcacgccccttccttatccctcgtcggccatgctcgtcggacccgtcgagcagagcccgacgccctggctgagctggtctagctcgcgccctcttccaatttgaccttccctgctcggtctggcatggaggtcagccaccagaaatcgtgcgccaaccttgcccttctcaaccgtcgaccatgtgaagccatggagccgtcgttcttagccccggctccccaagtccggccaggaacttcccagcgcctccctctctgctcctgtgctcggagcccagtactccacctcgccggggtcgacctcccctcgcccttatcctctggccgtcatcctggtcgccggttgagtcccctcatggatgtcgttgcccaggtgctgagtctcctcccctcgacatgcttaacagcgtcgttgtatcggactccgctatcgatccgcgccactgattcaactcgccatcgacacagcgccgaacctttgcctctgccccatcgtcattctgctcgacgctggttcctcctccgattcccattccctgcttggtttcttgccattcgtgccactcggccaacgtgccagaatgtgttgcctccctccgttcgttgccatgatggccatcctcgttgcgacaggctggtcaccccggcgctgccatccctactcgaaatcctccctcttcgaagcttgctggtcgctgttccatgctgttcctaatagctcagattctgctcagctcgcccccatggcacatcagtcctgcttgattagtgttggctggtcctccttggcgttgttccgtgtagatcctttgaccccgttcaccttcagccccaccgtgttcacctccctgcgttgtcgcgaactcgccgttgccattcgcctagggtgaagtccatgtcatctccctgccctggtgcacaccgtcgcgcttctgtgatctgggccaacacacctagccaatggagcccgtccgcatgtcactgttccgcttcccacgccgaggtgggttatcctggaagtttagatgaaggaagtgaagatcaacacgacattactagatgtttgatgaattgtgtggatcggatccgtcattagtttggtacgctaatgatcaaaatgcgaaggccagggtctaggttgatcccaaatggtgcaaaggatggtctactctgagaggcgatgtcggcggaccaatctagcagatgaatcaagtaccaggatggcagatgctcaccaagtgatcgtcatctaacaacactgacttagtgtttattccagacaagccccggtgcatttgccacctctttgctgttttaaaacttttatcactaatatgttgcattaggcggtaggagttaaatgattaaacctttgttacataacttccttgaactattgattatcatccttgataccagatttgaaaagcaagatgtgcttagtatgcttatagac

SEQ ID NO: 177952 - DNA, 188 bp, Zea mays
  Clone ID: MRT4577_93880C.1
gtccgccccgcgtccgcggacctggggggacgcgtggggggacaggaacctgctatcaagatatcttggttgttctgttacgaggaaatttaacgtacatggtaacaaccttctatgggtgtgtttattcacccgtaccttccattagtggttgtttatttaatattaaaaggggggggggggaggcc

SEQ ID NO: 177953 - DNA, 1220 bp, Zea mays
  unsure (1)..(1220): unsure at all n locations
  Clone ID: MRT4577_93881C.1
gccccggtccgtagatcgcatccggtccaggtgcatgtatctttccctcctcctccccacatcacaatcaccgtcctcctctataaccgcgcctcccctccactctttctctctcgagtcatcttcttcctgcccaatacggcgagcatcggcggcggcgacccaagcaggttgacctcgccccttcaccgaccagcgggtcgtacagcaagccgatccaattcctccgtaaataaaggttgataagctgtgaggttgaagctagagacgccgctgttttaagtttcttcaaggacaagggaacattaatgtcacctaaagtactttcctcgatggaggttgaagctggttttgctggcgatggcgtcggttcaaataatggaccacaagacatgtggtcacttggcgagatagatccaaaaagagcaaggaggacggggctgtcttggattttgctggttcgaatttggtgagcgtggataattttgcttatggttcagttgccagatacctccagcttgacagaaagaagtgctgccttcccgttaatcttgcagaacacgtatgcaagcagtcttacaaccattcagaattaggagcagcgatatcatgggacgatgctctgcgatcgagcatgagacgcttccagcacaagtactacaacctgttcacctgcaattgccactcgtttgtggcaaactgcctgaaccggctcgcttacaatggctctgtggagtggaatgttttgaatgtggcttcccttgtttggtttcatggccaatgggtggacaaaatgtctttcgctcggtctttcttgcctttcctaactgtgacatgcatcggtattttaatggctggctggtctttcctggtagggatggcagcattctctgttcttttgattggatggtnttgttttaacggtatactgcgttaagggtttgatatgttgaccggagaagaattactgaaagcactcattagcgcaattgcagtctacaaatantnnggatgtaatcgctgtgctagattcaattaaataatttgatgtcatcagcctcagtgattcagaaacctgtgcaagttcaccaatttattttgacttatggagggcggtctcgtgaaaaatttagttaatgggcgtgctcattggcctcaaaacttgtttctgcaattgcatggcctaacacaaaggtgggtcaatttattttgatctgcaa

SEQ ID NO: 177954 - DNA, 295 bp, Zea mays
  Clone ID: MRT4577_93882C.1
gctgatgaaagagaccactacgctgtggtgtgtgtggtgaccacgtgacttgctccagctgccggggaccatccaaaaccagccattattgatgaaatcacgtaagttcaagtgctagaataattcattgatggtgttctttgcggataccatcccttcctgatcacaggctactacgtcctgtcgccatccatgctgtgactctttcatgggaacgcctcttctggcatcgtgctctacatttctacatgcttatgaacactgggcacttgacttgagctggtgcccaatggat

SEQ ID NO: 177955 - DNA, 1222 bp, Zea mays
  Clone ID: MRT4577_93883C.1
actctcttttcccgcagccgcagcaaggccccagcggcggcacggcgcagtggcgcaccctctggagtcaccttcttcctgcccaatacggccagcggcggcaccccgaccaggttgaccccgccccggcaacgaccagcgggtcgtacagcacgccgatccaattcctccgtgaaggtcgataaactgtgggatactgagattgaagctgcacactgttttagtttcttcaaggacaaggaacattaatatcaccaagtactttcgtcaatgaagcttgaagctgatttcgctgatgaagatgtcagttcaaataatggattacaagatctgtggtcacttgacgagatagatccaaagagagcaagattcccgtgctgcattgtttggactcctcttcctgtagtttcatggcttgccccttacataggacatgttggaatctgtcaggaggatggggctatcttggattttgctggttcaaatttgtgctgccttcctgttaatcttgcagcacatgtatgcaagcagtcctacagccattcagaagttggagcagcgatatcatgggatgatgctctgcgatcgggcatgagacgcttccagcacaagtactacaatctgttcacctgcaattgccactcgtttgtggcaaactgcctgaaccggctcgcttacaatggctctgtggagtggaatgttttgaatgtggcttcccttgtttggtttcatggccgatgggtggacaaaatgtctttcgctcggtcttctttacctgtcctaaccgtgacatgcatcggcattttaatggctggctggtctttcctgctagggatggcagcgttctctgcttttctgattggatggtttgttttcacagtgtactgcgttaagggtttggtatgttgactggaaaaagaattactgaaagcactccattagtgcattgcagtttaggaattatggatgtaatcgctgtgctggagtcaggtaaatcactcgtgtcctcagcctcagtgattcagacctgtgcaagttcgtcaaacaaaaaaattgacctatggaggtggtctggagataatttggttcatggcaagttcgtcaatttatttagtgctgttccaaggaaaaaagaaatttttttgattcaagcattctttttgaacttaacaacttgatgtattagttttatatttaatattccaagaaatcccatcatagt

SEQ ID NO: 177956 - DNA, 1248 bp, Zea mays
  Clone ID: MRT4577_93884C.1
ctcgatccaggccgggcaggctcttttcccgcagccgcagcaaggccccagcggcggcacggcgcagtggcgcaccctctggagtcaccttcttcctgcccaatacggccagcggcggcaccccgaccaggttgaccccgccccggcaacgaccagcgggtcgtacagcacgccgatccaattcctccgtgaaggtcgataaactgtgagatactgagattgaagctgcacactgttttagtttcttcaaggacaaggaacattaatatcaccaagtactttcgtcaatgaagcttgaagctgatttcgctgatgaagatgtcagttcaaataatggattacaagatctgtggtcacttgacgagatagatccaaagagagcaagattcccgtgctgcattgtttggactcctcttcctgtagtttcatggcttgccccttacataggacatgttggaatctgtcaggaggatggggctatcttggattttgctggttcaaatttggtgagcatggataattttgcttatggttcagttgccagatacctccagcttgacagaaagaagtgctgccttcctgttaatcttgcagcacatgtatgcaagcagtcctacagccattcagaagttggagcagcgatatcatgggatgatgctctgcgatcgggcatgagacgcttccagcacaagtactacaatctgttcacctgcaattgccactcgtttgtggcaaactgcctgaaccggctcgcttacaatggctctgtggagtggaatgttttgaatgtggcttcccttgtttggtttcatggccaatgggtggacaaaatgtctttcgctcggtctttcttgcctttcctaactgtgacatgcatcggtattttaatggctggctggtctttcctggtagggatggcagcattctctgttcttttgattggatggtttgttttaacggtatactgcgttaagggtttgatatgttgaccggagaagaattactgaaagcactcattagtgcattgcagtctaggaattatggatgtaatcgctgtgctggattcagttaaatcactcatgtcatcagcctcagtgattcagacctgtgcaagttcgtcaaacaaaaaaattgacctatggaggtggtctggagataaaaaaaaaaaaaaaaggcccctaaatttatttagtgctgttccaaggaaaaaataaattcttttgattcaagcatctctttctgaactga

SEQ ID NO: 177957 - DNA, 1464 bp, Zea mays
  unsure (1)..(1464): unsure at all n locations
  Clone ID: MRT4577_93885C.1
gagtcatcttcttcctgccaatacggcgagcatcggcggcggcgacccaagcaggttgacctcgccccttcaccgaccagcgggtcgtacagcaagccgatccaattcctccggtgagttctcctgttactacaccccttccggctttggttctcggcgctgtgttatgtgatgtcggtctgctcgagagcagggatagatacaccatccgcccatacgcctgaaatcgaacttgctactaaattgccagtaacactgagcgcgattatcgcacccacctacgtacatagaaattgatctcacgtactgttcagggcctcggcgtttcacttcgccatttcgttgaactgctggaagacacgtcggtgcacactagatttggattggggagaggagaagcgacagctttcggatgtgcaaatgtgcctaggttggtttcaaacataggagtatattcagtacccatttattaccaattcgtaactatcttcttcgacttattgtattcaagggaccccttgatatgttagacaaaaaagaagaagctacattaacaaatatcgaaagcctgtaaaatcttttaccaatagatggtgctgataaggacgtagtgatagatttcctacttgtgtatgggtacctcctcagacatagcanaattaaagcctggtccagctatgcccaaagtacaaatgtgnttgggagaagtgagcagcaactgggcttgaggaagaacttgtatcagtggtaaagatattatggtttcgggacccattgcttgcactcttacgtccacgttcggtgtattacatagtgacattgccatatgaaattgtaaagtaaataaaggttgataagctgtgaggttgaagctagagacgccgctgttttaagtttcttcaaggacaagggaacattaatgtcacctaaagtactttcctcgatggaggttgaagctggttttgctggcgatggcgtcggttcaaataatggaccacaagacatgtggtcacttggcgagatagatccaaaaagagcaaggttcccgtgctgcattgtctggactcctcttcctgtagtttcatggcttgctccttacatagggcatgtcggaatctgtcaggaggacggggctgtcttggattttgctggttcgaatttggtgagcgtggataattttgcttatggttcagttgccagatacctccagcttgacagaaagaagtgctgccttcccgttaatcttgcagaacacgtatgcaagcagtcttacaaccattcagaattaggagcagcgatatcatgggacgatgctctgcgatcgagcatgagacgcttccagcacaagtactacaacctgttcacctgcaactgccactcgtttgtggcgagctgcctgaaccggcttgcctacaatggctccctggagtggaatgtcttgaacgtggctgcccttgtctggtt

SEQ ID NO: 177958 - DNA, 307 bp, Zea mays
  Clone ID: MRT4577_93886C.1
aacgaaagcttcttaaatgagatggctttgatgctcatgctgtcaagtgataaatcctgctctctacaaccagcattaatggctatgattccagaatcaaaccgattactaacacttgacaccctgcacattatctaggtgcagatgcctgcagaatggaatacacacacccaagatcgtggaaaccgtggacacaccatatcaacattggttcgagtcgttcactgaagaagtctgagacaacttttgggcggcgacccataaaactcaccagataactcgatctagttttatgcgtctcttgaac

SEQ ID NO: 177959 - DNA, 560 bp, Zea mays
  Clone ID: MRT4577_93887C.1
gtgtgtgtgtgtgtgtggggtttttttttttttttttttttttttttttttttttttttttttttttttttttttttttttttttttttttttttttttttttttttttttttttaaacaaaaaccctgggttctggctttaaaaaagggccccgggggggggggggggttttttgtttcccaaaaaaagaactttacaaaggggcccgggttcgcaaacccttaacaagggggcagggtttcaattcggggccccccccaattttaggccggggggggtttccccaaaaactttacccatctggccccctttttaaaacccccctctgcaaaccggtttgttggccgcgaaaaaaaggggggggcccccccatatgcccgggctagggccccttgctttaaaaattggggaacccccggggaccaagcgggctgggggacggccaaaaaaaaaaacatttacagatttttccaaaagtttctgggccccaaaacaaaaaatttcaggccgcccaaaagccctgggttcggggattccccaagcttggggggggcttctc

SEQ ID NO: 177960 - DNA, 269 bp, Zea mays
  unsure (1)..(269): unsure at all n locations
  Clone ID: MRT4577_93888C.1
gacacttacacccacgcctccacccactcntcctttcactttttcgtgaacagcaagctcacctacccgtacctgttagctctccatcgcttcgtcgaaggctaacacctacttcccattccttctctatgtctgccattaccctccattgtcccttagctctcctcctcatctctctcctccttctgactctggtcttctccatacactgcctgtacgctcaccaccgctttctgaagctccttcggctgaagcactatatccattcc

SEQ ID NO: 177961 - DNA, 362 bp, Zea mays
  unsure (1)..(362): unsure at all n locations
  Clone ID: MRT4577_93889C.1
cggctcgcccttttttttttttttnnntttttttttttggggtttttaatatgaacaaagccgaacccccttgaattattgtcccttgaaaattatcttagaaacgcatccatcccttcgcggggcttattatccagccatataaactagctacaacctaattcctcaagcactatgctcttcgaaactactagaaggacatgttctcgccgcctagaattcagtaacaaatcaataacccacttcttggagtccacgatgaacctggtcttcttacctagggtggtggtgattgcattttcttcctccctccgcatgtcccccattttcttccccttgcggtgtgcgagtaagtactgatt

SEQ ID NO: 177962 - DNA, 728 bp, Zea mays
  Clone ID: MRT4577_9388C.1
accaccatactacttggagcattcagaaaccacgcagcgaaccgcactagcgacgaccaaacaacagtggctaccaagatattacgccctccttgcgcttgttgtccttgttgggagcgcaacagatgcgatcattttaccacgctgcttacttgctactagcgccattattccacagctcctaccaccagctacttcgatgggctaacaacactcagctgagcaagccaacaggctacaacaagcgcttgcggggagcgtactacaacaaccaattgcccagttgcaacaacattctttgccacatataacactacacgccatcacaacgcagcagcaacagcagctactaccagtactgagccacctagccatggagaaccctgccgactacttgcaacagcagctggtagcatacaacccacttgctctggccaacgtagctgcccaccagcaacaacagcagctgcagcagttgctgccagtgctcagacaactagccatggagaaccctgtcgactacctacaacagcaacagctgctatcatctagcctggtcgctgtgggcgatgcacctacatacctgcaacaacagttgctgcaacagattgcaccatctatgactcaactagctgcggcacctcctgtcgactactagcaacagctgctttcattcaaacagctgactctgaacaactctgctgccctcctacagcagcgacagcagc

SEQ ID NO: 177963 - DNA, 622 bp, Zea mays
  Clone ID: MRT4577_93890C.1
aaaccgttaagagcggaacatcaaacactgatcaaaattattatgctagtactgcatgcaaaggattaccgacgcgcgtactaagtatcacaggggcaaaagccttggtgctaaccaagcaagcgcaatgagcatctaccgacggtctaatgctttcaacaataaaagtggtctgtaaaattgctgtagacgacccattcggatctaagccacagtgctcggaacgtttgcctgaataacatgggttacaaggaacggattattgcctacaccttttctaaaaacaaccacagaattctaaatttaccactaattgctgcttgatgacctgttcaggacttctgggcaagcgccactccaaacttgattggcctgtccagcgccattggtgtccaattcccacagatcgtaaagagtgacttgggatgaagctggcgcataagaagctcgacaagcatttcattgatgctgagccttgccttcacggcctgtctgataatcaactgtgtacagttcaccaactgtgagtatgaactgattttgtgaaagcctgcgcgttagctcagccacacttgaggccttctgctactgatccaggagataaacacctgacactataatg

SEQ ID NO: 177964 - DNA, 352 bp, Zea mays
  Clone ID: MRT4577_93891C.1
cagcgagcgatagcctcacagagacccttagataggagcaagaaccgcggcaggagcaacagcggccatcatgatctacctcaatgagctaggacggggcacttgaagacactgccatgcgtggatcaacatgtcgtttcctgcgtctccctgttctaccccacgacgaccaagacggacatccaccccgagatggtgggcgtactgtccggacccagcctattcaactggagcaaccaactacaataggaccaacactagactgtacccaaggccaccaagcaacggtgtgacagctccatggctcgcaatctgtcaggcgaaaacgcaaacttgtgattctccaagaaga

SEQ ID NO: 177965 - DNA, 569 bp, Zea mays
  unsure (1)..(569): unsure at all n locations
  Clone ID: MRT4577_93892C.1
tcccaccaccttgtccttgtggggcaggctcagagagacctccagagcaacagaccagttgcgacttgcgagcagcttgcagcagtgcaatacacaatggctagccgccgcggcagcgtcttgtcactgccaaggcagttttttttcctggcggcggttcttggcaccggggtggggtgtcggctagggcgcgacggccaggccgctgctgggcatggccgagccaccggcctcgccaagcgccgcggcggcggcgccgggaccgggggtcgccgcgcaggctgcggaggcaggcggcggcaggccccccgaccgctcggaggccggcgcggaagtgatcctcgccgggttcgcggctgcggtggccgttgtcatcgtctgctacatccgggtcaccagggagagcaagaacggcagcggcagtgtgggagagaagcgcggaagcttgggagggttctgagctcgctcgctctgtctagtgtgggcagatgttgatgtaccagcgagtaggcacttcttgttaatgaaatgaggtgtntggagtgagatgagaagaagcgtngtgtttg

SEQ ID NO: 177966 - DNA, 430 bp, Zea mays
  Clone ID: MRT4577_93893C.1
gctaacgtctccgttattacatcacatgggaaacaaaaatgcgtgtggttagagttctgactaatattacagcgcctcctgcatatatgatcacatctttaattggaacaccgctcgttgggctatttttttgtactaaaactccctgttgcttgccctccttgccgagaacatggaaagctggaaacgctccttgtgtcgagccgtatcttgagcagcaagctcctttgaaaccatgtacttgaggatggcaagctccgcaggaagagttgacaccagtacgacgggcaccatgtactacgtacctagccataacttattctcagatgggagcagatctctgatataagcgattttctgtcactcaggaacatgagacatgcgctgatttgaaaatacaatatcggagcacctaatgggactatgagct

SEQ ID NO: 177967 - DNA, 410 bp, Zea mays
  Clone ID: MRT4577_93894C.1
attacacaactagctttgactgttgaagatctttttgttgaatacgaacattcaatatgaacaaggcacgatactagagcaggacacataccatccactgatctagacacgaacatgctacgagacacagcgcaaatgaggaccctactttgctaagccttcttgggggacttggcgccctgaaagggggacttgggcggcttgatgccgcccctgggcaaaaaataagccttcttgttggacgggagcacgggggggaagggggggaggacacctacgtgctcgatggtgactccaggcagcaggttcccgagctaatcttagttaccgatcgccaggagcacgtttcgcgtgatcatgctgcgtattattggtgaacttcgccacgtttcctgccaacttcagaaact

SEQ ID NO: 177968 - DNA, 182 bp, Zea mays
  Clone ID: MRT4577_93895C.1
agcgggtaacaacgcagaacgcgggagtttctctcgtgcacgtgcatgcatcgtcgactgtctagccgcgtgcgccggcgccgtcgcatgttgcttttcttgaccacagcgcgcgcaggctgagctgttgtaccggaatcggcccgttgtttgaagatttggctttgcctggattaccggcc

SEQ ID NO: 177969 - DNA, 189 bp, Zea mays
  Clone ID: MRT4577_93896C.1
aagggttgaaagatatccaaccttcgtggcctcctcaatggggagtaggtaagggttgaaagatatccaaccttcgtggcctcctcaatggggagtaggtcttactttgtgatttgattttgcctctcctctatctctctctaagttctcttgcttatcattttgagttatctcccaaaagttatccgc

SEQ ID NO: 177970 - DNA, 1172 bp, Zea mays
  Clone ID: MRT4577_93897C.1
tcgacctatcaacccgtcgcatcatcatctctcgccatgtcacattcgacgagaccacctttccctttgcagccacctcagacgtctcgtcctctgcttccctagaattcctcctcgacgacgatatggttttggtgccctgtcctactgttgttgcaggtgggactccatcctcgacgcccgtggttgctccatcccactcggatgttgagcagccgcccccagacgttgcagcctcacacgactcgccttctgcgacaccgggcgggcgtggtcccgtgcccccgcctggacccggcgtggttcccttcccacgagtctatgtccgtcgttcccgtacgacatctacgtccgagccgacagctgtcccagcagccactatgacttcatcgcctccgccgccgccggtcgctcgcaccatgacgggtgccattcctcgtgtctgctatgaggggctggcggccacgacgtcatcctcaccatcgccgcttccgacaaactaccgcagcgcgctggccgacgctaactggcgtgccgcgatgatggatgaatatcaggccctcgtctacaacaacacctgggagcttgttccgcggacccccggagccaacgtcgtaacggggaagtggatcttccggcacaagttccatgccgatgggtcccttgctcgccacaaggctcgctgggttgtccgtggcttctcccagcgcgagggcgttgactacgacgagaccttcagcccggttgtcaaaccggctaccatacggtctgtactcagcatcgctggatcccgcgcctggcccattcatcaactggacgtgaagaacgcctttcttcacggccacctcgaggagaccgtctactgccaacaaccgccaggattcgtcgaccctggcgctccagatcacgtctgccatctgcagaagtccttgtatggcctgaagcaagctccgcgggcatggtaccagtgcttcgccaccttcgtccggcacctcggcttcgtcgcctccatctccgacacgtctcttttcgttctatgagaggggacaagtctcgcctacctactgttgtacgtcgacgacattgaaagggaattaggcttacacctagttcctatataattttggtggttgaaatgcccaacacaaatccgacagcaacggaattcgagc

SEQ ID NO: 177971 - DNA, 205 bp, Zea mays
  Clone ID: MRT4577_93898C.1
accacgcgtacgctaacgcgtccacgtactcagtgccataacatagatcgccgatcccaggattagaatgtcagaggtgacggtcaccatgatgcaaatcgataccaactcaaaagcgacagcaagagacaaaaatcagggcgcacgacaagaaagggtccacaaaatgttatctaagcatgcgcaggtagcataccgaataaat

SEQ ID NO: 177972 - DNA, 273 bp, Zea mays
  Clone ID: MRT4577_93899C.1
cccacgcgtcctaaaaaaaaaaaaaaaaaaaaaaaaaaaaaaaaaaaaaagggaaagggttcctataaggaaaaaaccaagaaaaaaaacacaaacatacaacaacataaatagggccaaagggcctcctaaatccaatttaatgtccgcccccttacaactttatacctttaaaaatccctgacttacttcaaattaactggcttgcattacaccccactttaattggaaaaacccttacctaacccaacttagtcgaccgactttccaaac

SEQ ID NO: 177973 - DNA, 224 bp, Zea mays
  unsure (1)..(224): unsure at all n locations
  Clone ID: MRT4577_9389C.1
tccgcggactcntcngtccacccgggccatttggaccgttaccagcaggcagcccgcgagacactaacgggttttggggggtttctaaacccccccaccaccacaagctgntagcaccataccatcaaagcccaattggcggccatacaggtgagccccccacttacataaaaaccaaacaagtattcacatggaagggaaagaagacccttgggcaaaacagg

SEQ ID NO: 177974 - DNA, 338 bp, Zea mays
  unsure (1)..(338): unsure at all n locations
  Clone ID: MRT4577_938C.1
acgacgcacgcacgcgaacggaagacaaggcttttcgagagcggccgcccggggggggggggggggccncacaanccacgggaaaccgcggagaggaccaacacgagggagagaagcacaacaggaaacaaggggcaaagacgggaaaagaacagaaccccagaaacaagcagcgcgggaccaancgccacccgggcaccaagccaacgagagggggggagacacatcatggtgggttcccaaanggacgnncngncaaccagaccagggggggggggcancangcccgcccgcaaggaacacgangccnccaaggcaagggaggcacaaaccaaaac

SEQ ID NO: 177975 - DNA, 318 bp, Zea mays
  Clone ID: MRT4577_93900C.1
gtcaaaagaaacggtgaaaatctcagctatgagcacatctgtgtctctggacgcgaagcactatgtagcgttccaatgtagttctatacacatctgagagcaatcaggcaactgtctgcatcagatgcagacacctagtgaaagttgttaaacctgcccaattcgaggcgattaatgatgacgaggtgcccatttaccagaagcctttcatggaaggggaagctgtacatccatttgccggtggaatacctgactcgttagcaccagaacagtgcaagctctcgagacagtcttccaccaggacttcatccagctgac

SEQ ID NO: 177976 - DNA, 266 bp, Zea mays
  Clone ID: MRT4577_93901C.1
tcggattcggtcgagaaattttagtgggctatttatcttaactttagagaagctgcataatgtatgaattattatacaattgctcgattcattagaagaattaaaacaagtttttgcacacatgtgctatgaaaacattaagtgctatattgactcacccacaatcagatttgaatggagcttcctttttagcctacagggatgggatagactggtaataggattcggtagggtaacttgaaaactgacgtaaatgagaaaggtag

SEQ ID NO: 177977 - DNA, 543 bp, Zea mays
  unsure (1)..(543): unsure at all n locations
  Clone ID: MRT4577_93902C.1
nctcgggccggccgggctacgtcaccgccagagcctaagtcatcatccttcactctgctatcatgcagctcatccaacactctccagagaagtctccttcgtcacaatcatcagtaaggtccccactacccccaataaaaaatactattacaccgggactagttaactatattgcaccagcatgcagatgaagccaccataactaccactaccggccgcagtgagttcaccttctcctggaggcacctgtgcccatccgcagaaagaagagcattcattaccaccaccaggataataccaacctccaccatcatacagtgacatcatacttccacctatcatgggcaacaagtacgcatgtacgccttgtcatcaattacaagggtattaagcgctacagacacatgtttgatgatgcatgaatgatacagtctataagggcagacgcgcacacatactgttacatgtaatacactatagacgtgggtgaagttgatctttgtctttcacgtgcacgtgagagtgtatacttatgcatacata

SEQ ID NO: 177978 - DNA, 305 bp, Zea mays
  Clone ID: MRT4577_93903C.1
tgcaagactctagagtgagtcgtattaacgcgcgttggacgtcggcggtagcaaggctgccgacggcatcagtgagggcgcacgctaagtggcgccggcaagccttgccgcgaggacatgtcagctgctccgcatgtcgacaccagctatcggtcatccggtgagctgaagtatctcagtcctgagacatcatctcttcatggcttcgcacccaaagactgagtctccgatagctcgcttaggcggcagtttcgcaagcacgtgcgcatgaatctcaaggcaggttccaaggtggccgggctcac

SEQ ID NO: 177979 - DNA, 466 bp, Zea mays
  Clone ID: MRT4577_93904C.1
ttgggctccccacgccccgtcggtttctctcatgccaatttctcttgccctggttctctctcgctcgtcggcgcgcagttggagtcgccgagagcgccgtctgcgccgaatggtactcgccgtcaaactccgtcgtgctttgaggaatcgacgatcaagcatggcgacaaagtgatcgaactcttcgagttctacgagatcgaagaccctgagcatctgtttggtgaaggttgtcagcattgcaaccactgctcaggcgaagatgaagctgtggaaggagacttccaggagttccaagattacgacgagttctaggtgtgggttagcggcaacccccagtcggctgcctgtgaaggccgcggttatctacgtttcttttccgcactttgatttattgtaagaactatatggacgtctcagacgtatgatgtaatcgactatttcccttattaatactagtttgagg

SEQ ID NO: 177980 - DNA, 427 bp, Zea mays
  Clone ID: MRT4577_93905C.1
ggggcacgaacaaacacatttagttccaagaacaggggaaaacttaacaaaagcaggggtggcaaatatcactggccttaaagaggtcgaacctccgttttaggcatgcataagcacaaagcacaagcagactaaaaaaacagggaatcaccggccaaaaccagtagcattgaaaccaagcagaatttttccgttttccccaaaaggaagggatgccaaattcggggagcgagccaactttggggaaaactccttggccgcctcaatcctcctgagctcaaaaagccctgtcccagccatagccggggcccaaaaaaaaaggggcgcggactcgctttttccctaagggcgcacagaggccgcccgccttttctggtccgccttgggcacaaggaaacttggaacccccggcctcctgctggcgcaa

SEQ ID NO: 177981 - DNA, 514 bp, Zea mays
  Clone ID: MRT4577_93906C.1
gcacgaggcaaagcgattcgttgggagcagcagcggcgcaaggtgaggccatcatcgaagacctctcggcaccgctattgagatctcggtggggagctttggcgcaatgttgaacctctaggggcacgtccatggccttagcgggagtcatggcgcattgtgatcgagttgattccccgccatcgtcacaccgccgtcgcggatccgctcaacgccatgaaccactaaacctcctgcgtataccacggttgtcagcattgcaaccactgctcaggcgaagatgaagctgtggaaggagacttccaggagttccaagactacgacgagttctaggtgtgggttagcggcaacccccagtcggctgcctgtgaaggccgcggttatctacgtttcttttccgcactttgatttattgtaagaattatatggacgtctcagacgtatgatgtaatcgactatttcgcttattaatactattttgagcataaaaaataataaaaaaactcgagggggg

SEQ ID NO: 177982 - DNA, 925 bp, Zea mays
  Clone ID: MRT4577_93907C.1
gggaccaaaaccatcaatctcattgccacctgtaccaaagtatctctgatcaagtatcactaatcactggagctcccttggccgctcataaccgcgagcacggctgatatatcagtttataacactctgcagaggttgtgcactttacccacaagccgtgattccctctctggcccgggcttgcaagacccttattcactcccgaggtgaatggccaaggattcactacgaagcctttacaaagattccccggggctgtagccacccgttaggtttcctaaatgcaccgcactcctccccaaggggcgaacccaaacttggcagagcgagccgcatacaccgagccccattgacggcacgacggctaagtgaactacaccccggatcctctaattattcagctaagggcaccccattccacccttatggttgcactgttttcccgggcggtcatccatagaacaggtccttacggagaggcactcgagaaaccgctcgagtccccttaaatgccacaagtataatcataaataagaacgggaaaacagcgtatcatagataaccacatcatgttcattgattaaagttgagcaatagcatcaaactaagcagtaataatccgacccaaataggtaaacaaggacatggataacaaaagctagtcaatccttaggcataaatgtgtaaagcgggaggtgaattaaataatgaataggacagagataggtcaaaggacacttgccttcaccaaacagatgctcagagtcttcaatctcgtagaactcgaagagcttgatctcgggaccagtggttcaccaagtcttgatcgtcgattcctcgaagctcaggaacatatcacaatctattcgcgacacacagcgaagacgaacaagcacaagcaaaccaacatatatgcataagaaca

SEQ ID NO: 177983 - DNA, 1017 bp, Zea mays
  Clone ID: MRT4577_93908C.1
cgggtatcctgtttggctgtagtggacttgctttatgtgggggataagtcaagcagttgcttttagttggtcagattattatttactaatagaaagccaagttttagcattaacccaagttattagcccgatgtaccttttccaaacggaaagaataccacttaccagcaccatagtcataaccaaaaccaatcgatctcatagccacctgtaccaaagtatctctgatcaagtaccactaatcactggagctcccttggccgctcataaccgtgagcacggctgatatatcagttttcaaacactctgcagaggttgtgcactttacccacaagccgtgattccctcttgcctcgggccgatcaaacccttaaacactaccaaggtgaataggcagggtttcactacgtagcctttacaaagattccccggggctgtagtcgtccgttaggtttcctaaatgtaccgcactcctccccaagggacaaatcaaccttggcagagcgagccgcatacaccgagccccattgacggcacgacggcgaagcgatctacaccccggatcctctaattattcagctaagggcaccccattccaccctcatggttgcactattttcccgggcggtcatccatagaacaggtccttacggagaggcactcgagaaaccgctcgagcccccttgaagaccacaagtataacatcataataaaagaagggaaaacaacatatcattgataattctcatcatgttcattgattagagttgagcaatagcataagactaagcaataataatccaacccagataggtaacaaggacatggataacaaaagctagtcgatccttaggtataaatgtgtaatgcaggaggtgaattaaagtatgtataggacagagataggtcaagggacacttgcctccaccaaccgactgctgctcaggggcttctcctgcgagttcttcgggttcctcgaccagatcgctctctatgcgaacacaatcatacattcac

SEQ ID NO: 177984 - DNA, 274 bp, Zea mays
  Clone ID: MRT4577_93909C.1
tcggaagaacatgatttttatcagggatgctactttttacggaagacctgcataattattaatcccattgccacataagcatgacatacactactttctatggatatagcgccccaatgaagaacaaacatcaaaatatgctgacccccccccctgccctatcactaccttgtcgtacacctcctaatatcccttccttcccttcatcctccccctcctctcctattcacttttttcctcccttttcaccccccccctccccccacttttcttc

SEQ ID NO: 177985 - DNA, 488 bp, Zea mays
  Clone ID: MRT4577_9390C.1
ttttttttttttttttttttttttttttttttttttttttttttttttttttttttttttttttttttttttttttttttttttttggggggacccaagggggggtttcatttcttaaaaggctaaatacaattattttctaaacaaacgggggtatttctttaaaatggggccaaaaaatggcttatcactaaaaaaaattgataacccgggaattttggccatcggaaaccccccacattttttttatttttgcccaaaaaaggaaaggcacccctttttttggaagccaaaaaaaggcaggaaacccccccaaaagggggggaggcccattagccaaacgatggcaaaaaccggggccggcataaacggggcaaccttatagaaaaaaaagaacgtcagcccggacctgaacaaccacacccccaggttgaaccctttcctgaggggggacccaaggtcccggcgcttttaccttcgggggcgac

SEQ ID NO: 177986 - DNA, 614 bp, Zea mays
  unsure (1)..(614): unsure at all n locations
  Clone ID: MRT4577_93910C.1
ggggacctgtgtgctacttgctgccaagggcccaggctagaacatatggtccagtgccgacataaaatcaaacaggagcactgccactgcagcctgtagacagtagtagtagtaggtgctcagctccctccattgatgccgagaccagaccagcccgtcatcatcagtgacacatagtaaagaagtatctatagtccatccttatgaatacagaaagtgactcccaaaacgctctcagacagacaagatctaatgagagtagacttgtctagagtcatactgcagttataggatatacacaaagaatataaacgatagttgntnatagacaaccttagactgcagaaatggacccgaaagctcatgatgattgcctttcgagtattacaaactttgacgcattgtctatctgaacacgatacacgttcctcttcattgcttgttagccgtccatctgtcatcctcatggacaatcggatacccagtactacatccaccctttttaatttgacgctaaactatgtaaaacagaactacaaaacattcaataagaaaaatccaggcgagacttgttacctactttcacagcaagtcatactaccacaacgcgcgca

SEQ ID NO: 177987 - DNA, 522 bp, Zea mays
  Clone ID: MRT4577_93911C.1
attgcttctatgttcgttgagttgctgttggcggtccttatcccatcgctgggagatcgagcggtggatgaggcgagtagatctgatggagtcgaaggggtcgcgagcctcgtccacggtccgtcctcctcaccgacgatgtcgttgtgtgccagcttcatcgacagacaccgcggggctccatacaatcgagatccgtccaagctcatgagaacgatccggttgaagagcccgaagaactcgcaggagaagcccctgagcagcagtcggttggtggaggttgtcaacattgcaaccactgctcaggagaagatgaagccgtggaaggagatttctaggagttccaagactacgacaagttctaggcgtgggttagcggcaaacccccaatcagctgcctgtgaaggccgcgtttatctacgtttcttttccgcactttgatttattgtaaatactatgtggatgtctcagacatatgatgtaatcgactactatttccctttttaatactatttgagcact

SEQ ID NO: 177988 - DNA, 309 bp, Zea mays
  Clone ID: MRT4577_93912C.1
atcaccatcatgtgctgctctagctgctgcgtcattatatattacatcgcgtatacgtataggtacggattcatacgtcttggaatcaattactgtgggtattgtattatacatatgcaggacacttagggcttgtacccgtgcctgtggctagtcattaatgagggagacatgcttttactgatctaatgtatgtagactcaattacatgctattacgatacgggatactatgcacactacttttccatcatcagcctgaattgagcgcttttgcgagagttgacactgtgtactcaaccactgtctg

SEQ ID NO: 177989 - DNA, 814 bp, Zea mays
  Clone ID: MRT4577_93913C.1
cggccgccctttttttattttttaattttatttactttctgtgatcataattactgtattttaagtaggctaatcactgttcatgctatgggaaaataggaagtttaatttaaaattccgttatgctattgattcacgtagttaattgtttaccctgtgcaatgttgatcaactaaaagtgattaggtttccattagtatatataaatatatataacagaattattttgttaaaaaccaattgtgtcattagtgcataagatttaaccccctgcgagacctttcccgtttctttctaaccataacaaatgcgttatcgaatgtcatacttgatgcatattcactttatttgttatcttgtatggtgtactgttcttttgtattaaatgtggatggatgtatgtatgtttgcactcgcatagagaacgatccggtcgaagagcccgaggaattcgcaggagaagcccctgagcagcagtcggttggtggaggcaagtgtcctttgacctatctctgtcctattcattatttaattcacctcccgctttacacatttatgcctaaggattgactagcttttgttatccatgtccttgtctacctatctgggttggattattattgtttagctttatgctattgctcaactctaatcaatgaacatgatgagattatctatgatacgttgttttccccttctcttacgatgatgtgatacttgtggtcttcaagggggctcgagcggtttctcgagtgcctctccgtaaggaggtgttctatggaaaacaaccaggcaaacagtgcaaccatgaggg

SEQ ID NO: 177990 - DNA, 546 bp, Zea mays
  Clone ID: MRT4577_93914C.1
ccggccgggaagcaaagattgatccggcctaatccctatctctctctcaagccgtcggctagggggtacaccccaaccagcgaagaatgacgaggggggcataaccccgccagctaccacgggccgagactacgaactttgtagtcgaggtccgacgtccttgggcacgtacgcccttgacaggcaattctctggaagagaacgatccggtcgaagagcccgaggaattcgcaggagaagcccctgagcagcagtcggttggtggaggttgtcagcattgcaaccactgctcaggagaagatgaagctgtggaaggagacttccaggagttccaagactacgacgagttctaggtgtgggttagcggcaacccccagtcggctgcctgtgaaggccgtgttatctacgtttcgttttcgcactttgatttattgtaaggactatatggacgtctcagacgtatgatgtaatcgactattatttccccttttaatactatttgagcactgtgtgatgatgtcgaaaaaaaaaaaaaaaaaagcggcc

SEQ ID NO: 177991 - DNA, 612 bp, Zea mays
  unsure (1)..(612): unsure at all n locations
  Clone ID: MRT4577_93915C.1
gaggctcggccgggcaattgtgtcattagtgcataagatttaaccccctgcgagacctttcccgtttctttctattcggcacgagtgcgttatcgaatgtcatacttggtgcatattcactttatttgttatcttgtatggtgtactgttcttttgtattaaatacgtggatgtatgtatgtatgtttgcgctcgcatagagaacgatccggtcgaagagcccgaggaattcgcaggagaagcccctgagcagcagtcgtttggtggaggcaagtgtcccttgacctatctatgtcctattcattctttaattcacctcccgcattacacatttatacctaaggattgactagcttttgttatccatgtccttgtttacctatttgggtcggattattactacttagtctgatgctattgctcaactctaatcaatgaacatgatgtgattatctatgatacgctgttttcccgttcctctttatgattatacttgtggttttcaaggggactcgagcggnttctcgagtgcctctccgtaaggacctgttctatggatgaccgcccggnaaaacagngcanccatgangnnccaatggngggccccttact

SEQ ID NO: 177992 - DNA, 800 bp, Zea mays
  unsure (1)..(800): unsure at all n locations
  Clone ID: MRT4577_93916C.1
cattgggtacctcgaggccggccgggngaaccgcccgccccgtctttctccctgcacagcccgctcacccacccctccctagagctgcctgttgcgtcgtcattcgtcggatccgcgccatcaccgctcagccgccgagatttcaacccattcccgggcctcgaggaatcgaagatcaagcatggcgatcaagtgatctagctcttcgagtcctacaaagttgaagaccctgagcatctgtttggtgaagacccctcatccctaggttgtcagcattgcaaccactgctcaggagaagatgaagccgtggaaggagacttccaggagttccaagactacgacgagttctaggcgtgggttagcggtaacccccagtcggctgcctgtgaaggctgtctaactatctgctcctggtacttctggttcagggcgccacctcatcagagaacgattcggtcgaggagcccgaagaactcgcaggagaagcccctgagcagcagtcggttggtggaggttgtcagcattgcaaccactgctcaggagaagatgaagctatggaaggagacttccaggagttccaagactacgacgagttctaggagtgggttagcggcaacccccagtcggctgcctgtgaaggtcgcgtttatctacgtttcttttccgcactttgatttattgtaaagactatgtggatgtctcagacatatgatgtaatcgactattatttccctttttaatactattctagcactgtgtgatgatgtccaaaaaaaaaaaannaaaanaaaaaanaaaaa

SEQ ID NO: 177993 - DNA, 540 bp, Zea mays
  Clone ID: MRT4577_93917C.1
aattcactatcaagtctgtatttttcataataaaaacagacaagtatcacaattatatatgccatcagcagtctaaatattcaaatttagatactcaaaactgatagtaattgtgatacaaatatacattaggtctgaaattgcagaaaaaaaacaatgataaaatgacagactcaatttgtacagcccagacaagtggcccatgagacccaaacagttagggtttgaaccctaaccattcgtcactccttcctgctggcggtcgcccaaggccatggcggcgcggtcgagcgagcaaccggccctgcgggtgggaaggtcccccggccctgacggcggcgggcgcggcccccgcggcgcgcaggcgcgggatcgacccggttcgggtggatctgctcatgcctcggcgcggggatccggccacggcggtgtggggcacggcgcgtggtctcccggcgcgcgggcgggccctggcggcacggtcaagcactggcggctagggatgacggcgcggcacgcagcctcccggcggtgcgggcg

SEQ ID NO: 177994 - DNA, 543 bp, Zea mays
  unsure (1)..(543): unsure at all n locations
  Clone ID: MRT4577_93918C.1
gctttcggcgtcttcacaaagccggcgcaaactctcgcccnggcccgacagatcttcaantctttannccgnccancgatcgatctttattccagtctcggtctcttccgaaggcgtcgcgcgcggttgnnngagaggagaggattttttttttggagagcattttcttccacatggggggggggcgggtccaanncggcaacncnngcagagaaccccncggggggggaggagggattcattttgttggtttagtgcctggacataagaccgtggtgtttttttttttatgccttcagcaccctcttttttcagactggggcagggaagcacgnaacccgagcaatcttcgttgttctagatcccactgtgttctatgaggngcgcactggcacttaccgccagctctaattttaaaaaaaaaaaaattattttttttgaggacgcaactaacacccccggnnggggctctttcacatttggcattgagaccgtcgaaccgtgcctttaccgttttcggaagcttgctgacaactgtaccgg

SEQ ID NO: 177995 - DNA, 555 bp, Zea mays
  Clone ID: MRT4577_93919C.1
atgggtacccttttggtccggccgggcctcaagcccgcagaagcagtgattactcccatactctgtcacaacacatatgtcattctagagagattcgagcaaccttcttgggtagatatagacattcttgttagagagtgctttcgagatctgcattcttgttatgtgtgctacgttcttgctcttgtgtgtgtcctctctcttgttgctattggagatgttgctcccataaatttgtgtgcggctgcaagagactccaatatatggagatcccgacgagaagaaagtataaggaagaaccatggactcaagttgatcattggatcacttgagaaaggttgaatggaaacataattctttggaacaccattatatggagtaagcaagcctttgagacttggccgaaccaccagaaaaattacctggcttatggggttgaacctttgcaatttggtattcctcccttattttatggtcctgaaccttacctatggtattggtctatttggaaattcgcaatcctggagagaaatcaagtgccagaacctctccctt

SEQ ID NO: 177996 - DNA, 3460 bp, Zea mays
  Clone ID: MRT4577_9391C.1
gcttcgaaccgggctttcgtgctttctataccatatatagctgtagcacgtacggccggcgtgcccattttcagcgaaattagtgatccgaccgacatgcatttgtttggttcgcgttacatcacatagctggagctcgtcaattaacaagcttctatttgccaaaacagaacaccatacatccctggagactagacataaatatcaccacaggtattccttctgacagaaaaaaacaaacaaacaaatggaccttgcatgcgggggcggcgcgacgtgcgtacgccgtaatttacaagcgggggcggggcacatatgcacttcttgtcttcttcaacataaagcggaagagcatagaaacatccttccgttgagcgtaggccccccacccgcggcatatctgttccaacagggcctagcgtttaaacgcaatatctttcgccttcatagtacgcaggtcagctaggtgccgcattgttggcctcccgtgtgggcagttccaaggggacctcaatccagccatgtttttaagtatcttcttcatctcagcttttgttagtggatcgcctatcatagtagacattcggcaagccctagaagccaacatagcacgaaccctcgaagggcaaacagagtcggctgtatccagcttgtagctactgattattgaacagtctccttgactatcggcaagcatggagatcaactcctttacatcttgaacaccaaatgtattatttttgctgaaaggtacagctttcagaagataatggttaccgggagaagcatgcaaatcttctgccaaaatgaaaccattttttctgatggtgctcatgttcatagaaacaattacttcttcctctggtgatagatcaagtctcagtggctcgagaagaggctgtacgtttaaaattgtagactgcgaaaggcactcaaagttgtacttctcatcagcagcatgctgatctacaataaacagatcctggccaagctttccaatgataaaaccaagattaaattgtccaacaacctccatttctcgaaaatcatgtttactgaaaagcctgtccaactcattggtggctgcagctaatgagtttgattttgcctcgtcagctaagggtacagtgatgtccagtgttgcagctttatagcaccttgttgttttctcgagacaatatgatttatttatatgagatatcataaaacaattctttcttcttctcctaagctcggcaaccgtaaattgaataatgggatattgtacagatgcataacatactgcagcaccatcaccataatcctgagcatcaggcaaaggactatcagccaatgcattctgatgtcgtgattctgaatatttgttgggagcaccagaagctgaatggcatcgaccacactgttgatccatatcagattctgtagtgtcaacatcacatggacctgttacccctgccccaatggtcacaatattaggttgtttagaatgctgtggtgaaacatctgtcctcacagatccaaaatattgtgaggagtgctgttttaaagagtttgtttccagaggtaaattgaactcaggtgctgaatttgcttctaaacttgttcctctcgcttgttctgaatttgtccttcttctcaacacaggggtttcagaaataagagtgcaattgtcatcatgcttctccttatttggtgatggaaaattgacttctaaacttgtcctcttgtatagttctgagcatgtcccacttctcagcactggagactcagaaataatgcaatcatcctcatggttctgcttgtttggtgtaacaaagtttgcttctaaacttgatctcctcatatgttcagagcatgtctctcttctcagcactgcagcttcagaaataagagtgcaatcatcttcgtgtttccgcttgtttagtgatacaaagttcaggagagaagactgaacagtacttgaatgagttggctttgcagcaagcccagttctaaaacaatttctacccaataccaaacttcttccttctttaggcgatctttttggctggtcatatgcgaaggatggaagccaagcagatctatcagcctgagtggttgtgcctcctgacaaggggctcgcatctctagccactgaaggcaatttctggttctctggagaaacctgatcctcattgtctgtttcttcattgtcatcattgttgtagtaagatggaacattcaccattacgattgcatttgtgtcttcattatgcctatcagtaacagcatccccttccttttcaggatctttgatgtgattgactgagaaactgcattgttgaggggagtacagattttcaacagtttcccgcaaagattgcagaatcatgctttcagatgagaagaaaacttttctcttatcaggtgcaatattcacatcataggatgtagttggaatatgaaaatctagaattaccacaggatattgtttggcatttgagcttttgtatagctcgttgacaagttttgtgacctttggcatatcaataggtctgccattcacatagaaaaattgtctatctcctgaactgcgaccagtaccaggtccaggttttgaaagaaagccctctatctggcagccatccgaggtggtaacactgaagggctcaagacatttaaaagtgtttggaccaaatacagtaatgatagtgtctttcatcgaactgcttccttgagttctaagcacaaccattttagaattttttccaacagtattagtgcagagtaatctgacccctttggcaatcaacgcataagcgttcagcagcgagatcactttcccgtattccttccgaatgttcctgctaaattccttgctccggaccggcaaggtggagaacaacttttctactgtcaccgtggttccaacctgtcgtgcggtcttcctttcactaaccaccacgccagagtgctcaaactccaaatgcgtcccaactagctcatccttgctcctcgtctcaaccgtcagtttcccaagcgcgcagagcgagctcagagcttcgccccggaacccgaaggtaaccagggatccaaggtcagagaaatctgatatcttggacgtgtggtgcttaagagcaagagcccggaagttggagggagatatgccgcatccgttgtcggcgaccttgaaccactcctcgccgtaggccttgaggctgacctcgacggaggtagcgccagcgtcgaggctgttctcgacgagctccttgacggcggaggaaaggtcgaagatgacctggccagagcagatgcggtgcactaccgccttactaattggcttgatcgccggcgaggattcgccgcgcccccctcctcctcccgccattccgcgcccccctcctcctcccgccattccgcgcctaaaccctacgcctcccgcctccggtggagactggagaagaaccgttttcggcgtcga

SEQ ID NO: 177997 - DNA, 371 bp, Zea mays
  Clone ID: MRT4577_93920C.1
cgacgtggtcaaaatatcgaccaccgaggcaggcgtcgacaaggggaataatggcggtgacgaacctgacggtacaccatacatggcggcgatcgaggagaacgacgacgaggctgcgtcgtcgaccgaggacgtcggcgacgccgtcgaggaggaggacaagaaggaggtagacgacggcagcgtcacgttcccggtctccatggtggcagaggaggacggcagcgtcaccttcaaggtacgagtcaatgacgccgaggccaaggacgacgacgggagcgttaagttcgcgactgccgtcgccggcgccgcccccacgaccagcagcaacgtggttgccgtggtggccgaagaggatgggagcgtcacgt

SEQ ID NO: 177998 - DNA, 375 bp, Zea mays
  Clone ID: MRT4577_93921C.1
ttgttgccttaaaagagccttacctgtttctttacacctttccgaattacatactaagcccattttctctcgaagcaagaaaaatgttcatctagagtttcatggttgcgagtcctaactcgaactacacagaaactgagattcacatcgatcacaactataaatccactgaactattacacgagatacataatggcacttatcagtgagttgacaatcccaacactgtcaaatatgaatataataccaacacccatgtacctaaactatgattaatacttatggcgtggcgtggaaacaatgtctcaaccctcaccgttgatgttattgctaaccgagacgatatttcatgggcatcaaatgtcaagattcaac

SEQ ID NO: 177999 - DNA, 175 bp, Zea mays
  Clone ID: MRT4577_93922C.1
cacggtgatagaggatctactgtgccgtctttccgagaagacggagcacaaggtctcagtgggctacttgtacaagcccttcatcttctccttggctcgtctggaccttgccaacaactggcctggtctgcggctgctctacggtcgcaacgagccgctggcagagttggttaac

SEQ ID NO: 178000 - DNA, 517 bp, Zea mays
  Clone ID: MRT4577_93923C.1
acaagctttctttttcttttttttttttttttttaaaaacaccattttttatttgtgggaacccacacacataacacaaaattcttttttatagctctgactcttataagaaatctaaaaggggacacccactattggggggtgggggtaaaacactgcggggtttgaaaaaacaaggtgtttaaagggccacaattgtcgcacagtaaaagagggcccccgctataggcacagtgctctgataaaacggacacaactgggtgtgtcaaaaaaacgcaacgggtctcaccccctctatctggataaaggggaagaggtggctctggtgaaaaaaaacaagagagtacaatgctcacagttgggtaaataaaaaaaacttctgggggtacgcaacatatatctgggaaaaggggacgtggtggttgcgcaaaaaaaaaacaaagctcaacgcatctaggtgtgtaaataaaaaaaacagatggctctaagagtacgcaacaaggttttctcacacaag

SEQ ID NO: 178001 - DNA, 1860 bp, Zea mays
  Clone ID: MRT4577_93924C.1
cattgggtacctcgaggccggccgggtgattgcacaagtacaccttggctacgacccttggccgccgcctcagcctcaacctcaactcatctcgccggtggtcgatctcctccatctgctcgccgcggcgcaacccggagaggagaccgcgctcggtcgagcaccacctggggctagcgtcctcgcgacgagctccggcgcggcgtccgccctctgcagccccggtgtccccgcgaccggctccggcgcgaccggcacacagctccacaggccaacgggacctgattcatggcgaagcaggcgtacgccacgagcagtctcgtggtcgggtacgcgctgtgctccagcttgctggctatcatcaacaagtatgccatcaccaagttcagctaccccggactgctgaccgccctgcagtacctgacctcggtggttggagtgtgggtgctcgggaagctcggcttcctctgccacgacgccttcaacctccagaccgccaagaagtttgcgccggccgcggttgtcttctaccttgccatcttcaccaacacccacctcctcaagcatgcaaacgtcgacactttcatcgtgttcagatccctgactcctctcctggtggctatcgccgacaccaccttccggaagcaaccgtgcccttccaagctcacgttcttgtccctcgtgatcattttgggaggcgcggtcggctatgtgatgacagactcggccttcaccctcactgcatactcgtgggcactcgcttacctggtcaccataactactgagatggtgtacatcaagcacatggtgaccaacttggggctcaacacctggggctttgtgctctacaacaatcttctctcgctgctaatggcaccggtgtttgggtttctgacaggggagcacttgtccgtcttcagagcttttgagtcaagggggcagagttggtttgagcttgatgcctttgtggcggttgcgttgtcctgcgtctttggtctgctcatcagcttctttggtttcgctgcaaggaaagcgatctctgccacagcgttcacagtgacaggtgtggtcaacaagttcctcacggttgcgataaatgtgatgatttgggacaagcatgcaagcatgtttggtttggtttgcttgctcttcactctcgctggtggagtgctctatcagcagtcagttacaacaaaaggcaatccttcagcagcagctaagcagggaagaggtggtgatgatgctgttgaggtggatgaggagagccagatgctggtttcatctccaaaggttgtctaaggtgcatgatcaccaaagatccagttctgttcgtttttctggacccatgttttgaagatttgtcagtcatgtaccgaaggaaatccaagaggctgcatttttgttctaggagaggctgcagtaactttacatgatacatgtttggtctataattatttttgttaccgtgccttgtttactggtaagctccaaaccccatgcgatgtttaattacttagaacgacaaaccaatgcggtgaccatcttatatggttattggcacctatctggacattgtatacctgatgaggtgactatcagattacatacaccctttctgacattactaaggcccatgttcgtttggtacggattgatgggctggaatcattcctagccgaattgcttctttaatttatataatttttgatcagctggaatgatttcgggtgcaatcccgcacaaacaaacaaggcctaaatgttttagcagtgcattagcttcatggttttggtatgatcagattttcagtggcccatttgctatcagcggagatcaaataaactacgctttgtttgcggt

SEQ ID NO: 178002 - DNA, 418 bp, Zea mays
  unsure (1)..(418): unsure at all n locations
  Clone ID: MRT4577_93925C.1
ggagcgcacacacactctaccagnancgcccccaaaggcagccgncggcaccnccgccccaagaagcagagccgggcgaaaaccccggcgggcaagacnagcacccncgagggggagncgccggacaccagggacaacgcnaaggccaagacccaggacaaggagggcacccccccagaccagcagcggcgcagcggggccggcaaacagcncgaggacgggcgcacgcnngcngacnacaacanccagaaggagagcaccccccaccgngcgcgccgncgcaggggacgcangcagagcggggcgaaaacccggaccggcaagaccaggagcccgcgaggcggcgcccgcggacaccacggacaccggnaaggccacgagccaggaccaggagggnagcccgccagaccagcagcgg

SEQ ID NO: 178003 - DNA, 262 bp, Zea mays
  Clone ID: MRT4577_93926C.1
tcgcgatctataactaggttctagatcgcgagcgggggggggggaggattcaggcttacaatacgcatacattcaacgttatagctcttaaatagcatcaccaatattatgttgattggccgtcaaataacaaaaaaaaatttttttaattttagtatatgcagtaaataataataaataatgactttgattatctgatatgattacatacatattaaaatattggaatatattctatattatttaaaatctgtgataagta

SEQ ID NO: 178004 - DNA, 335 bp, Zea mays
  Clone ID: MRT4577_93927C.1
cccttatattttttatgttatttacggccaaaactaaaaaacgggccgtggtaaaagtttcatgcttggaagacaatggctttataaaacaagtgtttttcctacgggtttcccgaattttccaccaatcattttttaaagggtttttgcacaaccccttacagtgccctaagacctatatgcggaccttggttgaggaagggaacgaaaccctgacccatgatagcttggggcacagtttaaattccaacggcctttttaggctgggggcccgaaaatgcttattaagcccaatgcccagcttacggacccatcccgcggacataaaacctctt

SEQ ID NO: 178005 - DNA, 384 bp, Zea mays
  Clone ID: MRT4577_93928C.1
ccttgtcgtgtggcgccatctcgagttcgtcgtgagaaacaccagcaacccccacgccgtcgtaactactcctcgcaccacctctatccaccgtgggtggggaaaaggtcaagtacctccgccttgttgcactgatcatgtccgtgagagctgggtggtgaattggggcgagcctggccggaatcaccatcggagtcaagcgccgctgggagtccttcgtggccgacgacctccaccgcttgagtaccggagaagaacaggtggtccaggaggagccctacaacgaggaatacgagctcatctaggtggcgtctcccagtcagctttatgacgccaagaattaatgtttagatcgctttattattctcatttatttttgtaaga

SEQ ID NO: 178006 - DNA, 292 bp, Zea mays
  Clone ID: MRT4577_93929C.1
tgatgatcaagactaccttgaatcctactgattatgatagtgaactgggtagtattcctgctgtacaacgaggtatattggaaatcattcctatgctacgcccaacagttgtattgtctcccatgtggacacatctgcttcttgagctgctatgctatcttaatgggcacgaaggccccctccagaaaaataatgaacaaacgcccgatcataattctcaagcactggtagacggtgcaaagcatgctcttgttgaaagaagcaatctcaatggcgggggtacaaaactgga

SEQ ID NO: 178007 - DNA, 407 bp, Zea mays
  Clone ID: MRT4577_9392C.1
cggggtcctatataaaattccctaaaaattcccctttaagaggaaaatgcggggccccaaaaaaaaagccacctctccaaagccaaaaaggaggttgggccataaggaaccaggccggccaaatcaagaaaaagggcccacccaaccccggaaaggggggccgcccaccgaaaaaaaaaaaagccccccaaaaaaaaaaaaaccccgccagaccccattaaaggcccaaaaaaagaaaaaaaagggcgggggcggcccatttgggaaaaaccacataagggaaaggggaggccctccgccaaaccggaaaactggaaaaaaaaaaaaagaaatgccccggtctcctgaaggaagggaaaacaaacaatttggaaaagcccggaataagaaaggcccgacacccaaaa

SEQ ID NO: 178008 - DNA, 295 bp, Zea mays
  unsure (1)..(295): unsure at all n locations
  Clone ID: MRT4577_93930C.1
gcgagtgtttacatcttaaaacaaactactgccgttttgtntccctnctgatttattgtgagtttaggtggacgcacgggttcttcctggcctattcaatcgccacagcagcatgggaacgcacctcccacggggaagcacgtcctcctccactaccatatgaggccagtgggtgcgaatggggggggggggggtggtgctcgcgttgcccaccccgatggtgagagaaggcgcccgccattctctgcgcgtagaaaccgatgtcctcctcgcccattacctggggaccccccct

SEQ ID NO: 178009 - DNA, 1589 bp, Zea mays
  Clone ID: MRT4577_93931C.1
ccattgggctgaaccaggaagaagggaacaagcacttgctgcagtccagctcagtacagtccagtgcgcctgctacaaatcaaagctcctgcactgcagcaccatgctctgatccccatttagagctgatcgtcgcgtcgagcacccggcggcgtctgttcgtccacagctagccaatctctctctccgggggacgagacgatggacatcatcaacggggccgtgctccctcgctgccacgccgcccccgtcacgggcgccgcggcggcctccgtcgccgacgcgagagtgagcggacacctccagcttctccggcgcgtgcgctgcagaggaagcggaagcgccagtgccgggctgctgcatgcgacgacgccccgagccggcgtggcagcgcgcaggttcttctccccaccgctggggaacgggaacgggaatgggaggaccatcggctggcggccggctcgctgcacccacggcggctcctcctccgacggcgacggcgccgccgccgcggacttcgacgcccgtgaggaggagttcgttgactccagcgtcatggaggccgttgagctcaggagcgtgtcagacggcggtttcgtcatcaagatgcgcgacggcaggaacctgagatgcgtccagaacaacccccgggtgctgaggctccgggactccgcgccgcaccacgcgatcgtgctcaagatggaagacggcagcgaccttctgctccccatcatcgtcatggagacgccaagcatcatgcttctggctgcgcttcggaacatccgaattccaaggccaaccatctacaatgtggtgctggagatgactacaaggatgggatatgaggtgcgtttggtgcggatcacagaaatggtccatgacgcatactattctcgactatatctcgcaaaggttgggaatgaccaagacactatcagtttcgacctcaagccatcggatgctatcaacattgctttccgctgcaaggtccctatacaagtgaacaggcgtatcgcgtataacaacggattgaaagtcctacagccaaaggcggccgggagttatttaggctccgacgacattcaaatcacaaggcttgacaggcctgacgaccagcattgcagcgaggcccaagagttcgatctggtccggaacatgctcattgctgccgtagaagaacgctacaaggatgctgctcaatacagagaccaactttccatgttgcggtcaaagaaaaagaacgcgatatagccagatgggtgcaaagcttcaacttgttagagcttgatgggggtgtacagaggaggccttttttgctgaagcacgtgaagcttcggcaaacatctaaggaacaccatgtaaatacgtacgtattacagaatttatgtatagacacacacatacacggagagcctaattctggattctttagctcatagttgcactgttgcagtgattgtactctaaaatgcaaatgactgttgtgtacgccatgtgcagctccaaccaagttgcatcaccgctgtttgtcttcaaatcggcaatcggttttgaagaaaaatagcatcgctgtgcgcgtttattggtcc

SEQ ID NO: 178010 - DNA, 406 bp, Zea mays
  Clone ID: MRT4577_93932C.1
ggcttcaagacgcacggcgtgaacgacatcaccgtggtgggcggctatcgcgccgacgcgatcgacacgtcgggcatcaagctcgtggtcaacgaacgccatgcgcagacgggcgaactcgcgtcgctcgcctgtgcggccgaacgcctgaccggcgacaccgtgatttcgtacggtgacctgctgttccgcagctacatcgtgcgcgacctcgcggagagcgaggccgagttcagcgtggtggtcgattcgtcgctcaccgaaaccaaccagagcgtgcgcgatttcgcactgtgctcggcggcggacgatcgcggcctgttcggccagaagacctacctgcaacgcgtgtcgagcgacgtcgccgccggcacgccgcacggccgctggatcggcctgctgaacg

SEQ ID NO: 178011 - DNA, 826 bp, Zea mays
  Clone ID: MRT4577_93933C.1
ccggccgggaagacagtcgagtgcgcctgctacaaataaagctcctgcatctgcaccaccatgctctgatccgtccatttagagctgatcgtcgcgtcgaggtactcactcatgcacccagccactacgtactatttgctcatcaagctaccaaggatttcttggttacgctagctcgccggtttcttggttgttactagcacccggcggcgtctgttcgtccacagctagccaatctctctctccgggggacgagacgatggacatcatcaacggggccgtgctccctcgctgccacgccgcccccgtcacgggcgccgcggcggcctccgtcgccgacgcgagagtgagcggacacctccagcttctccggcgcgtgcgctgcagaggaagcggaagcgccagtgccgggctgctgcatgcgacgacgccccgagccggcgtggcagcgcgcaggttcttctccccaccgctggggaacgggaacgggaatgggaggaccatcggctggcggccggctcgctgcacccacggcggctcctcctccgacggcgacggcgccgccgccgcggacttcgacgcccgtgaggaggagttcgttgactccagcgtcatggaggccgttgagctcaggagcgtgtcagacggcggtttcgtcatcaagatgcgcgacggcaggaacctgagatgcgtccagaacaacccccgggtgctgaggctccgggactccgcgccgcaccacgcgatcgtgctcaagatggaagacggcagcgaccttctgctccccatcatcggcatggagacgccaagcatcatgcttctggct

SEQ ID NO: 178012 - DNA, 601 bp, Zea mays
  unsure (1)..(601): unsure at all n locations
  Clone ID: MRT4577_93934C.1
gcgttcggnacantaaaggactanattaggggggagggggggtacggggacgtcattcgtccagggaagcaatgccgctgcagaatagtagccgaggtgctcgggcaggtgaagccaacgaatcacatggctgcatgtgagttaccagacaaaggtgcctcttaaaaagtataattcaagggggttgctggggactctcacctgtcagaacacaaccttttgtagcgcagttgattccattcaacaggggaacttgagttcttctcacaaggcataatattaggaactcgccgacatcattcagagataacaaatcttcccctgtcccggtgtcgaacataggagttgcactgaaatttaaagaaaacaaagaattttatttggggaaggttgagtggaaaaatacttgcattttagattcattctatctgtattttccctggcaatgagtccacttgttcttgcacaaaacctataaccactgagtgaaatgaagattattagtgaactaaattcctaataaagcaatccttggtactagaatcaccttgagtcaaactattttaaaactattttaagtatgaccgcttatatataaaac

SEQ ID NO: 178013 - DNA, 249 bp, Zea mays
  unsure (1)..(249): unsure at all n locations
  Clone ID: MRT4577_93935C.1
aanaactccccgtctctnactccctactgganctcctcccacgacgtcggataccganacctcggcggcgtcggcgcnacgcgagcnaaaaccctagtgcgagcaagcgagaggnagagacctcagtgcctcgagnaacgcgcgcccggcccgacggcatggagagcctcatcctcgcntcctcctgctccgcgtcccnacggntccngttactctcctcnggngcnctgttncngggggtgcnntttt

SEQ ID NO: 178014 - DNA, 830 bp, Zea mays
  Clone ID: MRT4577_93936C.1
cccacgcgtccggtcggcgcctacggtctcgccggctccagggccagggcgtgcggctgagaaggcagggctcgccggcttcggacgacgtgtgtgtgcggcagcaggccggccggcagagctcggattcccggccggtgctgcagcagtgcatgtgcctcctgatccaccgcgcctaacgccgagcaagatgagatcagttcttttcttcgtgtgcatttgcttcctgttcgtgtcgacggcgagggcggaaggcccctaccagttcttcgattgggagatcacgtacggcagtatcagccctattggatctctacaacagggaatcctcatcaacgggcagttccccgggccgaagatcgagtgccaaacaaacgagaacctgatcattaacgtccgcaacaagttgcctgatccgttcttgctctcatggaacggtctgcagcaacgcaagaattcatggcaggacggcgtttctggcaccaactgcccgatcccgccgggccacaacttcacgtaccacatgcaggccaaggaccagatcggtagcttcttctacttcccgtcgttggccctccacaaggccgccggtggctacggcgctatccgcatcgacagccgaccgatggtccccgtcccgtttccgccgccggccggcgagtacgcggtgctcatcggtgactggtacaccaccaatcacaagtctctgcaacgtatgctggacagcggaaaggaatcgcctcgccctgatggcgtcttgatcaacggcaagggtggtgcggacgttgtagatttcgccgtcgagcaaggaaagacgtacaggctgcgca

SEQ ID NO: 178015 - DNA, 377 bp, Zea mays
  Clone ID: MRT4577_93937C.1
cttttccgtacccaacttacgtcttagagttagaggtcatcggcggcggagatgcagccggtcgcggtggcgttgtaccgtggcgcgcgcggagatgaaggagaaggtggaggcgtcggtggtggacctggaggtcgacaccggggagacgctgtacccggggatctcgcgcggggagagcgccctacgatggggcttcgtccgtatggtctacggcattctcgctgcgcagctgctactcaccaccgtcgtctacggcctcactcgtctccagctcaccctcaacgtcactctcttcgactcctcgggcctttcgctcgagctcgacgtgctgcccttcatcctgatgattccattgtattattatcagctcaagc

SEQ ID NO: 178016 - DNA, 488 bp, Zea mays
  unsure (1)..(488): unsure at all n locations
  Clone ID: MRT4577_93938C.1
ggccgggccgtttccttcatctgacagcagccgcancgaattacacagactgccccacgtccctgccccctccctctctatgcctctactaatccttttccgcccccgtccagacaacatgccgccttcttaggcgcctcgaaggaggggatctcggtcacccaaaattacctgccgccgatcgcgatcacacatcctggtcgagcgctctactcccatcccgcccgtctacagaggctctaacctggcgacgcaggacgccactgcaacaagtgatactccgtgacaacactaggtgtaatttaatgaagatatggggaataaaactcgccgggtaccattttctttcatggcgaactagagagacaatcgcccacccaaatgtcatcaattcaattgtattacacaattccaacaacctctgatgagtcacctaccagaaacgataaatagagattgcgcattgatcgacgacattcactacctat

SEQ ID NO: 178017 - DNA, 132 bp, Zea mays
  Clone ID: MRT4577_93939C.1
ccaggagcgagcagccaaggaaacgagtcaagcaatggagaaggccgacgacaggcagtggttcctgttgcggcacctcaaccccgccgtggctgtgagccccgtcccgccctacatctccgtaagcgcgtg

SEQ ID NO: 178018 - DNA, 1167 bp, Zea mays
  Clone ID: MRT4577_9393C.1
ctgcatggttagggataacctagaagatatttgctagagtttcattagttgtttatggctgtattattagttgtattgaccttaatgcatgccttttggtttgttggcatttttagttcaaatctcaagtgccacactattatttggaacttgcagaagttattccctttgtatatacatatatgcatctacaggttttacatcatttcaaatttataaacgattttattttcataccattttcaactatgaacatgtatgcaatatctgtttgatgtttggaaggacatggaagaactaaagaaagaagttagggaagctcggaggatcaaaatgttgcatcagccaagcaaggcaatggatctggaaaatgaaatacgaattttacgtaacacatttgctgagaagtctaaggattgtgttagtcttttgaaagagtgggaaacgcataaaaggttaaaagaaaatggtaccatcccttcattcgatctggaggggctccaatgcttaggatcaatgctacgtatagttggtctgagtggtactcacatggatctgtcaaatatttcaatccagtggttccgtatacatccaaaagaaagcaacaaagagattatttcaggtgccacaagaccagtatatgctctagagccacatgacgtaggacgctatttgcaagctgaaatcgacgttggcggcgaaatcgcagtagcaaagactgctgggccagtagaccctggtttgtttgactggacacgttcggtgagcgttattcacatgtgctgcgtattgcatgactgacgtgtgtttcattattgttagcagatgctggattggttgattatgtggagacactcgtaaggaaacctgaaactgaattcaatgtatgattccggcatcctccgccgctctatggcattcttttctacaaatatgccatgttggtattgcagccttttcaagtatttattcctagttagtagtctgaatcggcacggccagtatattagctgctggtctcttaatttgaacagtattgctggtaacgtagccataaaccaattcaaggcaccgccattagaaccttgaggccttgctcggttgcgtctggatagaaggggaacctataacctgtgtacgtgtgccaaacctgcgcgcgtgacctta

SEQ ID NO: 178019 - DNA, 957 bp, Zea mays
  Clone ID: MRT4577_93940C.1
cattgggtacctcgaggccggccgggagaacgcgtcaccgaagcaaatctagaagcaaggaacaaggacgcggcgaggtccacctccagctctacctgcccggctggcggctgcccccgtcttcgtcttccttaatctcaaattcccaatcctcctccgacgccttgtttctggatcatccagcggggggacgccggtgtattgctcggtcctcctccctggttgcccgaggcagccgtgacggaggcggaggtagcgggggggaccatgtacagatcggcgggggtcgcgatggcgtggaacgtgttccggttctgcacggctctccgtgggctgggttccatcatgatcctactcgtcctcgccatcgtcggcgttacctactacgctgtcgtcctctgcaactacggccccgccctcctcaccggcggcggcaccactctcgccgcgctcgctgtcctgctcctcttccactttctgcttgctatgcttttatggagttatttttctgtggtgctcactgaccctggttctgttccaccaaattggaatcttgattttgatgcggagaggggagaaactgctcctctcactagctcagagttcagtagccagatgaattcacagcaatctgtggctcttggcaatacggcaaatccaagggctaggtactgtaggaaatgcaaccagttgaagccacctcggtgccaccattgctctgtttgtggaagatgtgttcttaagatggatcatcattgtgtgtgggtggttaattgtgttggggcactgaactacaaatactttcttctgttcctgttttacaccttcctcgagacaactcttgtcacactctctttattgcctcacttcatagccttcttcagtgatatcgagatcccaggaagtcctgcagcacttgcaaccacatttctcacctttgtgttgaatctggccttt

SEQ ID NO: 178020 - DNA, 846 bp, Zea mays
  Clone ID: MRT4577_93941C.1
cattgggaccctcgaggccggccgggtcacatctcctatctgcacctcaatcctgatcaggagacaaagaacccatatgctacctgtgctactgctgccgccacaaggacaaacacaaacacctcttactggtaaccagcataatcatgaccatgcatcctccaaacctaaaaagcaaatgcacatgggcgcaaacgtcatactgaggtgtacgcaacagcacttctatctctcataacgaagcatatgatgatgcgattgttgacaatcttagacacccgagctttagacaaccaactccctcttgagtcccttacccccataacctccgtccaaaagcggggccgcacatgcaaggctctcgctgctaatacaatccaactctatatcgtcgacatatgtgacatgaaattcctcgcataaaccgtcgagtctaataatgctgatgccgctgtccactttgtgaagcagataaccccgaacactactctatgatggatcgttcgcgagcagtactacacacagcataacaatgtcgttgacgacacttaatgtcccgtttgccataaaggaatacactgaatagtgccatcttgctaagctagggactatgcggtgagtatgtaacaccaaacattgatatcgcatgaggggactatcactattactcgcaatgcaacaacagacaccttgacttatcctagaacaaggcagctctgtctatcatctgagcaaagtgcatgattccacaacatatcagttacatgcagagcctgtggaataagggacactgatcttaaccaaggtgtgaactatggtgtcagaacaggatgaactgcaatgcac

SEQ ID NO: 178021 - DNA, 2237 bp, Zea mays
  Clone ID: MRT4577_93942C.1
cattgggaccctcgaggccggccggggaacgcgtcaccgaagcaaatctagaagcaaggaacaaggacgcggcgaggtccacctccagctctacctgcccggctggcggctgcccccgtcttcgtcttccttaatctcaaattcccaatcctcctccgacgccttgtttctggatcatccagcggggggacgccggtgtattgctcggtcctcctccctggttgcccgaggcagccgtgacggaggcggaggtagcgggggggaccatgtacagatcggcgggggtcgcgatggcgtggaacgtgttccggttctgcacggctctccgtgggctgggttccatcatgatcctactcgtcctcgccatcgtcggcgttacctactacgctgtcgtcctctgcaactacggccccgccctcctcaccggcggcggcaccactctcgccgcgctcgctgtcctgctcctcttccactttctggtgcgtagcctcacgtagctagggagtggggtggggagattcggatgggtcgtccttccggagaaatatctgctcttttggtggtgaagatgctaacatcagcgggatcgggtatcattgggtgccgatcttagttcttgggagcaattttgttatatcgtatggattttgaacatcactggatgcgactgtcttgattcggctacaattattgttttactaatatttttttctgacaacatggtaggtttgtttaatagaggatacgtcaaatgttaaaatggagccaactatgctgaaagaagtttaataagaaaaataaactttcctagatgatctaatccaatacatttgagcgctactgattatagaaccataaggttggctgaacttctggtgctttgcctaccaacatagttaactgtaaacactagtaaaattatgttacaccgttctctctcagttttgtttagtgtgctaataggataatttactctctgttttgcagcttgctatgcttttatggagttatttttctgtggtgctcactgaccctggttctgttccaccaaattggaatcttgattttgatgcggagaggggagaaactgctcctctcactagctcagagttcagtagccagatgaattcacagcaatctgtggctcttggcaatacggcaaatccaagggctaggtactgtaggaaatgcaaccagttgaagccacctcggtgccaccattgctctgtttgtggaagatgtgttcttaagatggatcatcattgtgtgtgggtggttaattgtgttggggcactgaactacaaatactttcttctgttcctgttttacaccttcctcgagacaactcttgtcacactctctttattgcctcacttcatagccttcttcagtgatatcgagatcccaggaagtcctgcagcacttgcaaccacatttctcacctttgtgttgaatctggccttttccttgagcgtttttggttttatgattatgcatatttcacttgtttcggctaatacgacgacaattgaggcatatgagaagaagacaactccacattggatatatgatcttggccggaagaggaattttgctcaggtttttggaaatgacagaaaatattggttcatccctgcatattcagaagaggatctgagaagaattccagctctacagggtcttgattatcctgtcagtgagaccagattttgatggccaggaattgtaatggggcaattctaacagtgtcctcgtcagatacctcagtgttggacatctactcatacaactgtcagcattgctgattgccctatgcaaggcatctagtgaaatgtgcacaagatgattgtagtaatagtaaccatgagttattcatctgttgcacttcatgtatgtgacgaaggggaagtcctcctacctttgccagaggaagtttgttgtgatgtaaattagttttagcgcctggttagatggaccaaatcttggcgatgcgccaggattttggacttaattctttatccatccacgtgaattgggcaggatttcatccatgcaaactgggcattagtgtggtttgaaacagtcttgtacttcagtttagttatatcatgccatgcaatacatttaccatttgagatatttaaaaaaaaaataaacagccaaaaaaaaagcggcccaatagtaaatggataagcgctgcgtaattaaaaaagaaaaaaaaaaaaaaaaaagcggcc

SEQ ID NO: 178022 - DNA, 2056 bp, Zea mays
  Clone ID: MRT4577_93943C.1
ctcgaggccggccgggaggcgcgaagcaaagaacaagcggcgaggtgcaccgtgcacctccagctctgacctgctcggtcgcccgtgtcttcgtcttccttaatctcgaattccgaatcctcctccaacacctcgttttcctggattatccagcgagggacgccggtttgttgctcgtcctcctccctggttgcccgaggcggcggtggcggggcgaccatgtacagatcggcgggggtcgcgatggcgtggaacgtgttccggttctgcacggctctgcgtgggctaggttccatcatgatcctgctcgtcctcgcgatcgtcggcgtcacctactacgctgtcgtcctctgcaactacggccccgccctgttcaccggcggcggcaccactctcgccgcgctcgccgtcctgctctccttccacttcctgcttgctatgcttttatggagttatttttctgtcgtgttcacggaccctggttctgttccaccaaattggaatcttgattttgatgtggagatgggagaaactgctcctcttgctagctcagagctctgtagccagatgaactcacagcaatctgtggctcttggcaatatgacaaatccaagggttaggtactgtaggaagtgcaaccagttgaagccacctcggtgccaccattgctctgtttgtggaagatgtgttcttaagatggatcatcattgtgtgtgggttgttaattgtgttggggcgctgaactacaaatactttcttctcttcctgttttacaccttcctcgagacaactcttgtcactctctctctattgcctcacttcattgccttcttcagtgatgccgagatcccaggaagtcctgcagcacttgcaaccacatttctcacctttgtgttgaatctggccttttctttgagcgttcttggttttatgattatgcatatttcacttgtttctgctaatacaacaacaattgaggcatatgagaagaagacaactccacattggatatatgatcttggccggaagaggaattttgctcaggtttttggaaatgacagaaaatattggttcatccctgcatactcagaagaggatttgagaagaactccagctctacagggtctggattatcctgtgagaccagattttgatggtcaggaactgtaacacagcaatttttgccagtgtcctcgtcagatacctcagtgttggacatctactgatacaactgacagcattgctgattgcgctatgcaaggcatcaaatgaaatgttcacaagattttagtaaccatgagtaattcatctgttgcacgtcatgtatgtgacgaagtgaaatttctcctagctgggccagaggaagtttgttgggatgtaaattagttttatcgacaacgtggattggtttcattccatccaaactggtagtgtgcttcaaatagtgctgtactttagtttagttattattatgtgatataaatatcatttctgataattgtgcctctgttatacactatcaatagtaaatggataagcgctgtgtaattctttcgaaattgtacaatgtgttctttccattgccctataaaagtattgaagtactagtttgcaatgaaaaaaaaaaaaaaaaaaagcggccaaaaaaaaaaaaaaaaaaaaaaaaaaaaaactcgagaggatggggagccggtaccctgacgagcacagaaaaggtctcatagctgcgctgggttgcggatcagtcgcaggtttgctaggtgagggggggggataccctctagtttttgttcggccacgaatgcagggtcaagccctttcgtcgccagccttgcgggttggggaacatttgaaagcctggttatgatagtgaaacagcaagggtggcgacatcttttctcaggattatctctcacctattgctaggtggtgccatcagtgggcttcggctttactgcttacgactcgatgaaggtctgcgtcatagttcctgtcgttggggggaactgctgctgctggcttcgcaggggagcgaggccactacagatcctatccc

SEQ ID NO: 178023 - DNA, 753 bp, Zea mays
  Clone ID: MRT4577_93944C.1
gcgaggagggcaggaagaccgaagaccgagccgtgcgggggctcgggacgggaacgggacaggaccccaaaatctcagatccttcctgcccgcccgcccgtgcccgtcgacgcgtcgttcttgccggccgcgccccacctccgccctctcctcctccagggggatcggatacgccacaggctgcgcgatggtgctgtgggtcttcggctacggctccctcatctggaaccccggcttcgacttcgacgacaaaatcctcggcttcatcaagggctacaagcgcacctttaatctcgcttgcattgaccacagaggcacaccggagcatccggcgaggacctgcacgcttgaaaccgacgacgaggccatatgctggggaattgcatattgtgtcaagggtggtccagaaaaagagctaaaagcaatacagtacttggagagaagagagtgtgagtacgaccagaaaatatccattgatttctacaaggaaggagatcccttgaaaccagctgtgacgggcgtcttagtgttcgtttccactccagatccaattggcaacaagtactatcttggccctgctcctctgcaggatatggcaaggccacgaagatgattcgatcatagagcttgcaaacgaggtgaggaaggtgctcaacagaacaaaggagaccaagatcactgttgtcgtgaggctgtatcgtctggagtaaaaaaaaaaagctaaaagccggcactaataatgatattaacttg

SEQ ID NO: 178024 - DNA, 381 bp, Zea mays
  Clone ID: MRT4577_93945C.1
cccacgcgtacgaccagccttcgcccaagcgttcgggctttccttcgggaaaggaaccaaaccagccggggcaaccgtgccgtcttcggttcttccatccgtcctaaccccggaaagtattcgaccacggaagcagcataacctccgtacatcccatccccggtcgcctgtactgtactcgtcccgctctagacgatcgatggccgccacggcagcggaagagatggaaaggattgtggaggcggaatgggatgagggtaagcaacggatgaggcataagcagcggcgccgaccgcttgcgctgccggcacggcctgtttcactcatgctcaatggggatggaagctgccggtatcgacgagagcagctacaactgcatga

SEQ ID NO: 178025 - DNA, 650 bp, Zea mays
  Clone ID: MRT4577_93946C.1
gcgcatcttgcaggctggcacgcaggcctagcttctctctgattccctgtagtgagctgtgctttgctttgcggccatggtttgcttgcgagctaatggattggccgtcaaggatgcctctcccttttcgctgttcgtggtcaccaactgccactgactgttggatcatccgtcagactgacgaaacgtgaaacgcattttgcaccgtcgcttggcttaacaaatcatcgtcaaagacactgaaatgactggtctaaatatacatggggattaatgctttaggggatgtttgtttggatcataatctactaaaattatataatcaaacttactttctccatcctgaattaaaattcgttttatcaaacttacttcctccatcccgaattaaaatttgtttgtcttttttaatgaattcataagataattaatgtatgtgttttgtatatgtgtatagattcatcatcatcaatttaaatatagatatataaaacaagtgttacaacgactactaaattaggacagatggagtatttttaaactaaatgttagtttaaattaagttagattatataatctatataaattataatctcaaacaaaccggaccttattgtgcatatttggttatagaaaataaagaaaaaaaa

SEQ ID NO: 178026 - DNA, 366 bp, Zea mays
  Clone ID: MRT4577_93947C.1
gatctggaagatttgtttaagctgtcgaatctcaagttcataatcagtagacgaccattattatgtttgaataatctgtacgcgggtacgcaaccaaactgtggtgcaaacgcgttcgactatactgtgcaaatgtctcccaaagaagatattgagttaagttcaatttgtacggatttaaaacaaagaaatccagcaattacaggtcgaactgcaaacagtttagatcaatatgatctagttagttgtgtaatcggactggacactactcaaaatacaaatccagttaattatcgcgttgcttgtacttttaacaatcaagcagattacatagaggatctggactgttcaaatcacttagaaaag

SEQ ID NO: 178027 - DNA, 584 bp, Zea mays
  Clone ID: MRT4577_93948C.1
ttatcattattagtgccggcttttagcattttttttaactccagaagatacagcctcacgacaactgttgaaaagggaaaatcagtacatgatggccacaaacatgcaagagctggaagtaaattccgagtagaggtccaacgtccaaggctctcgctatctcgagtccacaacggtgccttctggaagcgcggacaggtgcacaagaggggcatgtgatttcagggaagcattggcaccagtgatcttggtctcctttgttctgttgagcaccttcctcacctcgtttgcaagctctatgatcgaatcatcttcgtggctaatgctggctaatgccttctccattgagaacaggtaatcaatggatattttctggtcgtactcacactctcttctctccaagtactgtattgcttttagctctttttctggaccacccttgacacaatatgcaattccccagcatatggcctcgtcgtcggtttcaagcgtgcaggtcctcgccggatgctccggtgtgcctctgtggtcaatgcaagcgagattaaaggtgcgcttgtagcccttgatgaagccgaggattt

SEQ ID NO: 178028 - DNA, 1170 bp, Zea mays
  Clone ID: MRT4577_93949C.1
ccggccaaaaaaaaaaaaaaaaaaatcctttttttctctcatccgaattcccaggcaggcaggtcggcgaggagggcaggaagaccgaagaccgagccgtgcgggggctcgggacgggaacgggacaggaccccaaaatctcagatccttcctgcccgcccgcccgtgcccgtcgacgcgtcgttcttgccggccgcgccccacctccgccctctcctcctccagggggatcggatacgccacaggctgcgcgatggtgctgtgggtcttcggctacggctccctcatctggaaccccggcttcgacttcgacgacaaaatcctcggcttcatcaagggctacaagcgcacctttaatctcgcttgcattgaccacagaggcacaccggagcatccggcgaggacctgcacgcttgaaaccgacgacgaggccatatgctggggaattgcatattgtgtcaagggtggtccagaaaaagagctaaaagcaatacagtacttggagagaagagagtgtgagtacgaccagaaaatatccattgatttctacaaggaaggagatcccttgaaaccagctgtgacgggcgtcttagtgttcgtttccactccagatccaattggcaacaagtactatcttggccctgctcctctgcaggatatggcaaggccacgaagatgattcgatcatagagcttgcaaacgaggtgaggaaggtgctcaacagaacaaaggagaccaagatcactggtgccaatgcttccatgaaatcacatgcccctcttgtgcacctgtccgcgcttccagaaggcaccgttgtggactcgagatagctcgccttggacgttggacctctactcggaatctacttccagctcttgcatgtttgtggccatcatgtactgattttcccttttcaacagttgtcgtgaggctgtatcttctggagttaaaaaaaatgctaaaagccggcactaataatgatattaacttgaaaaaaaaaaaaaaaaaaaaaaaaaaaaaaaaaaaaaaaaaaaaaaaaaaaaaaaaaaaaaaaaaaaaaaaaaaaaaaaaaaaaaaaaaaaaaaaaaaaaaggggggggccgtttttaaagaaccaaatttaactacccggggccttgcaaaggtaaaacttttttttttggggccccc

SEQ ID NO: 178029 - DNA, 365 bp, Zea mays
  unsure (1)..(365): unsure at all n locations
  Clone ID: MRT4577_9394C.1
ggggggggggggggggggnnnnnncccaatgggtacctcggagccggccggggtccctccctcctcatcggactgccttctccctgttgaccaacagcgcaatctgaaccatcgagccatagctgcaaagctgactcgcctccacagcctccccgaacgcctaggagccaccttctcctgccatccgaatggactgatagcgctcttttgcaggtatgcccaccagggcgcaggcaatgcctcaccaacatcacacctgcttgcgcagttcgatgacctgccttgatagtgacaaggagaagaatgcacctgtttgaagacattctatcatgctgttcccccaagaatccgcgctccccccctgg

SEQ ID NO: 178030 - DNA, 322 bp, Zea mays
  Clone ID: MRT4577_93950C.1
gcgtacccaggctgattgccagcagttctatgccaagcgtggcttgccatatgatggtccagttatcccacccgcaccacagcctgcaccttcaccgtcaaggaagaagaacaggaatctgaaatacatactgatcggggccattggtggaagcctcctgctgatagccggggttgcagccattgtgttctgctttgtttgttctgtgagaacagggaggacggatggtcagagggaaagtggggcatcaccaagtgcaccagcaccatcggtagtgtcagctaccggcacagctgcagctactggtggcacacacccttct

SEQ ID NO: 178031 - DNA, 1102 bp, Zea mays
  Clone ID: MRT4577_93951C.1
ctcgaggccggccgggctttttttctctcatccgaattcccaggcaggcaggtcggcgaggagggcaggaagaccgaagaccgagccgtgcgggggctcgggacgggaacgggacaggaccccaaaatctcagatccttcctgcccgcccgcccgtgcccgtcgacgcgtcgttcttgccggccgcgccccacctccgccctctcctcctccaggctgcgcgatggtgctgtgggtcttcggctacggctccctcacctggaaccccggcttcgacttcgacgacaaaatcctcggcttcatcaagggctacaagcgcacctttaatctcgcttgcattgaccacagaggcacaccggagcatccggcgaggacctgcacgcttgaaaccgacgacgaggccacatgctggggaattgcatattgtgtcaagggtggtccagaaaaagagctaaaagcaatacagtacttggagagaagagagtgtgagtacgaccagaaaatatccattgatttctacaaggaaggagatcccttgaaaccagctgtgacgggcgtcttagtgttcgtttccactccagatccaattggcaacaagtactatcttggccctgctcctctgcaggatatggcaaggcaaattgctacagccaatggccctactggctataatagggattacctgttctcaatggagaaggcattagccagcattagccacgaagatgattcgatcatagagcttgcaaacgaggtgaggaaggtgctcaacagaacaaaggagaccaagatcactggtgccaatgcttccatgaaatcacatgcccctcttgtgcacctgtccgcgcttccagaaggcaccgttgtggactcgagatagcgacctctactcggaatttactttcagctcttgcatgtttgtggttgtggccatcatgtactgattttcccttttcaacagttgtcgtgaggctgtatcgtctggagtaaaaaaaaaaagctaaaagccggcactaataatgatattaacttgaaaaagctatcggcgatccttgaacttggaggacccccccccccccaaaaaaaaaaaaaaaaaagcggcc

SEQ ID NO: 178032 - DNA, 567 bp, Zea mays
  Clone ID: MRT4577_93952C.1
aacttgctcgatcgatctctctctcttctgctcgtcattcttgtgctctacccttaatcactcactattatggacttagctctactatcgagctaggcacgccactcctttcatgtagaatgctgcttactcatcgccaccaatggacactgatcgattgctagaccccaaccgactgtgacgatcgaggaagcgcctctgtgcatgaacaccgcgccgacggtcgacgagaacgaggagtctgtccccgacgaggtcgagtgtgtaggctgaggctgatgctgatgttcctgctgctcccgactagcttccgacgctcgagcagaagacagacgacgagacggatgtcgctgatcctgttgatgacgaagagcccgtcgctggcgaaccggtcgacgaggcgaacgctgatgctcctgctgcccacgaggagaccgccgcgagcgacactgtcacctaggcagaggctgctgctcccaataagatcgccgcggacgattctggacggtgctgctcctgctcctgcagtgccccacgagacgcgccacaagttggaatttgctggtc

SEQ ID NO: 178033 - DNA, 1424 bp, Zea mays
  Clone ID: MRT4577_93953C.1
caaagagccctcgttcccctcctcttccgctcgagtccatcgccgtcgccgtcgccctgccctcgtatctcctcccacgacaccggtgaccaccacaggccaccgtcctgatcctcatccgggtcatccccaggcaggcaggtcggcgaggagggcagcaagaccgagccatgcgggggctcgggacgggaacgggacaggaccccaaaatctcagatccttcctgctcgcccgcccgtgcccgtcggcgcgtctttcttgccgtccgcgccccacctccgccctctcctcctccaggggaatcagatatgccacaggctgcgcgatggtgttgtgggtcttcggctacggctccctcatctggaacctcggcttcgacttcgacgacaaaatcctcggcttcatcaagggctacaaccgcacctttaatctcgaggcacagcggagcatccggcgaggacctgcacgcttgaaaccgacgacgaggcgacgacgaggccatatgctggggaattgcatattgtgtcaagggtggtccagaaaaagagctaaaagcaatgcagtacttggagagaagagagtgtgagtacgaccagaagatatccattgatttctacaaggaaggagatcccctgaaaccagctgtgatgggcgtcttagtgttcgtttccactccagatccaattggcaacaagtactatcttggccctgctcctttgcaggatatggcaaggcaaattgctacactacagccaatggccctactggctataatagggattacctgttctcaatggagaaggcattagccagcattagtccccaaactcgacgcgcaggtacgagaattagccaccagccgacgggatctcgatggcgagctccgcgtagcagaaggacaagagcagcaccgccaggtccccaaaccattttcgcgcgggtataaaagcctggcatggtgttccattgaataggtcactggagtggagtgggtggcataccaaggacaaagcaactggactttctcatccgaaccatcaagtggcctccatagaccaccggtgtcaaagatgaagtcactggagtggagtgggtgacataccaagcacaaagcaaaggcatatgcagggtgatgatgatgtcgtagtgatgggccttgaggtagagcacagaggcagtaacgtggcggagtgcaacaagcagtagctagacagtataggcattgaccaagtagaggttaatgcagacaccaacagctccgggtcaggaccatgctgtgtatctcaagatggtcatgacttggagttctacagtgaggatcatgtggagtgtccagtgaaagtcctccataaaaaaaccttaattagtggggagtaacattgtaatggttgttggcaaatgataatatatgtgttgtttgtttt

SEQ ID NO: 178034 - DNA, 588 bp, Zea mays
  unsure (1)..(588): unsure at all n locations
  Clone ID: MRT4577_93954C.1
cccgggcaggcgggcaggtcggcgaggggggcgggtagnacctaggcgcggagggggggggggggtccggacgggaacggggcaggaccccaaaatctcagatccttcctgcgcgcgcgcgcgtgcccgtggacgcgtggtgcttgcggggcgggccccacctccgccctctcctcctccagggggggcgggagacgccacaggctgcgcgatggggctgtgggtcttcggctacgggtccctcatgtgggaccccgggttcgacttcgacgacaaaatcctcgggttcatcgaggggtacaagcgcgcctttaatctcgcttgcgttgaccacagaggcgcaccgggagcatccggcgaggacctgcgggcgtgagaccgacgacgaggccatatgcgtggggattgcgtattgggtgaaggggggggcagaaaaagagctaaaagcgatacagtacttgggagagaggagagtgtgagtactaccagaaaatatccattgagttctacaaggggggagatcccttgaaaccaggtgggaggggcgtgttagtgtgcgtgtccactccagatccaattgggaacaag

SEQ ID NO: 178035 - DNA, 402 bp, Zea mays
  unsure (1)..(402): unsure at all n locations
  Clone ID: MRT4577_93955C.1
gggtgaagatccacttgccaggggcagggatccgcactccatgagtccggatttgcactccttggaggtggtgaggtgattcaccggcaacaacagcggtgacatctcgacgcacgcgggtgggggtgctatggcaccctcctagctccgaaagtctttgtaaaaaaaatttaaacataaaaataaaaatattgggggcccctttactgggcttgcccctgaatgtgatgttgcaaatttcagatgcatcagaaactgttgtccttgtaaaaaaaattaaaacataaaaataaaaatattgggggcccctttactgggcttgcccctgaatgtgatgttgcaaatttcagatgcatcagaaactgttgtccttgtgcgaaaaaaaaaaaaaaaaaanaaaaa

SEQ ID NO: 178036 - DNA, 1011 bp, Zea mays
  unsure (1)..(1011): unsure at all n locations
  Clone ID: MRT4577_93956C.1
tttcagactttttttctctcatccgaactctcaggcaggcaggtcggcgaggagggcaggaagaccaaagaccgagccgtgcgggggctcgggacgggaacgggacaggaccccaaaatctcagatccttcctgcccgcccgcccgtgcccgtcgacgcgtcgttcttgccggccgcgccccacctccgccctctcctcctccaggggaatcggatacgccacaggctgcgcgatggtgctgtgggtcttcggctacggctccctcatctggaaccccggcttcgacttcgacgacaaaatcctcggcttcatcaagggctacaagcgcacctttaatctcgcttgcattgaccacagaggcacaccggagcatccggcgaggacctgcacgcttgaaaccgacgacgaggccatatgctggggaattgcatattgtgtcaagggtggtccagaaaaagagctaaaagcaatgcagtacttggagagaagagagtgtgagtacgaccagaagatatccattgatttctacaaggaaggagatcccttgaaaccagctgtggcaggcgtcttagtgttcgtttccactccagatccaattggcaacaagtactatcttggccctgctcctttgcaggatatggcaaggccacgaagatgattcgatcatagagcttgcaaacgaggtgaggaaggtgctcaacagaacaaaggagaccaagatcactggtgccaatgcttccctgaaatcacatgcccctcttgtgcacctgtccgcgcttccagaaggcaccgttgtggactcgagatagcgagagccttggacgttggacctctactcggaatttacttccagctcttgcatgtttgtggccatcatgtactgattttcccttttcaacagttgtcgtgaggctgtatcttctggagttaaaaaaaatgctaaaagccggcactaataatgatattaanttgaaaaatctatcggcgatccttgaacttggaggaccccc

SEQ ID NO: 178037 - DNA, 347 bp, Zea mays
  unsure (1)..(347): unsure at all n locations
  Clone ID: MRT4577_93957C.1
cgcagcnagcgcaacgatttgcagnnccggcgggggcgggcggggagcgggggggaaagagangagancaggggggggncgngccggcccgggccgncggcgcgcgnngancnngcangngnncnaaggccgnccccggagggccccccccgcngcngngngccgcnagaccnggagnancncgacgacgggggggggggcacgcagngacggnaccacgacgnnngnnccgccacgagagcccangnaacggnangnnnannnngcngnngnagnacncnnngacccagcncaagnnaacngccccgacaanaagaaaccagngcaggcangncaaaaaagaaaaa

SEQ ID NO: 178038 - DNA, 1370 bp, Zea mays
  Clone ID: MRT4577_93958C.1
gctagggaaagccggggtgcctccgtgcctgccagtgccatcacgtgccggtgaccaccgtcctgatcctcatccgggtcatcccctcgctcgctgcgcctggcctgacgtgtccccccggcccccgggtccgtgtgtacgctgtcgtccggcgggatataaaggcggtcccgcacccacctcttcttcctcctttttttttttctctcatccgaattcccaggcaggcaggtcggcgaggagggcaggaagaccgaagaccgagccgtgcgggggctcgggacgggaacgggacaggaccccaaaatctcagatccttcctgcccgcccgcccgtgcccgtcgacgcgtcgttcttgccggccgcgccccacctccgccctctcctcctccagggggatcggatacgccacaggctgcgcgatggtgctgtgggtcttcggctacggctccctcatctggaaccccggcttcgacttcgacgacaaaatcctcggcttcatcaagggctacaagcgcacctttaatctcgcttgcattgaccacagaggcacaccggagcatccggcgaggacctgcacgcttgaaaccgacgacgaggccatatgctggggaattgcatattgtgtcaagggtggtccagaaaaagagctaaaagcaatacagtacttggagagaagagagtgtgagtacgaccagaaaatatccattgatttctacaaggaaggagatcccttgaaaccagctgtgacgggcgtcttagtgttcgtttccactccagatccaattggcaacaagtactatcttggccctgctcctctgcaggatatggcaaggcaaattgctacagccaatggccctactggctataatagggattacctgttctcaatggagaaggcattagccagcattagccacgaagatgattcgatcatagagcttgcaaacgaggtgaggaaggtgctcaacagaacaaaggagaccaagatcactggtgccaatgcttccctgaaatcacatgcccctcttgtgcacctgtccgcgcttccagaaggcaccgttgtggactcgagatagcgagagccttggacgttggacctctactcggaatttacttccagctcttgcatgtttgtggccatcatgtactgattttcccttttcaacagttgtcgtgaggctgtatcttctggagttaaaaaaaatgctaaaagccggcactaataatgatattaacttgaaaaatctatcggcgatccttgaacttggaggaccaaaaaaaaaaaaaaaaaaaaaaaaaaaaaaaaaaaaaaaaaaaaaaaaaaaaaaaaaaaaaaaaaaaaaaaaaaaagggggcgggccgtttta

SEQ ID NO: 178039 - DNA, 342 bp, Zea mays
  unsure (1)..(342): unsure at all n locations
  Clone ID: MRT4577_93959C.1
ctcggncagcctagattttgttttttttaattttttttttttttttggagggggaaacctgtccacttgagaccttgcaatgtcgaagacatcatacagttactagcagaggataaaagaaccgctacccaggggaaaccctggattcacttaccccttgaaggaaaaagaacataatttctgcctgctgggattggccggagaacccataccagaaccaaggcataattggattaagatgaaccaaatgggttgaccataccatcatagggtggaatatggtttttgggccttggattggcccaagattggctctttttggccaaaaagggggatggaaaa

SEQ ID NO: 178040 - DNA, 199 bp, Zea mays
  unsure (1)..(199): unsure at all n locations
  Clone ID: MRT4577_9395C.1
gagcgggagctgtagcggctgcgttttttttcttcatcgtgtagcccaccccacattccgctgcggccagcgccggttttttttttgtattcttttgtttatgtaccagcgacccatctaccggccgttttaagcgcccgcttatcgccttctcggtgggcggtcgttcccgttcattntnttnttttttttttttttt

SEQ ID NO: 178041 - DNA, 316 bp, Zea mays
  Clone ID: MRT4577_93960C.1
ctcggaattcggctcgagaataaatattaccggccctatggtataccaccccaatacccaacaccgaggggggctttttttacatcaagagttctatatgccactagatccgcctactgctcattcttatgctcttacagatcactctggacaaaacactggggatgtacctgaccacacgtcacacatgctcacaacaatatgcacgcccccctctaagtatctctagccaaaatacgcacttagggacagccgtaagccagctggaggcacagatgacatgcgaaacaactgaaacgcttaccatgctcgggct

SEQ ID NO: 178042 - DNA, 1265 bp, Zea mays
  Clone ID: MRT4577_93961C.1
ctcgagttcgtcgccgtcgccctgccttcgtatctcatcccacgacaccggtgacaaccacaggccaccgtcatgatcatcatccgggtgatccccaggcaggcaggtcggcgaggagggcaggaagaccgaagaccgagccgtgcgggggctcgggacgggaacgggacaggaccccaaaatctcagatccttcctgcccgcccgcccgtgcccgtcgacgcgtcgttcttgccggccgcgccccacctccgccctctcctcctccagggggatcggatacgccacaggctgcgcgatggtgctgtgggtcttcggctacggctccctcatctggaaccccggcttcgacttcgacgacaaaatcctcggcttcatcaagggctacaagcgcacctttaatctcgcttgcattgaccacagaggcacaccggagcatccggcgaggacctgcacgcttgaaaccgacgacgaggccatatgctggggaattgcatattgtgtcaagggtggtccagaaaaagagctaaaagcaatgcagtacttggagagaagagagtgtgagtacgaccagaaaatatccattgatttctacaaggaaggagatcccttgaaaccagctgtgacgggcgtcttagtgttcgtttccactccagatccaattggcaacaagtactatcttggccctgctcctctgcaggatatggcaaggcaaattgctacagccaatggccctactggctataataggtaatccctattatagccagtagggccattggctgtaatagggattacctgttctcaatggagaaggcattagccagcattagccacgaagatgattcgatcatagagcttgcaaacgaggtgaggaaggtgctcaacagaacaaaggagaccaagatcactggtgccaatgcttccctgaaatcacatgcccctcttgtgcacctgtccgcgcttccagaaggcaccgttgtggactcgagatagcgagagccttggacgttggacctctactcggaatttacttccagctcttgcatgtttgtggccatcatgtacctgcccgggcggccgcccgggcaggtactgtagtaataatgtaatggagccgctgactagctacctatagctagttcactcgtttagcggcgatgagtaacggagtgtcacccatcaccatgggtggcagtgtgagcaatgacctgaatgaaccattgaaatggaaaggaataatatatagggaaaaaggatgtttgg

SEQ ID NO: 178043 - DNA, 240 bp, Zea mays
  Clone ID: MRT4577_93962C.1
gggggtggttttttttattaattgggtttaaaaccacattcatcggggctatatatataaagataggccccttttgttagaacaccaggatacccattggccaggtgttggcatggatacctaagtaaatgtggccttttgaggaaacaaaatacaaaaagacacgggtttggaaatgtgtctactcccgtttggggacatatagttggaacagagaagtcaattgaaaactaggtttgg

SEQ ID NO: 178044 - DNA, 200 bp, Zea mays
  Clone ID: MRT4577_93963C.1
cggagaaccatgacaacacacgaactgccaagcggccgcgtacagccattttctgttttttgctggggcacccgactgctcggggtgcaccggacagtactacagtgcgccatacccccgcggagcccaccatccggtctgggaatatcttccggacacctgggctaaaaatcaccggactgtccaacgtgcaccgtact

SEQ ID NO: 178045 - DNA, 446 bp, Zea mays
  Clone ID: MRT4577_93964C.1
cgcccaacgccttccgtaaaaaaaaataaaatataaaataaaaatttaaaaaaaaaaaaaaaaaaaaaataaaatgggctatttttaaaaaaaaatacgatatataataatattttttggggccccctattttaatatcccaactctttcttccccgggctccctctttataactttctctattttttcccctattttcaattctttgccctttttttaatacccccataattgaaaaacctttgctgttcccaaactaattctctttgcaaaaatactccctttccccattttaattttacctcaaaaaaccccccctctttccccttttcaaaaattttccaaactccatattcttaatttctccctccccccttttcccgcccctttattatctctccaatttgtttgtttcttttctccctagttttaatctttcccacttt

SEQ ID NO: 178046 - DNA, 772 bp, Zea mays
  Clone ID: MRT4577_93965C.1
accacagtgctcgatccactatctcatcacatcacgatcaagtcacacacagcccacgacgatgatgcaccgtgctacgatcgtcggcgtcgtcgcgcttatcggcgtccttctcgtcggcggcggggttcgagcgcagccgccgcagcggtttgactacccggcggcgagggcgcccacgacctgggccaacacggacgccggcctgccgcaccacgtggtctacaccgacggctccgtggcgcgcgtggccctgctgcggctcaacccggccggctacggcccctcctacgccttcggcttcttctgcaccggccacggcgcggccccgtgcgccgacttcctcctcggcgtcgccgtcgtgtactccaacagcggcgcgctcatcacgtccaccacgaccggcgtcccgcaggtcgtctggtcggccaaccgtggcagccccttgggcgagggtgccgcagcggagctcacgcctgagggcgacctcgtgctcaggtccgccaacggctcggcggtgtggtccgccggcaccaagggccggtccgtcgccggggtgaccatcggaagcgacggcaacctcgtgctgctcgacgggcgcaacgccacggtgtggcagtcgttcgaccaccccacagacgctctactcgtcgggcagtcactcgggcacggtgcgcggctcaccgccaatacgtcggctgctgactggcgcgacggcaggttctacctcgccgtcgaggacgacgccctgagcgcatacgtcaacgccacg

SEQ ID NO: 178047 - DNA, 715 bp, Zea mays
  Clone ID: MRT4577_93966C.1
gcaaggcccgcggggggctgctgtccgacgtgacgcgcgtgttccgggagcacgggctgtcggtgacgcacgcgaaggtgggcacgcgcggggcgcgggcggccaacgtgttctacgtggtagccgcattcggggggaggcccgtgcaggcgcaggcggtggccgccgtgcgcgccgagatcggcgagcagctcctgttcgtccgggagcaccaggacgccgccgccgccgccgccaacgggaccaggtcgaccgtggccggcgggcggcgctcgctcgggaacatgatccggtcccgctccgagaagttcctctacaacttagggctcatcaggtcgtgctcgtagccgccggcgactaattgatcagacagagctcgcatgtacctgaggcaggcacgcaggcaggggaattgtcgtctactagctaagctagcattagaatctctgcatctgctagataaaaaaagggagtccatgctctcatagtctcatcaacgccacgttgttcgatcgatccatgcatgtcaaagctcacgcggacgatagatcgaggtctgatgctgctagtagctgtgtagatacgctcatcttcgaatggttctcgctccttcagcccctcccttattctctagctcgtcgtatgattcgtctcgtctctgtggcagctcgcagctcccaatccatttgaataataataaaaagaatttagacgc

SEQ ID NO: 178048 - DNA, 1333 bp, Zea mays
  Clone ID: MRT4577_93967C.1
gcaagatgtaaatgaggcacaagccaataacagtccatattaataaggtttataccgaatttcaaatgtaacacatgtgagcaagaacgagaagacaagaaaaatacggactatataccaatatgtcaatcttgcaaaacataacttatctcaaactgtttgctagttaacacaaaatcatttgggacgtgctgtcctgatggaataagcaacacagttaagcactaggcgcaattggatggaccccattaaaagatccaaactttagatatataccatggaccccacatgtcattgactcatgtggacccacatgtaagtgagatagtaatggtatggatccaaagtggtgatcttttaatggtatggatccaaatttccctttctgaattttcatagcattatttcttttttctaaatgtactattgttctcagagccagagggacagatcaatggcacacctatattcttatggacgtcactcacctgttcaaagttttgcttcttgggcatcaaatcatactccaatttcaatgtcaagcagaggcggcttgcaaagaaactccaactgccctcaagcggagcaacgcaatatgcttatctctcagttaaccagaggatgcttcagagaagacatggatctacaaacgagattggctgtactggactcactttctgaagcatttaggaactgcgaggacacgcactctccagattcggatgatgatgattacgaggaccaaatagcgctcggcgtcgacagccagcaaagaggcgcctctgatgatcagataaacagcctgccactatcagtaatcgagggtgaaggtcgttccgatgaaccctgcaatatatgcttggactgccctgctgctggtgattcactccggcgtttgccatgcatgcacaagtttcacaaagagtgcattgacaggtggctcgggatgaagatatggtgtccggtttgcaagtcaaatgtgttctcccagtaggccgtgagcatctcttatactttttggagcagcatcgaagctagattatagttggctgatacgaggcattgttacggctgcagtgtgtacattgcgttcttgacttgtgctctcttctgctccgtggggagcatttgaatgctctttttccgcggagagtttttttggctgtgagagaaggcacggaaaacctcattctgctattcccatttcttgtataccttatcgtaggctgatatgcccaacagtatgtcaggtttaggcggtgccataggacatgaggctggatccagtgccatttttcgatcatactttttatctattaacctgtcccagtgt

SEQ ID NO: 178049 - DNA, 204 bp, Zea mays
  Clone ID: MRT4577_93968C.1
cggcatgcccatcttcccggactaattcgccatgcattcctcactctactcgagaggaggacaagggctactattgccgaaggcggttgttacgctactgtgaggtgcaagggctccagcggcggcttgctatccgcgcgtgttcaactgcggggactgtatctgtgacaccggcaactacgcattctgatatggcaacggctg

SEQ ID NO: 178050 - DNA, 646 bp, Zea mays
  unsure (1)..(646): unsure at all n locations
  Clone ID: MRT4577_93969C.1
caacatgnaccatgctgaagcttcgattctttgagagtagtggatattaattctatcccattgcaacatctgtgcactgaggtttcgatggcttgagcttggcttccacgtcattgcaagctatttctgctagctgggctttggatcctcctcctggccctcctcgttgctgctgctacgttcgttggatggaactggagtagagtactcgatcctgctgtagatggagctaatatatgtggatggagctagcttaattcggcagtatccacgaacgaaaattccaactgcgcaggcattccgcccgcctcattacgacatggatcgtcaccgtcggcgccatttccccttcctcctcgcgctcgtgcttctcgcggccctgagttcatcatcgcgaggggcggcggccgaagcatcagccgacacctccacaccactcaaagctttcacctggggaagcaatttcagcggcggcagcctgtaccaaggcaaccgtgacaccgtcgtccgtcggctcgtctcaggcccagccacctctggcggagttttcttcaactacagctccagcggcgatgggcccgacgtcgtctatggcgtcgccatgtgctacgccgacagccagtgggacgactgccagcagtgcctg

SEQ ID NO: 178051 - DNA, 153 bp, Zea mays
  Clone ID: MRT4577_9396C.1
caacgcaagagtatcaagaacagtacgatgcatgacctatgttcttggcttcgttttactttctatagtgtattattagggtttgtgaaatctgtatttgtgctcatacgccctttaactcctggtttgttaaagtattgcttttcaagaaaa

SEQ ID NO: 178052 - DNA, 236 bp, Zea mays
  Clone ID: MRT4577_93970C.1
acccacgcgtccgacacggtccgggacgctgcgctactacaggatatttagacttcgttggtgatgactacatcaactaacttatatattttcatgcgtacattaactgttgtgcatgtctaacaagacgtattaattgtaattttatagctctcgcatccacttgaactacatcgtgattggttcacaatatccaaaaccttccgtgcggtgaattggcaggcttagtaaccggg

SEQ ID NO: 178053 - DNA, 500 bp, Zea mays
  Clone ID: MRT4577_93971C.1
tcgcgatctagaacttgagttatacaagaagattattttagtgcatccatgttgttgttgatggcttcaagtgagagtcgaagcaaacattggtcacacttgaagccatcaacaatcatcatgatgcttgagttatactgttccgaatagcagtacccccctttttttttttttttttttttgtttggcgttccggcacatgccaccaaatgtgtgcacataccataccgtggattcctggagtcatctgctgatcctacaccgtgaggtcaattatgtaagtgtgacttagaaaaaaaatgtagatagatcctcattctggaaaaagccgggtatttgattgtaattcaatactgtgcttgatatatcacaatcagctcgcattttgtaattcaatactggacgaatataaattcaatcctttttttttcaaaaaaaaaaaaaaaaaaaaaaaaaaaaaaaataaaaaataaaaaaaaaaaataatattttaaaggggg

SEQ ID NO: 178054 - DNA, 241 bp, Zea mays
  Clone ID: MRT4577_93972C.1
aaaaaaaactgcaattcaggctttctaaatcccaaagcaaattttgtttgggtcacaccggaagttccacaaacattgaacaaaattaacagaatttctttcaaaacaacaagggttttaacgcaaccttttggcctttctttaaaacttgagcagggtcaggattttacccttacaaacagggcctttgacttttctaatgatgagacggttttggtcattcaaaaattttatttttacc

SEQ ID NO: 178055 - DNA, 483 bp, Zea mays
  Clone ID: MRT4577_93973C.1
cccacgcacgcgcgcgaccatggctgaggaggtcacgccccacaacatccacatcctcctcatctgctacccgagccagggccacatcaaccctatgctccgcctcgcgaagcgcatcgcagccaagggcatcctcgtcacctgctcctcgtcctccgtcgtccgcgacgatctcgccgctgcctcgggggtgtcggctggcggcgacggcgtgcccttcggcgccggccgcctccggttcgacttcctagacgacccattcgacgggacacttctggacctggaggacttcctgcggcaccttgagaccgccgggcggctggctttggcggacctgctgagacgccaggcggaagcagggcggccggtgtcgtgcgtcatcggcaacccattcctgccgtgggtgaccgacgtcgcggccgacgctggcatcccttcggcggtgctgtgggtgcagtcctgcgcggtgatctcggtctacta

SEQ ID NO: 178056 - DNA, 212 bp, Zea mays
  Clone ID: MRT4577_93974C.1
ttcagaacccagcgaatccagcctggccgatgcgcatgtctcatccgggacgccgactccatcctcatccccatcgccgcggcgatggatccctccccagccccagccccagccccggctccggctccggtcccggcccctacggtggtcgagtggcccgagggcggcgcactgactcgggactgggtggcggggctggccttcactctgga

SEQ ID NO: 178057 - DNA, 1210 bp, Zea mays
  Clone ID: MRT4577_93975C.1
gggacctcgagagggcggctcggaccgcgccggggcattgtgtaatccatctacaagatgtctaaatcttatccctttgactgatcctcagcactactacgccatggccaccaaagcaggctcctcactgtcgccatgcatcaggctcgtggaggaatccctgctcctcccgacgcaagacgccggcctcttcgcaaaggccttcgtgctcatcttcgcccacaccttcctcttcatcgcggtcgccgtccacttcgctcacccactcgccacggacatcctcgccgacatcaaagcacaaaggagcagcagcaggaccactaccactaccggcgccgcgagctccaaccactccaaggagctgtcgttactagcgatctacctctgctacctcgcgagcaaactcgccacccagctcgtcaccgccctcgccaccgccacgacctactccggcgagcgcctcacgcgtaaggtggtcatggagaggatcgccggaggcggcggccttctcggcacggctgccgtcgccggcgcgctggagctgtcgttcacggctctactcgcggcgctactcgtatccacgtggacctacgctgacgactcggtcgtaaagtctgtgtgtggctactcgatgttctcggtggcgcttctcgtctacatctacctcgccacggtgatcccggtcagcgtcggcgtgtcggcggtggacagaggctgccacggcgtctgggcgctccgccgggcgtggcggctcttgagagcaagggggaaggaggctgccgtgctcgtgttcgtcgtcaacatcctgcctgctttcatctacccagcccccgtgtacgcgttctcgtacatgtacccggcggacgagtactccctctactacggacaggacatggcggtcaggttttctctccacggcccggcgatgtggaggcagtggagccagggcgtgtgctggttcatgggcgtagttttcggatctggtcttccctcggttggtgcgcagctgttctccatggtggcagccacggtgttctgctgcctctccatagaaaccaacgatgatgcagcgcgcgcagtagtataaaactgcttgacaattttgtattaattgtcgatcacacctaagctagtcaaaatttacctactttaattttcgtcatgttgtggccaagactttatcgttgttttatacgagagagagttttac

SEQ ID NO: 178058 - DNA, 926 bp, Zea mays
  Clone ID: MRT4577_93976C.1
cggacaggaacatctgcctggatactattatgggcctgttctccatttttagtcttattcagttaggaataaaacagagattaaactgctttagggcatgtacaaccctgagcctctaccctgagcctctggaacggttttttaaatacaagagacagctaagagaccgtataatacaactcttagcccctaaataataaatacagtcaagacataatatgtatagaataccgtgtagagacgggctcttggtgaagagcctatctcttgacttttttccatttagccccctaaagactcctcaagagccccctcattcaattgggttgtacaggcccttagtccctaggtgactaaaagggactaaaccatattaatttcaccttttgctcctcatttatttcagttgtattaatggcaggagaatgataaggtgcatacccacgcgatgagtcatttaatgtgttctagatacttttaatccttttctagagtaaactttagtctatagactaaaggaaccaaacagaccctatgttaacagaaccgaattagcaattttctgtcgttaccatactgttcaaatcccttctttgttctgcctgcagtttcttaagcgacaactcatattttttgtattttggtttaagcaatttttctttcatacgaaaacagtcattttcagattgccatggtacattaaataaccgtttatgtatatttggtgaaccaggtccacatggactatctggaagctggcgcaaacattataatcacagcatcgtatcaggccactattcaagggtttgaatcaaagggtttttcaaaagaacagagtgaaaacttactaacaaagagtgtcgagattgcactggaagctcgtgagatgttcttgaaggaacatctgagaagttcactcctataca

SEQ ID NO: 178059 - DNA, 370 bp, Zea mays
  Clone ID: MRT4577_93977C.1
cgagtgccaggattctgatttaacttagtgcatcatataattatcctcaaattacaatataaacccagtctcagaacatgctagaatgaatcaaaaaggacggtttacatcgcctacgtctacagcaaagcacgtctcaacaagggagatcatcatcccaacgcgcctcagccatggtgcaggagaagctcgccatcctcggtcccaacatgcgcctacttagatctctgcctcattttccggcgcttcctcttgagcctccgcatcctcttcttcttccacttggcccgcatcgcgtcggagcaggtggagcgcgcgctcgagctacctgtccctgattgcggcggctgagtactggcgagttggagac

SEQ ID NO: 178060 - DNA, 352 bp, Zea mays
  Clone ID: MRT4577_93978C.1
taccctgcagtacgtccgaattcccgtcgcaccacacgcccggcaggcgctccctcgactttgaaaggcccacctcctccaacctgaatcgccttgtgtgggaggttatcaaatttgtgacggctcccctgaggtcccatggtcccctaattgtggatgtaaagaattccaaaaccaacctggttccttacccgaggatccacttcatgctctcctcctacgcaccggtgatttcttatgatagggccttccacgagcagttttctgtggtggaaatcaccatcttctcgttcgatcacgtgttcgacaacaccaaaatacgaaccactgtgttaaaggttcatggcttgtt

SEQ ID NO: 178061 - DNA, 414 bp, Zea mays
  Clone ID: MRT4577_93979C.1
ggcatcaaacatattcgagtgccaggaatctaatttaacttagagcatcatataattatcctcaaattacaatataaacccagtctcagaacatgctagaattaatcaaaaaggacggtttacatcgcctacgtctacagcaaagcacgtctaaaaaagggagaccatcatcccaacgcggctcagccatggtgcaggagaagctcgccatcctcggtcccaagatgcgcctacttagatctctgcctcattttccggcgcttcctcttgagcctacgcatcctcttcttcttccacttggcccgcatcgcgtcggagcaggtggagcgcgcgctcgagctacctgtccccctgattgcggcggctgagtactagtgagttggagacggaactgatctcccggccggctcgagg

SEQ ID NO: 178062 - DNA, 349 bp, Zea mays
  Clone ID: MRT4577_9397C.1
ggcagctctgcaacgacacgagcggcaacggggcggacaagagcgcctgccgggccaacatcaaccagctcgcgaccgccctcaccaacaacgcgtcctcctcaccgtctctcttcgccgccggcgccgcgggcagcgcgccggacgtggcctacgcgctcgcgctctgccgcggcgacaccaacgcctcctcgtgcgcgcgttgcgtcgccgcgtcgttcaagaccgcgcagcagctatgcgccttcaagaggggcgccaccctgtacgacgacccctgcatcctccgctacgccgactgggacttcctgaccaacaccacggacaacaggggcttgtacatcgcctg

SEQ ID NO: 178063 - DNA, 462 bp, Zea mays
  Clone ID: MRT4577_93980C.1
cgagaacggaggtatagtagttcactggaagtaccttgcaaaatttcagtcccagacagcagaacagcctatgatttggggatataggcaaaataagaaaatagaaccctgtgatcccttcctagtacaaactactgcaggatgaattcccctgcatctcagatagaatacaatgaataagggcacaaccatggttgccagacttggtaaagataatgccgcagtaatacgtctgcaaagcataagagtaaattatgataaagggcatgtagccaaaataaactgaactgagaaaaaaaagagtgaaattgcactaatttgttttcaagggtggtgtaaaagcaaataatgcatttagccaattttgttacaccaagctaaaataggcattagggtcacaagttcacaaatctgaagtcagatatgggacacaaatgttggggtctatgaatgactcccaca

SEQ ID NO: 178064 - DNA, 668 bp, Zea mays
  Clone ID: MRT4577_93981C.1
aataacactataattaatataatatagataaataacattcaatatctcataaataagcattgtcaaataactcatacataagtgtactctaaattgtggttttcatcagatacatatgatctttcttaaagggggactattccatctcggccatagaaaagcttgaatgctgactcaaagcctgacccttcctcaaaaattggacccttgcctccttgagcagctactggcaaagcagaagtgaggggaaaaggttgtagctccattgatattcctcacgaatgggcatctttcgacatctgggtgtccaaaaaggttctgcggtgatactgattcactgagaaagctgccaaaaaaatttccatcctggcaacagcaaaatcaaatgcacattagcaagtaatgacctagcaggatgtatttgatcttggatgacgaacatcaacacatatatacatatcagtgacacactggtactacaagtagttgaattcctcaaaaaacatagagagccaggaagataacatgcataattaaatataaccattttgtcacctgataattgactcatacatcaccttactgcctggtgtctgctggcttgctgtaaatagaacatgctctgcctagctgaaaatagaacatacatggtacaatttaaagccata

SEQ ID NO: 178065 - DNA, 372 bp, Zea mays
  unsure (1)..(372): unsure at all n locations
  Clone ID: MRT4577_93982C.1
tcgagtgacaggaatatcaataaacttagagcatcatataattatcctcatcgagtgacaggaatatcaataaacttagagcatcatataattatcctcaacggtttacatcgcctacgtctacagcaaagcacgtctacaaagggagacaatcatcccaacgcgtcacagccatggtgcaggagaagctcgccatcctcggtcacaaaatgcgcctacttagatctctgcctcattttccggcgcttcctcttgagcctccgcatcctcttcttcttccacttggcccgcatcgcgtcggcgcaggtggagcgcgcgctcgagctacctgcccccctgattgcggcggctgagtactantgagctcgtgcg

SEQ ID NO: 178066 - DNA, 2072 bp, Zea mays
  Clone ID: MRT4577_93983C.1
tcacaagcgcagttcgcgcaaggccagctcggacagcaaccacagcaggtgggcacttcagcttcataccagttggtggctgtaaagctttggcgacgaggggcaaaacaccactcattgcccggtaagaccgcgcaagtgggcactggccattttccaaccactcatcgctgaatgcctcatgtgatggtgggttgactcctttttgctggaaaaacccatggaagagaacactgagtcaataagttaaagccagcagaatgagatagctatggttttctgaccaacaacactcgcctttggatatagcaatgtaatggatagctaggaatgttctgagttggatggaatgtaaaataattaacattacacattgaaacttgggttgatattaggatggaaagaatcaaataacatggtcataaagtatcggcagatgcaaatggaatgagacatataatgaagaaaagcagtgtcgggacacactttcatggaagactgatctggtgtcttgggcttctggtgggactgatctagattgttgggtttcttgttctgccttttgcccttgccgttgaaaaagccaaaaccaaatggtccaaatgctgatagacttattgtggctgctctagcagccaatggattaaacggcagagcaggttcagtcctgacatcaatgctctcattgtggttttcatcagatacatatgatctttctgaaaggggaactattccatctcggccatggaaaagcttgaatgctgactcaaagcctgacccttcctcaaaaattggacccttgcctccttgagcagctactggcaaagcagaagagagggaaaaggttgtagctccattgatattcctcagaaatgggcatctctcaacatctgggtgtccaaaaaggttctgcggtgatactgattcactgagaaagctgccaaaaaacatttccatcctggcaacagcaaactcagatgcacattagcaagtaatgacctagcaggatgtatttgatcttggatgatgaacatcaacacatatatacatcagtgatgcactgatactacaagtagttgaatgcctcaaagaaacatagagagtcaggaagaaaacatgcatgattaaacataaccattttgtcacctgataattgattcatacatcaccttactgcctggtgtctgctggcctgctgtaaatagaacatgctctgcctagctgaaaatagaacagacatggtacagtttaaagccataatgactagcaggatttttaatagcatatctggatggcttcattgtgtccaacagaaccatgtaaagtaactgggaccatctcctgaaagagcatcttgactgtcaaggtcgtgtcactgcacatcaaacaaaattagctaaatggactgtattatataaataaaatgaagtgagtataggttaattcaacaaaagatactgcagcactgattaaagaagcctattagtcacccttcactcatcgcttgcactgtttacataatatagtttaaaacagaagatatacaaacatcctagcaaaaggggtctcatgtttacttatcaaaacgaagggatctgcaattagtattggaaaacacgaccatttagtgattccatatgtagaaataagtttaagtttttttcaaacaagtagtagaaccatgtataattatattacattaagaagaaaacaagtttaaggtttagctgatgtgagtaccactaaacctgctagatagatcagacaggccacaccacacattcagacttcatattgaagaaaaggtaaaaactttcataagcacctgggttaatgcaatcatgcttgtggacaaattatttatcctgcatcgcttgtcaattgagaggttcatctgtcttgccaataaatgtttatcgaagaaagcaaaagaaaatgattgattggcaaattgataattgataccaaaatacataaattgcagaaaatttcctggatatcctgataagctccataccttcacactaataatatcaaatagtgtttcattgtctcgagcataggcgtagttt

SEQ ID NO: 178067 - DNA, 776 bp, Zea mays
  unsure (1)..(776): unsure at all n locations
  Clone ID: MRT4577_93984C.1
atctctgtgctactctcactcagcaccacatccccccagccccatgtgatgtgaagccgcgtgcccgcgtccccaacctctctctctctcctcttctccgttggacgcagagccatcgccttatcacctccaactcacctactgccgcatctgttttagtgcactctgtccctccctccctgcctgctttggatgaatgccttgagggttcagtcctctgtctccctcctccttccctgaactgagctgcaagctgcagccgcaggcttggctggttgggtcaactgtgccgcgcccttcctcttgttcctgctcaatctcacctctttgatggcttcatcccactgctgccagtgcagcctcttcttcactggcaggcataggtggcaaaatccagcgccctgtagattcagctccattccctgctgcctgcagctccctgtcaatctttggaagccggccgcagagctttcagttcttgccgctctcctctgctctctcgctcgctcttccgctcacctctgcattcccccctccctctgtctctagtttccttgctggcaaacggacgaaggaaacgggccaagatgggagctttaagcagcatcggcgtcgggctggccgtggtgtcctcgctactcctgctggcgctcaccgcggagctctactacatcttcgtgcacaagcgccggcagcggcggcgncgccgcggccgtctccgacgcggnctcgtctccgtcctcctcctcccgcgagctgctccagctcttttgctt

SEQ ID NO: 178068 - DNA, 643 bp, Zea mays
  Clone ID: MRT4577_93985C.1
tttttttttttttttttttttttggcccttttttttttttttttttttttttttttttttttttttttttttttttttttttttttttttttttttttttttttttttttttttttttttttgatttaacttagagcatcatataattatcctcaaattacaatataaacccagtctcagaacatactagaattaatcaaaaaggacggtttacatcgcctacgtctacagcaaaggacgtctacagcaaagcacgtctacaaagggagacaatcatcccaacgcgtctcagccatggtgcaggagaagctcgccatcctcggtcacaagatgcgcctacttagatctctgcctcattttccggcgcttcctcttgagcctccgcatcctcttcttcttccacttggcccgcatcgcgtcggagcaggtggagcgcgcgctcgagctacctgtccctgattgcggcggctgagtactagtgagttgggaaaatggtctccctttgcagacgtcctttgctgtagacgtaggcgatgtaaaccgtcctttttgattcattctagcatgttctgagactgggtttatattgtaatttgaggataattatatgatgctttaagttaaatcagattcctggccctcg

SEQ ID NO: 178069 - DNA, 499 bp, Zea mays
  Clone ID: MRT4577_93986C.1
gaggaggaggaggccgtcaaggggaacgcagacagagaaggccgcgaggacgaggcggaggaaggggagtggcggcagcagcatccgcacgccgcaggcgggggagagacgtcgtcggctctggcgaaagccgtcgccgcggcgtgcgcgaacatggacccctccgcgctggtggactcgctgcgcgtcagcggcaggagctccccccgcgcgttcctcccggcgctgctcggcgccccggacccccacgctctccttgtccgcgccgtcggcggcgttttggacatggcctcggcggagcgcgacgcgagcaagtggtggtgcgcaaactgcgtcgcgctggtcgaatgcgcgccccgcctccccgcgccgtcgccggacgcgctggcgcatgcaaagcgcctggcggggcgctggaaggagatggtggttgcgggctctgcgggtggcggggacacgggcgggatggccggatggggccttctcaccttcattgctt

SEQ ID NO: 178070 - DNA, 830 bp, Zea mays
  unsure (1)..(830): unsure at all n locations
  Clone ID: MRT4577_93987C.1
acctgcccccatctccggctgccaccggagtcccttccctcctccctgagccgccccctcccgctgccgaacgcacgggtgccaccgactcctgagatcaccgacgcccaagccctgcttggccaccgaaggcccgagccgaagctccgaccgccgccgccgcttgcgatggaggcgctccgggaggcgacggccgagctgacggtgtacgtgcacccctccaacgccgcagacgtccgccttgctgtctcccgccagctcagcaccctcctattctcgtatgaagatcgctttgatggcgtgttgctatcacatgaagttgaattcgaaggtgacaacgaagatggccaagacagaaaagttgacggagacgggaaaagggttatcaaagccaaaatcctggatggtctggtaccatattttggcgtaccggtgactgcgaacatgctgctgttttctccccagccagagatgatactnagaagggaaagttgaaatgcttggcaaggaatcaattcatgcctcnngtcctgggggttttctcagcagccattatggcagatgatatccctgagatgttcaaattcaaaagaagaggacatggaggaaaatttataagccagtcggacaagcggcatgtgattaaaaaaggaagcatgatacggttttctgttaaaagggtggacacggaaatgaattgtcacataactgggatctttgatgccacctcacacaggatgcatgcggtggctatcagtacatgatgctgaatacgcatcgggaaattagcagtggtaaaaggaaaccaagggatcttactaagagcgagc

SEQ ID NO: 178071 - DNA, 129 bp, Zea mays
  Clone ID: MRT4577_93988C.1
ttcatcttttgtttgagaatctatgaagtgtatcatatacgtggcctaaagcaaggtgtgtattttgttattctgaaattgttttgcatctggacaaatactaaatatcccagtggccttttttttttt

SEQ ID NO: 178072 - DNA, 603 bp, Zea mays
  Clone ID: MRT4577_93989C.1
gttgggtttttttactatagataaataacattcaatatatcataaataatcattgtcaaataactcatacataagtgtactctaaatttaaagttgctcatcaactgtttgtgctaacattgagcctaagtatataacttgatacatatggaggggctgcgacggttcaatataaataagtgtactctacataagtgtactctaaattgagcctaactaagtatataaattgacgtcaatgctcattgtggtttttatcagatacatatgatctttctgaaaggggaactattccatctcggccatgaaaaagcttgaatgctgactcaaagcctgacccttcctcaaaaattggacccttgcctccttgagcagctactggcaaagcagaagagagggaaaaggttgtagctccattgatattcctcaggaatgggcatctctcgacatctgggtgtccaaaaaggttctgcggtgatactgattcactgagaaagctgccaaaaaaacatttccatcctgataattgactcatacatcaccttacttcctagtgtctgctggcctgctgtaaatagaacatgatctgcctagctgaaaata

SEQ ID NO: 178073 - DNA, 346 bp, Zea mays
  Clone ID: MRT4577_9398C.1
aagattcaccttttttttaaaaaaacggagcggcccaaaaggaaaaatgggggcttaagatacaccctttttttcacaaaaaagggcctcgcgttaggcctaaatgagggcccgggtacaagttttttggggccttaccattggcgggggggaccccatgatcccccacggggtaacagggcccgtacgggtcaaatattccggggggggggaaaaacttctccaccccttgttttttcttggaaaatggccaaaaaaaaaagcccaagctttcatcccggaggccccggggtcacaaaaaccacttttaaaaaaaaattttttcccccagcccccgggttcctcc

SEQ ID NO: 178074 - DNA, 1272 bp, Zea mays
  Clone ID: MRT4577_93990C.1
aggttcttcctctctctctctcctcttctccgttggacgcagagccatcgccttatcacctccaactcacctactgccgcatctgttttagtgcactctgtccctccctccctgcctgctttggatgaatgccttgagggttcagtcctctgtctccctcctccttccctgaactgagctgcaagctgcagccgcaggcttggctggttgggtcaactgtgccgcgcccttcctcttgttcctgctcaatctcacctctttgatggcttcatcccactgctgccagtgcagcctcttcttcactggcaggcaggttcctctagtctgtagtctcttctgaccggtggttgttgcagtttttaaccgttcttccctctgacagccaggcataggtggcaaaatccagcgccctgtagattcagctccattccctgctgcctgcagctccctgtcaatctttggaagccggccgcagagctttcagttcttgccgctctcctctgctctctcgctcgctcttccgctcacctctgcattcccccctccctctgtctctagtttccttgctggcaaacggacgaaggaaacgggccaagatgggagctttaagcagcatcggcgtcgggctggccgtggtgtcctcgctactcctgctggcgctcaccgcggagctctactacatcttcgtgcacaagcgccggcagcggcggcgcgccgcggccgtctccgacgcggcctcgtctccgtcctcctcctcccgcgagctgctccagctcttttgcttcaagaagccgccgccggagctcgcgtccacctacgccgtcccggagccggcgtccgccgtggccgtgtcagtcggcgacgacgacgacgacgacggcgagacggtggaggcgcaactgatgcggctcggcagcgtcgtcgggcccacgcggctgctgttcaccatcaaggaggagacccgggaggacctcgagtccgaggacggagggcgaggccggagccggagccggagccgcagcctcggtgagctgctgcattgcgccgagacaccgccgttcttcacgcccagggcctcgccatcgcccgtgccgacggcctcgatggacaactcctacaacccgctcttcgaatccccggcggccagcccggtccctacccatgccccgacggtgtcgccgccgccaaagttccagttcctcagggacgccgaggacaagctctaccgccgcgcgctggcccaggaggaggcgatgagggcgcggaggtcgc

SEQ ID NO: 178075 - DNA, 1176 bp, Zea mays
  Clone ID: MRT4577_93991C.1
tgggaccctcgaggccggccgggtcaagtcaccgcccttctgttctaacaaaaacccagatgctgcctggtacgacaagatggaggcttgcataactccactaccagaggtcagtgacttaaaggaggttgctggcggctcgttgaagaaatggccggagcggctcactgcagtgccgcccaggattgccagtggcagcatcgagggggtcacggaagagatgtttgtggaagatactgagttatggaagaagagagttgggcactacaagtccgtgattgctcaactcggccagaaaggccggtaccgcaacttactggatatgaatgcaaagtttggcggattcgctgcggcattggtgaatgaccccttgtgggtcatgaacatggtccctactgtggggaactcaacaacccttggggtaatatacgagcggggcctcattggaagctaccaggactggtgtgagggcatgtccacttatccccggacctacgacctcattcatgcagatacactgtttacactgtacaatggcagatgtgaggcggacaacattctgctcgaaatggacagaattctgaggccagagggcacggtcatcatcagagatgacgtggacatgttagtgaagataaagagcatcacggacgggatgagatggaatagccagatcgtggatcacgaagatggtccgctcgtccgggagaagctcctccttgctgtgaagacatactggactctggacgacagataatcaggtccgtctccaactcactagtactcagccgccgcaatcaggggggcaggtagctcgagcgcgcgctccacctgcgccgacgcgatgcgggccaagtggaagaagaagaggatgcggaggctcaagaggaagcgccggaaaatgaggcagagatctaagtaggcgcatcttgtgaccgaggatggcgagcttctcctgcaccatggctgtgacgcgttgggatgattgtctccctttgtagacgtgctttgctgtagacgtaggcgatgtaaaccgtcctttttgattaattctagtatgttctgagactgggtttatattgtaatttgaggataattatatgatgctctaagtttattgaaaaaaaaaagaaaaaaaaaaaaaaaaaaaagaaaaaaaaaaaaaaaaaagcggcc

SEQ ID NO: 178076 - DNA, 1555 bp, Zea mays
  Clone ID: MRT4577_93992C.1
ggtaccggcgccctctctcgagtttttttttttttttttttttttttacataagtgtactctaaatttaaagttgctcatcaactgtttgtgctaacattgagcctaagtatataacttgatacatatgtatgaactccgacggttcaatataaataagtgtactctacataagtgtactctaaattgagcctaactaagtatataaattgacgtcaatgctcattgtggtttttatcagatacatatgatctttctgaaaggggaactattccatctcggccatgaaaaagcttgaatgctgactcaaagcctgacccttcctcaaaaattggacccttgcctccttgagcagctactggcaaagcagaagagagggaaaaggttgtagctccattgatattcctcaggaatgggcatctctcgacatctgggtgtccaaaaaggttctgcagtgatactgattcactgagaaagctgccaaaaaacatttccatcctggcaacagcaaaatcagatgcacattaacaagtaatgacctagcaggatgtatatgatcttggatgaccaacatcaacacatatatacatatcagtgatgcactgatactacaagtagttgaatgcctcaaagaaacatagagagtcaggaagaaaacatgcatgattaaacataaccattttgtcacctgataattgactcatacatcaccttactgtctggtgtctgctggcctgctgtaaattgaacatgctctgcctagctgaaaatagaacagacatggtacagtttaaagccataatgactagcaggatttttaatagcatatctggatggcttcattgtgtccaacagaaccatgtaaagtaactgggaccatctcctgcaatgaatggagatgtaactgggaccataacaataggagatggcaaaagaagtggtttcaggagaaaaataacctgaaagagcatcttgactgtcaaggtcgtgtcactgcacatcaaacaaaatttgctaaatggactgtattatataaataaaatgaagtgagtataggttaattcaacaaaagatactgcagtgctgattaaagaagcctattagtcacccttcactcatcgcttgcactgtttacataatatagtttaaaacagaagatatacaaacatcctagcaaaaggggtctcatgtttacttatcaaaacgaagggatctgcaattggtattggaaaacacgaccatttagtgattccatatgtagaaataagtttaagttttttttcaaacaagtagtagaaccatgtataattatattacattaagaagaaaacaagtttaaggtttagctgatgcgagtaccactaaacctgctagatagatcagacaggccaaaccacacattcagacttcatattgaagaaaaggtaaaaactttcataagcacctgggataatgcaatcatgcttgtggacaaattatttatcctgcatcgcttgtcaattgagaggttcatctgtcttgccaataaatgtttatcgaagaaagcaaaagaaaat

SEQ ID NO: 178077 - DNA, 316 bp, Zea mays
  Clone ID: MRT4577_93993C.1
aaataataataataaaaaaaacaaccattttaaaaaaaacaaaactaacttccccttcctggcagagtccaaatacttactgggcggcgtgtctaactataatttacattctattttcccgtatcttaccaacttatttctttggaaaacctttcctttccccactttattcaccttcctgaaattcccctttttaccagtttcctaattaataaaaattcccccccctttcgcccttccaaacatttccccacctttatttcctattagaacccccctcttttttactttttatcccccccgcttttttttttcc

SEQ ID NO: 178078 - DNA, 652 bp, Zea mays
  unsure (1)..(652): unsure at all n locations
  Clone ID: MRT4577_93994C.1
cctgcaggcttcggtgccggactcccgggtgagactctagtctaggcaccaaagtcagggaggtgtttctctgagctctgcttcaaaactgtattatctgatgtttgtctgagccacaagtcatgaattttgcctgtagtcaaggatggtgaaggtccaatcatgtgcatatcattggtttcctcttgttatgatgaccaaacttgtatctaatatattgatttgaatatgatgacctctatattgtaagtttctgaatttttgcaacacaggtcatgcatttttcctgtagtcaaggatggtgaaggtccaatcatgtgcatatcattggtttcctcttgttatgatgaagagatctggattcaatacttgatttttcatttgtttttaaatatttgttaactgttatggtgtatgtcaatggaatttgggcattggttgctttgactgtttcttggaatgcagataaactacgcctatgctcgagacaatgaaacactatttgatattattagtgtgaaggtatggagcttatcaggatatccaggaaattttctgcaatttatgtattttggtatcaattatcaatttgccaatcaatcattttcttttgctttcttcgataaacatntattggcaagacagatgaacc

SEQ ID NO: 178079 - DNA, 482 bp, Zea mays
  Clone ID: MRT4577_93995C.1
aagaaagcctccattcctgagtctccggacaaccagcatcgatgtccacgccatcctcctcagactgcgacaacctggagtctcgacccgatggcgcccaaggccgagaagaagccacgggagaagaagccggcggccgaggtacaaggcggaaaagacgaccgcaggctaaatgcccaagctcgagaaccgcctgtccgtctcgaactcctccgtgaaggagggcgtggcagaatacggggaagaagaacgccccgaagagcgtggagacctaccaaatctacatcttcaaggtcctaaagcaggtgcaccccgacatcggcatctcctccaagggcatgtccatcgtgaactccttcatcaacgacatccttcgataatctcgtcgtcgaggccgataagctcgcccggtacaacaagaagcctaccatcacctcccgcgagatccagacctccgtgcgcctcgtactcccagtagagct

SEQ ID NO: 178080 - DNA, 349 bp, Zea mays
  Clone ID: MRT4577_93996C.1
cttgcgggggggttactaagttattacacaaaacaaccagcaaaaaggacgaaggttattagaacaaggtgaataatacgacaagatttaccacgccgacttgacaacatgggtgattataaagagggagaaaataacgggggcggaaagaaaacagacgctggcaaaacggaatctcccaacaaagctgaaaaaacgccacccgccaaaagctgattatcggggaccactctggaggggagcgaaaagaagccgactaaacagagttctgcaagccggcggtgacccccctgatggggaggaccatcgtgtccagcacgacggggggctacccgcccggcgggtccac

SEQ ID NO: 178081 - DNA, 360 bp, Zea mays
  Clone ID: MRT4577_93997C.1
gccggcctggttccagatattattctttaacaatgactactactaaaaataataatggatccttttgttcacataccaaatcaagacacaactgttagcgcacaagacatgttgaaattattagaatctctcgaactgaatccttcatctgtccctgaacttcaagctctatatgaatctgctaaaaacgggaagcctgttgagcgagatagtctgatgaacgtcgtgagttctttattaacaaatgattcacagcatcttggtgaattgacaagctctattgggaattttgaaattgagttttaaattaataaaacatgtgtcaattgaaacgaaaaaaaaaaaaaaaaaaggccccta

SEQ ID NO: 178082 - DNA, 2346 bp, Zea mays
  Clone ID: MRT4577_93998C.1
tttttctgttttctgttctcgatgttcccgtcgtctttattgaggtgaataaaaaaatcccagatcttcgaacagaaatccagtatagtacttaattcgaactgaaatccagtagtacttcagaaccgcaacactacaaagcttccaccgcatgaaattagacaaacagtttgcacacaaccactgacagaaacatgtataaccatcagtactacttgctgagtcgctgtcactgtacataactacagactgaattcctgacgggcagggtcgtaaaacaaccaacagatcgctggcgtcgcctaaaacagccactccagtggcaagcagcaatcactagtcagatcacatcagatgcacctagcagttctcccttgacaccatggcgaatgccagccaattctcatggaagcaagccctaccattggcgaggaattcagaagggcatggaaaccgagcaacggaagcagaattgcctagtcttgctgacacagtgaacacaattcaggagctgcgggttctggtaagatggaaataacaaaacagcaacgaagccaagactaattgctagatgttgggccatctgagttgagataacccatcttctcagacagcacattcatatcatcctcgattacagggctatcgttctcctcgccaagtccttcgttcagcaactgctcccagaagttgtcattcagatcctcctggggcatgtcttgctgctgctcataggtactgccaatatcaatatcaatatcaatatcatgtggcccaatcaggccgtggccatcgaaagctgggctctcgaggtcagctgggattccgtcgacaaggaattcaactgggtcctgggcattaaacaggaccggtgaaccttgctccaagctgctactagcccccaagtcatcagcttcaggcccttggtcgatgcgccgtcttcttttctttgaaatagcatcttgaagctccttcctcatctcattctgggaaaccaggtgcttcaagaattcaggattccgcatgacacgtgccaagaacgccatcatctgctgctgcttctgttcagtcccttgtagcctatcctccatcgctttgagatttgcctttgtgttctgctgctcctgccttagcttcaccacttctgccatcagtaactgcttgtctctcttcaacatgtcaatctctgcatcatatccaaaatgtcccacctcaaggtaaggcccaatggactgctggtttgtggcattctgagcaggaggttttcgacgcctgatgttcttcaggaggtgtctctgtccccgtaaaaagccctcattcgcgaattcccaccgatcaggatccaccttcctgaaaccataggtgttgagctgccggacgaagctggagaagttgttgtgcttgaagtgcctgggcagcagcaccgtggcgaaggcgtgcggatcccacaccacgaagctgttgttggtggcgctccacgacacaatcaggtcggtgtccgagtcgtcgaccatgtcatatgtcttggtgaggaacggcggcggcccagggtcatgcagaccctccatcggctttggtgccgcggcgacggccgcggacggcccatccgcggcctccaccgtgcctgccatcaaatctcctccctccccatggctctcctccttcacctggttcagcgttgagtccatagccggatcctaccctcctaatccgagtaacgatgctaaaatctctgctctgacaccggaatggaatagtctgttggacaatgtcagtaaaactccgttgtaaaagagcagcaacgagcagctgcccctagcacacggccacacaggagtacaaggcacgcatcgacgttaaggcatacacacacacggcggccggcgcgcatctagcacggggatagggaacatgataaggtgtcatcctggcaagaccacctcaccatgtttacccccacctacagctctgcaagtacaggtagaaagcagccgacaaactgggggccagagcaccacgccagacgccaggggcggagaggaaatcaaagccgccgggtgcctcgtggtggcaccagggcgggatcttcttccctgttgcccggaaccacggcgggggtgggtgagccgtcacgagcgcggggagggtgggtagctcagcagcctactagatgcagtggctctggaatggtgggtagggggatagggtatggatttggctatttcgggaaaggaaggttctggaaggcgaggggacgggggatggggataaagcgtcggggggcggggaccggaactggcgcggcgggagagagacggaggaggaaagggtcgcgatcgcggccgg

SEQ ID NO: 178083 - DNA, 363 bp, Zea mays
  Clone ID: MRT4577_93999C.1
agcgtggtcgcggccgaggtacaccttgagatccgggagcgagctttggactctgtgcacctgcgcgcatagctctgcgtcctaaaaaacacggtcctctgctctatactgctttggattggcttacggatccatgggtcactggtggaccaactatcattatattttctgtctggggtagtggggaacgactctttctcgaattgttgtgagctgggaactttctagagtgattccccaaaactcaattcattcacggtatgcacttgctgctgaccagaacaatattattgcaagttctgaggtgcctaatgagctagctaacttatatctagtcgggcgggctcactgaaaggctttatt

SEQ ID NO: 178084 - DNA, 438 bp, Zea mays
  Clone ID: MRT4577_9399C.1
accacgcgtccgcccacgcgtccggggatggcaaagcgccggcgccacgagttggcgccggtcgtggaggagctgatttcgccgatgaacagcctggacgacggctgcctcatgcacatcttcagcttcctgagcccaatcccagatggcgcttccttgcatgccaccctcggctatggctgcgtgttgagaggccaatcagagatgcgatggagcctggagtttatcctgatctcgaggctgctgtttctgctgctaggccgggtgacaccattcttattgcggctggtggttcccatgttgcatgtaacatccaaataaagaagcctatttgcataattggcgggggcgatcttcctgatgacactgtattgacctgctcacgtggcttcgacaacgcactggagtttctatcaacatgcaagattgcaaatctga

SEQ ID NO: 178085 - DNA, 273 bp, Zea mays
  Clone ID: MRT4577_939C.1
ccccaaaaaactattactggtacttggccatccacaatctttagcgggtttttataaaactcaaacaacatcctgaactttgggggaccaaaccatttatccgagggggacacgtcctatagtccatccaaaaacggggggggctccacacacacaacctggtacagggagccccctccagccccaataaaaagtcatcgcctttggaaaaaacctttttgcaagttggcccgagaaaaaatgtgtgctcaaactgcaaaacgaaactccctt

SEQ ID NO: 178086 - DNA, 1981 bp, Zea mays
  Clone ID: MRT4577_93C.1
aagcactggctgatgagtatgggatcaagttttttggagcgagtgccaagacattcctgaacgtggagcaagtgttcttgtccatcgcacgtgacatcaagcagaggcttgcagagaatgattcagacccagaggacaaggcaatcggaattagcaacccagtccagggttccgaggctccaggtgcccagcgatgtgcatgctccggttcataagcagacgcgcgatggccataatcattggttatttgacactatttatttcctgcttggcttttataggaagattttgaggaagccccttatgatatgctcttatgtggttgtactcttgcggggccttgggcctgcaccgataaccactgtcttggcgggccacgctttgcaagtgacggccccgacccatcataacaaatcaaaccatcacccgatttgtttacccccgaaaatttgccgtcttctcgtctcgctcccctctttgcgccgcccccagatccggcaccgcccgctgctcgaacccgcaccccacgcccgcaggccgggaccggtgggcgcgcgccgggcagtaggagggagaggaagggcggcatggcggcgccgccggcgagggcccgggccgactacgactaccttatcaagcttcttctcattggggatagcggtgttggcaagagttgcctcctgttgcggttctctgatggttccttcactacaagctttattaccacaattggtattgactttaagatacggacaatagaattggatggcaagcgtataaagctacagatttgggatacagcgggccaagaacgcttccgtactattaccactgcgtactaccgtggagctatgggtatcttgctggtttatgatgtcaccgatgaatcttctttcaacagtaaactcttcttaactatatactccaaatccttactgcttccattttaaactattttaccacctgtttgcaactggttcacctaaaatacagacatccgaaactggattcggaacattgagcaacatgcctctgataatgtcaacaaaattttggtgggcaacaaggccgatatggacgaaagcaagagggccgtacctactgcgaaaggacaagcacttgctgatgagtatgggatcaagttttttgaaacgagtgccaagacaaacctgaacgtggagcaagtgttcttctccatcgcacgtgacatcaagcagaggcttgcagagactgattcaaagccagaggacaaggcaatcaaaattaacaagccagaccagggttccgaggcaccagctgcccagcgatctgcatgctgcggttcataagcagacgcacgatagccataatcattggttatttgacactatttatttcctgcttggcttttataggaagaatttgaggaagccacttatgatatactgatgatgtggttgtactcttgtttgcttccactcttcgaagcaagcacctcttgctgttgacgtagctattgcactctggacatccgttggaacaacctctctcctccctacagtctacagtgtgtgatggacgaattccatgccgttgggtttgcattatcgatcaatgcatggattaacgtatcgcccttgtgtggattgttgtgttttttttttttcatgttgctgttcctttagattgaatttgttgggaaggaaaatatattttccttttcttatgtatatcaggtgcatttttatcttttgtacctggaatgtatgtatccacggaaagcgtgaatcttcaatttagaaaagaagaaaacttatctggaaaaaaaaaaaaaaaaaaaaaaaaaaaaaaaaaaaaaaaaaaaaaaaaaaaaaaaaaaaaaaaaaaaaaaaaaaaaaaaaaaaaaaaaaaaaaaaaaaaaaaggggggggccgtctttaaaggaccaaagttaacttccccgtgcttgcaaagtaatagtttttttttagggccaccaaaa

SEQ ID NO: 178087 - DNA, 550 bp, Zea mays
  Clone ID: MRT4577_94000C.1
aattcggcacgaggtatccccctacccaccattccagagccactgcatctagtaggctgctgagctacccaccctccccgcgctcgtgacggctcacccacccccgccgtggttccgggcaacagggaagaagatcccgccctggtgccaccacgaggtcccagaagctcccgccttcccgctcaaatctctcctatttctggttcccgccgcggaagatcaacttcttgctgtgttcgtcgtttcaggcacccggcggctttgatttcctctccgcccctggcgtctggcgtggtgctctggcccccagtttgtcggctgctttctacctgtacttgcagagctgtaggtgggggtaaacatggtgaggtggtcttgccaggatgacaccttatcatgttccctatccccgtgctagatgcgcgccggccgccgtgtgtgtgtatgccttaacgtcgatgcgtgccttgtactcctgtgtggccgtgtgctaggggcagctgctcgttgctgctcttttcaacggagttttactgacattgtccaacag

SEQ ID NO: 178088 - DNA, 634 bp, Zea mays
  unsure (1)..(634): unsure at all n locations
  Clone ID: MRT4577_94001C.1
cttgaattttccgttttctttattgaggtgaatnnnnnnntcccagatcttcgaacagaaatccagtatagtacttaattcgaactgaaatccggtagtacttcagaaccgcaacactacaaagcttccaccgcatgaaattagacaaacagtttgcacacaaccactcacagaaacatgtataaccatcagtactacttgctgagtcgctgtcactgtacataactacagactgaattcctgacgggcggggtcgtaaaacaaccaacagatcgctgggccgctggcgtcgcctaaaacagccactccagtgacaagcagcaatcactagtcagatcacatcagatgcacctagcagttctcccttgacaccatggcgaatgccagccaattctcatggaagcaagccctaccattggcgaggaattcagaagggcatggaaaccgagcaacggcagcagaattgcctagtcttgctgacacaactcaggttctggtaagatggaaataacaaatcagtgacgaagccaagactaattgttagatgttgggccatctgagttgagataacccatcttctcagacagcacattcatatcatcctcgataacagggctatcgttctcctcgccaa

SEQ ID NO: 178089 - DNA, 272 bp, Zea mays
  Clone ID: MRT4577_94002C.1
acctacattgcatacgatgcaggcccgctccacctggctccggggcttttcggccatggtcctacatattgcaccattgatatacgcacgttcgaccatagcttgaccactatctccgtcacctcctacacaccttacaactttgacaatctggtcaagtctctcatatttgtcaccaacaaacctacttacgtaccgtacgatctatacgacgccaccccgtcctacctcaacgtaattaacaacgaccacgtcgatgcatattaagatca

SEQ ID NO: 178090 - DNA, 237 bp, Zea mays
  Clone ID: MRT4577_94003C.1
gacttctccaagtccctgaggagcctgaccactgaagctgatcatgagatgactgtatgctgacacacccccttcaggggcctggccttgacttagggctgcactgtatcctcagcaacggccttgcaggagccccttttggactgctttccctattcagcccagagttggggtggtgggagaagaggggttggagtgaatccatctctattcaaattccagctgggattactctag

SEQ ID NO: 178091 - DNA, 499 bp, Zea mays
  unsure (1)..(499): unsure at all n locations
  Clone ID: MRT4577_94004C.1
ggggggggggggnagcagaacaaaagagggggcgggcagcanaacgangnncagcacgaggaaagcaggncacacaagacaggcacngnaanaccccanacacnnaaaanncangnngcnncaaagcaaaaaagaaaggcnaaaggggggggggggggggcgcannccaacngnagaaaggacnnaagcaacggccgcgaggaaagccnncccaggagcacgcnncncaagncnnccanggnnaccgagcagcnnngcgnngacaccancaggaacaanncnacccgcacncnnngncnncaggnagncggcacggcggaacccggngaagccccacnnncngcgcgcaanaancnnngggcggccagggaacnngaacnnggcgcggcgcagagcnncacgggcangcgcagcagngggggcccnggcccgaacagaaaggaggcccggaccaaaggccacccgagcacaggngcccngaggcgngccaaaggcaccc

SEQ ID NO: 178092 - DNA, 1037 bp, Zea mays
  Clone ID: MRT4577_94005C.1
attattgcattcaagatgccaagtacagagattgatacatcagcgaacaaattcttctcttactgggatcctgacaagaaggaatatctactgcaactgtacttcaagccaagaccgccagaagctaataaaccaccaccagctcctccggggactttgcctaatgggactggggttcctggtgctccaacaaggccaccggcgcaagcccctccacccctgccacaagcttccaccgcccccgcctcatgcacctgtctcctgcacccatgggaatgccccctaggattcctccaccccctatgggtggtgttcaacctccgccgcctcctccaccgccagttgcaaatggtccgcggccaatgattccaccgccacctaacttcactcctggagcacccccaccacgccctccaatgcatggttttcctgggcaacaacagcagtagttaagtgcttagcaacgtcagtaattgacgggcggcaaaagtttcacgcttgcttgtgttgccttatgttttccaactcgaaactttgaatgttatcataggcttacatggtctctagactatactcggatttggtcgaaattgcaagaaattgagttacatcaaaataaaaaaaacaaaggaagacaacaattaaaaccatcaaaatggtgaaagtgcaatggagtcagtacttgtttgaagaagccacatggtaagtggaagtcacgataggaagcaatatccatatctcttcgactcaagataactagaagccattgttttgtagcaaagtttagtttgggttcaaagggatagctaggagggaacgaaaattgctaatttctctcgattttgattttcaatgcataacacctattttggttaatctcagggcacattttttccccaaaggggaggttggtcatgaccctatcatgatagtcatttccatactcatcatgagaattatatgcatttgaatctcaatttgtttaattatgtaatcatatgtacttttattttattaaaatgtcatgtttttatgtc

SEQ ID NO: 178093 - DNA, 356 bp, Zea mays
  Clone ID: MRT4577_94006C.1
ggccgcttttttttttttttttttgttttttttttttttttttttttttttttttttttttttttttatttttttttatattaaactttttattattttaaaggttagggggtaaaaggaaacaccggcaaaaggcccaaagcaaaaggcccaaacacataaaattgtaaagtggaaaaggtaaaaaagggaagccaaccccaagggggccatccgaaaggggggactgggtcttctgttccggcattgaaaggcaggcacacccctggacaccttccaattcggaaaccgcagagatggtcacattaaatttggataaactgtccgttgcggaacccggcaaagttccctggccc

SEQ ID NO: 178094 - DNA, 283 bp, Zea mays
  unsure (1)..(283): unsure at all n locations
  Clone ID: MRT4577_94007C.1
ctttcctaaatttaactatagcctttacattatctctactaggtacttttatatntcgnncccacttaatatctactctcctctgcctagaaggaataatactatcactatttgtcataacttcaacatccacattaaactccaactccataatctccataaccatncccaattaccattcnagtttttgcagcctgcgaagagcagttaggtttagccttactagncaaaatttcaaatacttacggaacagactacgtacaaaacctcaaccttctacaag

SEQ ID NO: 178095 - DNA, 715 bp, Zea mays
  unsure (1)..(715): unsure at all n locations
  Clone ID: MRT4577_94008C.1
agcaaatttntaggcagggttaaaaaaaatcctcggtctgtccatgccaaatcacaagtttaaagtctggcctaggccataatcattctcatgtgggctacagtaccgctgtatgtggaatgtggatggagcaagggttcagtggttttttcggtttgtgtgacaagttatctttaatgcaatactcaaggactgtcttacccccaacaggtcgagtttattttaggagatcaatcaatagcctccataccggtattgcttgctactatttagataattgataggttgaaaaatctttcatcaaaccgtgtcagtgaaagaatattgcaatggcaattgccaactcagttactcagtaacaaatagggatccttccaaacacatgccctacctttctaatataggcagtggtagcgctatatttagcaatcagcatgtaatagcatgttcgggttcagatatactgtttgtgaaataagcttttgaacagatgttttggacatcttgatacctaaatcttatatgaggaaaattcataatcatatactgagggggggggtttcccccctacatctgnntgtttccccccattctgcttgctggccaggggacatatacaaaaacacgactttatgaaacacgncctgtgtgaccattttccaatgatattaagacatttatttgtactgccatttgtccctgtattgntattctg

SEQ ID NO: 178096 - DNA, 353 bp, Zea mays
  Clone ID: MRT4577_94009C.1
agacatgaaagaccgcctggccatatggttttttttttgatatagagccactagtggactagacaaagctagagtacccacttgaggtcccaaaccccacctcctaatcagaaccatgcaggatgctcgaggcaagtaatgccggccgagacacaccaaccgatgacagacagactcctcctctatggcgtcacagcttggcgagcccagatctgaagcaccataaagcactgcacgaaccccggaagaaagatgatgtagctgaacagaacacgagctcaagaagggaagggttcagatggagcaatgcccgcacacatgattgtggatacgatggagatgccatcgacatg

SEQ ID NO: 178097 - DNA, 337 bp, Zea mays
  Clone ID: MRT4577_94010C.1
cccacgcgtacgaccacgcgtccgcctacgcgtccgaaaaaaaaaaaaaaaaaaaaaaaaaaaaaaaaaaaaaaaaaaaataaaaaaaaaaaaaaaaaaaaaaaaaaaaaaaaaaaaaaataaaaataaataataaataaaattaaaaaaataaataaaaaaaataaataaaaaaaatataagctattatcaagatctactaaatagtaatattttggtactattatcaatgtctatgtatctgtatatgctcatattcttgatgctgaattgtactgaatgatgttgcttgaattcaatcgtgttactgatgatattgcctattcaatagatgcat

SEQ ID NO: 178098 - DNA, 284 bp, Zea mays
  Clone ID: MRT4577_94011C.1
gctggctaaatcttactcaaggggggggattcctaaaattacatcatgtattgtgtccatatccatgccacagttccaagcactttcactttcccacaacgcccaacaatcatattaacaatatggtaccaccacgttcatccacggacaaaggttgcagcgtacatcttataacctgcacctaaatggctttatacttttaactaccaaaagtacccttctacactacaccaataggaccttatttcaacaacccacaccccatccattctacatttccccca

SEQ ID NO: 178099 - DNA, 188 bp, Zea mays
  Clone ID: MRT4577_94012C.1
aacggaccaatccatgcgatgaatgggtctagctaaagctgctgtttatgatatgtgcttccgaactctgaagctgacgatccctaactttgatagacttggaatacggaattcacctagttgaatggtattactctgaacctccggttaccaggacaccttaactctgacctgcgcaagcttgcagt

SEQ ID NO: 178100 - DNA, 2020 bp, Zea mays
  Clone ID: MRT4577_94013C.1
accccattgggtacctcgaggccccccgggccggccgggtaacagcagtcagcagcagggttctttcttgtcacctggagctggacctgacgatggcataccatctcatctcttcaccactgttccttctcgcacaattgctcgccgtcgccgtccctctccttctgctcctgcttcaccaccgctcatcaattcgccgccgtcgtcgcagcagcagcagcagatcggccaagcagggaggacagctcctgccgccttcgcccccggcgctgcccatcatcggccaccttcacctcgtcagcgacctcccgcacgtctccctccgtgacctcgccgccaagcatggtggggacgacggcctgatgctgctccgtctcggcgctgttcccaccctcgtcgtgtcatcgccgcgggccgcggaggcgatcacgcgcacgcacgaccacgtgttcgcgtcgcggcccacgtccactctcagcgacgagatcctgtacgggtcctccgacatcgccttctccccctacggcgagcactggcggcaggccagaaagctggtcaccgcgcacctcttcaccgtcaagagagtgcactcgtaccgccgcgcccgcaaggaggaggtgcgcctggtggtagccaaggtgcgggaggcggcggtggcgggcacggccacggacatgagccttgccatgaacacgttcgccaacgatatcatcagccgcgccgtgtccggcaagttcttccgggcggagggccggaacaagctcttccgggagctggtggaggccaactctgctctgttcggagggttcaacctggaagactacttcccggggctggcgagggcgttaggtttccttagcagaaggctgttgtttctgcgcaacaggcggcgggtccaggagacgcacaggagatgggacgagctgctcgaaaccatactgagcgaccacgagggaagaaggggttctgtctctgtggacggtggtggtgacttcaccgacgtgttgctctcggttcagacagagtacggaatgaccagagatcatctcaaggccatcttggtggacatgttcggtgcgggcactgacacgtcatccttggtcctagagctcgccatggccgagctgatgcgcaacccacagcagatggccaagctacaagctcaagttcggaggcacacaccggaggggcaggaaacggtggaggaagagaacctatccgacatgccctacctgagagccgtggtgaaggagacgctgaggctgcacccacctgccccgctcctcgtccctcacctgtccctggcggactgcgtcgtcgatggctaccacgtcccctccggcacccgggtcatcgtcaacgcctgggctcttggcagagacccgggctcgtgggagaagccagaggagttcctgccggagaggttcatggacggcggcagcgctgctggcgtcgacatcaaggggaaccacttccacttcttgccgtttggagctggacgaaggatttgccctggcctcaactttgggatggctacggtcgagatcatgctagcaaacctcgtgtactgcttcgactggcagctgcccatgggcatggaggagaaggacgttgacatgacggaggtgtttggactcacggtgcatccaaaggagaagctcatgcttgttcccaagcttcctgctactgctgcacctactgcaactgctcgtcaactccatcctccaagctgctgacgatcgaaggaaaactgcatgcagcgggtgtagaggacgagcacgtacgtacgtacaatgcacatgccaatggtgaagtgaactacactctacagagatatagatggtttggagtttggattccatgtatatatatatctattattatactaggaaaagatgtccgagtgttgctatcgtacgggtcatgtaaactatgttaatcttatgtgtgtgtttacttatatagtaataaaaaaagctattttgtaaaaaaaaaaaaaaaaaaaggccaaaaagcggcc

SEQ ID NO: 178101 - DNA, 2379 bp, Zea mays
  Clone ID: MRT4577_94014C.1
gcattgtctcgcctcacctcgcctccccccagccgccgccccagcgatccgaaacccctcttcggccccttccccactccactccactccactctcactctcactcccactcctcacgcgccgccgcctccaaatgccggcgcttcacccccaccgccggtccttccccattcccctgctacttctcctatcgctcttcgcctcctcccctctattcttctccccgagccccgcagcaaccgccgtcggagattgccctctggattttagctgggcaaatttcacactagctgcggcagcctgctctgacccaacgcagcgggcggcgtgctgccgctacatcaatgccttcgttgccatctccattgcccgctatgccaatgccaccggcaggctgggtgtccctcctgcctttgctgagatctgtctcagctccgtgtccgagacattcaagctgcgggggatccccaccgacgccgacgtcttctgcggtctgggccccaagataagggtttcgtatcagtgcgctgggcgggataccgtgttggaaatgatgcagtccccgaacttcaatgacgttatcgggagctgcaggggccctctgtcgctggatatcacctgcaagacttgcttgaattatggcatcgtgtacctccatcgcctcatcggttcagacgataatgtcggcctcagcgtgtgccgcaatgcggtttttgtaacccttgccactcaagggggtattctttcatatgaagatatcgtcacgtgcttctttggtgtccagggaatcaccacatttccaggaccggcatctgtcacatcgacaccagcatcctctccgaatgtcactgttgattctccagctccaaggatcaagagtcttccacagaagcaacaccagcactaccggattacagttattccagggataggaatcggtgttatattgtttgctgtgctgctgcaaatcgtcttagcggtactgattcgaagaaagagcagggaattgaagaacgccgaatttcccgctcggaatccagataacacatttcactacaatcaatcctggagatgccccgaaggccaatcaccaatgttccaaaggtttagctacaaagaaacaatgaaagcaacagataatttcagcacagtcattggaaaggggggatttggaactgtctttaaagctcaatttaatgatggctctatagctgcggtgaaaaggatggacaaggtttcaaagcaagctgaagaagagttctgtagggaaatggaactcttggctaggttgcaccatcgccatctcgtgaccctcaagggcttctgcatcgaaaagaaagaaaggtttcttgtgtatgaatacatggcgaacggaagtctaaaagatcacctgcactcatctggaaggaagccattaagctggcagacaaggctgcagattgcaacggacgtggccaatgctctggagtatctgcacttcttttgtaaccctccactttgccatagggacatcaaatcgagcaacattcttttagatgagcatttcgttgcaaaggttgctgattttggccttgcacatgcatcaaggaccggagcgataagctttgaagccgtgaacacggatatacgaggaaccccagggtacatggaccccgaatatgtggttactcaagagctgacggagaagagtgatatatacagctacggggtgcttcttctggagcttgtgaccggacgtagagcaatccaggacaggactaacttggtggagtgggcacagtcgcacctctcgtcgggagcggtctctcctgaacttgtagacccgaggatcaggggcgctgttgacgtggaccatctgcatgtggtggtgggcatcgtgcagtggtgcacccatagagaagggcggcagaggccctccgtgaggcaggttcttcggatgctctcggagaggctggacccggggaacggcagcttcggcgagggcatggaagacgcggagggcggcttctatccccggagcagcaggtgcggcggcgcacatcaccggaacgagctggtcccatacggcggcggtgacatgaggtctctgcattcctcgtcgagcacgaccaggtcctcttactgcagccgcagcatgctgctggagagcgggcagactcaatcgcccccagaaacccagtgatgaatgaatgaatctagttagttcataggcaacttgttggtggttgctgttatttattattatttgctgtttgtttgttttgtaagggggaaaaaaggaattgtcaagtggtcattggaaggaaccagtggcggcagtgaatgagcaaagcagcagcacatgttccatgtggttgttggtcaaaggcccctagggcc

SEQ ID NO: 178102 - DNA, 644 bp, Zea mays
  Clone ID: MRT4577_94015C.1
tcatcatcaacgcgtgggctcttggcagagacccgggctcgtgggagaagccagaggagttcctgccggagaggttcatggacggcggccagcgctgctggcgtcgacatcaaaggggaaccactttccacttgttgccgtttggagctggacgaaggatttgccctggcctcaactttgggatggctacggtcgagatcatgctagcaaacctcgtgtactgcttcgactggcagctgcccatgggcatggaggagaaggacattgacatgacggaggtgtttggactcacggtgcatcccaaggagaagctcatgcttgttcccaaagttgctcgtgtactgcaactgctcgtcaataattccatcgtccaagttgctgatcgaagggactcgagatcgatcatgcatgtatatggtttatttggagtagaaaactgcatgcagcgggtgtagaggacgagcacgtacgtacgtacaatgcacatgctatcgtacgggtatatatgtatgtattatactaggaaaagatgtccgagtgttgctatcgtacgggtcatgtaaacaatgttaagcttatgtgtctttttacttttatatagtaataaaaaagctattttgaaaaaaaaaaaaaaaaaagcggcc

SEQ ID NO: 178103 - DNA, 595 bp, Zea mays
  unsure (1)..(595): unsure at all n locations
  Clone ID: MRT4577_94016C.1
gccgcgccgtgtccggcaagttcttccgggcggagggccggaacaagctcttccgggagctggtggaggccaactctgctctgttcggagggttcaacctggaagactacttcccggggctggcgagggcgttaggtttccttagcagaaggctgttgtttctgcgcaacaggcggcgggtccaggagacgcacaggagatgggacgagctgctcgaaaccatactgagcgaccacgagggaagaaggggttctgtctctgtggacggtggtggtgacttcaccgacgtgttgctctcggttcagacagagtacggaatgaccagagatcatctcaaggccatcttggtggtacgtagataaatatatataaatataatccatatttgatgcatgacatgacaataatgacaggcatcatcctgcgcaggacatgttcggtgcgggcactgacacgtcatccttggtcctagagctcgccatggccgagctgatgcgcaacccacagcagatggccaagctacaagctcaagttcggaggcacacaccggaggggcaggaaacggtggaggaagagaacctatncgacatgccct

SEQ ID NO: 178104 - DNA, 305 bp, Zea mays
  Clone ID: MRT4577_94017C.1
cattcttatagaggttggaagcgaaggatggtgttgtttatgcaagttgaaacaatgtggggtctgtcaaaggggggagaaaaaaaaaaaaaaaaaaaaaaaaaaaaaaaaaaaaaagggcgggcgatataaaggaatccaggggtacgcgctcttgcgtgtgggggccctctttttggtttggggggccctgattttttttgctgggcggcgggtactccttgggggggcggggattccctggcgtggcccttgttaatctggctgggggttgcggcttttttttgcgttgggggcgttttaaa

SEQ ID NO: 178105 - DNA, 209 bp, Zea mays
  Clone ID: MRT4577_94018C.1
agtgaaaacgctgaagcatgctcattatgtcctagctcgcgttccacttatgagcacatacacggggcttttgagtttatatgactggtacatgtcacgatttgcccgtagtgaaccataataaagggcgagggagcggtgcccataaaacaacacctgcccatacctacggtgtctttctaaggagaggtggcgccataggcaataaa

SEQ ID NO: 178106 - DNA, 429 bp, Zea mays
  Clone ID: MRT4577_94019C.1
tttccctcttgccgtctagcagagctcgactcgattctggccttcgcggaatggacggctagccttgggtgaccaagtgggctagctctttggggtccacgaagctgacgactgtgggcatgtgtgtggcgaaggttggtcacattgcaaccactgctgacgagaagacgaagtcgcggaaggagacttacaggagttccaggactacgacgagttttaggtgtgggctggccgatacccccaatcagctggctgtgaaggtcctatcttatactgctttgaacttagcactgacatttacctgtctagttggtgactatgcggatggctttgactctgcgatgtaatcaggctatactctgtaatgtcaatattcgagcactgtgcgacgatgagcatttatgggatcagctgggacgtgaagtctga

SEQ ID NO: 178107 - DNA, 926 bp, Zea mays
  Clone ID: MRT4577_9401C.1
atgaacagcctggacgacggctgcctcatgcacatcttcagcttcctgagcccaatcccagataggtataacaccgccctcgtttgccagatggcgcttccttgcatgccaccctcggctatggctgcgtgttgagaggccaatcagagatgcgatggagcctggagtttatcctgatctcgaggctgctgtttctgctgctaggtctatttctcgccccccccccctctctctctcaagttctcattgtgcacaatggatgttatggctgatctccatgtaccttgttgaaggccgggtgacaccattcttattgcggctggtggttcccatgttgcatgtaacatccaaataaagaagcctatttgcataattggcgggggcgatcttcctgatgacactgtattgacctgctcacgtggcttcgacaacgcactggagtttctatcaacatgcaagattgcaaatctgactattagagcagaactcggatgctgcttgctgcatcgaggcggtagattgaccatccaggagtgtctgctgcagtgcgagcaaaaccctttggaccacctgtccttcccaataatcagcacagcgatagagtacgatccattctcatccctcaaggagcaagggcacggagtaacggtcgtccgcaccaggatcgaaggaggcgcgagggccgtcaggacgaacggcacactcgcgctgcgccatgtgcgggccatctattcccgcagctctgttttcttctggttcgaagtaggagagaaagtagaagcgcctgtacactagcaaaaaaacccgtgttcgttcttgtatgtcagtgttggtatcaccctagcgtgcgtttggtgaactcggacggctgcctcgtgtctgttgtgatctctttataattataataccccactgatgtttgaacc

SEQ ID NO: 178108 - DNA, 194 bp, Zea mays
  Clone ID: MRT4577_94020C.1
ggattgtcgtgttagaacataaacttttcgtacgcatcattttccctttcaaacaattgtccaaatattcgagttgaacatgtatttcaataatcagagttgtaagcttgtgaacaatgtgaatctgtgaactttctgtcacctatgattcatgtatatgtggcttgtaatctgtgcctatacattaatatgct

SEQ ID NO: 178109 - DNA, 922 bp, Zea mays
  Clone ID: MRT4577_94021C.1
ggcctcttttttttttttttttttcacaagatacggaaattcttgacataagctacacattactctaccctgataccaagcactcagatccactcgttatgtgcgactcatctaaagatggttgttgtactgctggtaatccgcaggcgtcgccctcggagcagccttctgatcagaaacactgttgtgtcgcgtctcaggctcgtcctcaaactcgtacatcggcgcgatgggcatcacatcgcggcgcatgatgtacttgccgacataccacggcagtttctgagtgtagtacttggcgtggtcgcggttgccgacgttgaacacggtgtcgagctcttcgagcgtgagcgctttggtctccggcagcaggaagtagcagtagacccagccgaagagattccagcaggcgtaccagcaaaaagcgccggtgggggtgaaggctgtgcgcagggcgggccaggagaaggcgatgatgaagttgaagccccagcaggtggcggtggcgaaagacatgccgatatcacggatgtagagcgggaaggcctcagcggagtaggtgaagggcacggggccttcggagggcgagtagatggccatgaagcaaaagatggcagcggcgatggagccaagttgggctgggtttgctgggtcgccttcagtgggaggaccgcctccgatcaagaagctgaagccaccccagaacaggcagatagccatcagtgggaaacctgtcaagaggaggttgcgacagccgaaggtatcgatggtgtaaatggcaggaatagcgaacagccaattgacaataccagtgcctaaggaaactagcagagcattcgagtacgagaatccgcctgagacgaaaatatcggtcgaatagtacgcgatcacgttgacgccgcagaactgttgcatgaacata

SEQ ID NO: 178110 - DNA, 281 bp, Zea mays
  unsure (1)..(281): unsure at all n locations
  Clone ID: MRT4577_94023C.1
cactcccccacnncccccttattctacaaaatggccgccnccncccgcacgattgtctttatacaaaccatagggcctcacatanctactnatnccaccccaaccnttcctctctcttattttataaaancctctattctaccctacatcntcaccttcttccacaacaatatatccaaaaacatccttcaaccctattccatctccaaacactcctttcaccaaacttcatcttaatcctttnntacctntcntcccctctctcntatccctcntattcc

SEQ ID NO: 178111 - DNA, 358 bp, Zea mays
  Clone ID: MRT4577_94024C.1
gaaggaaggccggcccgcgcatgcgttcgcaggcccaactacccaagcctcggttctcaaccacgcagaaacctcagacttcagggccgctgcctttctatccatcccttcctcgccgcggcggtcgcccgctatcacataaacaatggcgaacgctggggctctgcttcggctcagctacggtgacaacgccaccatcttcttcacccctgagggagatggccctaccactgtcactggacgtgtgtctggccttacgcttggcccacctgggttgcatgtgcatacacttactgacaccaccaatggctggctgagcactggaccacactaacattcttcctgcaaggcacctggg

SEQ ID NO: 178112 - DNA, 196 bp, Zea mays
  Clone ID: MRT4577_94025C.1
gctatcacaaccttcaccatgccgccgccagacgctctgcagccaccacaaccacgcaaccacatggccctgcggcaggcgtgtgacgctagaccttgcggctgccgctgcacagaccctccccgctgacgacgatgaccagcgcgactacacacgacaaacatggcccccgatgaacactcaggctactaaacag

SEQ ID NO: 178113 - DNA, 1019 bp, Zea mays
  unsure (1)..(1019): unsure at all n locations
  Clone ID: MRT4577_94026C.1
cctcgaggccggccgggccgggatatctaatcacaatacgacagacacagactgggaatacggtgtggcgggctggcggctggctttgggcgtgcagcaggtgtcggctagccgctttgggcgtgcggcggcacagcggcaccgacgcaccgtggtgggctggtgggcggtggcactgcggcagctgggcgcaggcactgcggtctgcggcagccgggcgctggcactgcggtctgcggcggccgggcgccgacaggagcagccgagccctccggtcctctgcgtctcctccggttgcttcagagtctgcctttagtgctgctggccgggttgttgatccatatcgcaatcgccttgaccctgagatggtacaagcacttatatgcactaaagattggattcgtgcatcaagaaaagattcagtaattattcattctattttgactgatctaaaaccttcggaaacaattcatatggattttgaggaacaagatgctgatagtgatcccgatgtcatgaatgattatggtgagctttaactgagtctgccactagttatggtgcttaattcttggcaatatgtttgtaaactttagtaacaacgtatggagcacgagcagcttttgtattttgtgtgctgtgtgatcaaactattgtatggtgtatggtcgtatggagcaaacctgtctgccggactgccactattgactattgtattttgtatggacgtatggtgtatggagtagcagcagctttaactgcttgtgtgcaaaaaaaaaaaaaaaaaaaaaaaaaaaaaaaaaaaaaaaaaaaaaaaaaaataaaaaaaaaaaaaaaaaaaaaaaaaaaaaaaaaaaaaaaaaaaaaaanattttttnttttttatccattgtttaagggggatttnaaaaaaatttggggggggttattattgattttggatttgtgtaaaaatatttggggaaaaaatgtgtaattttttttttttgtgtgaaaatttatttgtttttaatttttaa

SEQ ID NO: 178114 - DNA, 1777 bp, Zea mays
  Clone ID: MRT4577_94027C.1
ggggagcgagcggccgcgctcctctgcgctgtgctcggtggctcggctatcagcttctccagttctccttccggcgcaccgtgattcaggcgttcagcgccacgctgccgtcgctcgctcccaggcctggcgtcgctcaccgagtctcagcgttcagcgccacgctgccgtcgctcgccgagtctcaggtgtcagtcaggaaccgaaccaccgattgtgatttgtgaagaactgtctattgatttactgaagatgtcaaagagtggaggcaagggatgccatccccgtgccaaatcaatgccagccgagaagcaactaggtatttcaagtttcctgcctgaacctccaccgccgccaccttctgcaaaaggtagcaccaacggtgccaattctatttcaggggccaagagggtattatgtgcaagtgacagtcagggggttccagggtcttcatctacagcagcaaagagtgttactggtggtgatgctagtctaccagttgaaccaaggattgggattgatggtactaacacacaagtaataatgcctgctactggtgatgctagtgcaccactcgatgatgacaaggaggagggtgaaggacatgcaattggtaacaatcaaaaaaggcagaaaagatgcacatcttgggtgtgggaatactttacgaagaagaatatggtcattgaggagaatgggaaaaagtacgaacaagtgtgggggcactgcaactttgcaagatgtaaggcaaagtatagagctgaatgcaaccatggcactactgggtttagcaaagtttttatgatcttactgagttgttgtccggaacttcgtatccaactgcaaatatattctatagaggtttctgtgagataaaggaactgcttgataaatggtgtgtggatgaagatttaactattagaacaatggcaatatctatgagtgacaagtttgagaaatattggagctgttctagtttgagtcttgctctagcatgctttcttgatcctaggtataagaagaagcttgctgaattctacatgagaaagttctatggtgactactaccaggtccgtcttgatgagttagttggtgctatgaagaacttgtttctattttatgcaagctctaaaccttcagcttccaacaatgatatgaatgcaaaccaacatgtcagcccaacagaacatttagctacacagataagtaccctattctctcacaaattgctcgtgatgtgatgtctatacaagtgtcaactgttgcttcagagtctgcctttagtgctgctggccgggttgttgatccatatcgcaatcgacttgactctgagatggtacaagcacttatatgtactaaagattggattcgtgcatcaagaaaagattctacaattattcattctattttggctgatctaaaaccttcagaagcaattcctatcagtcagccctgcatggatgatgaggaacaagatgttgaaagtgatcctgacgtcatgaatgattatgatgagctttgaatgtgagcctgcgactacgccgactagtcatgggtgcttaatgcttggcaacatgtttggaatttagataaatatgttgctgtgtcaatgtgtgttgtgtccatgtttggcaactgtgtgctgtgtgagataaacatgtttggcaacatctatatggagcagcagcagctgtgtgctgtgtactgtgtatttaaatctgaacagaactgtgtgttgtactgttgtgtgcgataaatatgttgttgtgtgctgtgc

SEQ ID NO: 178115 - DNA, 267 bp, Zea mays
  Clone ID: MRT4577_94029C.1
acttattaaattgaattgtaaaaagaaatgatagaaataaacataaaatgaacaaaaacgtaccttttgcttacctattcgaagcatgaaatgataagccctaacagtaactagcgagctgattaattagtcgaagaacgttggggcatttttgccacctgcaaaagggccatggtcttgtcctccacgtacttgatgtacatgtcacctgtggaaaagaaaagaaaacaattacattgcgaataatatatacgttatatacgtcgt

SEQ ID NO: 178116 - DNA, 1265 bp, Zea mays
  Clone ID: MRT4577_9402C.1
aaaaaaaaaaaagacgctacggagacgtgccccgctcgacagcccaccctccccctattcctccgggcctctcttttcatttcccatctctctctgcgccgtcccgtgctccctccgctagttctcccaattccttccccacctcctcggtcgtcgcctcccccagagagcaggagccgcctcgtccctgccggtcccgaccccgaccccatcccgtccgcgtccaacgccatgaatcccgagtacgactacctcttcaagctgctcctcatcggcgactccggtgttgggaagtcttgcctgctgctgaggtttgcggatgattcatatctggagagctatatcagtactattggagttgattttaaaatccgcaccgttgagcaagatgggaagacaataaagctacagatttgggatactgctggccaagaacgctttaggaccatcacaagcagctactaccgtggagctcatggcattattgttgtgtatgatgtaactgaccaggagagctttaacaatgtcaagcagtggctgaatgaaattgataggtatgccagtgaaaatgtgaacaagcttttggtggggaacaagtgtgacctggctgagaacagagtagtttcttacgaggctggcaaggcccttgctgatgacatcggaataccattccttgagactagtgccaaggatgcaacaaatgtggagaaggcattcatgaccatggcaggggagataaagaacaggatggcaagtcaaccagctgcaagtggtgctagtaggcctgcaactgtgcaaatgcggggtcagcctgtttctcagcaaagcagctgctgctcttgatcgtctgtctagatcacagtagtgtgattgtgcagcaagcgaaacttaaattggttgctccgtgtacattaagcctattactgtcccaaagaactcgatgttatctatcggatactggaagtctgtctatcgactgcaacgcttaagcagatatggcctgttttatctgcctgttcttattccagtgctaatgtgatgttggatcaaaaaaaaaaaaaaaaaaaaaaaaaaaaaaaaaaaaaaaaaaaaaaaaatacgaaaaaaaaaaaaaaaaaaaaaaaaaaaaaaaactcaaagggaaaaggtaaatattatatttaaactatcctaggctgtaattggttcccctctaaatgtttaatgaaccaccctgcttattccacacttacaagccgaaaattttgtaccagttacgaaataac

SEQ ID NO: 178117 - DNA, 304 bp, Zea mays
  Clone ID: MRT4577_94030C.1
ggtgaacacggcccctatttatgaaataaaaacatcaggccggggaacggagaagaacctacagatcagtctctcaatccctatcaaaaacatatttgcgtggttgtctgcggcaggccaaagccaaggtctaatcaactgtacgtattagattggtccatacctagtgcaatcacgtttatgttcaatgaaaaagcaaccgattccacattaagcatagttggaaaactggaatagggcgaccatacaaagaaggcctcgttctattattttcaataacaagttttgaatgggcttggaaaaa

SEQ ID NO: 178118 - DNA, 231 bp, Zea mays
  Clone ID: MRT4577_94031C.1
cttcgaaccggagaatctcaacccaatggccaggatcaagagcggggatcaatgggttcggaaggatctggaaggatgggggacaggttggtcctgaagagtgaccatgtctagctcgtccccgtgaacgacccgttcataagcaccgactacatgagctacatgttcaagtccgacactgtgcacggacactggacgcaccatgaaagtcctgggaaggactccaaaccc

SEQ ID NO: 178119 - DNA, 2054 bp, Zea mays
  unsure (1)..(2054): unsure at all n locations
  Clone ID: MRT4577_94032C.1
ccggccgggccgggacttggccccataaccacaacctcttctcccctgtttcctctcgtgcgttctccgcaggagcgaggagggctcgcggcagcggcagggtctccgggtacgtcgtgaatgagaagagaaagggttggaggaaatatttccgaatctgtttccattacgattttggtggcgtagaatttggtttcaaacgcgcagttatgcgcacactagatcagatccgacttgttctgcggcattccgattgcttggcccttttttgccgattagttatctacgtaaaccatggtcggcataatgcgtttttgtttattgccttggtctctgaataaaggtagttattatttggttcttgggtaatggagtgccattgaatggtccctgcatagcgtggtattggttctgtagatttagatgaatcacagtgtcaagagagacaagattcacctgaatcctctgctaaatctgaaaaatagagatgatccaaggtcctctgctgaaaatgcagttttcttgttaataccaagcattctgccgtttcctattgagatagatattctgttactgatttttaccctagcttggtctcctctcctcctagtgtttttgttccagaatctgtagcaaatggctgacggcgaggacatccagccccttgtttgtgacaatggaactggcatggtcaaggctggttttgctggtgacgatgcgccaagggctgttttcccaagcattgttggacgcccacgtcacactggcgtgatggttggcatggggcagaaggatgcgtatgttggcgatgaggctcagtccaagaggggtatcctgactttgaagtacccgatcgaacatggcattgtcaacaactgggatgatatggagaagatctggcaccacaccttctataacgaactccgtgttgcgcctgaagagcaccctgtgctgctgaccgaagccccactcaacccaaaggctaacagggagaagatgacccaaatcatgtttgagaccttcaatgttcctgccatgtatgtcgccatccaggctgtgctttccctgtacgccagtgggcggggggggggtattgtgttggactctggtgatggtgtgagccacacggtgccaatctatgaaggttatgcccttcctcatgccatcctgcgtctcgaccttgctgggcgtgacctgactgacagcctgatgaagatcctcactgagagaggttactccttcaccaccactgccgaacgggaaattgtaagagaacataaggaaaagctcgcgtacgtggctcttgactacgagcaggagctgaaaagcgccaagagcagctcatctgtggagaagagctacgagctgcctgatggtcaggtgatcaccattggggcagagaggttcagatgccctgaggtcctcttccagccttccttcattggtatggaagctcctggcatccatgagaccacctacaactccatcatgaagtgtgatgtggatatcaggaaggacttgtatggtaacattgtgctcagtggtggcacgaccatgttccctggtatcgcggaccgtatgagcaaggagatcactgcccttgccccgagcagcatgaaaatcaaggtggtggcaccgcctgagaggaaatacagtgtctggataggaggatccatcctcgcctccctgagcaccttccaacagatgtggatctcaaaggctgagtacgatgagtcaggacccgcgattgttcaccggaagtgcttctaagcttaaggcccatccccacttcggctccatttatgtattcctttccagcgagtgcttttcagctactatgtttgagattgccagcctattgaggaggcaatgttgttggatttatattnttgtggctcactacaatgccatgcattgctccagctcctttccatgccaagtttgttgctagtggtgaaaacatcaaccccaaaaaaagaggttggaaattattaaggtacctaggatcatattgtaattgtacttgtgcgagtaacattattggttctctttgt

SEQ ID NO: 178120 - DNA, 276 bp, Zea mays
  Clone ID: MRT4577_94033C.1
ggaaagcacgcacgcgtgcatgagccgggacggaatatattgggggaccgactatttctctagtgcgcgggcgcccggccttaaatcagaggcagaaagatggaactggcaacggaatactagagtggcatatgttgatacaaaatgatagtttgacatgctacaaggaaacatttcatccaaggaaaaatttaggcttgcaacaggacacgggattcccgacagagtccgagctttcagagattaactggaagtccaatggacgagcacagcaat

SEQ ID NO: 178121 - DNA, 2023 bp, Zea mays
  Clone ID: MRT4577_94034C.1
cattgggtacctcgaggccggcctcgctgccgccgtacctcctgcgccctttcccacacaagctcccgaccgtgtcctccagtttcccgcccttcacgacggcgtcttcgtcgtcgtcgtcgtcgtccacgctgtcctcatccaacctaggcgccgccaatgccagtgccccgacgggcacggccgccgcaccctccaaccctgtcgcgcccgacaccttccagcagctgacgtcatcggcgcttctccggctgcaggaccccagcagctacctctccttccagaacctcctggactcgcagccgtcaacgcagtccattttcggcgcggcgggcggtggattcgggcaggcggcgtccagactgcacgatccggcgccgtcgccatcggatttagaggaggtgttggaggaattagttccgaatctttctccattacgattttcgtggcgtcgagcatcatctgtagcaaatggctgacggtgaggacatccagccccttgtttgtgacaatggaactggcatggtcaaggctggttttgctggtgacgatgcgccaagggctgttttcccaagcattgttggacgcccacgtcacactggtgtgatggttggcatggggcagaaggatgcgtatgttggcgatgaggctcagtccaagaggggtatcctgactttgaagtacccgatcgaacatggcattgtcaacaactgggatgacatgggagaagatctggcaccacaccttctataatgaactccgtgtggcgcctgaagagcaccctgtgctgctgaccgaagccccactcaacccaaaggctaacagggagaagatgacccaaatcatgtttgagactttcaatgttcctgccatgtatgtcgccatccaggctgtgctttccctgtacgccagtggacgtacaactggtattgtattggactctggtgatggtgtcagccacacagtgccaatctatgaaggttatgcccttcctcatgccatcctgcgccttgaccttgctgggcgtgacctgactgacagcctgatgaagatcctcactgagagaggttactccttcaccacctctgctgaacgcgaaattgtaagagacatcaaggaaaagcttgcatatgtggctcttgaatacgaccaggagctcgagaatgccaagagcagctcatctgtggagaagagctacgagctgcctgatggtcaggtgatcaccattggggcagagaggttcagatgccctgaggtcctcttccagccttccttcattggtatggaagctcctggcatccatgagaccacctacaactccatcatgaagtgcgatgtcgacatcaggaaggacttgtatggtaacattgtgctcagtggtggcacgaccatgttccctggtattgcggaccgtatgagcaaggagatcactgcccttgcgccgagcagcatgaaaatcaaggtggtggcaccgcctgagaggaaatacagtgtctggataggaggatccatccttgcctccctgagcaccttccaacagatgtggatctcaaaggctgagtatgacgagtcaggacctgggattgttcatcggaagtgcttctaagctctgggtcccccttcggctccattttatttattccttgagtgtttttcatataagctactatgtttgggattgcatgcctttgagcaggcaatgttgttgaatttatattttgggatttatattttgtggctcactacaatgcatacattgctccagctcctttccatgccaaatttgttgctagtggtgaaaacatcaaccacaaaaaagagaggatggaaattaataaagtacctaggatcatattataactgtacttgtcgagtaacactattggttctctttgtacatccatctctgagacatgcaattcatttggttggtttgctacttctgtgaattacttggcgctggtggttgcgacattgtcatcccacaagtttcaagattttgaatgccaccatcccttgcatt

SEQ ID NO: 178122 - DNA, 679 bp, Zea mays
  Clone ID: MRT4577_94035C.1
tggacatttgtggacttcccgattcatgatcttgacctgtcgaagtatattggtcacagatgccaagacgttcctcacaattatcgactgtatgctactagcaaccactatggaagcttgggaggtggtcactatacggcttatgtttatcatgaagggaaaaagggttggtatgatttcgatgaccgtcatgtgggccccataaccgaggacagtataaagacatcggcagcttatgttcttttttaccggcggatacaggaggatagcttagatacagttacagacatagattctgatattccaacctgaggaggcggtggaggcaatttttgagcccaagtcccggacagtgtatagtttcattggtttagggggacagttgtgcggcaatgccgcaacggaagtgagaaatagaacaggtggggaagagtttgtgcggcaatgtggttcagaggggggagataatttgtcgcggttccttccgttgcaaattcctttgttttttttccgttcccttttagcacctgtaactgatagcggtaaaattttggctaatggcatgtggggaagatatttcgtcccagattctcaacacagttagggttagttttggaaccctatttttaaggaatttctatttttctaagataaaaaaaaaaaaaaaaaaggggcggcc

SEQ ID NO: 178123 - DNA, 583 bp, Zea mays
  Clone ID: MRT4577_94036C.1
cggagcatgaagggcttcaaaatagcatgcaatctactaagctgatgttcattcaaagctcctccatgctcagcatgaccctcaataccctttgagaaccactcgttgaactgttcatggctgtcaaatagagtgggcatgatgaaatgaagaagtgcccataactcagccatattgttctgtattggtgtcccagtaagaagtagacgatttctacagctaaagctcagtaatgtcttccagcgctggctgcttgaacttttgatagcctgggcctcatccagtaccatgtattgccacttaacacgtctcaaaagcttctcttcattcacaagtatctgatagtttgtaataagaatgtggaagctagcatctctgcgatacaaacgcttggggttgatgttctttcgaagaatcatcctctctgggccccagtaaggaagtatctttaggtcagggcagaatctaatcaactcctcagcccagttattcacaacagatgcaggagccaccactagaaaggggccccatatgtttttgtcctcagccaaatgagacaggaatgccatagcctgaacagttt

SEQ ID NO: 178124 - DNA, 684 bp, Zea mays
  Clone ID: MRT4577_94037C.1
ccggccgggaccttccccgccgtgggacagtcagtcagtcaagatgagcatgcatccggcgcgtcaggcctatgtcgaggaggagaatggtgtgggcgatgccatggaggggatagaccttgccagtgtcccgctcgaccgcaaccatgccatgcccggtggaggaaacgcgtcggcttcttcgctcatggaggattttgatcgcaagcgacgagccgcccagttagttgtgcccacagccgaccgcgatgtcaaagcaaagctgcgttcgcgcggagagccaataaccctgttcggcgagggacctgctgagcgccgtgatcgacttcgcgctttgcttgcagaggcacaggaagcattgggcgaggatgcagcagacgtagacatgcaagatgcagaagagggggctggggacgagcaagaggaattctacacgcagggcacacaggcacttctggatgcgcgacgggaaatggccaagtattcactgccacgagccaaagaacgaatcgcatatcagcgtcgcgaggctactataccgctcaagacgcatattgagttccggaatggcatcaaggagcgactgaagggctttgaactctacggatcgcaacagcagatcgaccagtgagcattgtacgcgtttcgccaaatgggcagtacgtcgcatacggcacctggggc

SEQ ID NO: 178125 - DNA, 1830 bp, Zea mays
  Clone ID: MRT4577_94038C.1
catcaacaacacagatcgatttcgatctaaaggcaatggcgattgctgcattagagctgctctacgtgctgggaagcttggtggcgctacggctggcatggcaggtgctggagtggggctggctgagcccgcggaggctgggccgggcgctgcgggccgagggcctccgcggcacggcgtaccgcttcccggccggcgacgccaaggacgaggagcgtctcctggcggcggcgcgggccaagccgatgccttcgctctcgcacgcgatcagcgctcgggtgggcccgctcgtccacaacgccatccacgaacacggtaaaatttcggttgtctggatcgggcctaccccgaaagtgatcctcagcgaccccaagctagtccgggaagtgctgtccaagtccagcaagttcggggacttccagaaacccaagctgccctcccacttcatcaagctgatcgcccaggggctgacggttcacgaaggtgagaagtgggcgatccatcggaagatcatcaggtctgctttccttgtcgagaagctgaaggaaatgctgccggcttttactgcctgcaccggcgagctgatgggtcgatgggaggaatcgatggggtgcgacggcgcgcgcgagatagatgtctggccggagatgcaggacctcaccggcgacgccatctcccgcgcggcgttcggtagcagcttgatcgaagggagaaggatcttccggatacaggccgagcaaatcaagatcgccaacgagatgacaaacctatacatcccgggttacacctacctaccaaccaagccgaacagaaggatcaaggcaaacgcacgcgaggtcgaagcgctgctgagaggcatcatcaccaagcgggagaccgccatgaagaacggccatgccgacgacagcgacctgctcggcaagctaatgcagtccaacgttgaagaggcccatggaggcggaggaagctccaagccgatgatgaccatggaagacatcatcggcgagctcaagctgttctacttcgccgggatggagacgacctcggcgctgctcgcgtggacactgatcgtgctcagcatgcaccccgagtggcaagaccgcgcgagggaggaggtcctggaggtgttcgggaagaacgagcccaacatcaatggcacaaatagtttaaaagtggtgaccatggttctatacgaggtccttaggctgtacccaccgatcatagatcttgagcggcaaacgtggaaggaaatggagctgggaggggtcaggtacccacccggagtgacacttctgctgccgatactggccattcaccatgacccggacctgtggggagaagacgtggaccagttcaggccggagaggtttgccgacggcatatccaaggcgtccagagacacgccggcgttcttccccttcggctgggggccgcggatctgcgtcggccagaacttcgcgctgctggaggccaaggtagcgctggccatgctgctgcaacgcttctcgtttgggctctcgccgtcctacacgcacgcgccgttctccgtctccaccgtgcagccggaacacggggcgcagatcgtggtcaagaaaatttaatcattttattgtatgtacttattacatatagtatggtcatcctgtcgtgtatgcatggatttatgtcgcttctctctatagataaataaatggtgtgtctgaaaattaaattatatgctagttttacttttacgtgtgcacaaacttagtagatgtattgtcgtgctgtactactgtacaacagcacggaatattgtgatgacatatagcatttgatttggctgaggtg

SEQ ID NO: 178126 - DNA, 299 bp, Zea mays
  unsure (1)..(299): unsure at all n locations
  Clone ID: MRT4577_94039C.1
gatcccaacannctttcctttgtgggggccaggttttgggtgttccataataaactaattaagtacgatccttacacattacagggaatgaacacgctatactgcatattaattggggggaaaacgacacaaaggcgtgtagtagacaggtacacgctatacgtgcttgctcgctggggggggagagggggntctgcttatgttataggtgggtgcgctcgtgaccgaccacgctgggcttggtcgggattgtttctcggggccgcgtttgtttgggacaccttggtgttgggtccctg

SEQ ID NO: 178127 - DNA, 447 bp, Zea mays
  Clone ID: MRT4577_9403C.1
cccacgcgtccgcccacgcgtccgcccacgcgtccgcccacgcgtccgcggacgcgtgggcgactaggagagagcctggtgacatactacaaccaaccccttattgctggtttgttgtcattcgtggctaggacactgaactcatactggggaacacagcaatgggttgatcttgcgcggtacactgggttacagagaagcgaggaaaagcctcctgctgaggccactatgccacctgattcagcacatttggagggttgtacgacggaaggacatgattttgatgacagcagcaataacaccaacaaatcgactggtccgagctagtgatttgattacttcacagtggctgcagatcacatggcctattttcatagacaatgaaagtggctgccttcctgctcttgggatcacaaggaagcggaaatttgaggaaatattagtcac

SEQ ID NO: 178128 - DNA, 959 bp, Zea mays
  Clone ID: MRT4577_94040C.1
aacatgaatggatccctctatgactttctgcacttgtccgacgactacagcaagccgctgacctgggacacccgcgtaaggattgctgttggtacagcttgtgctctggagtacctacatgacgcgtgttcacctccagtgatccacaagaacatcaaggcatccaacgtcttgctcgatgctgacctcaaccctcacctcactgactgcggccttgcatacttctatgaggatccaagtcagagcctgggaccagggtacgatcctccagagtgcacaaggccatcaggttacgttatgaagagcgatgtctactgctttggtgtcgtcatgcttcagctgttgaccggccggaagccctacgacagctcgaagcctagagcggagcagtccttggtcaagtttgtcggtccacagcttcatgacaccaacgccttggaagctctggcggatccaggccttcgtggcctatatccaccgaaagcattgtcccgtttcgccgatgtcctctcccgctgcgtccagtcggatccagaactccggccatccatgtcagaggtggtgcagttgcttctccagtgcgtccagcgcacaaccagcaacaggaggctgggtggccaccgcaccgtctcgcagcgaagcgacgattctgattggtgatgctctgtttctgcctccatcctgctgctgcggcccagttgctgaaactgtctcagaacagaaccgtaggtgtgcggcccttggcatgccgctgtacaaaagaaaatgctttattagacaatctggttgctcgaacagtgtggcaacaaataagtcggttgatttaggtaaaggtaaaagcagattgggtgttctagtgagtagtgacattgtatttgtactcataaacttaaaaacatatgaccagctaatttttaaaaatatataaaccatcttagaacaaaagtcgacgcggccgc

SEQ ID NO: 178129 - DNA, 163 bp, Zea mays
  Clone ID: MRT4577_94041C.1
atgtgtgaggcaattttttactagtgccacgaaacaacccattcccatggcccgttccccacaggccatctttaatttgataaaaaacgggttccaaccaatttctgaccgtgagcgggggctaaaaaaataacttggtttttaccgagatccgtctctaaaa

SEQ ID NO: 178130 - DNA, 328 bp, Zea mays
  Clone ID: MRT4577_94042C.1
ttaaagcccccgggggggagaaaaccttggtgccgaaataacatgtttacaaggggcaatttcgcccccccagaaggtttgcccctccaaaatacaatgccccccaattcaacggggggggcaaacccatcctgggaggcctcccaggatttaaattggagggggaaacaaaaaccttttttttggcgctttttttttggaccagttcggacggtttttcttccccacgttcaggatccccttttgacaggcctgttttcacgaccactggcacttttccccatttaagctttggggggattttatccacgactttagccacagggaa

SEQ ID NO: 178131 - DNA, 164 bp, Zea mays
  Clone ID: MRT4577_94043C.1
ttctggatagcgtccggcgagggggagggtgttccaattacagcttctatctttgctacaaacaagtcgtgctccactagggatcctatccagattctgtggcgacaccccccgcccagtgtccagcctcaacaatcttccaatcctcctcctgtggtgcaggc

SEQ ID NO: 178132 - DNA, 271 bp, Zea mays
  Clone ID: MRT4577_94044C.1
agcgaggacaatacacagtgcgctactgacatgtctatggtcaccagtatactgggccgtatgcatcatcacccgcagcagtatcatcattaccattaagggctgcggctcgcgcactgtcaccagagcctgttccggcatggacgctgtcgcattggacccgttgagcatagatatcgcggagctggggcagctagtggatactatcacgcttgtggtgtacatgttccagtgctctaggcgtgcagatgttcatgacggcattcatgta

SEQ ID NO: 178133 - DNA, 422 bp, Zea mays
  Clone ID: MRT4577_94045C.1
cggacgcgtcggctgacgcgtcgggacacctgcaggaagctccaccacctcctccatgagagagatctaccaaagcatagcctccttcctgctgacgggatcgccgtttgggtcgcagcttatcacataataggaggtcgcacaacaccttggcaaatgattaagtctcagcagctgcagctacggattcacgatatgatgagtctgaaagggatatcattcatcagcagcaaggtgataatgcatgaatccactgcagtcgcgtcatcatcatcatcacctgcacgtgcggctacaggccagcatgttgctgcccatcgtagtcccagcaagattgcggcgtcctcgtggactcattaccgccgtctgcactgacagacgacgaatacgcctcagatggccgtgagtccgaatcttcgacc

SEQ ID NO: 178134 - DNA, 822 bp, Zea mays
  unsure (1)..(822): unsure at all n locations
  Clone ID: MRT4577_94046C.1
aatttcaaaggttaggggcaaggaaaggagaggtaccaccaccacggcacgagaaaggctggcgactctagtggtgtagtggtacgctagcagccagccgcagtatctctagtatcgtagcagcgcggattgctcttgccgttcgcacttcgcccctcgcttgctcaccaccatcatcatcctcgcagcctttttccccaacagatttcgtccgggctcctgcaaaggggcgccgaggctcttgagtgctgtgcgcggcggaagcaagcccccgtccggttgtcttcttcctccgccagaggacaaggggcggtcacaagggatcacccacagggccgccgtgcggtgcggtggctgccttcataagcgagggagggaagcagtcctgtggagtgcggtacagaggagcggcgtttcttctttcttcttcctctcggcgacggtgcgaggccagcaaggggagatgtcggaggtgaagccggaggagatcagccacccggccatggagcagctgcaggggttcgagtactgcatcgactccaaccctccatggggggaggccatcatactgggcttccagcactacatcctggcgctgggcacggccgtctggatcccggcggtgctggtgcccatgatgggcgggaacgacggagacaggggtgagggtggtgcagacgctgctattcgtcaccggcatcaacacgctgctgcagtcgctcttcgggacgcggctgccgacggtcataggcggctcatacgccttcgtcatcccggtgatggncatcgtgcaggactcctcgctcgcagccatatctgacg

SEQ ID NO: 178135 - DNA, 519 bp, Zea mays
  Clone ID: MRT4577_94047C.1
ctttctttttttttttttttttttttttttttttttttttttttttttttttagaggtttaaaaagagaatttattaatataaagggggtgatatttattaagaaacatagaaatgatggactgataatgaatgtttttatgcacttgttaaattttgaatttattttttacttaggttaacaaataattgtgtgttattttaattgatggttttttggggttataaagaggaaggggttagaggaactcgtgataagctattgtatttggttttggttgcatatagatcttaaattcttgcatgatattttggacatagggctttaagttatggcatgtagaaagttttttcttacgggtgtgtgttagtggtatgccagaatgggcttccaatggtaatgatgggtaaagttttgacaatgatgggctgcctatctgtggatttattagagtgaatgtttttcttgtatgggaatataccattaggcctggtaaaatgggatacatccggtgggtcc

SEQ ID NO: 178136 - DNA, 245 bp, Zea mays
  Clone ID: MRT4577_94048C.1
ccagatttgagaactcgacaccatgtaggtgcttatcgttgcccttgctctccttgcgctcgctgcgagcgtcgcctccagtacaagcggcggctgtggctgctagacaccaccgtttcatctacctcctccgttctatatgtcgtctccgttctatctgtcgcttagcagcagtcgacgctatggcaataccccactcgatcaccgcatctatgcccgtgccagtagttctgatcctgctgcgt

SEQ ID NO: 178137 - DNA, 858 bp, Zea mays
  Clone ID: MRT4577_94049C.1
aatcaaaaactatcctctcgtcctatctcttcccctatccccgagaaaccccgaaacctccgcccgcccgccaatggcgaccgccgcccaggtcgccgccacatttctctccttcctctcatgcccccgtcaccacaccgctccctccccttccatctccttcctggcgacccctgtattgcccgcctcgctccgggccgctgccgcggggggccaaaccctcaccttccgctgccggggccgtcgcatcgccgtcgttgctcagctccctactatgattccagagctagctagcggggagaagaaaatccggtggtcatcgagggcggtgcgatcatttgcaatggcggagctggaggcacggaagatgaggtacccaaccacaggcaccgaggggctgcttatgggcatactcgttgaaggaactagtgacgcggcaaaacttatgcgtgctaagggaatcacattgctcacggtgcgtgacgcggcagcaacaatacttgggaagtcagaaatgttttacttcagtcctatgcatccaccattgacagaatctgcacagcgtgcccttgattgggctgtaaacgagaaactaaagtcaggtgaggacggagaggtaacggccaatcatttgttcctggcgatatggtcagataaagagtcagctggtcataaggttctggcttcccttggttttgatgatcagaaagccagtttgctggccaaaacggcaggcgaagagaaagcaatgagtcctagatagcaaatcaagcagccggtttataattgaacttcccggaggttatttatgtgttcacctggcaacatctaagcactagttggcggctggcggtacac

SEQ ID NO: 178138 - DNA, 303 bp, Zea mays
  Clone ID: MRT4577_9404C.1
atggctcttggcggctgaaagcatgggattttttaccaaggaagtgtggttacagggaatgacttcataacaagtgtgctgcacagacacgtgactaagcaggtttgacttcctgcgatcacagctgaacgacatctcgtcatttaagaacatctacagatacgcctttgattgctcaagggataaagttcagagaagccttgatattcgcactgcgaagtctatgctagctctgctgcttatgatgacgtggccactttgtgcagtatgataccagtacctggagtcatcatagtatcgtgt

SEQ ID NO: 178139 - DNA, 119 bp, Zea mays
  Clone ID: MRT4577_94050C.1
tcgttcacgcgtccgagtatgcagtgtgacctgactatttgccagacacatagccttgtgccgtacatgaaactcttataggtactatgaaggtgtagcggtctatcgtggtgcggagg

SEQ ID NO: 178140 - DNA, 281 bp, Zea mays
  Clone ID: MRT4577_94051C.1
cttccatgcatggccatcaatatggcattcattcatcttatgagtagacagggtgagtgcatattattacggggcacgtactacggaagcagagacgcgcgcatgcatgcacgcggggtacgtagatcgtcgtcgtcgccgcttatggccggggaacctagctagcaagctagctagggtccctggggggccaatcttcatgtacctgagggagagtcctctttccagtccccacctaatcccacatggcgatcttcatttcactcttttcgcccggcctc

SEQ ID NO: 178141 - DNA, 576 bp, Zea mays
  Clone ID: MRT4577_94052C.1
gaggacgcacgcagccgcgacccatggggacctgacccgaccctcccgaggccggcagcacttatgctatccgcctgcgcctcccggcgaacaccgggacccatcacacgcgccaggagaagacatgggctaccacgatcggtgccagttgtacagccggacatagtgggtgctccaacagtgggaagaatgcgcgccttaacaggtagggctaaactttagagttaaagcggataacgagctgtactttatcaaggatgggccacctttcagagtagagctccagtactaggaggaagtaaggtaggatacctaggagcaggtacactgggaccgaaagggaagaatgtagcttgggagagcaagagcggatgttccaatattgataacgatggcgacacagttgcaagagacgtagagctgtaggaccctgaagaaaacataggagctaaattggacaaggcagctgcacataaaaccaacgatcttgctggagatggtacaaccacctctgtggtccttgctcaagagctgattgctgacggcgttaatgtcctagcagctggtgctaatcct

SEQ ID NO: 178142 - DNA, 307 bp, Zea mays
  Clone ID: MRT4577_94053C.1
gcgccatcttccttgagactcctgcgccatgagagcgaagtggcggaagaagagaatgcgcaggctgaagcgcaagagaagaaagatgaggcagaggtccaagtaaaccatcttgtgcacccacgaagcctgcgggagcagaagtaagggatgctgaagcccggaacaagtggttggactgtatgctgctgtcggtaataagtctcagtagacccggaatgtcacctcgccgagatcagctgggaaaatgactaccttcctcacaaccacaacagtccccgctggccctctgccctggacctttggc

SEQ ID NO: 178143 - DNA, 2621 bp, Zea mays
  Clone ID: MRT4577_94054C.1
aaagattcctttttaatctgttttgttaagtttgttaagggtttgtttggttagaaggggattgaagaaagcttcctttttaatccattttgttgattgagtcgcattcccgaatccatacttgaacatcaggatctcatatgcgaggtatcatctcgggacactggaaagactatggttgatgcttcattaggagagataatgaccacatgttagaagattacctagcaaaatgaagactggtacttaattattgttgtcacatgatgtttttactcgggagatctggaggttggcgaacgcccggggagaaactattcaaggaactattatttagtcaatttgtttcttttggagaaactttgcacagttgagggatataacttagtttttcaagcctgtccatctccagcagatggtttagttgggaaagaatcttatgctcaggtacaaattggtaggcaaattctaggcaaaggagttgggttaacatgggaagaggccaagctctagttatacatggttgttcagatgtgacagcaatgactaatgggacaaatgtcgagataggtccaaaaggccaagaaccaccatcaattagctctggcaatattagttttgttgttcgtgtattggctaagttattgcagatggcgcttgccttttgcttcagctgatcaagatctagaattcgaattgggccatgtgaagcatttcacatttcacgatctgcaaagtgcaacggacaattttaattccaagaatatattaggtcaaggaggttttggaattgtgtataaaggctgtttgagaaatggaactttagtggcagtgaagagattaaaagatcctgatgttaccggtgaagtccagtttcaaacagaagttgagttgattggccttgctgtgcacaggaatctcttgcgtttgtatgaattttgcatgacctctaaagaacgattgcttgtatatccatatatgctaaatggcagtgttgctgaccgcttgagaggaagctatgcattctaaagggtgtctttccacgtcagccaaagaagaaggtggaagggaaccacaagacctactaccacacaaaggatattgcattcctcgctcatgaccctttgatcgagaagttcagggagattaaggtccatcgaaggaaggttaaaaaggctgttgctaagaaaaacagggatcttgcagacaggctgttgaatcggccaccaacttacaagcttgataggcttgtccttgaaaggtatccaacattcgttgatgctcttcgtgacttggatgactgccttacaatggtgcatctgtttgcggcattacctgctgttgacggtgaacgtgttgaggtcaaacgaatccataactgccgcaggttaagccatgaatgcttgacatttatttccgtgaagggcatatattatcaggctgaagttcaaggacaaaagatcacctggctaactccgcatgctcttcagcaagtattaactgatgatgttgatttcaatgtgatgctttcttttctagaattctatgagactcttctaggatttgtgaacttcaaaatctatcattcaataaatgtaaattatcctcctattctggatccacgtctggaagctttagctgttgagctctatgcattgtgccgatacatgtctgctggttccagaagaatgattgggaattcacaaactgacgaagtaatggaagataaggatgagaaaagtaaagctgaggaagtaattgaggaagagaaggttgtgaagaataaagcaagctcaaaagcagatgaatctgagttcagattagcacagcttcaacatcagctcccaaccaatgaacctggtgcactgatgaatcttgtagaagaatcaactgccgatgatgcagatgatgatgatactaaagattgtaaaggtttatttaagaacttaaagttctacttgagtcgagaggtgcctagggagtccctgttatttataattccagcatttggagggactgtttcatgggaagtgtgtttcgctccattggagccagcagagaaaaatttaccctttcagctgaaaacttgcccaacacattagaatatattgaaggcgaggttgaagctcttgacgaagttattggtagccatgctgacttctgcgccctggtagcttctcggggcacagctaccgcttttttgaaagctggttgcacgcatggaaaaattgttaataggcccaactacagcttatcatcatcagatctgatagatattccaagcctagctcgaagtatcggaaatagatttatgacccagatttgggtaaatggcgggcggaaaatggcgggtgacgaagctcgaagtcatcttaagccggatgacgaagctgaagtataacaaatctgaagtatgacgaagctgaagcttgatagttgctacaatattctttcctgtaaaaattctggagagacttttgtaatattattatgtaaaaactcatgtaaatttgtacataccttgtaatatattttgtttccgctatctgtgtacaatctgctttgttgtggacgaaactcttttttgagccgaaggcgaaaaacatattccctcttttcgt

SEQ ID NO: 178144 - DNA, 652 bp, Zea mays
  Clone ID: MRT4577_94055C.1
ggccggccgggcccgggttctcctcacccacttagctaatcataactagtcatgtacgcccaccagagacaacaatggtcatgtagacgtagcttcaaagtatgagaagctccacggccccgatggataggaaggacaggctcttctctccgaacctgatgttgtggtccaacccgtggatcccgccgttgctagggcgtcgcggaggaacgcgcccttcgtcgtaaggctgacattcaaacatccaaccgaacaaagtggcgacagggagctgatgaataagtgtccaagcagtgcccgtactcctacctcaaaggcacgctgtccggcaactatggcttccacccggtgggcctctcggacccacagggcaccggatcgcattcatctgagcccaagatgactgcgctatgatgaggtgatcaacggtcgatacgccatgctgggcgcagcgtgggcgccatcgtacccggagatcttcatcaagatggggatcatccccccggagaccgcagctgacgtggatcaagatgggcgtcatcccgaccgcgaggatctacaactactgggacgactcctacacgatcttctgattctacatggcgatcatgtgcttcgtcgagtaccgccgtactcagtactggtacaaccc

SEQ ID NO: 178145 - DNA, 1247 bp, Zea mays
  Clone ID: MRT4577_94056C.1
gttgaggtcaaacgaatccataactgccgcaggttaagccatgaatgcttgacatttatttccgtgaagggcatatattatcaggctgaagttcaaggacaaaagatcacctggctaactccgcatgctcttcagcaagtattaactgatgatgttgatttcaatgtgatgctttcttttctagaattctatgagactcttctaggatttgtgaacttcaaaatctatcattcaataaatgtaaattatcctcctattctggatccacgtctggaagctttagctgttgagctctatgcattgtgccgatacatctctgctggttccagaagaatgattgggaattcacaaactgacgaagtaatggaagataaggatgagaaaagtaaagctgaggaagtaattgaggaagagaaggttgtgaagaataaagcaagctcaaaagcagatgaatctgagttcagattagcacagcttcaacatcagctcccaaccaatgaacctggtgcactgatgaatcttgtagaagaatcaactgccgatgatgcagatgatgatgatactaaagattgtaaaggtttatttaagaacttaaagttctacttgagtcgagaggtgcctagggagtccctgttatttataattccagcatttggagggactgtttcatgggaaggagaaggagctccatttaaagaaatagacgaagatatcactcaccagcggctgaaggatgtgtttcattctattggagccagctctgaaaaatttacactttcagctgaaaacttgcccaacacattagaatatattgaaggcgaggttgaagctcttgacgaagttattggtagccatgctgacttctgcgccctggtagcttctcggggcacagctaccgcttttctgaaagctggttgcacgcatggaaaaattgttaataggcccaactatagcttatcatcatcagatctgatagatattccaagcctagctcgaagtatcggaaatagatttatgacccagatttgggtaaatggcgggcggaaaatgacgggtgacgaagctcgaagtcatcttaagccggatgacgaagctgaagtataacaaatctgaagtatgacgaagctgaagcttgatagttgctacaatattctttcctgcaaaaattctggagagacttttgtaatattattatgtaaaaactcatgtaaatttgtacataccttgtaatatattttgtttccgct

SEQ ID NO: 178146 - DNA, 258 bp, Zea mays
  Clone ID: MRT4577_94057C.1
atttctctttttttttttttttttttttgtttgtggggggccacaaaaccggaatacttttttcttttgaatgacaaaaacacgaccgagcctccactagaacaacaagggggggatggggtgctaaaagtgctttatttgacaggacagcacacataccacaccgggtagatctacaaaatggcgaaaatggccagccccttgcacttgaccaccgactacacgaggccactgggggaggggggcgaccgaaagcta

SEQ ID NO: 178147 - DNA, 385 bp, Zea mays
  unsure (1)..(385): unsure at all n locations
  Clone ID: MRT4577_94058C.1
agatctccgacttcgggctggcgaagctgatgagcccggagcagtcggggctgttcacgacgatgcgcggcacgcgcgggtacctggcgccggagtggctcatgaacgcgcccatcaccgacaaggcggacgtgtacagcttcggcatggtgctcctggagatcgtgcgcgggaggaagaactcaaagaagcagggggaggagcatcagatggcgagcgggtccagcgcgtcgtcgtcgtcgtcgtcatcggagagcagcggctacttccccgcgctggcgctggagctgcacgagcagggccggtacgaggagctggtggacccgaggctggaggggcgcgcggacgcggtgcangtggaacgtgtggtgcgggtggcgctctg

SEQ ID NO: 178148 - DNA, 1143 bp, Zea mays
  Clone ID: MRT4577_94059C.1
cgacccagcgtccggtcctgcgtggtttgagtgtttgaccacggcagcacgagcagcccgctccactcctcccctgccgaagcaccacacagcagaagcgaaaactgcaggaaggccaatcgggcctggcaggcatgcttgcccgctgccgcaggtgaggcgacccgcagccgtccgagacgcaccccggcgcaagcgcgcatccgccatggatccggcgtccgaggagctcgagcgccgcagccgctatctcaactcgctcatccgccgtactaagctcagcgccacccctgctccccctcctcagccggagccggagccggagcacgaggtagcgccacagaatccggagccggagccggagccggaccgcggttgggaagcgcgaggaggccaaggcggatccagtggtcgttgaggaggagaagcgggaggccaaagtggcgggggacgggaaggggaaagagatcaaggggaaggacgacgggggtcccaaggaggacaacagcaggaaggtgtcagtgcgggtgcgcgcggccgacatgcccctaccgctgcagcgccgcgcggtccggctcgcctacgaagccatcgccgccatgccgcgcctcgacagcaagcgcctcgccctcgcgctcaagaaggaatttgatacggcatatggtccagcttggcattgcattgttggaacaagctttggttcctatgtcactcactctctgggcggtttcttgtacttctccgtcgacaaggcctatattctcctcttcagaaccgctgtcgagccattagcccatccgcgatgaggggccatgaaacagtctactagctagcgcattctgtattcgacatttaactgtagaagggtaaggagagtagaacgatcatcgcccccaccccccaatgcaaatatgtagaactaatctgctgtagcttagttttttccatgtactgtgcactaatcggccatgtggaccttaacattagctttcagagttgtagcttgactcaactcagttcttccgcgcgaggggaatttactttcgcatcttgtaatgccttgtagccttgttcgcattggaatcagtagatgcatcctgatggatgctccatatttcatctgcgcttctaactaaaaaaaaa

SEQ ID NO: 178149 - DNA, 418 bp, Zea mays
  unsure (1)..(418): unsure at all n locations
  Clone ID: MRT4577_9405C.1
ccgcgcgnaagngggactgaggaccacccgcgggcagcatttgaaagttttgaaccaggcccaaaacccagagggcacagacaagggcgcgccgctgcagagccaccacccaacacgaacataggggaggacgacgagcacancnncgcgccgagggggccgaccgcagcgaggatccccgacggaaggaggaacagcagcaaccgcagaccgagcgcaccggacgggcgaggctcactgcaagccatggacaacgcctgcagatggacagagaaacacgagatgggagtcatcgtcgaaccgcacacagctgccgagaagaaaaacccctgaaagcacagggtgacccgagacggcacccaatactgcggaaccacagacaccaacatctcgcagacggtgcacggaaaaaataccc

SEQ ID NO: 178150 - DNA, 1106 bp, Zea mays
  unsure (1)..(1106): unsure at all n locations
  Clone ID: MRT4577_94060C.1
cattgggaccctcgaggccggccggggtagtttgaccacgacgcgaccagcccccgctcctctcctcctcccttgccgaagcaccccacagcagaagcgaaaacggcaggaagccagccggcgggctaggcaggcatgcttgcccgctgacgcagctgaagcgaggcgacccgcagccgccatggatccggcgtccgaggaactcgagcgccgcagccgctatctcagctcgctcatccgccgcactaagcttagcgccgtcccggctccttctcagccggagcccgagcccggggtgacgcaaccgactccggagccggagccggagtccgcggtggagaagcgcggggaggccaaggcggagccagtggtcgatgaggaggagaagcgggaggccaaacaggccggggacgggaaggggaaagagatcaaggggaaggacgacgggggtcccaaggaggacaacagaaggaaggtgtcggtgcgggtgcgcgccgccgacatgcccctgccgctgcagcgccgcgcggtccggctcgcctacgaagccatcgccgccatgccgcgcctcgacagcaagcgcctcgccctcgcgctcaagaaggaatttgatacggcatatggtcctgcttggcattgcattgttggaacaagctttggttcctatgtcactcactccctgggaggtttcttgtacttctctgttgacaaggcctacattcttctcttcagaacagctgttgagccactagtccgtccgcgatgaggggccatgaaacagtcaactagctggcgcattctgtattcgacatttaactgcagaaggttaagaggagtagaaccactatcgccctcggtgcaaatatgtagacctaatctgctgtaactagtttttccatgtactctgcacagatctgccatgtaaaccttcaactttagcaatnggagctgtaactngactcccctacttcgcgcgtgtttagatgccagggaactcccacgcctggggacgctgcttgtgcctggagcaacccatttgcatcctgtattgtgttgtaaccttagtcggacgtagagatttgacattcaatcatcggttctgatcg

SEQ ID NO: 178151 - DNA, 1033 bp, Zea mays
  unsure (1)..(1033): unsure at all n locations
  Clone ID: MRT4577_94061C.1
gnaagcaccacacagcagaagcgaaaactgcaggaaggccaatcgggcctggcaggcatgcttgcccgctgccgcaggtgaggctacccgcagccgtccgagacgcaccccggcgcaagcgcgcatccgccatggatccggcgtccgaggagctcgagcgccgcagccgctatctcaactcgctcatccgccgtacataagctcaaggccacccctgctccccctcctcagccggagccggagccggagcacgaggtagcgccacagaatccggagccggagccggagccggagaccgcggttgggaagcgcgaggaggccaaggcggatccagttgtcgttgaggaggagaagcgggagaccaaagtggcgggggacgggaaggggaaagagatcaaggggaaggacgacgggggtcccaaggaggacaacagcaggaaggtgtcagtgctggtgcgcgcggccgacatgcccctaccgctgcagcgccgcgcggtccggctcgcctacgaagccatcgccgccatgccgcgcctcgacagcaagcgccttgccctcgcgctcaagaaggtaatgtggcttggctagtctccacagtggcataaaacaaatcttattgtgaaggggtatacaatcagacatccagtttggttaaagtgacaacgactaatatgcaatcagcaagcaggaatttgatacggcatatggtccagcttggcattgcattgttggaacaagctttggttcctatgtcactcactctctgggcggtttcttgtacttctccgtcgacaaggcctatattctcctcttcagaaccgctgtcgagccattagcccatccgcgatgaggggccatgaaacagtctactagtactagctagcgcattctgtattcgacatttaactgtagaagggtaaggagagtagaacgatcatcgcccccaccccccaatgcaaatatgtagaactaatctgctgtagctagtttttccatgtactgtgcactaatcggccatgtggaccttaccatt

SEQ ID NO: 178152 - DNA, 242 bp, Zea mays
  Clone ID: MRT4577_94062C.1
tgtttgttgatagcttccttcaggagcgcgggcacgggcaaaattgacgacttgggcttcacgctacacggggccaccgagggctacggttacatgaggacgacgacgcacgctaccggctgccaccgcgggaaccaaggtcggtcgtggcttcccgagcacgtcaggagcccgagcgcgagctggatacccagcatccgtgaaggaggacatgaggagggttgaagaggttgttgtccttt

SEQ ID NO: 178153 - DNA, 250 bp, Zea mays
  Clone ID: MRT4577_94063C.1
tgtacacatgtgagaactgggtacagaatgtacggatctggcaggccatcgatcgcgaggtctggatagcactgagcgaggatgcaacttgataaggtaatgggctcaagtacgtcgtacttggtgattgagtcgatctcaatactcatcaccgttactctgatagcctttgccaatgcctacatagcagacttggacatggcaacgctgtacgctgacacacttgcacatactatgtgaccatagcctt

SEQ ID NO: 178154 - DNA, 313 bp, Zea mays
  unsure (1)..(313): unsure at all n locations
  Clone ID: MRT4577_94064C.1
gggttgtgtttttttttgttttttttttttttggagttgaatcgtgctccccgtacatttatggggagagtttcctttcccccgtatatggaaaaactgttaaaaggaccgttggagcttttgctcatcccatagtacacagtatatggtgtattggtgtgggtgggggagtggccacccttggaactagggttaaactgattacaacccttggagctactgttagctgttgctcancccnggggactatactgtatgagtttgaacatggcgtatttacaaggtagatattgaactcttttttacaaacacc

SEQ ID NO: 178155 - DNA, 187 bp, Zea mays
  unsure (1)..(187): unsure at all n locations
  Clone ID: MRT4577_94065C.1
ttattaangcatactccaggctattggacaccattttggctagcgtggtttttctttttttttaaactacttgaaaatggttgcatacaacttggcgaaaaggcacacacatactactactacttggggacaccatccttttgtgcacaaggccttgcaggcttgaggagaaacaaaacgcaccccc

SEQ ID NO: 178156 - DNA, 935 bp, Zea mays
  Clone ID: MRT4577_94066C.1
gcttactcaaaacttagatcatatgcatttatgtaacagtggtcctcatttttttcttgcagggaagttaatgattttgtatgtttccttgttcttcaggttcacctggagctcctctactacccttacgctaagcatgaaggggttcctaatccttttgctaatcagattcaactaacttcattggagaaggttctcaaaaccgagtctaatggatatgatattaatcagaggaaaaatgttattatgagaggagtcctttcggtgacggtcatatctgcagaggagttgccacctatggacattggtggcaaggctgacccatttgtggtcctgtacttaaagaagggagaaaccaaaaagaagacgagggtttttatcttgcccaatctcagagttctgtagggccatatacttttttcaaggctctcatagttcagtattgttgcaggttgtgacagacacgttaaatccaatatggaaccagacatttgatttcatggtagaagatgcactgcatgatttgctcatggtggaagtatgggaccatgatacatttggaaaggattacatagggaggtgcatcttgacactgacgagagttatactcgaaggtgaattccaagatacctttgtcttgcaaggtgccaaatcgggaaaactaaacttgcatttcaagtggacgccacagccaatctatcgtgatcgtgacagggatcagtgagacttgtaaacgaaaaaggccgataaacacttatccccaacgatgctatgtatattagccgttctgtatttacacaaatcccacggttcttgtagccacgtgaccaaaaagagatcaacccaccgacctgtattttctcctttgtgatgcaagtcagcaagtgcatggacctgtatatttgagtcgtgaatgaataggaaatgctgttacg

SEQ ID NO: 178157 - DNA, 291 bp, Zea mays
  Clone ID: MRT4577_94067C.1
aataaagtggccagagctagcttgcctgttcgcgctgctttgagaacccgtcggcgctggagccggtcgtggaggaggcgaggtcctggacgacttcggtggcctcaaggactacgtctttcggatacatcgttttcaaggatcggcgacgacctcgtcgccgacgccttcgaggacgacttgcccaacctgatgaatatagacgacagacgtgcttcgttcgcatactttgttgcggggctcgatttcttgcatggggatccatatgatcccggccaatgtgcccatata

SEQ ID NO: 178158 - DNA, 359 bp, Zea mays
  Clone ID: MRT4577_94068C.1
ttttcttctacccctagacagctactgtgtgtttacttcatacaatttcgggagggccaaccccctccctcaccacctccctcccattctgtctccttctcactcccatactattccataccgaggctcatttatatcaaccactacatataactacttcagcttcaagcaacgctagtaacgtcacaagcaataagagaaaattaatacctctcaactgcactataaaatatctacctgcccttttccactctatacctcatgccgttcactcgatccacaaaaacattgccccaaattacattgctggtctctacatttgacattcatttttagctaatgtctcaatacaaatcacc

SEQ ID NO: 178159 - DNA, 319 bp, Zea mays
  Clone ID: MRT4577_94069C.1
accggcggaacatacaggtggttcattattcattcagggggaacaaaggggctcagccccggcggtttattatattattacgatgattattattactgcatgctaactagctcgcactagtcaggaaacttttggtttcgggagggtgcgacgcccagcatttattggggacgagctagcaggagccatggcccatgggtatggacgccggcgcctagcaagggaggttgggccctgggtcgacgcggagctgctggcaatactgcttgtagtagccgacgcgcgcgttcatttgggcgggggttggtcccgttgcact

SEQ ID NO: 178160 - DNA, 450 bp, Zea mays
  unsure (1)..(450): unsure at all n locations
  Clone ID: MRT4577_9406C.1
cgggnccggaaacccggggtggaccacacccttccggggcccttcttgattggtggcctaatttgattcggttggttttggggggaccaccagggtgggttgaccgaagaggaaaaattttttccttggaatggttgtttgtttttagattaaaataccaaaatttttttttggttggaataacaaatgatttttgaaccattttttcaaaaaaaaaaaaaaaaaaaaaaaaaaaaaaaaaaaaaaaaaaaaaaaaaaaaaaaaaaaaaaaaaaaggggggggccgttttaggggttccaggtttccttccccttgcttgcaacttattagtttttttttggggtccctaaaattaatttaattggccgcggttttaaaccgttgggcctggaaaaaccttggggtacccaaattaaatggcttggaagaaaatccccttttcgccagtt

SEQ ID NO: 178161 - DNA, 199 bp, Zea mays
  Clone ID: MRT4577_94070C.1
cctctctcgcatcctcatcctctcgagctctactccatcccctcgatctgtagtcgcatcatcatttttcaggcggccatggacgccagcgcatcaagagccgtcggagaatgcgaagaatggctcggccgttcgcaaggccttcggaccgatgaagaagtcggtgactaggtccttcaaggccgtgctgtatttcccc

SEQ ID NO: 178162 - DNA, 188 bp, Zea mays
  Clone ID: MRT4577_94071C.1
aaagtcaacccacccgtccgcccttttctttaaattaaaataaaaaaatgggggggcccaaaaaccccgcgcagtatatttttgctgactacttaaatgaccgtccgccgcatgcttcagtgcatacaacgacttccacatctgttgctgtctttgatcaatcaactgagctacagactgtctaattt

SEQ ID NO: 178163 - DNA, 459 bp, Zea mays
  unsure (1)..(459): unsure at all n locations
  Clone ID: MRT4577_94072C.1
gccgcggcgatagaacaagggcgcggcggggcggnggggtatgggnngggcggcgcgngcgccccggnaggtactccngcgcccctccgggcttcnccngccggcgtccggggctagaatggnggggtggcgtgnngcgcttatcggggctcttctcgnggngncccgcggcgtgctcngatatttaaaaagnncgtcntccgcgncgccgtcaccttcnccgngcncgcgcgccgcngggccgtgnccgcctttgncgtcgtcttcgcacacnngcgccngggccgccccctcttcggcttcggnggcttggcttgncgcctcttctttgtcggggcctggtttggggccttgtctctgtgtgntgctttctgtggtngtnttgctgcnntngctgtgtnntccttcgcttctgcnntgngcgctttgngccttgcttcgtntgttgtgcctgtgggt

SEQ ID NO: 178164 - DNA, 1613 bp, Zea mays
  Clone ID: MRT4577_94073C.1
gtgtagttgctacatactaaatacagcaaactactataatcgaggacataaatagtcacaatccagcagcaactgtatctaattggcaacgcctgctcctacacaccacaccacagtagtttgcacggtcgtttcagctgttgagcactagtagcacatatgtacctgttagctcctgcagatcacatcatgctagtctcccatcagccgttgagcactattagcattggtcggtcgtttcagcaaaccaagaacctctgtagaccacaccatcgtcgtcgttattcctgttgcgccctgctccccagcgcctagctcccggcgcggcggcgtccctctcctcgctcggcaccacgctccctagctcgacgccctaaatgaaatcaacccaacagttgcttctcctaaatatagttgtaccaagactacaatagacaatacaatatacaatgtgttccattcgtatgatgtttgtagttgctacatactaaatacagcaaactagtagaatcgaggacataaatagtcacaatccgaatatcattgtcctatagcgcccaaaatcttgggtgccaattctcataatctgagtcatctgtgtcatcactttcagatgatgaagctgctagatcttcaacgcgcaatatgtatttagcaactgtatcaggtaacagaggtcgtagttttacttcatggtgtctattcttagggcaatggtgtggagaagcacatgtgaggttgctcagccaaataactgatctgcaatgcgcacatagtgctctatttgatacaaatttccatgacgcgcattcttcatacttagtgtggaaggactccttccagctaaagcttggataatttggcactgaattcgtgctgtattgcacaccagatacaggaatgttgttgcaactcaaatggctgaggccaaagaaaatcgagtaattcatcttccacagtttgttgtcatttgccgctgaattccaagaccagcagacaagacctgctgctaccaaagaatgcatgtccaggaaactgaagatatggacaagtatatcttgtggtatgtgtggtgaacctgaaatttgttggactcttgcacgccttttatgtgcaataatagagtgcttgaactctgaaacagcctgcgccttcttttgctttggtagagcaacttctactgcttggagaagaacattagctgtgcttactgcatatcctgtctgcacatcgggaaggaggcgaaacgcgagtagcacgtcggaggcaacgagcgcctgggctgccttagggaggtccgcgtatccgaggcgcagcagcgctgcaagctcgccgcaggccgtgggatagtcccagggccgcgacagcgcagccccgatccccatctccctgtacctctccgccgcacccgtctccggccgacgcggctgccgccgcctcaccggcatggctgctgagcagaggcaggaacccgatgtgtggggccgtcccttgtggatcggagccacgatccgccactccgctctccacctcaccgtcaccgtcgtcgtgtccacctctcaccggccacaagccaagccaaaacagctgaatagcctccacggacgcgtggg

SEQ ID NO: 178165 - DNA, 695 bp, Zea mays
  unsure (1)..(695): unsure at all n locations
  Clone ID: MRT4577_94074C.1
tccggtggagggagcagaagtggaaggatgcagggggccaccatggagaagggacgcacggcacagtgcgtcaggttctacggccggtgcaccatttctcggatgcantagtgccaagaccatccagcacgagagcacgtaggttattatgattgaggtggtgaacaccaacgtggacgccgcgtggtacgctggctagcgcatggcgtacatttacaaggactaagaccaagagcagcgagacccgttacaggtgcatttgatgcaaggtgaccctcccgcacggatactcggtagtacaaccgcgccaagttgaagcacaacctgccgcctgagatcatggggcgcaaggtacgagagctcatgctcccgaacattgtttactgctctgattttgatggagtaaaggcgtactatcaatggccatgcttaaatcttgtctctgagcttaaaacgccatgatgcagccatccatagcattgaccatgttcgtgtaccctgcatgaagtttctaccaataattacgctgctagacacggactgaacatgctgctgctttagttactgctataaacagcgacttattattcagacagatagactggagggcgctatggtcctttagctacacatctagatccgttgacggaggaccaattgggcgcttgtaacaatgatggccttagacgactgct

SEQ ID NO: 178166 - DNA, 799 bp, Zea mays
  Clone ID: MRT4577_94075C.1
cattgggtacctcgaggccggccgggggatatgctgtaagcacagctaatgttcttctccaagcagtagaagttgctctaccaaagcaaaagaaggcgcaggctgtttcagagttcaagcactctattattgcacataaaaggcgtgcaagagtccaacaaatttcaggtacgtgataggttccttttccatggtgtaactgcatcaatgtaactctgtttagtgtgaacttgatatcttgagcccatttagctcttgagcatatttggtgactgggaaattactactcaagctgtgtcttctattctgtgctgcagtaccatagatgccatacacacgggccattttgttaatttattcttccaagttctatgagctgatttcagaatttctgcttgatggtgtttttggatggtaatcatgacaaaatcatgaagtttggctttaagtaaaagcttattaaatgttaacatgttgtctcgtaaaagtaaaaccatatgcatcttcagacgtcctggtgttttgattcattttaccaaaaagacagcttggccatttcgaattaactaactagttggcttaccgtgcagcctcctttgaagatttaggaggattacaagccttaagacttactgatacaaggcattgtgatgtgttattttcaatcctcttgacaggttcaccacacataccacaagatatacttgtccatatcttcagtttcctggacatgcattctttggtagcagcaggtcttgtctgctgaaggtcttggaaatcagcggcaatgacaacaact

SEQ ID NO: 178167 - DNA, 134 bp, Zea mays
  Clone ID: MRT4577_94076C.1
tcggacaaacgaccagccactccttcagggacgcgggggggaaaaataatccactaccctaccttccgaggggaaaagggaaccactgcgtcgtggttgacataaacgatagcagcgccgcacatggccggatc

SEQ ID NO: 178168 - DNA, 460 bp, Zea mays
  Clone ID: MRT4577_94077C.1
ggcaacaggggaaacccggccccaaagatggttttgcccccaaaaaaacacaatatatgggccccaaaaaaacattccaaaatcatagtccaacgttccaaaaagggggggccccaggaaaataactaacaacattttagggggacatagaaacaacatatttagccttgttaattaaggacccccgcaaaaaaaggggggcccccaaaaccaaaaataaggggttttttttttccttttgggccgaaacaaaaacaatcaacactcatttgatcccccaaaattaaacagccaaaaaagggggggtcccaaaatccttgacccccaaactttagagaggcccccaaaccctttttcgcaaaaaacaaaatttaaaaagggtgataggccaaaactgctaggaaaaaattccaaaagggtggtgcaagcgtttattactgcaacaacaccaggggaccct

SEQ ID NO: 178169 - DNA, 222 bp, Zea mays
  unsure (1)..(222): unsure at all n locations
  Clone ID: MRT4577_94078C.1
ctctgtcatggccaattctaagcatgggaagccggatntccactgctataggatcaatgtttcgaacattgtactcccattagnggactgcatgctgatgctgccatcggacacggacaacccgccatacatggggcggatggatcgtatttattcagacgggcacaacaacctgagggtgccgttgcacttatactacctaccctagtaaaccaatattct

SEQ ID NO: 178170 - DNA, 424 bp, Zea mays
  Clone ID: MRT4577_94079C.1
ttttttttttttttttttttttttttttttttttttttttttttttttttttttttttttttttttttttttttttttttttttttttttttttttttttttttttttttttttttttttcaaaaaaacccccccttttttgggggggggggggggggccggtaaaacctcccttgcccaaggggaacaacgggtccagaggggaaaaaacaacccaacccccccccaaaaacccggggtttggcaaccatgccctgggggttgtttttaaaaaaaaacccggcccttttttagggccccgggttttaaataaaataaacaccccttaccgggcccaaccgccggggattggaaacgggtccgtgtttaaggtgggttttgaacgatttacaatgagcccctttttttgtggagagaggccact

SEQ ID NO: 178171 - DNA, 277 bp, Zea mays
  Clone ID: MRT4577_9407C.1
taaatcttcgcatcagtgcaaacttcaatgagcatctctgcagaaaagtaactgaggcttgtgctcgtgtaggtgccgctgactatgggtagaaggcttgatggaaacacaatgttccctgaatgccaacaagcgtcgattgttccccttcttccactataccatccatcagagttagcttcaagcaaatgaaaacccaactcttcaaccagatcggcttcaacacgcaataccaataaagaaacataccattaactgccttgttgatttaacaatc

SEQ ID NO: 178172 - DNA, 340 bp, Zea mays
  Clone ID: MRT4577_94080C.1
acgtgtacctgacaaccatatgggcaggcggtgccactctagtgcacggctccctaggcttttttcttaggaagcgctgcttcagaaaccgaagcatggtgaattctttccgtaggtattaccccaagaagcctcgccatcttactggctcacttgtctacaatgctggcatgactcacattgtccgagaggttgagatgcccggatccaaactccataagaaggaaacttgtgaggctgttaccatcattgaaacccctcctcttgtcattggtgggctcggggcatatgtgaagactccctggggccttcgcacactcatacttggttgggcccaaca

SEQ ID NO: 178173 - DNA, 862 bp, Zea mays
  Clone ID: MRT4577_94081C.1
ggatcgtcgggataggcatggtggctcgagccgctcccccggtggtcgggaggatcgtcaccgtctgcgccgctagcgtggccaccgcgacgagcgcgttagagatctagatccagcccttgattagcaccctgacacaccgccaggtcctcgcacctcgtggccccgcgccacacggcgccgccggtgatagtcgttaccgttggcgctcgctgccggcagcggcaggcctggctctagccccgcggcggcaagcttggtgcggatgcgggggcaaccgacggtggcatcccaagcaacgatggcctcgaggagggaggtgaaggggtcgcagtcacggtcgcgcgagccgaaggattcgagcgtggtggggacgtgtgcgcgaggggagggggagctggaaggtgggacggagagggggaagttgccgtccggctcaaggtgtggccggaggctttcgctcgtcgttgcctcacgcacgagggggaggaaggtgccgacggtgtggggcttgagatggtccaatacggcggctagggtttcgggcgctggcggcgggatctgggccgaggaggaggcaggcgcgtagagggagcttggcgggtcttgggcgggcgaggaaggaggcgtcgatgatggggacgagatccggatttggcggcggacggtggtgtgggcgctgcggatggagcggtcgggtggcagagactgcgtgattgacggagcgcgaacaagagtgtgtcggaggcagaacccgatcagaacgccaatcagttttcttgcagcacagggaagaagctcttgcctcccctcagaaacagcctctgatgagaatcatcatctccacaatgacccggccggc

SEQ ID NO: 178174 - DNA, 180 bp, Zea mays
  Clone ID: MRT4577_94082C.1
attgactgatattttttgtataatgaacttttaaaaggaaacaagaaaaaaaaaccaatgtggattcaaagcaaaccagttgattcaagcaggatgtccgaaaaaaggccggaaaacccatcagggctgatcaaataaaaaatagtgcacgcacaaaaccattgggtcacacactgggaa

SEQ ID NO: 178175 - DNA, 329 bp, Zea mays
  Clone ID: MRT4577_94083C.1
cgcgcacatcgaccgcctccgccgtgccgtccacgacgtccgtggccgggctacgcctggcgccttctaaaggacgggcgggcgtttcataccgcgcattaccggctctcctctcgctacatcacggcgcagctcacaactttcacttcgtcgctaactatcataatatccacttccctgccaatattaaggtgacgaatgaccacgcataactgccagtcgatgaccagggctatattctagagaatgaagccctgaaccatgcactggaaaaccttaagacctaactctatggaaaggaagggcttgcctacgggacactcaatctt

SEQ ID NO: 178176 - DNA, 830 bp, Zea mays
  Clone ID: MRT4577_94084C.1
ccccgcgtccgcttcgtggaggccgacatgcgggcgcgcctcggcgacttcggcctctcccgcctcctggcgccgccggacgcctgcgccacggggggcgcccgcgacctcgtgtgctgcaccgcgccgcaggggacgccggggtacctggacccggactaccaccgctcgttccagctcacggagaagagcgacgtgtacagcttcggcgtcgtggtgctggagctcgtcacggggctgaggcccgtggacgtgggcagggagcggcgggacgtcacgctggcggactgggtggtggccaagatccaggtcggcgagctcagggaggtcgtcgacgcgccggtgctgggcgagggccccgccgtgatggccagcgtcgaggcagtggcggagctggcgttccggtgcgtggcgcccgacaaggacgaccggcccgacgcccgggaggtggtggccgagctcgcgaggatccagacgatgctccccgagcttcccggccggatcgcacagaattgagctaaccacatcctgacatcttggcttctatgctgctatcttgactaagaattagcatcacatcctgaaggaacactccaagcaaggcagaccaatgtcgagctcacatcttcccgtgctggttctgtgacatgaatctgtatgtatgagcattggccagatctgttagttgtgttaccggtcagcactaccctcgtcaggttatgtgtagtcttgctctgctggaaactggaatgtacaagctctcccccaaaagtaattttgtccgatccatttttctgggttcctcagccaattctcgcattcagcttgcc

SEQ ID NO: 178177 - DNA, 313 bp, Zea mays
  Clone ID: MRT4577_94085C.1
gaagaagcccaaaaacagataaattcctgattgctaatttacatagcaatgtattctcttggttttttaaataatagcaaaattaacaatgatctgtgctctgaaagttttgaaaatatatttgaacaatttgaatataaattcatcatttagtcctcaaaatatatacagcattgctaagattttcagatatctattgtggatcttttaaaggttttgaccatttttgttatgaggaattatacatgtatcacattcactatattaaaattgcacttttattttttcctgtgtgtcatgttggtttttggta

SEQ ID NO: 178178 - DNA, 145 bp, Zea mays
  Clone ID: MRT4577_94086C.1
acagatatgtatgcttcttgtcttggttaccgtacaagataccaatgactcgagttgtggattgcaagacactcttatattaaactaggaacgaccatttaaatgaaggattctgtgagatagaattcaattacagcgatttgac

SEQ ID NO: 178179 - DNA, 710 bp, Zea mays
  Clone ID: MRT4577_94087C.1
cttcgtccggcgaccgagccgtcgccgagaaggtcaatccgccttgtctgctcgcccctttccttcccttcccttcccactgcttttatttctagtgctacaataagggcaatgcgtgcgctgttctttcaattcttagactagtactgtatacatggatccctgcttcttagattggtttggtagtgtagtagatccacgctgcctgcctgataccacaggtaccttgcttcatttttgactgcttctcacttggtcatgcatgacccaagcaccttttcttcatagcacagcatagcatagcaccagcacgctaaaatttattaggtaaatctttaacaaaccaggcagcttcattgttatccattgaacttaataacatgctccacgccatttcccaggttacatacttgttccggaggccatctattggggatatagtgtttttcaaagtaccgactgctgtgcaggtttgccttctccacttttcaatcagatcctcccgttgcccttgcccaccctgaaaatataatgtgccggttccaattttcagaattatggtgtcaataaggatgttgtctttattaagagagtattggcaacaccaggagacttcattgaggtaaaataaaatgcatcactagctccattgaggtaaaaacgcatcctcctccttttatgttgtttacaggtccgacaagggcagctta

SEQ ID NO: 178180 - DNA, 264 bp, Zea mays
  Clone ID: MRT4577_94088C.1
acgaacctgcctgtcacattgttcattttgactttctatgtcactgttacagctccacggaccggtttgtttgtcaagtgcttattgaacacaactaccacatagatacactaagcatccaaagaacagacggattcatcctgccaagacaccagctgctccaatcaccgatgtccctactgccttagcgcccatgacatgttctaatatctatccttaattcttaaagatggtcattaataaccccttctttaaaagctcacc

SEQ ID NO: 178181 - DNA, 271 bp, Zea mays
  Clone ID: MRT4577_94089C.1
accaggtgatctcaaattattaacagataatatattccatcattgaaagagagagacgtttttttaggtgctactgattcggagaataagacatcatggcctgaggtggtgggcatgttcatcaatgaagcaagagaaatcattcttaatgactctcccaactctaacattcaaatttcttccggttagctttcttgtaacccttaaatttaacccttatcataatctaattattcattattatagttatctatacttcaatagtttggtt

SEQ ID NO: 178182 - DNA, 245 bp, Zea mays
  Clone ID: MRT4577_9408C.1
gggacccgtgggcgggctaccttcggcactacactacctcaccggggcgtgcgcagacacttttggtaccaatgctctcctgtgcggccttgcctgacagacgccaaacgaggaccttcactcgcactttgaggagtatgaggacattctccagaccaatgtcatcaccgactcgactattgccgatcaacgctacagattactaaccttcgtcaccacatcagcaggatggctgatggacaatc

SEQ ID NO: 178183 - DNA, 3124 bp, Zea mays
  unsure (1)..(3124): unsure at all n locations
  Clone ID: MRT4577_94090C.1
cagaggccaacgatagttcaggacacggcagacgggaggtgcctcgacgaagtgcatggcaacatagagttcaaggaagtggccttcagctacccttcccgcccggacgtcatgattttccgagacttctccctcttcttccccgccgggaagacggccgcggccgtcgtcggaggcagcgggtctgggaagagcacggttgttgctctcattgagcggttctacgatcctaatcaggggcaagttttactcgacaatgtggacatcaagacgctgcaattgaagtggctcagggaccagattggcttggtgaatcaggaacccgcacttttcgcgactacgattcttgagaacattctttatggcaagcctgatgcgacaatggcggaggtcgaggctgcggctacttcagctaatgcccatagcttcattgctctccttcctaatggctacaacactcatgtgggagatagggggcttcagctctccggtggtcagaagcaacgcatcgccatcgcccgcgcgatgctgaagaacccgaagctcctgctactagacgaggccaccagcgcactcgacgctggttcggagagcatcgtccaagaagccctcgaccggttgatggtcggcaggaccaccgtcgtggttgcccacaggctatcgaccataaggtgtgtcgacatgatcgcggtgatccagcaaggccaggtcgtggagactggcactcacgacgaactcctcgccaaaggaagctcgggagcgtacgccgcgctcatcaggttccaggagaccgccaggaaccgcgcgtgcccgtcgacccgcaagtccaggtcgtcccgtctgagcaactccctctccacccggtcgctgagcctcaggtcggggagcctgaggaacctgagctactcgtacagcaccggcgccgacggccgcatcgagatggtttccaacgccgacaacgaccgcaagtacccggcgccgaggggctacttcttcaagctcctgaaactgaacgcgccggagtggccctacaccatactgggcgctgtcgggtccgtcctgtccgggttcatcggccccacgttcgccatcgtgatgagcaacatgatcgaggtgttctactaccggaaccccagcaagatggagagcaagaccagggagtacgtgttcatctacatcggcaccgggctgtacgccgtcgtcgcctacctcgtccagcactacttcttcagcatcatgggcgaaaacctcacaaccagggtgcggaggatgatgctcgccgtgattttgaggaacgatgttgggtggttcgatcaggaggagaacaactcgaaccttgtcgccgctcgcctctccacagacgccgccgatgtgaagtcggccattgccgagcggatatcggtgatcctgcagaacatgacgtccctgctcgtgtccttcgtggtgggcttcatcattgaatggcgggtcgccctcctcatcctcgtcaccttccctctcctcgtgctcgccaactttgcccagcaactgtcgatgaagggcttcgcgggcgacacggccaaggcccacgccaagacgagcatgatcgccggggagggcgtgagcaacatccggacggtggcggcgttcaacgcgcaggacaagatcctgtccctcttctgcagcgagctgcgcgtgccgcagatgcacagcctgcgccgcagccagatctccggcgcgctcttcggcctctcccagctctccctgtacgcgtccgaggcgctcatcctgtggttcggcgcgcacctggtccgcacccacgtgtccaccttctccaaggtcatcaaggtgttcgtggtcctggtgatcacagccaactccgtggccgagaccgtcagcctggcgccggagatcgtgcgcggcggcgagtccatccgctccgtgttctccgtgctcaacagccggacccgcatcgacccggacgacccggacgcggagcaggtggagtcggtgcgcggcgagatcgacttccggcacgtggacttcgcgtacccgacgcggcccgacgtgatggtgttcaaggacctgagcctgaggatccgggccgggcagagccaggcgctggttggggcgagcgggtccggcaagagcaccgtcatcgccctcgtcgagcgcttctacgacccgctcgccgggaaggtgatgatcgacggcaaggacatccggcgcctgaacctcaagtccctgcgcctcaggatcgggctggtgcagcaggagcccgtgctgttcgccaccagcatcctggagaacatcgcctacggcagggacggcgcgacggaggaggaggtcgtggaggcggccaaggtggccaacgtgcacggcttcgtcagcgcgctccccgacgggtacaggacgcccgtgggcgagcgcggggtgcagctgtccggcggccagaagcagcgcatcgccatcgcgcgcgcggtgctcaaggaccccgccgtgctgctgctggacgaggccaccagcgcgctggacgccgagtccgagtgcgtgctgcaggaggcgctggagcgcatcatgaagggccgcaccgccgtgctggtggcgcaccgcctgtccaccatccgcggcgtcgactccatcgccgtggtgcaggacggccgcgtggtggagcagggcagccacggggacctcgtgtcccgccccgacggcgcatactcgcggctgctgcagctgcagctacaccatggctgatcctgcgcctggaatagatactggagggcgcacggccggtgtagatactggagggcggtgttagcgtggcgtggctcaaccgtggccggagaagacgtgttttgatgtgaacgatcaggattgtgccgacaaacaagtgatgccgtattcttcttgcactcctgccggctctgccaatgtttagatcatcccctcctagtaattctcacacctttttttttcttcctttgagaagatcctagtaattctcagatggacccaattgtttgatgtgtaacggtcagaagccagggttcgtctttgctacttgtctaggagttgttgcctctaataattgggcttcaaacctttacgcaaggcatgctgncttggaaacagcccttgncagttg

SEQ ID NO: 178184 - DNA, 453 bp, Zea mays
  Clone ID: MRT4577_94091C.1
aaaaaatattaattaatcaataattacttatacaatatttatcatgggattttaaacttttttatgggggtctgtagagtcccaaacgatttttttaacaaatgggtggacaagagcacaaggattccttaagggctggttttttttttgagggtttttaaaatcaaaaggggcccaatttttcaaaaatttacagggggtttgttttttttaaaacaggtagtttatggggtcgcgcttcaaggccttttggaccaaattcgtttgtttctggacgtgcaccgagtaaaaacccgtttcaatagcaaccgacggggccctgccgacatacttgatgttctcgatgccaccacgggccaaaacctttatttgccgtcaaaaaccgggggttgatgtaactgtaccctcccatgttcattgggtcctcctggcaccacacgatcttagcatttg

SEQ ID NO: 178185 - DNA, 563 bp, Zea mays
  Clone ID: MRT4577_94092C.1
ggccgcttttttttttttttttttctttttttttttttttttttttttttttttttttttttttttttttttttttttttttttttttgggaaagggaactttttatttttggggggccccatacatcatccaaaaaactttttttttgaattcccactaataagcaatttaaaagggggcccccccaatgatgtgttgttggtaggaggctgctgggtttgtcaaaacaagttggacaaagggcaacaattgttgtatttgtaaaagggttgcggggttacccccaaactgctggtaaaaaggcaacaactgttgctgggtaaaaaaggaagcccggtttgctgcaactagctggttaaatgggagaaaaatttgctgctgcaaaaaagcaggggggttcagggcggccaattggttaaatggaaaaaattgttgttgctgaaaataggcaaaacctacctggctgaaggggaaaagttgttgctgcaaataaccaacccggttcaatgtaaacagttggttgaatggaaaaaattgttgttgctgaaagtagggaaaaagg

SEQ ID NO: 178186 - DNA, 254 bp, Zea mays
  unsure (1)..(254): unsure at all n locations
  Clone ID: MRT4577_94093C.1
cccacgcgttccgaccacgtcgtccgtcctatctgccctactatcctctccctagcagcggagcagcttctgtcccagccgcagatactcccttttgttccctgcttctccaaaaccactctctctgcacgcttatccctgactctcccagccgctgcagccgtgctgccctccgccccggtgcccgtggggctggcctgccatttgcctcgggggctgcgttgtcatttgtcaggtaggccgnctcccccccc

SEQ ID NO: 178187 - DNA, 175 bp, Zea mays
  Clone ID: MRT4577_94094C.1
gtccaggacatcaggccccagaaataagtcctaacgcatctgtcctttctacttgtcttgtgacccaagtacgaactcggtgaactctttctcctcgcgcaggaccggtgcacaatcaaggattgcaggccagtcctgccaatgtagtgcgttttggacttggtgtggccgcgac

SEQ ID NO: 178188 - DNA, 142 bp, Zea mays
  Clone ID: MRT4577_94095C.1
tctaagctcctagtccatacgccatgggtcatttcacagaggaggacgaggctactatctctagcctgtcgtgcaaggtgactgtcgatgctgctgctaggagcaataccgggaccgctcctggttgcctacacatggaacc

SEQ ID NO: 178189 - DNA, 258 bp, Zea mays
  Clone ID: MRT4577_94096C.1
ttgcggcacgtgctcgatctccctccgccactgcctccatctcctcgctcccagtccccgggaagctacgaagcatggcgtccgttatctcgcccgcgccccggtcgcggcccttcgcccgtcgtcggcatcgctcaagtcgtcgtcggacttccttggccactctagccgtctcggccgcaccgcgtcgcccacgaggtgcattctcaaggtggaggtcaagggcgagtggatccccggacttcactcctcctccta

SEQ ID NO: 178190 - DNA, 369 bp, Zea mays
  unsure (1)..(369): unsure at all n locations
  Clone ID: MRT4577_94097C.1
actaggtgtttttttagcttagctaggaatgcaaatttcttgattcgatggagggttttttttctagcacgcggcgcggacggtgcccatctgtctcacaccgtcgcacgcctcttcatacanataaaaaacgaaggtgaggaagcgacaaataattgtggcttgtgctccaaggaggtatcaaatgaagaaaaacaagagtgaggatgcgggaggacttggagcatcatataggactttatgtgcaaggctattggtaggagtgtatgcaaagaaaaaatcgtgtactactaagaactagattatagctctgtactcttataagtaacgagaggttacttttttaaaaatatcccaatttatctacct

SEQ ID NO: 178191 - DNA, 474 bp, Zea mays
  Clone ID: MRT4577_94098C.1
acagacatggaattcttgcggtctaaaccaaccttcgcgccgcggcggaacctctgaccctcgcgagtgcaggcctacgcgaagcggtcgacagaggacctgcagggcggaaacgaagacacgctgcaccaagccatctcaggcggagagagcgacctacaatggggctaaggccgcaagggctacagaatcctcggtcgacaagtgcttctcaccacccacgtctacggactgaccggagtgcacccaagcctaaacgacacgctataagactgcgcagacctacaagcatctacctcttcaaggtgctgtagctgctgcacacccacttggatatttatcacaacgacctccccatcatgaactccttcatgaacgacatttacgataagctcgagctcgagtacgccaagctgtcgcgctaccacacgaagcacaccatcacctgacgctagatccactacctcggtgcgc

SEQ ID NO: 178192 - DNA, 184 bp, Zea mays
  Clone ID: MRT4577_94099C.1
aaaaaaacatggggtggaaatttatttcccgatttagatccttttaaaaactggaccagaagtgcaaaatcccccccccaaatgtccatttatttcccctcttatgggatggccccccccccttgttgccgagtcttaattcccttttttttaatgggggtcccacctggatatctataacttt

SEQ ID NO: 178193 - DNA, 568 bp, Zea mays
  Clone ID: MRT4577_9409C.1
ccctccctcgagttttttttttttttttttttttttttttttttttttttttttttttttttttttttttttttttttttaaaaaaaaaacagaaggattttggcgggggggggaaaagccatacagggccacaggcaaaacacacccccccccgtttttttttttttttttatccaaaggacccggttggggatcttgcagaagtagcaaaaaaaatagttaaaaaacaacggccagggccaggggctttttttcctggcacggggcccccctaaaaaaaaaatgcccgggtaaggctgaagcgtgacgggtataacatggaacctggggctggcgttggggctggacccaaaacgggggataaaccccacattgggaaaacctaggggggggggctgtatttgaagaaccttgccacaaaaaaaattttgggggtgacgttacctgctactgttaaatactaaggccagatcctttttttttcctaaaaactgggggattattgggaaaaaaaaaaaaaaaaaaaacttaaatcgggggaaaatattgcatatgccgccgtttttt

SEQ ID NO: 178194 - DNA, 593 bp, Zea mays
  Clone ID: MRT4577_940C.1
atccgatcctttttcacttccgcaacaagactcagtcccgaagcaaaaatggccaacgtcaaggaagtccagcgcatcatcaacggcaacaacgtcgtggtcttctccaagacgtggtgcccctactgcaaggccgccaaggccgccctcaacgagagcaaggccaactacgaagtcgtcgagctggacaaccgaaacgacggtgacgacctccaggacgccctcctcgagatctccggccagcgatccgtccccaacatcttcttcgcccagcagcacgtcggcggaaactcggacctgcaggagctcgtcaagaacggcaccctcaagagccgtctcgaggaggccggcgcatttgcgtaagcaagcagaaatgaaagaaaaatactcagagaaataaaatgttgtgagctgacggcatttgctgtttggcgctgcatagagaagagggtagatccaagttataatagatgaacaagatgcggctagagttcagtggagtttttcagcgatgctccagactcgaatagagtatagagttgtcatcttctaaagtttttgcctttagctacaatacaagatatttatccatc

SEQ ID NO: 178195 - DNA, 539 bp, Zea mays
  unsure (1)..(539): unsure at all n locations
  Clone ID: MRT4577_94100C.1
ggccgggnnaaaaaaaaaaaaaaaaaaaaaaaaaaaaaaaaaaaaccaaaaccgaaaacctgaaaatataaataacaaagaaaatgaaaccgcgccacctggagcgcgtgcaggaatataacatggccgtgcccccaggtgccgtccgacggcgcggaattacacacatggcggccccgcaggcggggtccgacggcttgcacttcctcccgggggcccccccgccagggctccgagagctcaaacttcttatgaagttcaggggcataaggggttaaaatcagaaccaacttcatcaagttaacggccatgaacgtgaacctgaagaacgcgaccagcccccctctgaccaaaaattggtccggaaagacggcaaagaagctttcctcaaacgccgcatttttacgaaaagcctccacgggcaatttcaaaaagtccacgaggaaagcgatgatcctcccgttgacggccgagaagtacgcgaaaaaaacaacggaaaactgggcggcgtcttgaaaggcctccggcctgtacacgaa

SEQ ID NO: 178196 - DNA, 565 bp, Zea mays
  unsure (1)..(565): unsure at all n locations
  Clone ID: MRT4577_94101C.1
aattcggcacgaggctcatggctgcccacgccgtcaccccgctcaccatctgctgcctccgccgcggcgttcccctcaaccacagccgccgcctcctcgccgtagccgcctccgccgtggcgcctttgccgaggccgccaagctcaggaccctcgagccacaccacgacgccatcgaggcgccctgccccctcgccgctgactgcggcggctgcaagacccagtctctcgcgtacgccgcgcagatccgccacaagcatcaccaggttcgcgacttgctcgtgaactttggcaagtttgatcccaagcgcctggagagctcggagccggatgatatcctcaaacccaccgtgcagtgtgacgagatattccggtacaggaacaaaatggagttctcgtttgggacgaagagatgggtgcaaaaagagttgaaggacaagggtgaggaggtggaggtgaagcangaaacgaatgaaactgatggatatgcgcttggactgcacgcaccagggttcttcgacaaggtgctacatgtgcagaaatgttttctgcagagtgagccagca

SEQ ID NO: 178197 - DNA, 354 bp, Zea mays
  Clone ID: MRT4577_94102C.1
gggggagggaaccaatacaatatgaatccattggttttggtgaatctgggaactacatccttaagggttagtcccgttaaacgaagggccccccaaaaaaacaacattttttaagcaaagatgctggctgtttgctattttttttcccatgctaaaaatgggaaccactttccacaaggaaacaaactttccgggaaagaaaaacaagccgggactgcattttgttttgagtaactttaaatggatcatttggtagcaccaccagcttggggagatttgctaccacgttaactggaccctgtttcagttgggggaacgtacaccttaattttggggagaattttagcaacaacc

SEQ ID NO: 178198 - DNA, 442 bp, Zea mays
  Clone ID: MRT4577_94103C.1
gctgtatactgaaacaacgaatcaaagctcaacacaagttcggcaccggaaaggaaacaaggacacttggccactttggcagatacagagaccagcaacgtactaagtcaattccaaaggagtgaggaaggcgcacttttgtctttttgcaacagggatgtctggcgtgcgctcgccggctagggacgggagcccccgggctgtcacctaggagcacaaggctcctaaccaaagacggggtgggcggataaaaaacgggcggaccgggagctcggctcgttccttagagggggttaagagtgagccgaacaggggagcttcgacccatgggatccttaatcattggcacacaccaagggtctttttgacacggactcgtccaagtaaggctaactactaaggataccgagctttgactagggtaaaaccgggtaaaccccgc

SEQ ID NO: 178199 - DNA, 1966 bp, Zea mays
  Clone ID: MRT4577_94104C.1
cattgggaccctcgaggccggccgggacagaggcagccccctcatggctgcccacgccgtcaccccgctcaccatctgctgcctccgccgcggcgttcccctcaaccacagccgccgcctcctcgccgtagccgccgcagcgccagaatcgcccgcgcctacccccgcgccatcccagttgccgcttcccccggttcctcctcgcaagggctacttcccgaagcgtggcgagacagtcgagctcacctgcgaggcgctcgccttcaagggcaagggcgtctgcaaggtcgcgggctccacgttcgtcctgctctgcgatggtgcgctccctggcgagcgcctcatcgcccgcgtccgccgcctccgccgtggcgcctttgccgaggccgccaagctcaggaccctcgagccacaccacgacgccatcgaggcgccctgccccctcgccgctgactgcggcggctgcaagacccagtctctcgcgtacgccgcgcagatccgccacaagcatcaccaggttcgcgacttgctcgtgaactttggcaagtttgatcccaagcgcctggagagctcggagccggatgatatcctcaaacccaccgtgcagtgtgacgagatattccggtacaggaacaaaatggagttctcgtttgggacgaagagatgggtgcaaaaagagttgaaggacaagggtgaggaggtggaggtgaagcaggaaacgaatgaaactgatggatatgcgcttggactgcacgcaccagggttcttcgacaaggtgctacatgtgcagaaatgttttctgcagagtgagccagcagataaggttcttgcagttgttcaagaaacctggatggatcctgccataggcctcacaccttatgatgtccataagcatgttgggtttctcaagcatctgatgataagaactggaagaaacatcagcactggaactccagaagtaatggtcaattttgtgacgtcatgttataagccagatgtattgatgcctcttgttgataaaatcacaaaaatacctgaagtggttagtgtcataaataatgtgaactcgtctgttggtaattcatctgtgggtgaacaagaatatactttgtacgggaagccaaacattacagaaatgttgagaggacttgcgttccagatatctgccaactccttttttcagactaatacaaaacaggctgatgttctttacaagcttattgaagattctgctgggcttaaaggagatggctctgaaattgttcttgatctgttttgtggaactggaacctttggtttgacccttgcccgaagggcaaagcacatttatggatatgaagttgtccctgaagccattgaagatgcgcgaaagaatgccaagttgaacggtatcaacaatgcaacatttgttcaaggggacctcaataaaatcaatgaatcattcgggaaggaatttccaaagcctgacataatcatctcagatcctaatcgccctgggatgcacatgaagttaatcaagtggctgttagaagttaaagctcctcgaatagtgtatgtctcatgtaatccagctacttgtgctcgggatttggactacctatgtcatggcgtggaggagaaagatttgagaggattctatgaactgaagagtgtaattcctgtggatatgtttcctcatactcctcatattgagtgtgtatgcttattggagctgcgttgattttcagttttggtcaggtaaacccactggagccttgtttgggtgacgagtattcacctcaatccatataaggccttgttcggcactctagtatttaatacatattgggatccaatacatggtgggattgagtgaatccatcccatgtcacttaaaccatgtgtgtttcaattacagctgagatttaatacatggctaattttccattgtttagttccgcggtaacaaaaaaaaatccgagggggg

SEQ ID NO: 178200 - DNA, 188 bp, Zea mays
  Clone ID: MRT4577_94105C.1
gacattctctttgatccctttcatagataatcaggtgtgttggaagacctgttagtgtgcgggatactcataaaaattgtctccacattgaatctatactatatacctaaaaggtagttatgacagggacaatattctccaaattaaatataaattataatccttatttaattaattaataataatta

SEQ ID NO: 178201 - DNA, 296 bp, Zea mays
  Clone ID: MRT4577_94106C.1
cgttgctgtcgtccagcagcagcagcattttcagtcccatcatccgcatgttcgcaggatcaacaagccacatgtgtacatacgcatttacatagctttatagatggccagtagtgccgccttaaccgggccggcacgaggcacggcacggcccaccgtgcccaagcacggcacggcacgactggaggcgggcccgtgccggcacggcccgacctctagtgccgtgcttgggccgagggtggggcacggtgggccggcacgggcacggcacgattagggtttaggccggttaggcc

SEQ ID NO: 178202 - DNA, 491 bp, Zea mays
  unsure (1)..(491): unsure at all n locations
  Clone ID: MRT4577_94107C.1
tggtctttctgcaannnanaaacgggggagggggggggnnaaataaaaaaaaaaggaaggggtgaataaggagaangtttttttagaatggtgaaaagagttgtattagtttanttttttggggtggtacttttaacaaagggggtgtttgggtttgttgaaacccaaatttttaaaccttgggggggggagcgggcattaacggttggctttttaccttaataaaaaaagtacttcaacaattaataatccttataaaagaagttcccttgggggatttcttgggtccaaaaaataagggggcgaacaactaaaaaaattggggttagaaaaccttgctgcttactgtaagtatcagaagttttttcctttcaacaaactagttgattgaaattttgctgttaatttgcaacaaaaacaacaacatttcagcaagtaaactgctgcctaccccaagcaattgttttcattaaaccaaatgacagaattga

SEQ ID NO: 178203 - DNA, 308 bp, Zea mays
  Clone ID: MRT4577_94108C.1
aagggggaagcataattttccattggttgaagggaaatcaggaaaaaaaataaaaataaccccttagtacgattcccttatgtttacttatggaacagagaaagcaggatcccttttttttttttggggggggggctcaaacccggggggaaataccttttaagcgagttacctaaattgccacgaccttgtcggtcacacaccccaaataatcccagggcgggaagggggggaaatgaaacaaacatatcgttttagaaagcctagactcgctgaacccgccagaaaaatttaggggggaggggggg

SEQ ID NO: 178204 - DNA, 242 bp, Zea mays
  Clone ID: MRT4577_94109C.1
aaaaaccccattccctctgggtgatgtccatatataagagagagggctctttaataaacttccatatcactcccacaatgataagctctacctaattctattccatcctagtcaaccatccttaataactatatacccaattccaatccttcccaacttatttcaccttaaacatactacacaaattcctctaatttattacatctacaaaatttctccccaattattaataaattcaccat

SEQ ID NO: 178205 - DNA, 259 bp, Zea mays
  unsure (1)..(259): unsure at all n locations
  Clone ID: MRT4577_9410C.1
aaaaagtatgcctagctgcgactagagaaatacacagtatactgtctnttgtgagaggggtcggtcaatattgtaaacagggtatacgaatcgccgctgcttaaaactcatcatttaatcaactactcatcgtcctgaaaccatccactcctccctaaatcctctcagatcaaatgcctacttcttaaatatgaagcggctcgaggactagtcgaatctaaagaagacgccaaggagctgattacaatctttattatta

SEQ ID NO: 178206 - DNA, 559 bp, Zea mays
  Clone ID: MRT4577_94110C.1
aaaaaaaggggtttttccctgcccccgtttccaaaatagcaaaaacaaaaaacctcccctaacccgggctattggtggggaaactaaacaccaaaaaaaccccgggaaataagggttacccgcgcgccccaaaaacgggagggcaaagcggaaagtcctggggcatgagggcaaccccctaggggtgaagggccaaaaggtgggcgccctaaaaaaggcaaaggagaaaggcctcgggggtctccggggcccccagcacggggggcctcagaaaccggaggccgggctgaaatcccggggcaatctccccccccaggcgggggagggggagcagggggaaaaacagccggggcctctcgaggaactgggggatttcccgcagggccacggtccgggcccggaactgggggggtttttaaaccccgcggccccacggaccagattccctcccctcttggggggaaagttgatgggggggggccttgcccccggggaattggggggcggccggcttaaaacaaacaaaccccccgggctctttttttccttggcgcggggg

SEQ ID NO: 178207 - DNA, 140 bp, Zea mays
  Clone ID: MRT4577_94111C.1
acactacaccacacccacccgacgactattttacacgcacaacatctagttcattcgatcgttaccatcactcatgaagctgtaaactagccaacacacgaataataatgacggcgtcaacagtggcgagcctctctgtc

SEQ ID NO: 178208 - DNA, 464 bp, Zea mays
  Clone ID: MRT4577_94112C.1
ccggccggatattcttaatcagtcgtgtaacttgccttatttagcctgtgcatcaatcatatcgtccactgggacggaagttcgcgaatgatgagctccaccgacttgcgctccttcctgaccgggcggctagacgtgatgtgctgctgcgcctacattgagatgcggatgaccccaaaaacgcgatcctcgaggagaagtcggaggccgacttctggatgctgcccgtatagtccatggagaccgcccattatcatcctaaccgtgtctctcattatcgtaatattcgctattctcatcccccgcatcagttgtaaatatataaagctagacgctatttcctttccttggcccagacactggaaataaatatatatatcatatgaaataacgctgcttatgccgaataagggatgcgcggattcacactaatcaggcatggcatatctagacttattcaaaat

SEQ ID NO: 178209 - DNA, 252 bp, Zea mays
  Clone ID: MRT4577_94113C.1
cgactgtgatacatagaagaggaaaatcgattgtataacagcggaattgcaattgaaactgagtatgaggcggatgcggatattgataacccctatgaagaaggcgcgcagctaaacaccaatactgacattataagggtggacaaagaaggttgctatatattgacacgattaaatagaggttattctagagtcagcacctgtagatggacgttaagatcaaaataaaattatcctagggcttggaagcta

SEQ ID NO: 178210 - DNA, 424 bp, Zea mays
  unsure (1)..(424): unsure at all n locations
  Clone ID: MRT4577_94114C.1
aaggtcaccaaaagttattatattggtgcactgatgaaaaacagatgaaacaaattttgcaactttatgttttcatacaaaacaataatccagagtaagatgtattgttttttaatataattctgtaagcctaanngtcataatgaataagcttaagtacgaattgcatttcctttgaacaaactctatatttactgatctaaagtgaaacacagcaatttaaccttttagtaatttcattgattttgtttccaaccttgtatgcaagtgggatggaagctcccaggccccatcctatcattgtgctatgtggtcccagggtactggcggtagtgcctgtgctccgcggtttaccaacgatgttgcacaaagcgcgcgatctggtccctgagcttgtacagcttgcgcagcagttcgacggggt

SEQ ID NO: 178211 - DNA, 358 bp, Zea mays
  Clone ID: MRT4577_94115C.1
ccggaacgaccgacgcgtccgcgaactcctaaaacacatttaccaccttattttactatttctcgacaagctttataactttgtcttttgtgacaacaaatccggcaagagttttcacaatcatgttctcaccatcttccacattttccttatgaagaaccactatgaattactaactatatttcatgacaatatatctgctttgacatttctttcaccatataatggtgaagccattctcattttacactaccacaatgtatttaaatattatccccactacgacttcttacattacataaattatcactccctttacacacatcctattgacactgctctgatttacctatctaat

SEQ ID NO: 178212 - DNA, 151 bp, Zea mays
  Clone ID: MRT4577_94116C.1
aggcaacttgtctatcactgactggcaaagactctatgttctcggggaacttcaaattcacagctctgctaccggcaactccaagtcatatcccatagaagcctgtacgatcaactgccgggggacgtagacatttaacgcggggatttag

SEQ ID NO: 178213 - DNA, 385 bp, Zea mays
  Clone ID: MRT4577_94117C.1
tgagctgataatggaaggtcaccatacacggatggaggacgcggatggaaggtccgtggccaaatccgatttgccccctcgcccgcgagatgccgccgcccaccgtgcccgcgattccgccccaatcacctctggttctcaagtatggggaggaagggaaggtggtggagcgagtgaacctcgccactcggcagctgcgcctactgccgaagcccgttgtccggatctgcggtctcctcgcgctcgacgtctcccgcgaccagctaaaggttagatactcgtctcccccgacctagggcaggggctgtatgcgatagtcgagcgcgccggagcaggcagctggccaacaacccagcagatgggggtagcatcaacgaagggcgtg

SEQ ID NO: 178214 - DNA, 107 bp, Zea mays
  Clone ID: MRT4577_94118C.1
aacctatctggggctgcgattcgaggacctatatggacccatccgtaacaagtacgtcatcacactgccaagcttcaagaatgaatccatctatacggatatcaaat

SEQ ID NO: 178215 - DNA, 330 bp, Zea mays
  unsure (1)..(330): unsure at all n locations
  Clone ID: MRT4577_94119C.1
ataggaaaatcagccaggactttttattatccatggatgagagtgaaacgccgcgtcgcggtcgccgtcctggcgggcaaaacctcgcgcgaagcgcctctctctcactccgttcgtctcaccccaaattagcgagacctagaagaatcttgaaagtgatcgctccagcgcgtgccgccgtcgtcttctnctnctcttcctcatcctnctccacggaacagacgaggactggcctagccaagccacgccacgccaagagcgtatactgtacgtacatcgtttgccgagcatgtggcatagtactactatacgtatatatagaaaaaaaca

SEQ ID NO: 178216 - DNA, 687 bp, Zea mays
  Clone ID: MRT4577_9411C.1
ttcatgcaatgttctgaagaatataataatgtcatccaaataacaggcatgcaactgtaatttgtacttgctaataacgagttctaaattagtgttgaggtgcatgccttttttgggatagaattgacacaaaggtatttctcctgcctgaccccttcctgatgggtttcgtgtcttttttttttttttttttttttttgagatgtgaagagaggatctccaatccatcagattaagaaaaaagaataatcctctatatcagacaacaggagatcacgaaaacatatataaacctaagttgtaggtgagatgtgctacagcagatagaggattttttgtattccctttatacgtggcagaattttgtttttcctttctggagggtttgtccttcatcttcgtcgtccttcttgttcccgtccgtcgtccgcatctccctgctcatgggatttcggtaggtcctgtccgcccgcctgctctcacgatgccttccatctcctgcttgaggtggcagcgtttgcagagcggcgctgcagctagcgactcatgagctccggtgatgcagtagcggcgtgcggcagcagagcggtcggtgctctcacggcgactagaagaggaacaaagaggattgagaaaaaatggtgggaggatcccctctatttgagggattgagtggatcccggccgg

SEQ ID NO: 178217 - DNA, 743 bp, Zea mays
  Clone ID: MRT4577_94120C.1
ctcgacttcatcgagggattaccccgttctggacatgctaattgcatcttggtggttgtggataagttctccaaatatgggcacttcttgattttatcccatccattcactgctgctcgcgttgctcgggtgtttttggatcacatctataaattgcatggattacctaccaatattatttcagatcgtgatcgtatttttacgagtacgttctggcagaacttattccggctcaccgacaccaagctttgtatgtcatcagcttatcacccgtaatcggatggccaaaccgagagactcaatcagtgtcttgaaacctttttgcgctgtttcgtgcacacttgtccttccaagtggtcacaatggatttctgttgctgaatactggtataatactagttttcattctgccctcggtcggtcgcctttcgaagtattatatggttacaagccgaagcactttgggttatctgctgcttcagtaacttctgttcctgaattgaacgagtggatgcaagaacgggaggtcatgaacaaggtcattcaactgcatctgcaacgtgcatgtgaccgtatgaagcgccaggccgataagaagagaacagaacgcgtcttcgctgtcggtgattttgtctacctcaagttacaaccctatgtacaatcttcagtggcagcacgttccaacaacaaacttgcttttcgattctttggtccttataagattctggacaaagttgggtctgt

SEQ ID NO: 178218 - DNA, 243 bp, Zea mays
  Clone ID: MRT4577_94121C.1
agactcttacctacaaaatgagattcagtgaactaatttggtttttactcaaccaaattaacaatgtttttaaggaaaattagcagttggtctattcagagtcaaacctttttatattttatactgcactttagtgtattttctgtcactgtaggtatagaagatctgcctcccctgtggaaattggggtctgttggcgggcgtgcccctcaagcctggcttgggttgaaaagtgttcccgcc

SEQ ID NO: 178219 - DNA, 678 bp, Zea mays
  Clone ID: MRT4577_94122C.1
atggacgctcttaacttcgaatacccagattacgaaaggcttgatgaaggagacagaggagcaaagaaaaagagggttatcagaggtctgctaaaaacaaaaaatttcagcgaaaccgaaggattcggctcccaaaaacgaaagtcctcaatcttggcccttgccaagatggtacaagatgtaccagagaagactgtcggcacctcttcgtcctcctctgctagtgttacagaaatattgaagggattcacccttaaaatgaaagagttggaaggagcttcttcagaggatatagagttggacctacgacacttgggctgccaggaactctccgaagaagatatctctgagttaaaagaatttgctattgccggcggctacaagcccggatccgtgctcttcgacggtgtcgacgaggagattctagggtgcatccctgaccgtgctggagcaaaaattgccaatactttatcaaggaccatcggattctcgaagctcgaacgagatctcatcaactataggagacaacatattactgggagcttgttctgttcgaattttaagcttgaagaagcacattcaaatttaaaggaagtaggaatccgttatgagcatgaggttaaaggtttaaaagataaagtcaaagccgaagcagagaaaagctctaaattatcttaa

SEQ ID NO: 178220 - DNA, 207 bp, Zea mays
  Clone ID: MRT4577_94123C.1
atgggatatggtgtgcccgatgggctcaaggtttatactggttcatgcaaaacgtccctacatccagtcttcggcagctcgcgctaccagcacatttgttgctcaatgctcgtagcaggggtttacaagcgggccaaagagaaggagctcccaagtctcttatgcatggacgaacctatagactatgggactagagttctaagataa

SEQ ID NO: 178221 - DNA, 372 bp, Zea mays
  Clone ID: MRT4577_94124C.1
ttttttttttttttttttttttttttttttttggttactttttaaattaaaagggggatttctttttttttacaattgacagggcaaaacccactaacatgttttgccacaggcgccggctcacctaaaaacaagaaacattacaacagacttgcctacccatatggggacactaaacaataccaccgggtaaacccaagaaaatccgttgttacaaaaccgccaacgtcccacctaaaaatccaaaaggggcaaggataaaatccccccccctcggggccccacaaaccctctctttttaaaaaaaccacaaagaggggagaaaaaacccaaaaacccccccatggttacccccaaaggcctgcccccccc

SEQ ID NO: 178222 - DNA, 301 bp, Zea mays
  Clone ID: MRT4577_94126C.1
ccgctgtggttttttttttttttcccttcctttttctctctgagaaaaaaaaacattcccttggaaaaaaaaaacccaggggggcctttccctcaccttggatacaacgggcaccccccccaaaacccccttttttcatcaccctttccccccccccccccgggcaggcgtctaaatgctccttctcacctgaccccaccaccctcaccagaccaaaacctttgggttccgtcagaccagcctcttcaaaggccagctctctatctcactagctgctgggccccctagacccagtacattc

SEQ ID NO: 178223 - DNA, 844 bp, Zea mays
  unsure (1)..(844): unsure at all n locations
  Clone ID: MRT4577_94127C.1
atcctgcttctgcccctctttcccccaatctgcaggctgcaggcgctgctcctttcgccctccgctagcgagcgaatcgctggctcgaccccgcggcgggaggtatcccgccttcgatctggttcactggccaattcgttgcttcgtggggctttggagtttggagccaatcttgccccttaaagtgtcggtggcagcgttttgtgatcatcatgagctttgtgttccgagggagcaggccggtgaatagcaattccttggcttttcttctaactgttcttgttttgttcatggtactgaactcgcaccagatctctcccaatcttctgctttggcttgtcttgggagtcttcctaatggccacgagcctcagaatgtatgccacgtgccagcagcttgctcatgctgcagctgccaacagttttctcggccacactgagctgcgtgtgcatgtaccgccgtccattacccttgctacgagaggccggttacagagccttagacttcaactggctcttcttgatcgtgaatttgacgatttagattatgacactctgagagcattggatgctgacaatagcccacatgctccatctatgagtgaagaagaaataaattctcttcctgtcttcaaatataaagttcaggcacaacagaggcatccccctgcccgaaaaagtgatgggccatctcagctatcggtttcttcaactgngtccggcaatgaggaaaagcaggatggtttaaagcagatggaaccagcaaaccttcagaggatgaactaacatgtagtgtttgcttagagcagtcacggtgggtgatctgttgagaagcctaccatgct

SEQ ID NO: 178224 - DNA, 968 bp, Zea mays
  Clone ID: MRT4577_94128C.1
gccggccggtttcgcgaactacttccctgtacgtggacgaggaccaaggagacagagagaaagcctggccgcgccgcccaccgtcgcctcgtcagtcgcctcctccatcctccctccccatcgacttcccaaatcccagccagggttgttatctgtctttgtagcagaagaaacagtcctaaaaaagaatggagagctcctcagataggagcaacgtttctcaggggaaccacctgggttatgcgagaagcacatccatggattccactggtcctcagttagctggtaggtctagctcaatgttgagtaggagaagtagcagacagggctcaaggggatccatcagcctctcaagggagatgggggactccatactgagctcaatgaggcattctcttcagtcggcggatcaattgctaggagacatcgatagctcagttctggctcaactcatcgaaagtggtcgagttctatcacccgaaggcgatgttgatgaggatacagtaagaatctctgaacatcataaggttggccctgttccagatgatgcaataaagcaaaccagtgacaattttgcatcagcacctatatcttcagcggagacaaaagacactatttctaacgtcctagcagattcatctactaaggttgaaccatataagctttctctgaggctagactatgctgcttacatgatccatttagctgtctttggctttttcggggtattcacaaggtatgggctccaaaagctgtttggcccagactgtttggcactcacttcagatcaaagcccactttaccctgatcttccatctaatatgcttgggtctttcttgatgggctggtttggtatcattttcaaggctgatatacgatacatatctgaccatcttattgtcggaatcacaactggatacatgggaagccttacaaccttcagtgggtggaaccagaaaatggttggt

SEQ ID NO: 178225 - DNA, 867 bp, Zea mays
  Clone ID: MRT4577_94129C.1
atggacaggctgcaggcgctgctcctttcgtcctccgctagcgagcgcatcgctggctcgaccccgcggcgggaggttcacgggccaattcgttgcttcgtggggctttggagtttcgagccaatcttgccccttaaagtgtcggtggcagcgtcttgtgatcatcatgagctttgtgttccgagggagcaggaccgacatcgaggccggtggcttcccagggttcgctcccgagcgccgcgccatgttcttgttttgttcatggtactgaactcgcaccagatctctcccaatcttttgctttggcttgtcttgggagtcttcctaatggccacgagcctcagaatgtatgccacgtgccagcagcttgctcatgctgcagctgccaacagttttctcggtcacactgagctgcgtgtgcatgtaccgccgtccattacccttgctacgagaggccggttacagagccttagacttcaactggctcttcttgatcgtgaatttgacgatttagattatgacactctgagagcattggatgctgacaatagcccacatgctccatctatgagtgaagaagaaataaattctcttcctgtcttcaaatataaagttcaggcacaacagaggcatccccctgcccgaaaaagtgatgggccatctcagctatcagtttcttcaactgggtccggcaatgaggaaaagcaggatggtttaaaagcagatggaaccagcaaaacttcagaggatgaactaacatgtagtgtttgcttagagcaagtcacggtgggtgatctgttgagaagcctaccatgcttgcatcaggccacaatgagagtgataagagacttttcaaggaagacttaa

SEQ ID NO: 178226 - DNA, 334 bp, Zea mays
  Clone ID: MRT4577_9412C.1
agctcggaattcggctcgagcctattatcaccgcctctttgttacccacctctagccccaccacgaaagagggcactttggacataacgagggctttctgccacggcatccaacatctaattcatcttacgcgccaacatagaactgtgaactcaacacggtcagctttcgtgcatccagcgtaaacaaggtcagaacaggatacccgcacccacgctaaagactcccgcctagatgagcacttggggcctgtcgacaggcctcctgaacatcaggagactttcagaacgtcgtacacacccacgaagatgtggacgcgcccagaagtcactgc

SEQ ID NO: 178227 - DNA, 396 bp, Zea mays
  Clone ID: MRT4577_94130C.1
gcgcacgtaagctaggaattcggctcgaggttgaggctccttcctgacatagggagtggtactctatccaatacacctggggttcgttactacttactacccatcaaaaaaaaaaagaagaaaaagaaaaaaaagaaaaagaaaggaaaaaggaagaaagaaagaaaaaaaagggggggggggagacaagatgaggaaaaaagacgagggggggaaggggtcaggggcggggtggatgagaggagataaatatggggaaggggtaggggggggaggcggaatttagagcagaggggatgcactgggggagaggggaaggatggtataaatgagcaccagagaggaacagggggtaactcgaaaaaaaaaaaggggggcggaatggggggggtaagg

SEQ ID NO: 178228 - DNA, 819 bp, Zea mays
  Clone ID: MRT4577_94131C.1
tctggaccgggctctgcctaactacttccctgtacgtggacgaggaccaaggagacagagagaaagcctggccgcgccgcccaccgtcgcctcgtcagtcgcctcctccatcctccctccccatcgacttcccaaatcccagccaggtaattcttggagctcgtctttccggttgtctcctctttcctgtgcatcctgctgctccgaaaatctctcagatctcctcgtcctctggcccattctcttcatctccatgcatggatgaacaagagacggagggagacagatgcaaacatcgagactggggttgttatctgtctttgtagcagaagaaacagtcctaaaaaagaatggagagctcctcagataggagcaacgtttctcaggggaaccacctgggttatgcgagaagcacatccatggattccactggtcctcagttagctggtaggtctagctcaatgttgagtaggagaagtagcagacagggctcaaggggatccatcagcctctcaagggagatgggggactccatactgagctcaatgaggcattctcttcagtcggcggatcaattgctaggagacatcgatagctcagttctggctcaactcatcgaaagtggtcgagttctatcacccgaaggcgatgttgatgaggatacagtaagaatctctgaacatcataaggttggccctgttccagatgatgcaataaagcaaaccagtgacaattttggatcagcacctatatcttcagcggagacaaaagaactatttctaacgtcctagcagattcatctactaaggtggaacatat

SEQ ID NO: 178229 - DNA, 339 bp, Zea mays
  Clone ID: MRT4577_94133C.1
agtgctctctcagaagagggatggattatcctcgccctccgacaagtactcctatgtcatatgccaccgtacgcttttgtgctggcgcgatgatcggaggctgatgtggattacctatgctatcgccggcgtgcattgcctgttgccatcaccaaccaccatctggtaaaatgccttcggatcctacgaagagatactcgactcgaatgtcatcacatgagcagacacactctgacgtcccgcgatttctgtttggtaaccttctcctccaactactccacgatcgacactatcgaaaacatgaacggcactcaggtcgaccgccggaacatcaccgtt

SEQ ID NO: 178230 - DNA, 246 bp, Zea mays
  Clone ID: MRT4577_94134C.1
tagtgagtcgtattatcacccttcagctagccccaagttgagtcggccgatcgatcactgacgtagggatggcctcagccagcaggtggacccccgacatcgcgtcgctggtggccccgcaccgccggatccgcgccgccgtgacggactgccacaaccggttcagcaccgtcgcctcgcacatgcgcgcgagcgcgccggccacgttcggagacggcagcgcttgcatgggctggccgtgcaggt

SEQ ID NO: 178231 - DNA, 647 bp, Zea mays
  Clone ID: MRT4577_94135C.1
gacgcctgcaggaccggtccggaattcccgggtcgaccacgcgtccgcacttctacaaatgcatggcttccagcatttgataggaagcgtctccagatctacacgcagaactagctcgcgtgtctagttcaagagtgcctcatattgagtactcactgggcaacgatgcctgccactctgatgacatgtacaatgcagatcgagtaaattctgcggcaacacataatgcatttcacaggcattgccaagtaccatcaaaatcattttcacccaaatctgggtttaacctaactgtgacatcaaactcagaggactacacaacacagaccttattgacaagactacagctaaacaactgtctgcactgaacatatatggaacttgtacgacatacatcattaactgcttaaatactgttgatacttgtagcgactaattcacacactaagcagactgcctacatgaaaaagaacgaagacgatgcctattactatactaagtaggagactactaacattaaatacatctatactgatggtactatgccaggagatatacattgtaaaatgctgccatctgagagctatatatataatctctaccgttcttttgctaacctatgagaagatgctaatcaactctgatac

SEQ ID NO: 178232 - DNA, 237 bp, Zea mays
  Clone ID: MRT4577_94136C.1
actctagatactacctgattcctatgacttttcttttggcttctgtcactaggtcaggtccaaagatttctcgctctctaggttgagaccggttgaggggagtttgacaccttttttcatatagggcttcgatgggtgccatctttaggctcgattgctaactgttggtattagcaaactctactaaggagaggtacttatccctgtttttgccgtatataattgtacaagccctta

SEQ ID NO: 178233 - DNA, 179 bp, Zea mays
  Clone ID: MRT4577_94137C.1
gtgaacatggcggtcgttggctttactcccaaaatacgagcgacaaaaaaaaaagaagaaaataataaaaaaaataaaaaaaaaaaaaaaaaaacgacctcccactttatataatccatccttacattctcatgcattcgacctcatatctacaactatagtgacacctaaatccaatt

SEQ ID NO: 178234 - DNA, 353 bp, Zea mays
  Clone ID: MRT4577_94138C.1
ggaagagaagtggggtccggaaagcagagcgcggttgacctgataaggacaacaagatcaccaacatcgaggagatctacctccactgggtcccctgtaaggagcaccataccgtacagaccctcttgcctggtctcaaggacgaggtcatgaacatcacacccggccagaaccacacccctgcctggcagagcacccagttcatgggcttcgtaagcgtccgtgattgctactgccacgttgggctaagagtcaagtgctccaaggaggcgtccatcatcatcacgagtgccatcatgctagctaagctgtactgctcacccatgaggagaaggtactgggggaacacgatc

SEQ ID NO: 178235 - DNA, 266 bp, Zea mays
  Clone ID: MRT4577_94139C.1
ggcgcgctcgcggcactttttattctcttcgcctttggtgcggccggcggagtggcggtcgacggctccgaccaccggtacaagatgtacgagtttgtccggcatacaacaacaggcctggcccttgcgcaatcccagcgaggcatatcgctacttgggcctggccttctgctctcctgagaaagtgaatacccaaagcgcgaccctttttcaggtaataaaaccgaaaatgtttgccaaatttcccccctagcaaaatttgggcc

SEQ ID NO: 178236 - DNA, 1312 bp, Zea mays
  Clone ID: MRT4577_9413C.1
cgagatcgatctctctcaagggaccttgtttgcttgccgccacccccaccgcagttacagttatagctagggatctgagggctagctgatggacagcaggagggagtcctcggagaccttgaggaacaaatgcgcggcctgcttcaggcagtacaacaggatggagcacctggtggagcacatgaaggtctcgtaccactcggtgcacgagcccaggtgcggcgtctgcgggaagcactgccgctccttggagtcgctcagggagcatctcatcgggccgttgcccaaggtggagtgcgcgcgggtcttcggcgtccgcggctgcagcatctgcctcaacgttttcgacagcagcgccgccgtcagataccaccgtgcggcctgccagtactctcgtgctgctccgatgcccaggggcggtggcatgactggccgcgcggtcgccttggcttgcaagatggtagggggagggagcgacggctccatggacctttgtgcgagggtgtgcctcgttggagaagatgagcacgtcatcttccagacctatgtcaaacctacactccctgtcaccaactacaggtacgaagtgactgggataaggccagagtacctgagggacgcaatgccgctcaaggttgcgcagagaagaatccaggaaatcctgtgcaacggggagccactgtggaagttacgcccaaggagctatggtagggcaaaggtcctcgttggtcatggccttgaccatgaccttgagcgcctagggttagagtacccggcattcatgatcagggatactgcaaaatacccaccactaatgaagactagcaagctgagtaactccctcaagtaccttacacaagcatacctcgggtatgacatccatactggcattcaggacccctacgaggactgcgtcgcagcaatgaggctgtacatcaggatgagatcacaggctcaccagagagattacaactccggctctggcgaggcccagaacaactatccagcctggaggcagagggagctcgacaggatgagcccagaagaactcctggcactttcagcatcagactactactgctggtgcctggattactaaaccgatcggcttataaggaaaataaggcaggcgaacgttgtcggttgacatgttccgtctatggcgatcatctttagatgtacaagtagcttgcggctttgctatattgggggttaattaaagcgtataaacaaaggattctatataaatgtattgatgccttagatctgtataagaagcaatatcatgattcatgatgcatgtggaaagagg

SEQ ID NO: 178237 - DNA, 230 bp, Zea mays
  Clone ID: MRT4577_94140C.1
acgcacacgcgtccgcccacacgttcgcacttatcgtgcgcccacgcgtactgactagagatcgtatgctttccggccgactacattgctagccaaacacgctgtcggccatagccctctccaagaaaagtaagcaataactacgactgtctgagttcacactacattgaagctgtccaaaagctggcgcagcctttcatttatcactgaccacggaagcattgaccatg

SEQ ID NO: 178238 - DNA, 780 bp, Zea mays
  Clone ID: MRT4577_94141C.1
accgtcaacttccgccttcgtccgcgccggcgccgctctatcgctctaaaataacctttccagttccaccgggactagctgaaaggagagggaacggagggggatggcgtcgccggacgacgagataagccggctcttccgcatccgccgcacggtgtatgagatgctgcgcgaccgcggatacggtgtccgcgacgaacaaatcaagctcgaaaggcacaagttcatcgaacgctacggcaaccccgtccgccgtgacgagctcaccttcaacgccacaaagttgaacggcccatcggaccagatctacgtgttctttcctaatgaggcaaagcccggggtgaagacaatcaggaactacgtcgagaagatgaagaacgagaacgtcttcgccggcatactcgtcgtgcagcaggcgctcagcgccttcgcacgcagcgccgttcaggaggtctcccagaagtaccacctcgagctgccccggattcagattacagacccgatagcaagatactatgggatgaagcgtgggcaggtcgtgaagatcacaagagccagtgagactgctggaagatacatcacctaccgctacgttgtctgagtcttgctacattctcatggcttaagcttccgcaccaagcgaaaatgacctctacttgctaatcctgctgtgtactcggaatatctgttgccctggtgcccttccttgagaatggatctcgggctgttctggcgatagaaataggccgctggtcccttaagctgtgttccatctcattt

SEQ ID NO: 178239 - DNA, 307 bp, Zea mays
  Clone ID: MRT4577_94142C.1
cgcgttcctgaataccgggtccccgagcgtgcgtacgagcgggacacggtgcggagtcgcctggatccactctgccacgttgatcgctgccggttgaccctgcagagacatggtgcatcgctctgtcttacccatggccgttaggcgcaatatgtgtctttagcgactactgcatggccgagcatgatgtcaatatcgagctgagtgtctctgggtgtgcatctgcacctgtattgcaaactggccgtgtcgaccatgaacctgatgctcagtctgtgagagatccaagacgaggttgagctcacga

SEQ ID NO: 178240 - DNA, 1359 bp, Zea mays
  Clone ID: MRT4577_94143C.1
actatagaagagctatgacgtcgcatgcacgcgtacgtaagctcggaattcggctcgagtggtcccacactcccaccgtactcccaaacaaaacattctctcatcgtctgcgcccgggcggacgggacggcatctattgcctttctcccaacccgccaaaccctacttgccaccgccaaacttccgccttcgtccgcgccggcgccgctctatcgctctaaaataacctttccagttccaccgggactagctgaaaggagagggaacggagggggatggcgtcgccggacgacgagataagccggctcttccgcatccgccgcacggtgtatgagatgctgcgcgaccgcggatacggtgtccgcgacgaacaaatcaagctcgaaaggcacaagttcatcgaacgctacggcaaccccgtccgccgtgacgagctcaccttcaacgccacaaagttgaacggcccatcggaccagatctacgtgttctttcctaatgaggcaaagcccggggtgaagacaatcaggaactacgtcgagaagatgaagaacgagaacgtcttcgccggcatactcgtcgtgcagcaggcgctcagcgccttcgcacgcagcgccgttcaggaggtctcccagaagtaccacctcgaggtcttccaggaagctgagcttcttgtcaacattaaggaccatgtcctagtgccagagcatgtgctcctgacaccggaagacaagaagactcttctagagcggtacaccgtgaaggaaacccagctgccccggattcagattacagacccgatagcaagatactatgggatgaagcgtgggcaggtcgtgaagatcacaagagccagtgagactgctggaagatacatcacctaccgctacgttgtctgagttttgctacattctcatggcttaagcttccgcaccaagcgaaaatgacctctacttgctaatcctgctgtgtactcggaatatctgttgccctggtgcccttccttgagaactgatctcgggctgttctggcgatagtaataggccgctgttccttaagctgtgttccatctcattttaggccctgttcggttgcagataggtgtgatattggggggtgatattggatcgtgatccaaatgtttcttcacaaattattagggtcataaattatttttagttaaaaaatgaataggaatagggtctgatcctaatccgatctttatgttttatagtttaaaatttagagtctattattacctattattacctctagttgtacagttatagaatattggaggggttaggtggggattaaatccctttctgtttaaaattgaatatggagatactcctctaaccg

SEQ ID NO: 178241 - DNA, 1088 bp, Zea mays
  Clone ID: MRT4577_94144C.1
agtcagcctctgcgagcatccaacgccgaccaaccaccaccacaaggcccacaagttcccgctactgcacggagcacggagtcacggcgatgacgccgcctcaccaccccgtgaacttcgccgtccttctcctcttcctatgcctcccggcagtcccacccgccgccgccgcggccgacccgaccccgaccccatggcccccgcagttccacgcgacgctggtgatggactaccacggcaacatgtccgtggccgacctctggtacgactggccgggcggccgcaacctgcacgtcatccgctaccagctcgccgccgacgcgccctactacgacaacgagtggaacaacggcacctccttcttctacacgccggcgctccgcacctgccgctccgccgccgtcggggtcggcatcctccgcccggactggctccgccccggggccgtctacctcggccgccgcgacgccggcggattcgactgccacgtctgggccaaggccgacttcatcacctactacgaggacgtcaacaccaagcgacccgtcaagtgggtcttctacacaggtaggaccgcctacgttatgagctttgaggtgggagcggtgctggaggacgcggcgtggcaggccccggagtactgcttcaccaacaacggtgggcttgggctggccgacgagaccaccaccaccatcgctggcggcagcagcttcgtccccaggagcgtgctgtgaggtccccacgagcggcagcagcttcagtatttggagaaatacgatcgatatgtgcacagcgtacgcgcagtaatgtatgtaatcttttgcctgtctgttgtttatctctgagcgaaacgtgtggcttttgtggtgtccacgagctctgcggactgcgtgacactattgaggaagagacggaaacaaaagcaaaaaaagaaagacatcggcatgcacaaatagcatgacgagacgactgtacgaaaaaaaaaaaaaaagagaagcctgctgtgagtgtgaggtccccacgagcggcagcagcttcagtatttggagaaataagaataaaattttttttttttttccccccccccc

SEQ ID NO: 178242 - DNA, 470 bp, Zea mays
  Clone ID: MRT4577_94145C.1
ttttttttttttttttttttttttttttttttttttttttttttttttttttttttttttttttggggggaagccccaaacttcttccaaaaaacttttttttggaactataacccaaaaccaatttaaaaaggggcccccccaatggggggttgggggaaaaaccctttggggtttgaaaaaacaagttggttaaagggcaacaattgttgcatttgaaaaaggggcccccctttaggcccaccgggcaggaaaaacggaaacaactgttgtttgggaaaaaaggcaaaagggctcaaataaactacctggctaaaggggggaaattgttccttttgaaaaaaacccccaaatttcaatgctccccgttggtaaaaagaaaaaaattgctggggggaggcaccacctacctaactaaaggggatttgttggggcaaaaaacccccaaatttcaatgccccccgttggtt

SEQ ID NO: 178243 - DNA, 416 bp, Zea mays
  Clone ID: MRT4577_94146C.1
gagccgcaaaccctactacttatctccacctgtctgttttggtaacctcccgctcgtccacgagggccacctaatatgtgcgggtgtccctgccaagccgcctgccctaacactttcttccttcagttcccacgactccctgtcgattatcccacgccggtgatcctaaaggacaagccgtaccccgccatcggggtcctgcccgccgtctcctagttgacccctgatttatgccctaaccttgtcctaatcttcttcgacatcgattcccaaaccccctacatcggttgataatatataagctagccgttatttcctttctttgccccagaacttgaaataaatatatatactatgaaataacgctgccatgccgaataatggtattgtgaattctcactaattaagtaatgcat

SEQ ID NO: 178244 - DNA, 465 bp, Zea mays
  unsure (1)..(465): unsure at all n locations
  Clone ID: MRT4577_94147C.1
gatcgcgagcgccctttttttttttttttttttggatacaacaaaaacaaagacgataaatgtcatatttatacaattccgtcccgcatacaaaaactgcatcatcaactggctgaagattgcagaagtggacgcatttcatggtttgctacatttctggaaacacaagaatttcaagaaaatcgacacactaacaccaagatgatctaatatagattcaaataaatgcaatgcagactcgaactactaaggagaagagtacaccacgcgcctgttaatcagaattgagaattactaaggaatgtaaccatgcatcgactactttgaaacattttatctattctctgccaaaccgagctctgaacttccagaagccgtctggccttctcctgtaacttcgtctgacaccgcaatgtttcaccatgtatcttgagaaacaatctgataacagctngaatgaactca

SEQ ID NO: 178245 - DNA, 534 bp, Zea mays
  Clone ID: MRT4577_94148C.1
agttcagaacatggaatcaaaggtgcgagcagcatgtaacagttcgaatgcaaaattagatgacatagtcaggctccttgatgacctactcacagagtatgagtcaacggcctatggtcctggaaaatggaaaaggctagccacattcttacagcagtgtttggctggccctgttttggaccttttcagaagacagttagagcatatagatgctgaaaggaacgccctgagattgaaatgcaattcaagagatgtggaactatctgagaagatattctagtggtggagctatgaacaacaatctgagctacgaacaacaatccgatgtcctgatcgagagcgatggagctaatgtttgaacttgtgtgtttgaacttgtgaactaaaaatgtgcactatgaatgtgaacttatgtgaacttatgtatttggacttatgtgaatttgtgaacttatgtatttggacttgtgtgaatttgtgatatgaatatatatccatgtgtttgaaatctcgacagcaacggcgacagcaacg

SEQ ID NO: 178246 - DNA, 373 bp, Zea mays
  Clone ID: MRT4577_94149C.1
aaaagacaaaccccatttattcagggccattcccaggttccccaaaaatcaagccgtttgcccgggcatatcgacccttctgaaccagagggaccagagggggttaaatattctggcttgaagggccctaggagtatatacccgagcgggacacacacaagtccacacaggccatgcccgctcggaagcgcaagcgcgtcagggcttggggggggggttgttgggggtttcggggccgtcggggtcggggggggcggccttgggatggggcgggggcgtcggggtttgtttgagcgcgagcgcgcgctcgatctgcgcccagggctgttccggggggccgttggggccggcgggcttgcgggccggggccggg

SEQ ID NO: 178247 - DNA, 267 bp, Zea mays
  Clone ID: MRT4577_9414C.1
aaagttaaaacccttattctcgcccccttttaacatttttttaaccccaaaaaaaacaccctaacaaaaactttttaaaaagaaaaataactccattatcccaaaaaacattaaaaaactcgaaataaattcctaataaaaccccaacttccaaaactttttttattttaaaaccacaacccttcttttttaaaactcctacaagtccacaaaaagggctttttattttaagaaaacattttcaccaggaaatttggacaccctttt

SEQ ID NO: 178248 - DNA, 335 bp, Zea mays
  unsure (1)..(335): unsure at all n locations
  Clone ID: MRT4577_94150C.1
cttctacaaataactttacaaacgaatnatttccaactttaaatcttcaattaacctttcttttaaaatctcattcttttacacttttaccacttaaaaattcctaattccaaaatataaatataaatttaaatcatacatgctatacattatcattaactttcaatacataaattcttattatcacctaaaatatctcacttactaacattcaattctttccaaatcttaattccatacttaactttacttattttccttaaccttacatactttgtacaactaattcccaatgtatcctttcccaacacaattcttttcttatattctttctc

SEQ ID NO: 178249 - DNA, 196 bp, Zea mays
  Clone ID: MRT4577_94151C.1
cgagtgccgaatactcataggagcgatttgaagtgatggtgaacgtcgtcttattctgcctcggcaaaatcgggtatcaagcctgttatgattgccttagtacagatctctgcatttgagggctacaacatgatagagaggtcaaccaacctagactggcacagatgcccgaccctgctacaggctattaaccaga

SEQ ID NO: 178250 - DNA, 266 bp, Zea mays
  Clone ID: MRT4577_94152C.1
aaaccatacacaataacacctgaaacattttttcacaccgctcaaacaactatccatggcggactctaacgactacctacaacagcaacaactgtttacatgtacccaactcactgtcgccaatacacctacacacctccaacaacaatcgcaccatcaacatataccatatcacacacagctacatgctgcaaaccatgaatactatttacaacaacaactaaaattccatcaactgactatgtctaactctgctgactacctac

SEQ ID NO: 178251 - DNA, 347 bp, Zea mays
  Clone ID: MRT4577_94153C.1
aaacacagggggtgactattccttgagcattaacaaaaattgtatccaatagaccaatactgcacacataatatgataggacgttccagaatttacacaatttatcttgtgctgaaaataagcctccctcataagatcatgtgtataaggggtcttttcaaacaaagagaagcttagaccaaggctgtattacaaggtaaaaactggaaacatgagatattattagcaaaaattcatatttgaggggggaaacttagatgcctatgggtgagcaatggctatttaaagctacagttctatgcgaagataaaacaatactgacaaagcttatggtcctttggcaaatt

SEQ ID NO: 178252 - DNA, 473 bp, Zea mays
  Clone ID: MRT4577_94154C.1
gatttccgggtcggccccacccgtccgcgtttggccggggaagttgggggcgatggatatttgcaaaggccattgtgggaatggctgaatcagctggttggatttagcaccgttgaggggttaaaggggttggctgcaccaaatcgggctgtttttctggaccctgctttgatgagacctggtcgcttggcccgtaggatggagttccctaatccatcaaaggaggcaggggctggattcctgcaaatccactcggggaaattgattgtgattccagatgtcaactttgaagagtgggcccgtccaaccgatgtattaatgggccctcagttaagggctgtttgcgtaaaggctgccttgctcgttttacgccaggatgctccagaggttacccacgaggttttcaccggggggttcatccaagtgcaggcaaagaggaagtccagtttgatttactacccgtaaggggggga

SEQ ID NO: 178253 - DNA, 661 bp, Zea mays
  unsure (1)..(661): unsure at all n locations
  Clone ID: MRT4577_94155C.1
aacaagatcagcaagcagctgcagctgcagcgtggcgggccattgttggatgggtcggacggagcgtcattcagggtcggcatgcagttgaggaacctgtcggggtgctaccagtgccacatggtggtggtccccgttagcggtagcgtctccatgagggccaccatctgcccctgaccggactgcggtgatgtgttcgtcaggcaggagagcctccagctccaccagtccatcaggcatgcagtgtcagagcttggcacgatggccacgaatgggcgcgcgcacgacgtcgagggcaaggaggagtacgactcggtggcgatgttgaccagggtgaactgccgttctaatttcatcatctagaggagtctattcgacgcgtgctgcaggctgtgcaagttgttcaactgacaagagctcaagctcacagatagccggtctgcattgaccttgattgatgctcaagtggtgtttgaggaaatgcagcaaagtgctaccttggttggtgtcccgcaggatgccttcaacatgttctgcagcaagactagttctagcaagcaggtggctagagccatcttcgtcaaccctgaacatgatctgtacctcgagatcttccacctagagcagctcatctcanggaaggaggatacaacttacaact

SEQ ID NO: 178254 - DNA, 267 bp, Zea mays
  Clone ID: MRT4577_94156C.1
gggataagatggaggaaaggtacacactaattcccgcaaaaggacgaccagatatggattgcacagaattttagcaaaactgtaagtactagataaggtgccttctggcgtattactaagccactgcaactttccaagccatggtttagaatgggctatggaattaaagaataccagcccattacaattcggtggctggcggcagttttatcacatggggcaaggtgacgcattaaagttgcctctaacagtgttgtcactcttaca

SEQ ID NO: 178255 - DNA, 532 bp, Zea mays
  Clone ID: MRT4577_94157C.1
gactcctatagggcgattgggtttctccaggccggccggggggaaaacggtgccggcaagcaaccacggccggagctcggagcgtcctcctcctcccgcctatatttttccctccttctcttcctccatatataggggacattagacccaaaaagagggacgagcaccccggagcttaggggcacgtgaacgaccccgatctataccaagcagggatcttggacgacctcttagaattcacagaacctccatggaactctgatgatcgcggcacgccttgcactaccagaatacccgatgattgtgccaccaaacgttctttaggttgcccgaactgtatactgcatgtacgacgaatctgttaaccacactgtgtcgcatacggtccaacacatgctaacatcgctctatgtcgaaccgccatccatgcgaacggcccctattgctatctcgcaaccacagaatatcagcatgaagcactacttcaaggaggccaacatatctacctgagctatacatattgcacacctca

SEQ ID NO: 178256 - DNA, 653 bp, Zea mays
  unsure (1)..(653): unsure at all n locations
  Clone ID: MRT4577_94158C.1
cagaatgcggattgatgcaaagtttgattactggcctaattctacagacgctgtagcgcgtgctgactatagtctacgaagtctgacacaatttcccccccaatatccggtagttctctcctctgcttgccatcctataccccttatccctcttacatcaacgccgacatcaccgcgacgatcgaagcgagcaagaccggggtcaggtagacaaccgatcccgagctcgcagcgttagagttcgagcctccactgcttccggtgccgtttccgcccgagccggtcgttccgcctccattcgtcgccgttccgcccacgctcgtaccgttcgagacagactgtgctgacccgctaagctgggcgaagccgatggcgagcgggttgtatcggaacaccgagtacacattcttgaggaacgaggcaccgacgatccagctgataggtgactggcttccgagatccatctcgaagaaagcaccggtgcacatggacgtgtctcgagtgaacggtccgaggttgaagtcagcattcgagatcgcgtaggcaagtccaccgtattggagagtgacgttgacattggtcgaacatgggtactgccagtatccactgtatcccgtggaagcgtccatctnctcggctccctggatctgctg

SEQ ID NO: 178257 - DNA, 338 bp, Zea mays
  unsure (1)..(338): unsure at all n locations
  Clone ID: MRT4577_94159C.1
tacggaagacgacangagggatattgaacgaattaattgacttttctttttgaaagtttcgttaccttntagggctttgatttcttctagtttttgaaatatgcttactatagttacattccaagactntgcatgtgtgtatggtgctactgttacttaactttcttaagcatgcttctttntttttttcatctacttggcttccttttatgttggcagatctaattccaaagctggaaggttgtgccatgtgccatgtgcacttaatacctctggaaggtttgccatgtgcacttaacattcaagactttgcagtntatctgacctacatgtatcat

SEQ ID NO: 178258 - DNA, 221 bp, Zea mays
  Clone ID: MRT4577_9415C.1
cgtattgacagactaaacccttgcgtgcagccaagctgaaaggagaacagtactgaacatattggaagccatctgaccgtatgcaggcagaggaaaataactcacattttgatatagatcaatgatcgggatggccaagcctgtgtgcacaagtacgagctgttggagcttctaccaagctaatgtatgcattgctgcatgagatgcgcacctattcttga

SEQ ID NO: 178259 - DNA, 301 bp, Zea mays
  Clone ID: MRT4577_94160C.1
aagaaagactccatctcagtacataaataaataaatacaaagcgctgcagtagctgtggcctcatcctgaagtcagcgggcccatgcctacatcactctctcccttggcagagaagcagacgtccatagctcctctccctcgcaagcgctcccagcctgacctccagctagctgctctcacatcccagtctctactcactgggatgaagttaggtcatcgaggacaccaataacctagaaataagcaataagccaaacaagcctgagcttgtgcttaaagactgaagaaaacaaagatggg

SEQ ID NO: 178260 - DNA, 411 bp, Zea mays
  Clone ID: MRT4577_94161C.1
ctttttcttttttcttttttctttttctctttttttttttttttgggccccttgtttcttttctcccctcttgggcgaaaaacaaaaatggaaaatggcctcccctcccattccaaatgccggtcttttccctcccggaaaaccagggccccaaaaccccaaacccttccccaccccccaaccagggttccccccccccccggctttccagaacccctctccccccctcaaagtgcacttgcccccgcccgggcctttttaaagggccccccactttacaatgtcccttcccctttccctcgggtccgttgcttttagctcccccctaatgccccccccccccccttttaacccgtccttggagcttccgcacaaaaccttgatttttacccctctattttcccggcgccc

SEQ ID NO: 178261 - DNA, 423 bp, Zea mays
  Clone ID: MRT4577_94162C.1
accacgcgtccggtaccgggttcatgccggaccaaactcgtgccgggttttgggccgcccgataagcccggctcgtctagacatctctagttcacgtgacttgaatggttttaactaaagtgatttttatacaagcggcctaaaaagctggaaacagtagtctgcataccttccggtggccaaaagctgagtgcccatacggcacgcacatgacaaaaatattaatatattatgttttatataaatctatagaatacaaatttattgttacgttggcctttcaatataattagttaggatagttatttaaattttttatataaccattacaaaactaatcaatcaaaaagattcaaaaccttattatatatttgaattatatcttaattgttaaataaaatttttaaaactataatatataat

SEQ ID NO: 178262 - DNA, 503 bp, Zea mays
  unsure (1)..(503): unsure at all n locations
  Clone ID: MRT4577_94163C.1
gtcgcatgcacgcgttcgttaagtcttggnatccctctangcggccgcgcggggttttttttttttttttttttttttttttttttttttttttttttttttttttttggggccccaacgggccctggttgcgggaagatcttttcggtggaagccccaccttcctttgggcccaagggccaaacttgggccgggcccatccgcggggggggggggggacccgagcctgctccagcccccagggcaaatgaaggcccttctttctaagcctttttgggggacttggcgccctttttgggggacttgggctccttgctgccggggctggcccccttttccgccgcctttttgggccgggccccggggtgggttttggggggggcccccccccgcccggaggtggcccctgcccgcagtttcccgtgctcctcgtttttgcggttcccccggggcccctggcgcgggttggtgccccctttttttttttctttcgccgggttccc

SEQ ID NO: 178263 - DNA, 1177 bp, Zea mays
  Clone ID: MRT4577_94164C.1
tgttcatatgcgcaggtatctctgatgagaaactacgccatccaaatattatactcttcatgggagcagttgcatctccagaacgactttgtattgttacagaatttcttccacgggggagtttgttccgcttacttcaaaagaacactgccaagctagatccaagaagacgagttcacatggctatagacattgcaaggggtatgaattatcttcaccattgtagccctcctattgttcaccgtgatttaaaatcgtcaaatttgttggtagacaagaactggactgtaaaggttgcagattttggtctttcacgtctaaaactcgaaacgtttttgcgaacaaaaactggaaaaggaacgccacaatggatggccccagaagtgttatgtaatgaaccttcagatgagaagtctgacgtgtacagctatggggttattctgtgggaacttgtgacccagaagataccctgggataatctcaatacaatgcaggttatcggagctgtcggctttatggatcagaggttggacattccaagcgatacagatcctaaatgggcatcgatgatcgagagttgttgggatagcgacccgcagaaacgcccttcgttcctagaggtcctggacaggcttagagatctgcagaagcagtacagcctgcaggctcagatgcagcgtaacctgtccgcggatgctctcctgaaaggcgctgtgaaatgagcgtcgaggaatgctagctctcggaatgtaatggaacatggcactggacacattgacagcgaccagagcaagcattcatcgacatctgtagcgtctgcgtgctgatgaggaaggctggctacgtgcatcttggtcgccttcgtatagaagaggaggagctacgtgcaaaggcggccggtgcatgcatggcttcatgtatctcgggcctgaacgaagcttcataatgcggtaatcttcggccaagaaggccggactactttttgtattaacgccccaatttttcagtggggggaaacaatcgaattgtttataaattgtatacttagtctcgataacgttcttgtctgcatatagaacctatatagattatatgtaagcatgaaactggcagagactgaccaaaatcaattaactcgaacaacttaaaaaaaaaaaaaaaaaaaaaagggggcggc

SEQ ID NO: 178264 - DNA, 244 bp, Zea mays
  Clone ID: MRT4577_94165C.1
gtttttcttaattgagggcttgggatatgaagggaggatgttattgatgggtgattttctttatagcgatacttaaggtttggagttaaaaagtgaagatctgacttttatgtaggaaaataaaagaggacaatgagttcaacgatgtagagactaaagctttttagaagaacttgctgataaaggaatagttaatacatgatgataattagggggcaccccccagtattagtaatgaactgat

SEQ ID NO: 178265 - DNA, 576 bp, Zea mays
  unsure (1)..(576): unsure at all n locations
  Clone ID: MRT4577_94166C.1
ggctgtaatgtggtcactgttcagaaaacgcatctttctatgcatctgaacacactactaccacccatccatgcgtctgaagacacccggttcgcattatgaagcttcgttgaggccttgagatacatgaagccatgcatgcaccggccgcctttgccggtacagcctccggagtccggactgtagctcctcctcttctatacgaaggccaccaagatgcacgtagccagccttcctcatcagcacgcagacgctacaaatgtcgatgaacgcttgccctggtcgctgtcaatgtgtccagtgccatgttccattacattccgagagctagcattcctcgacgctcatttcacagcgcctttcaggagagcatccgcggacaggttacgctgcatctgagcctgcaggctgtactgcttctgcagatctctaagcctgtccaggacctctaggaacgaagggcgtttctgcgggtcgctatcccaacaactctcgatcatcgatgcccatttaggatctgtatcgcttgggatgtccaacctctgatccatanagccgacagcttcaataacctgc

SEQ ID NO: 178266 - DNA, 284 bp, Zea mays
  Clone ID: MRT4577_94167C.1
atattttttatttttcctctcttattaggaagaccaacgggcggattcagattctttttgattgaaggaatggcgtccaccaaaataagaacacatttcccaacgctgtcacattttactgattacaaatgtccaatctttctagggtcaaaggggaaccacatcaaatgcaaaaacagtagataataagtatgcgactcggacacatatattttcccccgcgacttattatgcaaaatgcaaaaaaaaaggcgtggcatgccatgccctcaaacatgaggggc

SEQ ID NO: 178267 - DNA, 431 bp, Zea mays
  Clone ID: MRT4577_94168C.1
cgcggaactgcgaagcggtaacaccggtaggcgacgacgtgtttgtgctcatcgcagctcaatgctctgtcctgcggcgcgcacaaccatataatccggggtgcgtacgacggatggccggaggcctcgccgtcgccgtccccgtgcggtagctggcggggggtcggtcgcgacgcgaacggccgggtgagatccctcgacctctccatgtccagcatatcgtccccgctcttctgcaacttctcgacgctcataggactcatccgcctggacctctccgacaactccatcgttgattatctcgcggctgacctcgacaggagggtggcgttgcaacgcctcaacctctcgtaatacctcatatctggaccccttggtatgtccagcctgaccaagctgtggaggatagacttgccacgcaatcatctcga

SEQ ID NO: 178268 - DNA, 273 bp, Zea mays
  Clone ID: MRT4577_94169C.1
cctcctctgctctccccacctcccggttcggcagcagagagcgggggtgcagagagatcgagatccggaggccgtgagtgggagcgccaccaccagcgtctgcggcaatggcgggcacggtgacggtcccggggtcgtcgaccccctccacgccgcctgactccataggaaacgcgaaacacgctcctcgctgccgcctccgcgaccgactctgcctactgcgtccaggcgcccttctccgcgaccacccccagctccgccgcgacactgtcg

SEQ ID NO: 178269 - DNA, 218 bp, Zea mays
  Clone ID: MRT4577_9416C.1
ctggacatggccaatttgtcacaatttattattttgacccatgtcatgtgaaactgctttcgttgaagtctggtatctagattgacttgtaccagagctgtggtttacgcagactggattctggagtactggactgtgtgtgtttttttcggaactgaaaaaaaaaaaaaaaaaaaaaaaaaataaaaaaaaaaaaaataaaaaaaaaaaaaaaagaa

SEQ ID NO: 178270 - DNA, 136 bp, Zea mays
  Clone ID: MRT4577_94170C.1
gatttagaggtagagatgaaattgcggctgctattgctagttacagaagtgcaagaggcgcataaagtgcaggccttttttacaaccagagataaacgtgaggaaagcctaccaacaaccagacaaataagaaaaa

SEQ ID NO: 178271 - DNA, 270 bp, Zea mays
  Clone ID: MRT4577_94171C.1
aaaaaaaagccccattaagggggcctgtttttttaaacgggaatcacaatttggggttttttgaaacccccgcagagcataaacgggagaaaagaccccattttttttttgttggggatactgggctccccagggttcgtttccaactcaacataaatcccattgggctgcattatggccgggggaagcccaacttgtccgggggaaattaaaccatggccccgatccgactgaatccacaggatcagacttaaggtggttccttcactt

SEQ ID NO: 178272 - DNA, 418 bp, Zea mays
  Clone ID: MRT4577_94172C.1
gggagacaaagcgacttcgggttttttagctgcaaattttggtttttttttcaaaagcacgaaggggatctgcgaccccttttttccttcccccccaacaaaaaatgcaagggggctttaaagggccatgacaaaaaccccaacccggcaactttttcggttcaggagcaggaccccccccgagggggacccattcttggcctacaaacctagtttgcacacgggcacgttcttacggaaacttgtgggactcaccagccggggggatcccaaaaaccacgggggggagcggcaccacggggcccaacacgggcgggagtggggggatcaagggaaaacccctggcctttttgttgcccccgtttctaccaccaccgttgggggggggaccgtccgacacccccgggccgtttgtttt

SEQ ID NO: 178273 - DNA, 367 bp, Zea mays
  Clone ID: MRT4577_94173C.1
gttctgtgttattttacagcgaattgccacaacccgtgaacacggggggggcacggggcggagtccgggggcacattcccatttcccattaaccccagcaaatgcccaaaccgaggggaaaaacctatggaaatagattagaaagaaataaaactccgagataaatgtataggccctgtgcgtccggaatttgcccccgcaatgggggcctcgggcgctcctgagggaagcttggggccggagaatagagcctgccagcagggttgccccgaagccagccccaaacgccttggacgaaaactttgccccctctttatccattaaccattttgattgaccgtgaacagggccttaacccgggacaaaa

SEQ ID NO: 178274 - DNA, 714 bp, Zea mays
  unsure (1)..(714): unsure at all n locations
  Clone ID: MRT4577_94174C.1
cggaatagtagtaacgtatatatatgcttatgtagcttggtggagctggtggttaggaaagcatgggtgtatatatgtatgtccactttattttgtaggatagaagatgcctttaaatcatagataggtttgggcaggaaagaatagggtaaggaaatattccatccaagatggtggatcttgattcctttgaagatctggcttgaatcttatccttccttgattttatgaggtcgatcatcttcaatcttcgttcttgaagttgttatccgaatttgggacatgtagtgaaggcagattcttaggtaaacaaaataggttaataggtggttatgagttaaataagtttaagcatagtctgtcttgttgttttgctcctagattggttggataagttatgtaacctgttatatcggtcaagtttggtgttatcatcaaggataatgggntattggtgttaccataactagggacatagttgagataggtgtgggttcatggggtaggtagattgaatagagtttttctttgcttgtaagataaatgggttgggcaacctacaatataggctagtttgtgattcgatggacaagttggtttaaaacaccattttaggtttaaaacccattcataggaatatggtttagttaatacttgtnacccagattagaccatatcagataggtagggtatagattagattggatatactag

SEQ ID NO: 178275 - DNA, 167 bp, Zea mays
  Clone ID: MRT4577_94175C.1
ggcacatgcatcctgagacttacaaccacgcgttcgatgaaacgtgggctgtggcggaataaaagtcattaaatccaaaaagtcacaagatccggggccgctgaatccgccggtccaattttgataaccgatttaacacctaaggggttccctgtggcaggtacaaa

SEQ ID NO: 178276 - DNA, 307 bp, Zea mays
  Clone ID: MRT4577_94176C.1
catctggttattaattgttttgtgtgcatactttggtgttttattattttttattataacatttataatatgtagtggtacaaaaaactttttttgtgacactttgatcagtaaacaaagacggtgaattttgtctggacaagggggagcatatattagatgaccatttgggggctaaaacaaaaggtctttgaaggactgtaacggggccttggggtacttgttaaaaacccacacctcgggcgtgaggaagccttatgttttaagcagacccacaaaggtggactccacgaagctaccgaatgtc

SEQ ID NO: 178277 - DNA, 315 bp, Zea mays
  Clone ID: MRT4577_94177C.1
gcgcattggcgagaacttctgaatttcatttaccacaccagtgcgttgccatttgacatgtagatacatcatcgcttgaagttcagagttcccatcacatttattcacatgaagcctgcaccgaaaactttgttcaaaaatgaatatgccaggatcacgctgcatgtcaccgcggaacaaaattgtatgccgagatgagggagcagatggcaaaaacaacaaatgccacgaaagatatggcaatggagccgatcgccaagttcgggaaggaatccttccccccgttttcaatcaaattacttgcttcgagcagtt

SEQ ID NO: 178278 - DNA, 391 bp, Zea mays
  unsure (1)..(391): unsure at all n locations
  Clone ID: MRT4577_94178C.1
atgcatgcagtagtaggtatangacgatcaaaaaattaaggaccgtggggtgcatctaataatcaagaacgctaggcaatgtgggcatatactacgtatatcattatcagaaggtggggtgctctataagaaacagtctctacgggaaataaaatcgtaaaagtcaactactcggggatctcactcggtgcaaagtagtgcaaaatacgctatctgtagctaccgtacaagctgcacagtttggaatactatgtgggcctggtgattgaaaagaaatctgaggggggcctgcaaacaggtaagaatgggaagtccaatggaaccgaaatggtggatttaaaaatgtaacaagaactaatataacccaaaagtagaaaaatggaattggatt

SEQ ID NO: 178279 - DNA, 798 bp, Zea mays
  Clone ID: MRT4577_94179C.1
ccggccgggccgggatcgggatcgaaagggaacgcaagcttcacccacacaaggccacaagatcctccctacgccacacgctcctcctacatagtaattgctaaccgcgctgcgttgattcactcgtcggtggctcagagacctgcaccaaaacagccgaggcaaagcttgccccgagtcctcgtgttttttccccctttctcccccttagtcttaggactcggcgttttgatcccgcctctggggtcgctggcaatggcgcgatgccgggggaccgccgagagcctctgccaggggcggctcgacctcgacgacgacaagttcggcgcaatgtgcaccaccgcgttcggctgcctccaggagtggccggacctgggcgccatgtgcggcgcgaacctcggcgtgcctgccatggccggcaacggcaacgagtcctcttgcagcggcagcggcggctccaggaagaggaaaccggacgcgtacgacggcctcgatgccacgggtggtgcaaacgacatgagcaagagacccagagggaagcggctgtctggcatctctgagatcgtggcgccagggaaagggaagcaggagcggccaaaggcaggcacaaagaaaaaggccgaggctgcatcggcggcggcggcggctgctgctgccggccataagaccgactacatccacgtccgggcccgccgcgggcaggccacggacagccacagcctcgccgagcgggtaatattaacagctgagttactgggcaaacatctttgcgcgcgtggcccatggcccatgctgctc

SEQ ID NO: 178280 - DNA, 443 bp, Zea mays
  Clone ID: MRT4577_9417C.1
cccacgcgtccgatttaatctgtgccaaactattggtggtgcaggatataacatgaaaggaaaaaaaaaaaaaaaaaaaaaaaaaaaaaaaaaaaaaaaaaaaaaaaaaaaaaaggaaaaaaaaaaaggaggatcaaggtaaaggaaccaaaaaaaggaacgaaaaaaataaaagaaaaaagtcaccaaaatgaaatccataggaccaatgattaaaaacgtagttgaagggaaaaacaatgggaaaacccaagtaaaaccccatgtaaaacaggcaaatttaaacagctggtaaaatagcgaagaggccagaaaaaaggcctttaccaaacaggggaaaaaccaaaagggcaaatggaacgggcattggaaaggcctttaaagcgcggaataagaaggggaaacgcccagggtaaccgcaacagtggccagtgctttagcgc

SEQ ID NO: 178281 - DNA, 334 bp, Zea mays
  Clone ID: MRT4577_94180C.1
cccatgggttggggtcccttcctttgtttgggggctgccaaacccctttttttttaccaacaaaaatttgctttttggacccatttccgggttaattttttcaaccacccttttaaattttttggggaaaccctaaaggacccaattcggggatgctaaaaacccccctgtgggcataaaccccaaagcacaaacgtccggtttacaaccgagcgacgtgggaaacaaaaaattttggggcccccattttttttacccttttaatggagggaaaaaaatatgaggggaggggtaaaaaaatgcaagcgccccaaaacccccgggggggtaaatt

SEQ ID NO: 178282 - DNA, 353 bp, Zea mays
  Clone ID: MRT4577_94181C.1
cccccaaaaaaaaaaaaaaccctgtctagtacttatttaacatgcgcaaaaaaaggggaagttgacagggagggggtttactgggcgcgaatatcatatgaatactcaaaaaaacccccctactcatataaactctggagagccagcccccctccggtacagggggggggcaggaaaaaaattttttttttcagcgggcgctttttttttttttgccgctgtggcagccccccccctttgtggtcggggggaaccctcgggggcggggcttttttttttgggcggtgagaaaaaaaaccccgatgctggggccaactttggggtgtacataaaggcacctaccccacgggggg

SEQ ID NO: 178283 - DNA, 203 bp, Zea mays
  Clone ID: MRT4577_94182C.1
cgggagggcccaaaatttccgggtgtttttaaatgccccctccgttttgccccttcgttcggcacccttaaaaatttacccccgccttaggagaatttttagggggtcccctcccacattatttcttttctcctgaaaatatccacaattctcccccccctgttgctccctttttaccctttattcggaccatttttccccct

SEQ ID NO: 178284 - DNA, 833 bp, Zea mays
  unsure (1)..(833): unsure at all n locations
  Clone ID: MRT4577_94183C.1
gccttcaatggatggcctacaagccactaaattgatccgttgctttgaaaatactggctgttgggatgcttctgtaaagcctgaagacaatgagatgatagctaactcagctatttcatctgattgtgtgcaagacaagaaagggaagagagtacctataattgcgatgacagcaaattcattcgcggagagtgctgatgagtgccttgctgcaggcatggattcctacatatctaagccaatgaacttccaaaaaacaaaagagtgcctgcagcgctatttgttgtctcagtaactaaccaattgctgtaaagtgtaggaaggtgatcctggagctgctgcataaagatttggccctgctttttggcgctgcttattcctgctccctgcgagtgctggtgtcactagcagcagtgaaaggggcgtgctgaaggggacctgacaaatgccatggataatgctcctcccctttcttcaggtttggggcaaggataatgctcctcccctttcttcaggtttggggcaaggggtttttcctgggaagtgctggtgcaggagagcagttgagcacaagggctgccgtgagttagaggggccggtgcaccgtactaccaccgaacaggcttgtgggcgacggcgcggtcgctgtcacgcgttgtgctcgatgcccggttcgtcatctcgacggcgaccggtcgtgggaaagagctggtacagatcagcacagncattcctaccggncggcggacggcgaggttcagctgcagtatggcgccaccatcttcttcaggtacaaaaggngggcacaagttgttgatgatgatggcataatg

SEQ ID NO: 178285 - DNA, 424 bp, Zea mays
  Clone ID: MRT4577_94184C.1
ttctttttttttttttttttttttttttttttttttttttttttttttttttttttttttttttttttttttttttttttttggcgcacaaaaaaggcatttggccaattatccttttttttttccctcgggacaagaattttggggaatcgtttaattaaactagcaattaggtggccccaacctacagaaaccaccccacgtggggaaacatttaacgctgggaagagagggcctaacccagtaacggggaagctttgtcaacaagcctaccaaaatccaggcaaaacattagtttcccccaggtatagccaattttttgatgggttttttttatccccatcctcatttccgcctatttacaaattcagctgggggggcccaggattttcattattactccacgatgcaggggggcctgttt

SEQ ID NO: 178286 - DNA, 177 bp, Zea mays
  Clone ID: MRT4577_94185C.1
gggaaaaaaaaagccctgggcatgacaacgatttataaagttccaagtttggcacacaacacaacacacacgagggtttagcctcaatacataatctcgcgtcctggagggggaatccctgctgggcatcaactttatttggggtcatcagaactttttatttccatccaaatcgac

SEQ ID NO: 178287 - DNA, 372 bp, Zea mays
  Clone ID: MRT4577_94186C.1
gcttagttcatggtcgcgacgtcgttgcgagacctgcgccagaccctgagcgctgtataaatggctgatggagaggacatgcagcctattgtctgccacaatggcactgcaatggccaaggctgggtcagctgtcgactatgcaccaagggctcgcctacctatgattgttgtacgatctcgccacactggtgtcacagtagggatgggacagaaggatgcctatgtggtccacaaggcacagaccaagagaggtatactaacgctcaagtatcccatcaagcatggaattgtcagcaactgggatgacatggagaaaacatggcataacactttctacaacctgcttacagctggcccagaggagcaccct

SEQ ID NO: 178288 - DNA, 985 bp, Zea mays
  Clone ID: MRT4577_94187C.1
tacctcgaggccggccgggccgcaagcagaacagtccctccctcggcctatccggctactcagaccaagaacagacggccaagggcactcgcgcctttatataaaggaatccaccattcccattagcttaggtttcatctccttgtatgcacacaaacccatcgcagggcattctcgagcatagcttctctggctctctctcccctcctctcctttcctctcgttcactcctccacgcctacgcccagaggttcgtccttgcatgcacacaaacccatcgcagggcattctcgagcatagcttctctgcctctctctcccctcctctcctctcgtccactcctttgtccaaagcttcgagatggctcagcagcagaaggtggtggtcagggttccaaccatgacagatgacaagatcaagcagaaggccatcgaagctgttgcggacatttacggtattgactccatagcagcggatctgaaggagaacaagatgaccatcataggcgagatggatgcagtagcgattgccaagaagttaaagaagattggaaagattgacattgtgtctgttggacctgcaaaagaagaaaagaaggaagaaaagaaagaggagaaaaaggaggaaaagaaagaagagaagaaagaggagaagaaagaagagaagaaagaagagaagaaagaagaaaagaagtgataaacctataaaacatatatatcatcgcatggcctcacttatcttcagttgcattgactttgcactgttgttgctatgtggagttactatgtaatacttatactacagagtacatattagttaataataaaagtgcaatttgtgcatttcttttaaaaaaaaaaaaaaaaaagcggccactcctataggccatgaaaggaggatgaaaattaaaaaataaaaaatataaaatatcatattgataatttatgtatttgccttaaacaaaattactaatttttctttttgg

SEQ ID NO: 178289 - DNA, 282 bp, Zea mays
  Clone ID: MRT4577_94188C.1
ccccaatgcgccggcctccacttgcctacttggggcgtgaggaggttggagagttttttctgggacctaaacaaaggcatccacggcgctgctaagctgaagttgagcctcacatatcctggaaaggaaaatgcccataccagaacccaagcctggagatctgattgagattttccgccctatgtacagtcactgggccatctatgttggtgatggatatgtgatccacctggctcccccaagtgaaatcccaggagctggggcagccagcatcatgtctgc

SEQ ID NO: 178290 - DNA, 768 bp, Zea mays
  Clone ID: MRT4577_94189C.1
ttgggtacctcgaggccggccggggaacagaacagtccctccctcggcctatccggctactcagcaccaagaacagacggccaagtgcactcgcgcctttatataaaggaatccaccagcagcattagctttggtttcttctccttgtatgcacacaaacccatcgcagggcattctcgagcatagcttctctgcctctctctcccctcctctcctctcgtccactcctttgtccaaagcttcgagatggctcagcagcagaaggtggtggtcagggttccaaccatgacagatgacaagatcaagcagaaggccatcgaagctgttgcggacatttacggtattgactccatagcagcggatctgaaggagaacaagatgaccatcataggtgagatggatgcagtagcgattgccaagaagttaaagaagattggaaagattgacattgtgtctgttggacctgcaaaagaagaaaagaaggaagaaaagaaagaggagaaaaaggaggaaaagaaagaagagaagaaagaggagaagaaagaagagaagaaagaagagaagaaagaagaaaagaagtgataaacctataaaacatatatatcatcgcatggcctcacttatcttcagttgcattgactttgcactgttgttgctatgtggagttactatgtaatacttatactacagagtacatattagttaataataaaagtgcaatttgtgcaaaaaaaaaagctacctgctaagcaacttatgttcataagt

SEQ ID NO: 178291 - DNA, 321 bp, Zea mays
  Clone ID: MRT4577_9418C.1
ttatcttttctcatcgattctctaagagatcgagctacttttgcaccacaaggcccaggatgtcttgcagctgcggatcaagctgcggctgcggctcaagctgcaagtgcggcaagaagcaccctgacctggaggagacgagcaccgtcgtgcaagccaccagcatactcggcgtgcccccggacaaaaaggcacgatgcctagctcgtctaggccgttgcggaatgcgcgaggccgcccactcctgcagctgcggcagcagctgccagtgcgacccctgcaactgctgatcacatggatccacgaccacggatatgatta

SEQ ID NO: 178292 - DNA, 367 bp, Zea mays
  Clone ID: MRT4577_94190C.1
tttttttttttttttttttttttttttttttttttttaaaatcgttggctgggatttttttttttgtttatatggaataatgtgttttttttctctgttctttctttagaaaaaaatttttagaaagacacgggggggttagaacacttacactatatattattagggcccctgaccagaggtcaccaaaaaaaccgctctaccggttcaaattccaaattttttctgggactgaaaggtggccgcggaaaccagggcccccccaaaaaaaatctgagattccgagcaccaaaagtcgaaaacttacatggcgtgcacaataccctgcaaaaaaaaaacggggtgctaaaaacccccctcttaatgg

SEQ ID NO: 178293 - DNA, 928 bp, Zea mays
  unsure (1)..(928): unsure at all n locations
  Clone ID: MRT4577_94191C.1
tgtaattcngcacnangggcgggggcggggggggggtcaccgagaacggcacgctctacggcaccgctatcgcctcgtccacgcctctcgcctttggcaagcagcgcctcctcttcctcaccgagggcggagccgcgtccctcgacctccgctccatgtcngtccccgagactccgggggganccttgctgaatgctattggcaccagcggcaggcatactcgtttgacccctcggagcgattcaaggcctacggcttcaccgaagctggtgatctcgtgcacgtcctgcttcttggggatgtttccagcctcaaatgccgggtccgttccgggaagaaatctgagatggacaaccccgttgcaatacagacgatcaagggttaccttttggtggccagccatgataaaattcttgtcttcaacacatcggctcagtattatgggagagtcggtgcgcctcggccgctgtttgccacaagcatcaaggacatcaaatctgtgtttgcgggttctggtggcgtgctgcccaccgagccagctgggaagcctgttatcgcggcagaccgggagaagctggtgatcttgggtcttggggatggccacattgctatctataggtctaacttcccggtgtacaagccagagagcaatgctgttgtatggagtggaccagcgctgcttttcctcctgttcttgatcggcatttggcaagtatacgtgaaaaagaaggattctctgggatggacaccagaggagacatttaacacctctgtaacagcaccaacggggagccttttgaatcatccaactagtgatcgagcctttgcagacagcacagcaagaagcagtgaccggggctatgttgatggaacatcaagagccagtgatagaagctatgtggatgccactacaagaactaccgaccga

SEQ ID NO: 178294 - DNA, 553 bp, Zea mays
  unsure (1)..(553): unsure at all n locations
  Clone ID: MRT4577_94192C.1
aattcggcacgagggccagggccagcgcgcgcaaccccgtcgccgccttctcgaaccttccgaagatgagccccccgggcccgggcgccgcggggggggcggcgccccgaacgggcgcctcggcggggctccgcgtgcagatggggctcctcgacggggccgcggggtccagggagtgcggggtccacgcgggcgcctccgcgctcctctcccgcgccgactacgacgacggggtcaccgagcgcgccatctcggacggctgcggcaaccccgcgtgccccaaccctctctcctcctcctccggcgggcggacgggggcccggttccacatcggcctcagggagcaccgcgtctacgacctcgagggggcgcgcaaggtctgctccgagcgctggctcgtcgcctccaagggcttgggcggctcgctcccggacgagcgggcctacggggggccggtggaccggctggccggggacagaaggctaagtgggggcggggggggggggggcggggngcgggggggggggtgggggctgggggggggcgggggggg

SEQ ID NO: 178295 - DNA, 371 bp, Zea mays
  Clone ID: MRT4577_94193C.1
ggtctagaactcgcgggccgacccaagcgtctatggaaaatctgtccatcatctttacaaggtcaattttcgggccatcatcacacgcctactataattttagaagcagttgcttcacaagatttatggatttggcatgctttttttggattacctggctctctcaatgacatcaatgttcttcatcgatctcccctgttcgcaaaattatcaaatggagaaagtccacaagtgaattatagaataaataaccatgactattcaatgggatattaccttgcagatggcatatacccttcttgggcaacattggttaagaccataccagaaccacggggcaataaaagaatctactatgtgaaggcacaaga

SEQ ID NO: 178296 - DNA, 499 bp, Zea mays
  Clone ID: MRT4577_94194C.1
gtagcactgccatccctaccgcaagacactggtatcagtcacactaactagcactttccgtaaccaccagctcaccatgaaggcttgcgagtcagctctaacatgcggacgctctactcctctaagctcgccataggatgattgaagtctcaattgctaaaccctatccctgaatgagaattccatctactcttgcatcagcttttacatacttcaactgatgagcccaatgggcatgtgctgtacagttgccccttcctatccaacagcaaagctatcgtctaatcacgagatgacacgtcaggactatgtacacatggacttaccatgactggggacgaagaaacaagaacattaacattaaaagggccagactgtatgctttcctacacctggagcaataaaaacagatactatgactacctgcaatttcactacactagctgtgtgaaagcaactgtacatccaaaaccggtctcatctagaactgtaaaagatg

SEQ ID NO: 178297 - DNA, 4155 bp, Zea mays
  Clone ID: MRT4577_94195C.1
atggggcgcctcctccttcctcagaggaggcggcgagggtgggaggtgggggacgaatggggctccacctggtccaccggcctcaccaaggaccactttgacggatcctctgtcagcaaaccagtatcagcagagcgacgtcaaggagtgatggatcctaatacgaagatgatccttgatgaaatggagaagaagttttcggctatggatctcaagtgggagaaacgtttctcggcgttcgctgatgccaaggaagaacgcctcagtgctgtggaggtggccgctgaggatttggcggtgtggcgtgtcaagatggacaccaccatggaggacgtcaagttggatttgaggaagctcaacaagcactgggatcgggcatccctcgaggccgcgacagaaccaggattgttgcagaagcctgttgcagctatcggtcgagcactcggtggtcctgagggagaaggttttggaggcatccgtgaggaacccatcctgccggagcagggttttggctccgtcacgacctacgttccaaccagcaacaagggtatgcatcacttcgtacctcctcctgtccagtccagtgcctgttgtcctggtcttgcgtttgatgtcggtggatctcgtcacaggaattttgagtctggttttcattcgttgggtaaattaccacaactaccatttccaacgtttgagggtgataatccccgtctctggatttcacggtgtgaaaattattttgatatgtactttgttgatcctgattcctggattcggtcactgcttgatcgctatggcaagaaccagcatcaggcgttgctacgccaactgttcaggattcgacaaacgaattctgtgtccgactatattgctcgattctccactctcatggatcaattgtctgcctatggtgctgtgtctgatccgttatattttactacccgattcttggatggtttacgggacgaggtccgtgctgttgtgattatgcagcgaccgggagatttggacgcagcatgctctttggctctgttacaggaagaggttgcggactcggggcgacgtcgtgcgttccctcggtttgaatcgggttcgtggtcgaaatcagagggcaaggggccttttcccttaccttctcctccttctggggatcggaatgtgtcatccaactctgataaacgtccagtgtcaccgtctaagtcagtggatgagcgactgggtgcactgcgggctttccgtagggccaaaggcttgcgtgacagatgtgcagaaaagtggcataagggccatacttgtgcagcaacggtgcagcttcaggccatgcaggagggttacatttttcaccaggatttgaaggtccttcccctgcagcattatgacatgattttgggaatggattggttggaggttcacagacctatgcatgtgcattggcgtcacaaatggctttctattacatatcatggatcttttgttacattgtatggctcagactatggggctagtgagagcttgctaattcagatatcatcagtgtatgtacccgagcctgcaagtgagagctccaagttttaccctgagattgagtccttactgtcccagttttcttctgtgacttcagctccaacttcgttgcctccagtaagaagttgtgatcatgctataccattattggtgggagccaaaccagtaaacatccgcccttacaggtacccacctgcacttaaggatgaaatcgaagcacaagtcactgttatgttacaacaaggccttattaggcccagttcctctcccttcagctcccctgttttattggtcaggaagaaagatggctcttatcgtttttgtgtggattatcgatatttgaatgcactaactgtgaagggcaaatttcctatacctgtttttgatcaattgatggatgagctagcagggtctagttggttttccaccttggatttggtctcgggatatcatcaggttcgtctaaagtcaggtgaagaatttaagactgcttttcagactcatggtggacattatgaatttgtggtcatgccatttgagctggctggcgctccagggacgttccaaggagctatgaacaccacactggctacattattgaggaaatatgtgttggtattttttgatgacatattggtttacagtagaacatttgaggagcatcttaatcatttgagagatgtgttgttgctattgcagcaggatcattggcacattaaattatctaaatgccagtttgcccaacgaactatctcatatttggggcatatcattagtgagcaaggtgttgcaactgattcagccaaagtggctgctgttcgggattggccatctcctctcaatgtgaaagagttaaggagctttttggggcttgcagggtattataggaagttcattcgtcactttgctatcttgaccaagcctttaaccgagttacttcgcaagggtgtcttgtatgtttggacttctgatcatgaaatttccttcactgctgtcaaacaggccctatgtactgcacctgtgttggcccttccggatttcaacaaaaccttctgtattgaaactgatgcttgcaagtctggtgtgggagcagttttattacaagaggggcatcctttgacatttattagcaaggcactcggaattaaaactcaagggctttcaacttatgaaaaagaatatttggctattttaatagttgtggagcagtggcgaccttacttgcttcacgcagagtttattatctttactgatcaaaatagtttggtccatcttaatgatcagagattacatacaccctggcaacaacgagtttttactaaactactaggcttacagtacaaagtagtttacaaacaaggcatccagaatagagtgactgatgctctttctcggaggacacatgaagagaagagtatccaggagtttgtggcctcatgtgatatctgccagcaagctaaaccggatagaagcaagtatccggggtcacttcaaccattggctgttccagctggtgcctggcagacaatcactcttgattttgtggaaggtcttcctctatctcgtggtaaaaactgtgttttggtggtggtggacaagttctccaagtacggacacttcatacctttgaagcatccttttactgctgcttcggtggctcatgtgttcatgcaacaagtataccgtttgcatggcttaccatttgctattgtgtcggatcgagaccgaatttttacaagtcaattgtggaagagtttgttctccttggcaggcgttgcattgaatatgagcagtgcttatcacccacaatcggatggacaaacggagcgggtcaatcaatgtctggaaacgtttctgcgctgttttgtgaatgcctgtcctcataaatgggtgcagtggatttatttggccgagttctggtacaatgctgcttgtccagctcctcagttagctgattggctccaggagaaatctgtcatgtccgcattggtacatcagcacttggcgcgggctcaacagcgcatgaaaattcaagctgacaagcaccgatcagagcgacattttgcagtgggtgacagcgtctacctcaagttacaaccttatgtgcagtcctcgttggcacctcgctccaatcagaaacttgctttccgtttctttggacctttttcggtcatcgccaaagttgggtcagtggcctacaaattgacgttgccagcttcatcacatattcatccagtttttcttgtgtcgcagttaaagaaagcagttccttcttctgtgaccgtggatcagctgccggtgtcgttggcaggtttccagatccctgaactggtgttgcaaaggcgtcttgattccaaaggcaatactcaggctttgatcaagtggtcgggcttaccgccttcgttggcaacttgggagaacttggaggttgtgcagcaggcttttcctctgtcccctgcttggggtcaagcaggacttcgtcgaccggggaatgtcagcaaaccagtatcagcagaggtaactgaagtgttgggccaggaagataagactgaaagtgtccataggctgaaaaggagcgacagaattaggaggaagaacgtgcggctgtctgggccagagtggatggcgtga

SEQ ID NO: 178298 - DNA, 163 bp, Zea mays
  Clone ID: MRT4577_94196C.1
gtaaaaaaaacgcgggggagaccattttgggagagccaaaggcagattgaaaactgcggaaaccaggtaaaggattggtttaacgggtcacacgccacgggaaatcccgtcatctggccatgcatgtggcctaaacgtgtatggacttggtaagcagctctac

SEQ ID NO: 178299 - DNA, 288 bp, Zea mays
  Clone ID: MRT4577_94197C.1
cagattggatggctcctctgctctccgctgccagagtggcatcgtgctagctctgctgggttgccaatttgacatgccttagcggcttagcctatagccttgcactgcggtttgtttcggttcatctttttcttcaatcttgtcactcacaaggctttcccccctctggttttcttgattttccgctcggaaatttgccatgccttagccttgcactgcggtttgatttggttttcttggccatgcttgcttggataagctttggcttcaagcttcagcctagctcgc

SEQ ID NO: 178300 - DNA, 370 bp, Zea mays
  unsure (1)..(370): unsure at all n locations
  Clone ID: MRT4577_94198C.1
taggtaaaaaagggaggaatagaaagaattaaatattgtggggatacaagaattttgtttatagnttaggggaagaataattanagatattaaatgttgtnaggnaaatgttngnaataacgatattgagggttgtgtggnttanntattatacaagaacaagaggagggagagaagnaaangtaaaggttatgannnagtatgttttttagggttagttganggngcatgagaattnagnaggggttgtagngtattggaaacaatgntnatgttgggnaggaagttggtttagtattgaagaaaaaagggggtgaaagttgtaaattttgtaaaaggtttaggaggatagtangntnnaagttttgag

SEQ ID NO: 178301 - DNA, 130 bp, Zea mays
  Clone ID: MRT4577_94199C.1
attatataatagtgtctgttgtacaatctgtacacttcagaattgttcatgttgggcttcacagtttacacggctatcccaacatgaacaattctgaagtgtacagattatataatagtgtctgttgtac

SEQ ID NO: 178302 - DNA, 330 bp, Zea mays
  Clone ID: MRT4577_9419C.1
acaaggcttacgggtacatccccacgagcacataaggggcccactgggcccgggacgcctgacaaataacagctgcacccttgaccaaatacaggcttgttgggttagctctcaatccatgtgaattgaatcaaaatggatacctgtgaatttcaaacaatttaaacttaacaataaacatttccaaactgattcaatccataggccattagaaataaccgatcacagatttgaagtcaccctgtttgttcatctgataacccgtggacacacaacgcgacagagactaaaaacttggtcaatattaaaaaagaaaggtgtgtcatttta

SEQ ID NO: 178303 - DNA, 507 bp, Zea mays
  Clone ID: MRT4577_941C.1
cctttttaacatcatctatattcattttcagaaaacacgactattaacttttttgtccttggccatgaacctactttccttgttggatcgacttagcttaattgttatacctattgttttattcgtctattgtggatccaatgaattgaagacgaataaaatccgtataatttcctaactaaaaatgagattgctaaagattatgttgtgattcttcgaattattgcacatatcctgtccaggtagaatacgaaatttatgatattcgaaaattaaggaataaagcataaagaaataattaatgaatacaatccttatccatctttggtttctttctgcttgatatactaaaaaagaattcataaaggggaaattgtcgtcatgtcacgaagaattctatctatggcataggagtaactagaattaaaaagaagggaatgacgaagcatttggtaataaacgatcgatttctatcaataaagctggtaaagccccaaaccatagagt

SEQ ID NO: 178304 - DNA, 612 bp, Zea mays
  Clone ID: MRT4577_94200C.1
atggctagacgtggagggggatgccttgtccgcgacgtgcgcgtggttggcggagggggcggtttgggagggaaggggaacgaccaggagcggatgggtaagacaacactatttaactgagacgggagaggaggctttaaaatgcaagtccaggataagcatcgaggtaaagatctcctggacctatgggttaggacccacacacgcttctgctgcgccactctgatcttgttggttgatgttggtcgcattgtcttcactggggagttggaggttgccaaatggacaggtgcaagaggaaataatagcgaggaaagacaaaacttgcaaggcgtcaaagaaggggaagcaatcaatggtgaagtaggtgaggcattacccccgaacagggatgaaaagaggaggcttcaagctaagcaagacagcaaggacatagatatcacgagggttttaaaggtaataacggacaaggatgtaggagatggggtaaataggcataagggaaaggatataagtaccacaaaggatggagttgggataggacctacaaatggaaaaggggagggtacgtccaagggccagataggtaaactgccactctcaaattgaggg

SEQ ID NO: 178305 - DNA, 851 bp, Zea mays
  Clone ID: MRT4577_94201C.1
ttgggtacctcgaggccggccggggtttcggggttcccctccgctgtctcgcctctcttttggttcctcgcggcgacgactgggcgagcgccgcctcctctccctcgctccctccgtgagctcctcgccggcggcgcgcgccgccgcccgttgccacgttttttccgctgacgtgggctcaccaggggcggtcttctgggcgatctcgtgggtttggctatgtaacattcgcatcagccgacgatgcaaagaatgttcttgattgcgagcatgttcttgggagccgtacattagaagtgaagatagctactccaaaggaagaaatgaaatcacaaggaacaaagaaagctacaaggatatttgttgctcgaattccacagtcagtggacgagtcgatgtttcgtaggcattttgaagcttttggagaaattcttgatctttacatgccaaaggaacatggttcaaaggggcatcgtggaattgggtttatcacgtttcagagtgcagagtctgtggacagcatcatgcaagagtcacatgagcttgatggcacaacagtagttgttgatcgcgcgactccgaaggaggaagatgtaagataccccccgagtagaccatctcagggtggctatggtgcatataacgcttacatttcagctgctaccaggtatgcaactttgggtgcaccaacactgtatgatcatcctggatcagcctatggaagagggtactatggatcctctcaagcagtgggcaagaagatatttgttggtagacttccacaagaagcaaacacggatgacctaagacattactttggcagatttggtcgaatcgtagatgcgtatatt

SEQ ID NO: 178306 - DNA, 122 bp, Zea mays
  Clone ID: MRT4577_94202C.1
cccacgcgtccgtccgcgcgaacgctcaatgcatgaggtgtagggagggacttacgtcaccacatacagaatctaacgctagtgccgaatccaaagctcgggcgacggttcatccattcgac

SEQ ID NO: 178307 - DNA, 619 bp, Zea mays
  Clone ID: MRT4577_94203C.1
cgattgtgtcgtcatgaagagcggacttctgggcgatctcgcgggtttggctatgtaacattcgcctcagctgacgatgcaaagaatgttcttgattgcgagcatgttcttgggcagccgtacattagaagtgaaggtagctactccaaaggaagaaatgaaatcacaaggatcaaagaaagctacaaggatattcgttgctcgaattccgcaatcggtggatgagtcgatgtttcgtagacattttgaagcttttggggaaattcttgatctttacatgccaaaggatgaagatgtcagataccccccgagtaggccatctcagggtggctatggtgcatataacgcatacatttcagctgctaccaggtatgcaactctgggtgcaccaacgctgtatgaccatcctggatcagcttatggaagagggtattatggaccctctcaagcagtgggcaagaagatatttgttggtagacttccacaagaagcaaacacagatgatctaaggcagtactttggcagatttggtcgaatcgtagatgcatatattccaaaggaccccaaaagaagcggccaccgaggttttgggtttgtcaccttcgctgatgatggtggg

SEQ ID NO: 178308 - DNA, 362 bp, Zea mays
  Clone ID: MRT4577_94204C.1
aattcccggctcgacccacgcgtacgcaaagaaagctacaaggatatttgttccttgtgatttcatttcttcctttggagtagctatcttcacttctaatgtacggctcccaaggaagaaatgaaatcacaaggaacaaagaaagctacaaggatatttgttgctcgaattccacagtcagtggacgagtcgatgtttcgtaggcattttgaagcttttggagaaattcttgatctttacatgccaaagagtctgtggacagcatcatgcaagagtcacatgagcttgatggcacaacagtagttgttgatcgcgcgactccgaatgaggaagatgtaagataccccccgagtagaccatct

SEQ ID NO: 178309 - DNA, 1670 bp, Zea mays
  Clone ID: MRT4577_94205C.1
ctcgaggccggccggcccggcacggctctgagtccctgacgacctcgttcccctccgctgtctcgcctctcccttggttcctcgcggcgacgactgggcgagcgcctcctcccctccctcactccctccgtgagctcctcgccggcggcgcgcgccgccgcccgtcgccacgtcttctccgctgacgtgggctcaccaggttcaaggcaatatctgtgttaatcttggggaccttcagtagattgctgagagttctccttgatacaggggaataaagatccaaataagtttttgacattgatctgtagccagtactgcaatggctacgaagcttgtggttctcggtatcccctgggatgttgacactgaagggttacgagagtacatggccaagtttggacccctagacgattgtgtcgtcatgaaggagcggtcttctgggcgatctcgcgggtttggctatgtaacattcgcctcagctgacgatgcaaagaatgttcttgattgcgagcatgttcttgggagccgtacattagaagtgaaggtagctactccaaaggaagaaatgaaatcacaaggatcaaagaaagctacaaggatattcgttgctcgaattccgcaatcggtggatgagtcgatgtttcgtagacattttgaagcttttggggaaattcttgatctttacatgccaaaggaacatggttcaaaagggcatcgtggaattgggtttatcacgtttcagagtgcagagtctgtggacaacatcatgcaagagtcacatgagcttgatggtacaacagtagttgttgatcgtgcgactcctaaggatgaagatgtcagataccccccgagtaggccatctcagggtggctatggtgcatataacgcatacatttcagctgctaccaggtatgcaactctgggtgcaccaacgctgtatgaccatcctggatcagcttatggaagagggtattatggaccctctcaagcagtgggcaagaagatatttgttggtagacttccacaagaagcaaacacagatgatctaaggcagtactttggcagatttggtcgaatcgtagatgcatatattccaaaggaccccaaaagaagcggccaccgaggttttgggtttgtcaccttcgctgatgatggtgtggcagaacgagtagctcgtagaagccatgaaattctaggccatgaggttgcaatagacacagcggcaccacttgagaatgattcagctgctggtgggtacattgatccaatggatctttacggagcttatggttcaatgagatctttcggcaggttctgtggcggtctagattacaattatggctatggccccagcagcggaagcagccgatcaagatcggattggcgataccgaccttactgaacgtgtccattgtcagtgatgttctagtttacctccagggaaggaaactgaaatggcgaaaagaaacattttaagaatgttaagtgttacgttaagtggcatgttaatcgtaagagggccgtgcggaatctgtcgatttgttcatgttgtaattttggacatggaaatgcttttatgcaatttctttgccgtgattcacattattgacacacgatgaaggcagcagcctttgtgtaaaaaaaacaaaaaaaaaaaaaaaaaagcggcc

SEQ ID NO: 178310 - DNA, 437 bp, Zea mays
  Clone ID: MRT4577_94206C.1
ccgccgccgagctcaaggtgaaggagctcaagaacggccgccttgccatgttctccatgtacggctttgggcaggaggccatttgcaacgtacaaggctcgatggatatcctaatcgactacatatcacattctgtgagccacaacgccttgtacatactctaagaactttgtccgcggtaactaattcactgaccaaatccactcatgtgtactactatcacatccatcaattgtgtcctacctctgtaacatgaacattgacttatattctgtactttacttaatcatatcgatctatcctattaatatcaccatccagactttactcattaccaatctgctcttaacaattactggaatcctctaccttgtttaagaggtatatatgccataagctcatacgaatgtctcctgatcaacggataaatctactta

SEQ ID NO: 178311 - DNA, 1762 bp, Zea mays
  Clone ID: MRT4577_94207C.1
cattgggtacctcgaggccggccgggggagcaacgtgtgctttgcacggctctgagtccctgacgacctcgttcccctccgctgtctcgcctctcccttggttcctcgcggcgacgactgggcgagcgcctcctcccctccctcactccctccgtgagctcctcgccggcggcgcgcgccgccgcccgtcgccacgtcttctccgctgacgtgggctcaccagatccaatgaaggctgccaacttgacgcaaggtgttcaagaaatttaaaccatgcactcttcatcgggaataaagatccaaataagtttttgacattgatctgtagccagtactgcaatggctacgaagcttgtggttctcggtatcccctgggatgttgacactgaagggttacgagagtacatggccaagtttggacccctagacgattgtgtcgtcatgaaggagcggtcttctgggcgatctcgcgggtttggctatgtaacattcgcctcagctgacgatgcaaagaatgttcttgattgcgagcatgttcttgggagccgtacattagaagtgaaggtagctactccaaaggaagaaatgaaatcacaaggatcaaagaaagctacaaggatattcgttgctcgaattccgcaatcggtggatgagtcgatgtttcgtagacattttgaagcttttggggaaattcttgatctttacatgccaaaggaacatggttcaaaagggcatcgtggaattgggtttatcacgtttcagagtgcagagtctgtggacaacatcatgcaagagtcacatgagcttgatggtacaacagtagttgttgatcgtgcgactcctaaggatgaagatgtcagataccccccgagtaggccatctcagggtggctatggtgcatataacgcatacatttcagctgctaccaggtatgcaactctgggtgcaccaacgctgtatgaccatcctggatcagcttatggaagagggtattatggaccctctcaagcagtgggcaagaagatatttgttggtagacttccacaagaagcaaacacagatgatctaaggcagtactttggcagatttggtcgaatcgtagatgcatatattccaaaggaccccaaaagaagcggccaccgaggttttgggtttgtcaccttcgctgatgatggtgtggcagaacgagtagctcgtagaagccatgaaattctaggccatgaggttgcaatagacacagcggcaccacttgagaatgattcagctgctggtgggtacattgatccaatggatctttacggagcttatggttcaatgagatctttcggcaggttctgtggcggtctagattacaattatggctatggccccagcagcggaagcagccgatcaagatcggattggcgataccgaccttactgaacgtgtccattgtcagtgatgttctagtttacctccagggaaggaaactgaaatggcgaaaagaaacattttaagaatgttaagtgttacgttaagtggcatgttaatcgtaagagggccgtgcggaatctgtcgatttgttcatgttgtaattttggacatggaaatgcttttatgcaatttctttgccgtgattcacattattgacacacgatgaaggcagcagcctttgtgtagttattgtgtgggagtgctggatgtgtgataaaaaaaaagatcattttcaaaagaagttataagcgatcgacgggcgcccggaaccgtctgatcgttagtctct

SEQ ID NO: 178312 - DNA, 1593 bp, Zea mays
  Clone ID: MRT4577_94208C.1
ctcgcctctctttcggttctcacggcgacgactgggcgagcgccgcctcccctccctcgctccgtgaggtcctcgccggcgacgagtgccgccgcccgtttccatgtattttccgccgattagtgtccaccagatctagtgaaggctggtaacttgacgcaaggggaatatagacacagaattttttgaacattgatctgtagccagtgctgcaatggctacaaagcttgtggttctcggtatcccctgggatgttgacactgaagggttacgagagtacatggccaagtttggacccctagatgattgtgtcgtcatgaaggagcggtcttctgggcgatctcgtgggtttggctatgtaacattcgcatcagccgacgatgcaaagaatgttcttgattgcgagcatgttcttgggagccgtacattagaagtgaagatagctactccaaaggaagaaatgaaatcacaaggaacaaagaaagctacgaggatatttgttgctcgaattccacagtcagtggacgagtcgatgtttcgtaggcattttgaagcttttggagaaattcttgatctttacatgccaaaggaacatggttcaaaggggcatcgtggaattgggtttatcacgtttcagagtgcagagtctgtggacagcatcatgcaagagtcacatgagcttgatggcacaacagtagttgttgatcgcgcgactccgaaggaggaagatgtaagataccccccgagtagaccatctcagggtggctatggtgcatataacgcatacatttcagctgctaccaggtatgcaactttgggtgcaccaacactgtatgatcatcctggatcagcctatggaagagggtactatggatcctctcaagcagtgggcaagaagatatttgttggtagacttccacaagaagcaaacacggatgacctaagacattactttggcagatttggtcgaatcgtagatgcgtatattccaaaggaccccaaaagaagtggccaccgaggttttgggtttgtcaccttcgctgatgagggtgtggcagaacgggtatctcgtagaagccatgaaattctgggccatgaggttgcaatagacacagctgcaccacttgagaatgattcagctggtggtggttatattgatcccatggatctttacggagcttatggttcaatgagatcttttggcaggttctgcggtggtctagattataattacggctatggccccagcagcggaagcagcagatcaaggtcggattggcgataccgaccttactgaacgtgttttagtttttacctctagggaaggaaactgaggagatggagaaaagaattacctgtctaagaatgctaagtgaggggggtaccttacgcgtggaatctatcaatttgtttcatgttgtgattttggatttgtcgtgattcacattattgacacaagatgaaggcagtccttgtagttactgtatggaagtgctgtatgtgtaataaaaaagtatcatttgcgaaagaagttataccgccaaaaaaaaaaaaaaaaaaaaaaaaaaaaaaaaaaaaaaactcgaggaaggg

SEQ ID NO: 178313 - DNA, 1922 bp, Zea mays
  Clone ID: MRT4577_94209C.1
gaccctcgaggctggccgctcgaacccctccgctgtctcgcctctcccttggttcctcgcggcgacgactgggcgagcgcctcctcccctccctcactccctccgtgagctcctcgccggcggcgcgcgccgccgcccgtcgccacgtcttctccgctgacgtgggctcaccagatccaatgaaggctgccaacttgacgcaaggggaataaagatccaaataagtttttgacattgatctgtagccagtactgcaatggctacgaagcttgtggttctcggtatcccctgggatgttgacactgaagggttacgagagtacatggccaagtttggacccctagacgattgtgtcgtcatgaaggagcggtcttctgggcgatctcgcgggtttggctatgtaacattcgcctcagctgacgatgcaaagaatgttcttgattgcgagcatgttcttgggagccgtacattagaagtgaaggtagctactccaaaggaagaaatgaaatcacaaggatcaaagaaagctacaaggatattcgttgctcgaattccgcaatcggtggatgagtcgatgtttcgtagacattttgaagcttttggggaaattcttgatctttacatgccaaaggaacatggttcaaaagggcatcgtggaattgggtttatcacgtttcagagtgcagagtctgtggacaacatcatgcaagagtcacatgagcttgatggtacaacagtagttgttgatcgtgcgactcctaaggatgaagatgtcagataccccccgagtaggccatctcagggtggctatggtgcatataacgcatacatttcagctgctaccaggtatgcaactctgggtgcaccaacgctgtatgaccatcctggatcagcttatggaagagggtattatggaccctctcaagcagtgggcaagaagatatttgttggtagacttccacaagaagcaaacacagatgatctaaggcagtactttggcagatttggtcgaatcgtagatgcatatattccaaaggaccccaaaagaagcggccaccgaggttttgggtttgtcaccttcgctgatgatggtgtggcagaacgagtagctcgtagaagccatgaaattctaggccatgaggttgcaatagacacagcggcaccacttgagaatgattcagctgctggtgggtacattgatccaatggatctttacggagcttatggttcaatgagatctttcggcaggttctgtggcggtctagattacaattatggctatggccccagcagcggaagcagccgatcaagatcggattggcgataccgaccttactgaacgtgtccattgtcagtgatgttctagtttacctccagggaaggaaactgaaatggcgaaaagaaacattttaagaatgttaagtgttacgttaagtggcatgttaatcgtaagagggccgtgcggaatctgtcgatttgttcatgttgtaattttggacatggaaatgcttttatgcaatttctttgccgtgattcacattattgacacacgatgaaggcagcagcctttgtgtagttattgtgtgggagtgctggatgtgtgataaaaaaaaagatcatttccaaaaaaaaaaaaaaaaaagcggccgtccgtttccatgtattttccgccgattagtgtccaccagatctagtgaacgctggttacttgactcaaggtgttcaagaaatttaagccacacactcttcatcatatgcccaggcaatatttgtgttaatctcagggacctccagtagattgctgagagttatccttgatacaggggaatatagacacagaattttttgaacattgatctgtagccagtgctgcaatggctacaaagcttgtggttctcggtatcccctgggatgttgacact

SEQ ID NO: 178314 - DNA, 143 bp, Zea mays
  Clone ID: MRT4577_9420C.1
cagagccgagaaagttgatgcattaggctcaagtttggcagcacaaagctcctgaaccaactgactggccttccatgtcttcccttcattacagagcccgagaatgagcgcattgtaggtcaccagatcagcactaagtccag

SEQ ID NO: 178315 - DNA, 2488 bp, Zea mays
  Clone ID: MRT4577_94210C.1
cggacgcgtgggtcacccctctaacaccacgccgccgccgtttgctgctcggcgcctctgctcacaacccgtacgccaacgtctccaatctcgtatactttcgtgctcagcatcatggacggcttccccaagagcgtcggcggtggcggacctaacattacggcgggatcccaccccggaagccggagccacgcggcggcaggaggaggacccccgcctcgttcccctccgctgtctcgcctctccctcggttcctcgcggccacgactggctcgcggccatccccccgcgcgcgactccttccctgcctcactccccccgcgggccgcgcccccgccggtcgcgccgtcgtctccgctgacgtgggctcaccaggttcagggcaatctcattgataaacttggggaccttcagcagattgctgagagttatccttgatactgggcaataaatatccgaataagttttagacattgatctgtacccagtaatgcaatggagatcaagcttgattttccttggttcccgggattatacagacactgaaggcttagaagtttagatggcccagtttcgccaatggctacattgtgtctgcttatcggaattgcctagagggttgacacgggaagagtgcaatttaacatgtgcaaatttggatactgcgaagattgttgctcaatgtccaaacggagttgaggaccccacgtgcccggccctggagtctgacgacctcgtttccctgctgtctcgcctctctttcggttctcacggcgacgactgggcgagcgccgcctcccctccctcgctccgtgaggtcctcgccggcgacgagtgccgccgcccgtttccatgtattttccgccgattagtgtccaccagatctagtgaaggctggtaacttgacgcaaggtgttcaagaaatttaagccacacactcttcatcataggcccaggcaatatttgtgttaatctcagggacctccagtagattgctgagagttatccttgatacaggggaatatagacacagaattttttgaacattgatctgtagccagtgctgcaatggctacaaagcttgtggttctcggtatcccctgggatgttgacactgaagggttacgagagtacatggccaagtttggacccctagatgattgtgtcgtcatgaaggagcggtcttctgggcgatctcgtgggtttggctatgtaacattcgcatcagccgacgatgcaaagaatgttcttgattgcgagcatgttcttgggagccgtacattagaagtgaagatagctactccaaaggaagaaatgaaatcacaaggaacaaagaaagctacaaggatatttgttgctcgaattccacagtcagtggacgagtcgatgtttcgtaggcattttgaagcttttggagaaattcttgatctttacatgccaaaggaacatggttcaaaggggcatcgtggaattgggtttatcacgtttcagagtgcagagtctgtggacagcatcatgcaagagtcacatgagcttgatggcacaacagtagttgttgatcgcgcgactccgaaggaggaagatgtaagataccccccgagtagaccatctcagggtggctatggtgcatataacgcatacatttcagctgctaccaggtatgcaactttgggtgcaccaacactgtatgatcatcctggatcagcctatggaagagggtactatggatcctctcaagcagtgggcaagaagatatttgttggtagacttccacaagaagcaaacacggatgacctaagacattactttggcagatttggtcgaatcgtagatgcgtatattccaaaggaccccaaaagaagtggccaccgaggttttgggtttgtcaccttcgctgatgagggtgtggcagaacgggtatctcgtagaagccatgaaattctgggccatgaggttgcaatagacacagctgcaccacttgagaatgattcagctggtggtggttacattgatcccatggacctttacggagcttatggttcaatgagatcttttggcaggttctgcggtggtctagattataattacggctatggccccagcagcggaagcagcagatcaaggtcggattggcgataccgaccttactgaacgtgttttagtttacctctagggaaggaaactgaggagatggagaaaagaattacctgtctaagaatgctaagtgaggggggtaccttacgcgtggaatctatcattttgtttcatgttgtgattttggatttgtcgtgattcacattattgacaaagatgaaggcagtccttgtagttactgtatggaagtgctgtatgtgtaataaaaaagtatcatttgcgaaaaaagttataacgccatcagacgaggtgcctgcacgtttatatacacaaaatcggttaaaaaaaaaaaaaaaaaaaaaaaccccgccccccgccctcgttaccactgctt

SEQ ID NO: 178316 - DNA, 1181 bp, Zea mays
  Clone ID: MRT4577_94211C.1
ttgggtacctcgaggccggccagggcattgtgctttgcacggcccggagtccctgacgacctcgttcccctccgctgtctcgcctctcccttggttcctcgcggcgacgactgggcgagcgcctcctcccctccctcactccctccgtgagctcctcgccggcggcgcgcgccgccgcccgtcgccacgtcttctccgctgacgtgggctcaccagatccaatgaaggctgccaacttgacgcaaggtgttcaagaaatttaaaccatgcactcttcatcgtaggttcaaggcaatatctgtgttaatcttggggaccttcagtagattgctgagagttctccttgatacaggggaataaagatccaaataagtttttgacattgatctgtagccagtactgcaatggctacgaagcttgtggttctcggtatcccctgggatgttgacactgaagggttacgagagtacatggccaagtttggacccctagacgattgtgtcgtcatgaaggagcggtcttctgggcgatctcgcgggtttggctatgtaacattcgcctcagctgacgatgcaaagaatgttcttgattgcgagcatgttcttgggagccgtacattagaagtgaaggtagctactccaaaggaagaaatgaaatcacaaggatcaaagaaagctacaaggatattcgttgctcgaattccgcaatcggtggatgagtcgatgtttcgtagacattttgaagcttttggggaaattcttgatctttacatgccaaaggaacatggttcaaaagggcatcgtggaatttggtttatcacgtttcagagtgcagagtctgtggacaacatcatgcaagagtcacatgagcttgatggtacaacagtagttgttgatcgtgcgactcctaaggatgaagatgtcagataccccccgagtaggccatctcagggtggctatggtgcatataacgcatacatttcagctgctaccaggtatgcaactctgggtgcaccaacgctgtatgaccatcctggatcagcttatggaagagggtattatggaccctctcaagcagtgggcaagaagatatttgttggtagacttccacaagaagcaaacacagatgatctaaggcagtactttggcagatttggtcgaatcgtagatgcatatattcca

SEQ ID NO: 178317 - DNA, 305 bp, Zea mays
  Clone ID: MRT4577_94212C.1
cttagaaaaaagactcaccatcgattcattttcccttcccgatagttctgaatcgatagggtcattctcgagagcagggggacgcgcccaccgcgatggctcgaaccaagcaccatgccgtgaggaacacagtgtataatcccatgattaatctccatttcgatcgctcatgtggtgcgagtacctcctcgactccggtgagcgcgtgcgtgcagacatcagttccctccttttgcctttcttgagggctgctcttacttgcttgcatgctgtttgatggtatgcaagaaatggctgcttggacc

SEQ ID NO: 178318 - DNA, 255 bp, Zea mays
  Clone ID: MRT4577_94213C.1
gacccacgcgtccttccacccgtgcggaagaagatcacggctgacagcatgaacatgtatgacaaccatgcagagcatgtcaaaacactccccattcctgtaagtaagaagaaaggtgacgtgacgctaactcctgactaaaaagctcatgggggggccaacaaaagaaatatgatccaaacactgcgtttggcagggaattgtatacgggggagaacacccccatctgaaagaagagctttgtagagatcactg

SEQ ID NO: 178319 - DNA, 566 bp, Zea mays
  Clone ID: MRT4577_94214C.1
attggggacctcgaggccggccgggaacctctttcctcccccttcatacccgagggggagtaccgctaccgcgccacgctgccgccaccgtcatccgggcggccaccccgccaaacgccatttcgctccgcccgcttcgcatctccctcgccccccaccccaaccactcccctcgttccgcccgcgtcacccgactcaatccgattctatccgcccgcaccgcaacccgccggcgccgcccgagatcccgcccccagggttccgtcccgtgcgatgcgcggatctggctgagggcgagccatgccgagcgtcggggtgaagatctacagcggcttcttgaagctcttgctccggcaccggctccagttgctggcctccgcggggggcctcagacaacgcggtcttcggggtctcctgccgccccgacgaggccaccgtgctgcgcaacacggtcttgtccgccggcgccgagggggtcaggtgcaaggagctccacatcgaccccaactcctcgctctcaggccgcatcttccgtccgacatcgctttcggtaggacagaaaggtg

SEQ ID NO: 178320 - DNA, 245 bp, Zea mays
  Clone ID: MRT4577_94215C.1
cccacgcgtccgcccacgcgtccgattgacaaggctgagaagaagaagactctgcaaacatttgtcatgcattttgtaaaagcatttaaagattgggagccaggctatattgagcaatcaatcgatcatgaatcgttatcagatgatacaattttaggatgctctactggtcatccttctgaggtcatccttattctcattcaagagatttctcaaataacttcatctatcactgagagcagcag

SEQ ID NO: 178321 - DNA, 307 bp, Zea mays
  Clone ID: MRT4577_94216C.1
ggttcctgaatctgaacattttattttattctattttattcaggggacccgacttcacacattatccaccgaaagattttccacataatccgggggaccggcccatccaagaaaaaaagcgtgaccaggccaggtcgacggctttctggttctcataaataaaacccatccccttttttcttttgagtgcctttagcgaaatttacattaaagcttgctaactttccgggtattttttaacttcaaatggtttcccggaagatttgagtttctctttcagggacttgtcttgctatacattttaaaa

SEQ ID NO: 178322 - DNA, 270 bp, Zea mays
  Clone ID: MRT4577_94217C.1
aatagctgctggatcttatgtagtggaagttgtatctccagcttacagatttgatcgcgaacgagtggatatcacgtacgaaggaaaaatgagagcaagatatgagagttacatcggtacatcagaggttgtcagactgccctatcctctccaaatgaaatcttcaggtccaacttcttacattataaaaagggaatcgaggggctggacagactttcaaatgaacccaatggtaaagatgatggatcttccttaatggatattggagca

SEQ ID NO: 178323 - DNA, 302 bp, Zea mays
  Clone ID: MRT4577_94218C.1
gggggaaactggacaagcaaatttacttacaacccggcagaaaagcctcaattcgtttttcccccatttgaaaagcctcggtttatttttttacatttccagctccctccaaataataaagactcgaaagggtccttctcgattgcgcattttatcaaagggagaagccctggaagcaggcaactgcaatagtttgaccgcttatagtaaccaacccagcccggttgtgaagtccttgggcggattttaccaacgggtgggtggctttggcttaacgagcagttaagcatgccaaatttggc

SEQ ID NO: 178324 - DNA, 326 bp, Zea mays
  Clone ID: MRT4577_94219C.1
gggacccaaacccctttttgtttttgctagcatgggccaagggcactttttttcacaagggggggaaggggttaaaaaacccaattttgggggtttttgctccaaaaaaaaaaaataattccgttattttgaaaaaaaagggccctggccatgaatttgccaacccaacttatgggcccccgaaggttggctttggccccaaaaggccttaatttttttccacttttttttccgggcccaagtccttaaatgccattgtttgggggggccccccccgatctaaccgggaaagggaattttaccggttggggaaaccccccagggga

SEQ ID NO: 178325 - DNA, 344 bp, Zea mays
  Clone ID: MRT4577_9421C.1
ccttggggtttttttttttttttttttttttttttttttctttaaatttttgggaaaaaagtggagtaaaaacgagagaggagacaccagaccaccaaacgccgcaaggcacggcccaggaggaaggggaggcccgcagaagccgcccaacaggggggccggagcccccgggggagcccccgggccaccccggccgcctcagaagcggccccccacgcgaacaggcggcgccaacccccacaagaacaaacactcctagggagagaaagacagcgcaggataaaagggccccgaagcaccaccaccaggggaaccacgaggaaagagggacccccaaaaaggaa

SEQ ID NO: 178326 - DNA, 731 bp, Zea mays
  unsure (1)..(731): unsure at all n locations
  Clone ID: MRT4577_94220C.1
ttctctaccatccgccgccgcaggctcgggttgttctcttcggctcgcctccccagcttccaccatgaactccatacctgcctatctgctagctgtaccagggtggaaacacttccccaactgctcgacgaggacccaatgattctgaaatcaagtgtggctgaagctgatgacgcaataaactacatcccctgctcacacaactcttcgactaggacataacacaagtgattgcaactcggaagggaaaggccatcctctgtgccttcaagtggtgaccgcaattgacatggcgaccttccagcagctagtagttgctgctcggcacatcacctgctgatgaggcgaagaaggaagtatactgctctgcacaatgaacagcctgatgacgatatgaacttcaccttgatccatgaacacagcactaccagctgaccgcttcttcgttgatggtctcataatattgatcggactccacgaaataagatcgccgatacctactacctacttatgctattctgcatgtgatgtacgaatgagcatcttcaagaatccttcagctgaatgttcgctggctccataataatattgataacgatgcaaattgtatgtgctggacgtacttgggtatcgcgacatctcagagtgcatcttcaaggatcctaagtggaatgctgtcatcagngtcacgaagctgcatatagatataattgctaggtatagctaaacat

SEQ ID NO: 178327 - DNA, 466 bp, Zea mays
  Clone ID: MRT4577_94221C.1
gttttgaattagagctagattatcaatcccacagttggaacagctgaatttgcagtgaatagtatactcggatagtacaacacagatgcacccactatgttctagaacatgccctttacccaaaattctgtatctgtacatgaggcacgaagcataggtctttttgtcaccaatgctgctgttcttttttactataccattgttttgaaatgttgtttacttgtggagcaaaagtagtttttgtagtctgttttgaaatgctgttgtttgcttgactatcacagaagttgttagaactgttgatggcaccatccaccgtggaaacttggtacaaggatatcacctccaactgggccaagtggagttacttatttggcatggtcccagttttctatgctctcaaaatggcagattatgcaaagattttgaagggcgatcttagcggtatagatcctcgggttgaggt

SEQ ID NO: 178328 - DNA, 422 bp, Zea mays
  Clone ID: MRT4577_94222C.1
acaagctttttttttttttttttttttttttttttattttttttttttttttttttttttttttttttttttttttttttttttttaaaaaaggggaaataaaacttcttatttctagggggccccatacctcagcaaaaaaacttcttttttgaaggaccaccaataagcaatctaaaagagggcccccccaatgatgggttgttggaaaaaggctgctgggtttgtcaaaacaaggtggacaaagggcaacaactggtgcagttgaaaaaagggggcgggggtaaccacaaaccggtgggaaaacggaaacaattggtggtgggtcaaaaaggaagccgggtttggtggaaccagccggccaaaagggagaagtatttgccgctggaaaaaacaaagggggtcagggcggccaattggtt

SEQ ID NO: 178329 - DNA, 275 bp, Zea mays
  Clone ID: MRT4577_94223C.1
tgcacacctacctaagctcggaattcggctcgagggaggggcttcctctgctatcttgtttgctcctgaagaagtggtgtgggccttgggcgactgcattctgaggatcgaagcctcgggtcggaggggatgcaccttttcctgcctcctgctgctggcggtgggtgcgcagcacgtcatggtgacggacacccaatcagcttcgacgacctttgttacgctacctccaacgcggaggtctacggagcgtgttgtggtaggtgaactagcactac

SEQ ID NO: 178330 - DNA, 402 bp, Zea mays
  Clone ID: MRT4577_94224C.1
acggaatgctccaaatttctatccatctcttgggtcactacgggtaaatgatacctgtgagagaaaagacatggaacgagagtagacggctaaacttctcgaaagcctctgcagtggtcgacataattagttgagcaagcaacaactcaatgatggcctttcaaatgtgcttgccttattagaagataatctacatgatgcttcaagagccactgactaccttcgacgacttcttgcaaggcttgtggaggaaagcatattgctcttccacgaagtaggtgaattgacttcaagaaagtgcataataaccagggtacctaatacaaggcgggattgcggctgacatcctaagtgcactcctctatttcataaaatcagacaaagggcatctattcttggatg

SEQ ID NO: 178331 - DNA, 116 bp, Zea mays
  Clone ID: MRT4577_94225C.1
actcttggcgggtgaaggtgtgtgtcagcttttgcgtcactcgagacctgggcgctagcttctaaaagagccgagcacgcgggtctgtcatcatgtcgcgttccgggcggtacgga

SEQ ID NO: 178332 - DNA, 4410 bp, Zea mays
  Clone ID: MRT4577_94226C.1
atgacttcccacggatcctcagacgacggaaatgcactgtcccacactgacaggcttgcacgagagggctttccccgcattttgtgggaggtacttcagggggccggatacacgacacctcctcagtacgcggtgcagcagttcgagaagcaccgagtgccccgctgtagagtgaggatgaccctggagcctcatcccctacagccaggctggcgttcactggactctgagtcctttggataccgggctgaggacacgatcgaggcaattgctctgcatgggttgaccactttctgcggattccatcccttggagctgtctacccaccccattggcttgttccccgtagaaagggaggacgacccgatgtggaaggatcgggtggagcacgccaaggacatctgggctatctacccaggtcagactgctcacttgacagtacggtgcatgaatgccctgtaccgtttgcaagtgatgcgtggtgaggcaatgtctcatctgatggcattattggaggcaacaaagatcaccttggacaacagaaaagagcttgtggttgatttgtccactgagatggtggaaaaggacttacaggtggagcagctatccaatgagatccaagagctggaggaattagtgggtaccagagagaacaccatcgaggttctcgaggatcagctcattaacacccagcagcagcttgccgaggctaatgagcacctggatatgcatcgccaggagatccaagacatggaggccaacgaggacgtcgacattgagggaggagaggagcctgcctccagcttggacactgcgggctcagggagaccaccttcccccgagtcgagtatggccgggagagcgcgtcgtggccagaatgagcgcgttcctccaccgccgccaccgcctcccactctgcaggagctaatggctcagcagaatgagatcttgaggcagctagctcagcgtcagccaccacctcagcactatggtggtggagaccatcagcgtcaccccgcggcagctacctaccaggagttcctcagtacccaacctcctttgttcactagggcagaggacccacttgatgcagatgtgtggttgagagtagtggaatccaaattcccgctactccatggagtttgctcagaggtcacaaaagtcaggttcgctacccagcagcttcacggacccgcaaggacttggtgggatcattttcttgctatgcagccagatgaccgagagggcaacaggacagtgttgcagtatgctcaggcttttaatgacctgtgccagtatgctgggtatcatgcagatacggacgagaagaagagagacaggttcaggagggggctcagcactaagctctgtgaccgtctcaacaccgtcagggccaacagctacaatgagttggtcaacatggccatctcccaggaggactgtatcacagctcgtcaggcagaaaagaagaggaagacccctgtggcaggaccctcagctcagccacagcgcttcaggattgtgtctgacactcagagcaggggacctcagcagcagcaagggcgatgggtgatccgaccagagcagcagcaacaacaggcacccaaccgcacccagtttccagctcaagggaacaatcagcagcagcagtatcgccaggcaaatgacaacaggtgtttcacatgcggcaacaccggacattatgccaagaattgccccaggaaccaacagaggcaggggcagaatgtgaatcagaatcaaggcaagatacagaaggtgcaagtgaggcagggcaggctgaacttcaccaccatggctgatattccagagggggcacccgtcatgactggattggatagcgtggatattatattgggagctgactggttgaccaggcatcaggcagtattggatattgcagccagggccattgaaattcattcccctgcttatggcgagactgttttatatttgcccgaccagggatgcacccgttcttgtgccttcgttatgatagaatccccagtggaaaagatcccagtgagaccttataggatgcctcccgcagaattggcagaactgaaaaagcaattgcaagagttgttggacaaggggtttattcgcccaagtacttcgccttggggatgtcctgctttattcgtaaagaaaaaggatgaaagtttgagaatgtgtgttgattaccgccctctcaatgcggtgactatcaagaacaaatacccactgccccgcattgatgtattgttcgatcagttggtgggagccaaggtcttctccaaaatagaccttcgctcgggttaccatcagatcaagatccgtgccagtgatattcccaagacggctttctctaccagatatgggctctatgaatttttggtgatgtcttttgggctgaccaatgccccggcttattttatgtacttgatgaactcagtattcatgccagagttggacaagttcgtggtcgttttcattgatgatattctggtctattccaagaatggagacgaacatactgagcatctgcacatcgtgcttcagcgactgcgcgatcatcgtctttatactaagttgtctaaatgtgaattctggctgaaggaaattaaattcttgggtcacacaatttctcaggatgggatatcagttgatcctgagaaggtacaagaggtaatggattggaaacccccgactacagtgagaattgccaaaccaatgactgaactgttaaagaagggagtcaagtatgattggagccaaaagtgcgaagatgcctttcatactttgaggcagcatttgaccacagccccagtgctggctcaacctgacaacaccaagccctttgaagtttattgtgatgcttctggcactggtttgggatgtgtcttaatgcaagatgacaaggtaattgcttatgcctcccgagcactcagaccccatgagcagaactaccctacacatgatctggagttagcagctgtggttcatgctctcaaaatatggagacactacttgatgggagctcactgtaacatttacacggatcacaagagcctcaaatacattttcactcaggcagatttaaacatgaggcagaggatatggttggaattaatcaaggactatgatttggaagtacattaccacccgggcaaagccaatgttgtggcagatgccttgagcagaaaagcccagtgcaattgtatgagcatagatgcaagagttaccaccctgtgtgatgagttgtgcaagctgaacctggaagttgtttcttcaggtgccttaagttatatctcggtagagcccacattgcaagagcaaatagtcagggcacagattaaggataagggtgttcaggttatcaaagacatgatcaagcagaaggcagaaaaatacaagtgcttccgtcaggacaacaagggaattttatggtttggagatagattggttgttcccaaggaccctgagctcagaaagaagatactagatgaagctcacctttcaaaattctacatgcacccgggcagcaacaagatgtaccatgatctcagatccttatactggtggaccaggatgaagagggaaattgccaagtacatatccgagtgtgacacctgccaaaggattaaagccagtcatttgaaggcagcatgccctttacaaccccttcccataccatcttggaaatgggaggacatttgcatggactttatcgtgggattgcccaatacctccaggcaccatgattccatttgggttattgtggacaacttgaccaagaccactcatttcttgccagtacacaccacccacaggacagagaagtatgcagaaatctacattgaccagatagttcgtctgcatggaataccaaggactatagtctcagacagaggagcaccatttgtggcacgattttgggaacaattgcaggaatcacttaggacctatgtcatacgaagctcagcataccatccccaaacagatggccagacagaaagggtaaaccagattttggaagacatgttgagggcatgtgtactgcactacggaaaagattgggacaagtgtctttctttagcagagttttcttataataacagctaccagtccagtctaaagatggcactttttgaagctttatatgggagaagatgtagaaccccgctgaattggtctcaagcaggagagagggaaatatttgggccagatttggtacttgaagcagaggcaaaggtcagagtcatcaagaagaacttagaagctgctcaggccaggcaaaagagctatcatgacaagaggaggaagcctctgcagtttgaagtgggagaccatgtttatcttaaggtgtcacccaccaagggtgtccagagattcggatcaagggcaagttag

SEQ ID NO: 178333 - DNA, 315 bp, Zea mays
  unsure (1)..(315): unsure at all n locations
  Clone ID: MRT4577_94227C.1
tttttatattttccccccncnnnnnnncnnngggaaagggtcaggcctagagcagccgaacaaggaggcgcaccaaaaggncaaacaccgggggccaaggggaaaaaaacggaggcaggcaaacagacaaggcgaggaaacaanncgccnnacagcacggggacggggagccaaaagacaggacgaaanggcaaaaaaaagggaggccgcccggcaccgaaacccgcagggaggccncaccggcaancaaggcccgccccggcggcccgccggggctgggaaaaccgccggctcccgaacggccggaacccgggg

SEQ ID NO: 178334 - DNA, 4437 bp, Zea mays
  Clone ID: MRT4577_94228C.1
atgacttcccacggatcctcagacgacggaaatgcactgtcccacactttctgcggattccatcccttggagctgtctacccaccccattggcttgttccccgccgaaagggaggacgacccaatgtggaaggatcgggtggagcatgccaaggacatctgggctatctacccaggtcagactgcgcacttgaccgtacggtgcatgaatgctctgtaccgtctgcaagtgatgcgcggtgaggcgatgtcccatctgatggcattgttggaggcaacaaagatcaccctggacaaccgagaggagctcgtggttgatttgtccactgagatggtggaaaaggacttgcagatggccgggagacagcgtcgtggccagaatgagcgcgttcctccaccgccgccaccgcctcccactctgcaggagctaatggctcagcagaatgagatcttgaggcagctagctcagcgtcagccaccacctcagcactatggtggtggagaccatcagcgtcaccccacggcagctacctaccaggagttcctcagtacccaacctccattgttcacaagggcagaggacccacttgatgcagatgtgtggttgagagtagtggaatccaaattcccgctactccatggagcttgttcagaggtcactaaagtcaggttcgccacccaacagcttcgcggacccgcaaggacttggtgggaccattttcttgccatgcagccagaggactcagagtatgctggatatcatgcagatatggacgagaagaagagagacaggttcaggagggggctcagcactaagctccatgaccgtctcaacaccgtcagggccaacagctacaatgagttggtcaacatggccatctcccaggaggactgcattacagctcggcaggcagaaaagaagaggaagacccctgtggcaggaccctcagctcagccacagcgcttcaggattgtgtctgacactcagaacaggggaccccagcagcagcaagggagatgggtgatccgaccacagcagcagcagcagcaggcacccaaccgcacccagttttcagctcagaggaacaatcagcagcagcaacagtatcaccaggcaaatgacaacagttttatcagtacaaaatttagagccaagtgtcaattgccttttcaccacaccaatgggggtattacgatttcaacaccaggaggcagggttgccacctaccaaatcaacaagaatgtgcctataaagtttggtagtctgataatcaaaactaacctcctcattttgggtttggatagtgtggatatcattttgggaactgactggttgaccaaacatcaggcagtgatggatattgcagctagggccattgaagtgcactcaccgacctgtggtgaaaccacattgtatttgcccgaccagggatgcacccgttcttgtgccttcgttatgatagaatccccagtggaaaagatcccagtagtctgtgactacccagatgtttttccggatgaattgccgagaatgcccccagaccgagacattgagttcgccattgaattgcaacccgggactgctcctatttccaagagactctataggatgcctcccgcagaattggcagaactgaaaaagcaattgcaagagttgttggacaaggggtttattcgcccaagtacttcaccatggggatgtcctgccttatttgtgaagaaaaaggatgagagtttgagaatgtgtgttgattaccgccctctcaatgcggtgactatcaagaacaaatacccactgccccgcattgatgttctgtttgatcagttagtgggagccaaagtgttctccaagatagatcttcgttcgggctaccaccagattaagatccgaaccagtgatattcccaagacggccttctcaaccagatatgggctttatgagtttttggtgatgtcttttgggctgaccaatgccccggcttatttcatgtacctgatgaactcagtatttatgccagagttggataaattcgtggttgttttcattgatgatattctggtttattccaagaatgaagtcgagcacaccaaacatttgcatactgtacttcagagactgtgtgaccaccagttgtatgccaagttgtctaaatgtgaattctggctgaaggagattaaattcttgggtcacacaatttctcaggatgggatatcagttgatcctgagaaggtacaagaggtaatggattggaaacccctgactacagtgaggcagatttggagttttctgggattggcagggtattatcgacgatttattccggatttctccagaattgccaaaccaatgactgaactgttgaagaagggagtcaagtatgattggagccaaaagtgcgaagatgccttttatactttgaggcagcatttgacaacagccccagtgctggctcaacctgataacaccaagccctttgaggtttattgtgatgcgtctggtacgggattgggatgtgtcttgatgcaagataacagagtaattgcttatgcttcccgagctctcaggccccatgagcagaactaccctacacatgatctggaattagcagttgtggttcatgctcttaagatatggaggcactacttgatgggagctcactgtaacatctacactgatcacaagagtctcaaatacatcttcactcaggcagatctgaacatgaggcagaggagatggttggagttaatcaaggattatgatttagaggtgcattaccatcctggcaaagccaatgttgtggcagatgccttgagcagaaaggcccagtgcaattgtatgagcatggatgcaagagttaccaccctatgtgatgaattgtgcaagctgaacctggaagttgtttcttcaggtgatttaagttatatcttggtagagcccacatttcaagagcaaatagtcagggcacagattgaagacaagggtgttcagattatcaaggaaatgatcaagcagaaggcagagaaatacaagtgcttccgtcaggatggcaagggaattctatggcaccatgattccatttgggttattgtggatagattgaccaagactgctcatttcttaccagtgcataccacccacaagatggagaagtatgcagaaatttatgttgatcaaatagtgcgattgcatggtattccaaagaccattgtatctgacagaggagcactgtttgtggcacgcttttgggagcagctgcaggaatcacttgggacccatgtaatacgaagctcagcataccatccccaaacagatggccagacagaaagggtaaaccagattttggaagatatgttgagggcatgtgtgctacactacggaaaagattgggacaagtgtctttctttggcagagttttcttataataacagctaccagtccagtctaaagatggcaccttttgaagctttatatgggagaagatgcagaaccccactgaattggtctcaagtaggagaaagggaaatatttgggccagatttggtacttgaggcagaggaaaaggtatcacccaccaagggtgtccagagattcgggatcaagggcaagttagctcctcgctacattggacccaacaggattaaagcaagttgtggacccgtggcctatcaattggaattgccacttcgcatgtcagcagttcacaatgtatttcatgtgtctcagctacggaaatgtgttcgcctacccactgaagtactacctgaactagaccttgagatagaaccagacttatcctatcaagaataccccatcaaggtattggatcggaaagagagatcaacacgggcaaggtcaatccggatgtataaggttcagtggagtcaccattcagcagaagaagctacatgggagactgaggattttctacgctctcgcttccccgactttctgcccaaaggagtcgggcacccactggaaaaagttgagcccgagaccttgacgtttgacatgccttggcatggtttttgtcgcgaggtgggcagagagacatacctgatttggcgaccaaagatctccctacctaggccatatctgccatggcgactcacggatgagagacagcccaaggtgccaggaaaaggctcgcgccggatttttgccaagattcgcacgtttgcgacttgggcgagctgtggaacacgggcagaagaaaagctccacgtgttcgacgcgctctgtgcacgccagagcacgcccgtgcgcaccccgcgtcgcgccaacggccagccgacgccatggcccgcgcccgcgcctataaagcccactcaggcgtcgactacactcttccgcgcacgctcaaacctcactagagctcaactcaccaccgtttgcccgtgcgcgacgtgtccgcggccacccgggcccctgccgccgtag

SEQ ID NO: 178335 - DNA, 4821 bp, Zea mays
  Clone ID: MRT4577_94229C.1
atgacttcccacggatcctcagacgacgggaatgcactgtcccacactgacgtgcttgcacgagagggctttccccgcattttgtgggaggtacttcagggggccggatacacgacacctcctcagtacgtggtgcagcagtttgagaagcaccgagtgccccgctgtagggtgaggatgaccctggagcctcatcccctgcagccaagctggcgttcgctggactctgagtcctttggataccgggctgaggatacgatcgaggcgattgctctgcacggattgaccactttctgtggattccatcccttggagctgtccacccatcccattggcttgttccccacggagaaggaggacgacccaatgtggaaggatcgagtggagcatgccaaggatatctgggctctctacccaagtcagactgctcacttgaccgtgcggtgcatgaatgccctgtatcgtctgcaagtgatgcgcggtgaggcgatgtcccatctgatggccttgttggaggcaacaaagatcaccctagacaacagagaggagcttgttgttgacttgtccactgagatggtggaaaaggacttgcaggtggagcagctgtccaatgagatccaagagctggaggaattagtggggaccagggagaacaccatcgagcttctcgaggatcagcttatcaacactcagcagcagcttgctgaggctaatgagcacctggatatgcatcaccaggagatacaggacatggaggccaacgaggatgtcgacattgagggaggggaggagcctgcctccagcttggacactgctggctcagggagaccaccttcccccgagtcgaatcatcaacgtcaccccgcggcagctacctaccaggagttccttggtacccagccgccattgttcacccgggcagaggacccactggatgcggatgtatggttgagagtagtggaatccaaattcccgctactccatggagtttgctcagaggtcactaaggtcaggttcgccacccagcagcttcgcggacccgcaaagacttggtgggaccattttcttgctatgcagccaaatgaccgagaggtggaatggagagagttcaaggcagctttcagggggcaccatataccaaccgggattatggaccgaaagctcaacgagtttctggcactcactcagggcaataggacagtgttgcaatatgctcaggcttttaatgacctgtgccagtatgccagatatcatgcagacacggacgagaagaagagagacaggtttaggagggggctcagcactaagctctgtgaccgtctcaacaccgtcagggccaacagctataatgagttggtcaacatggccatctcccaggaggactgtatcacagcttgtcaggcagagaagaagaggaagacccctgtgacaggaccttcagctcagccacagcatttcaggattgtgtctgacactcagaacagggggcctcagcagcaacaagggcaatgggtgatccgaccacagcagcagcagcagcaggcacccaaccgcacccataacaccggacattatgccaagaattgccccaggaaccagcagaggcaggggcagaatgttaatcagaatcaaggcaagagacagaaggtgcaagtgaggcaaggcaggctgaacttcaccaccatggctgatattccagagggagcacccgtcatgactggtatctttacagttttgaattatcctgctattattctttttgattctggtgcatcgcatagttttatcagtgcaaaatttagtgccaagtgtcaattgccttttcaccacaccaatgggggtattacaatttcaacaccaggaggcagggttgccacctaccaaatcaacaagaatgtgcctataaagtttggtagtctgataatcaaaaccaacctcctcattttgggtttggatagtgtggatattatattgggaactgactggttgaccaaacatcaggctgtgattgatattgcagctagggccattgaagtgcactcaccgacctatggtgaaaccaccttatatttgcctgaccagggatgtacccgttcttgtgccttcgttatgatagaatccccagtggaaaagatcccagtggtctgtggctatccagatgtttttccggatgaattgccaggaatgccacctgatagagacattgagttcggcattgaattgcaacccgggactgctcctatctccaagagaccttataggatgcctcccgcagaattagcagagctgaaaaagcaattgcaggagttgttggacaaggggttcattcgcctaagtacttcaccttggggatgtccggctttatttgtgaagaaaaaggatgagagcttgagaatgtgtgttgattaccgccctctcaatgcggtgaccatcaagaacaaatacccactgccccgcattgatgtattgttcgatcagttggtaggagccaaggtattctccaagatagatcttcgctcaagttaccatcagatcaagatctgtgccagcgatattcccaagacggccttctcaaccagatatgggctttatgagttcttggtgatgtctttttggttgaccaatgccccggcttattttatgtacctaatgaactcagtattcatgccagagctggacaaatttgtggtcgttttcattgacgatattcaggtgtattccaagaatgaagccgagcacaccaagcatttgcatactgtacttcagaggctgcgtgaccatcaattgtatgccaaattgtctaaatgtgagttctggctgaaggagattaaattcttgggtcatacaatttctcaggatgggatatctgttgatcctgagaaggtacaagaggtaatggattggaaaccctcgactacagtgaggcagattcggagtttcctgggattggcagggtattatcgacgatttattccggatttctctagaattgccaaaccaatgactgaactattgaagaaaggagtcaagtatgattggagccagaagtgcgaagatgcctttcatacactaaggcagcatttgacaacagccccagtgctagctcaacctgataacaccaaaccctttgaagtttattgtgatgcttccggcactggattgggttgtgtcttaatgcaagataacggagtgattgcttatgcctccctggcactcagaccccatgagcagaactaccctacacatgatctggagttagcagctgtggttcatgctctcaagatatggagacactacctgatgggagctcactgtaacatttacactgatcacaagagcctcaaatacattttcactcaggcagatctgaacatgaggcagagaagatggttagaattaatcaaggactatgatttggaggttatcaaagaaatgatcaagcagaaggcggagaaatacaagtgcttccgtcaggacagcaaggggattgtatggtttggagatcgaatggttattcccaaggaccctgaactcagaaggaggatattggatgaagctcacctttcaaaattatccatgcaccctggtagcaacaagatgtatcatgatctcagatccttatactggtggaccaggatgaagagggaaattgccaagtacatatccgagtgtgacacctgccagaggatcaaagccagtcatttgaaggcagcaggccccttgcaaccccttcccataccatcttggaaatgggaggacatttgcatggactttatcgtgggattgcccaatacctccaggcaccatgattccatttgggttattgtggacagattgaccaagaccgctcatttcttaccagtgcataccacccacaagacagagaagtatgcagaaatttatattgatcaaatattgcggttgcatggtattccaaagaccattgtatctgacagaggagcactgtttgtggcacgcttttgggagcagctgcaagactcacttgggacccaggtaatacgaagctcagcataccatcctcaaacagatggccagacggaaagggtaaatcagattttggaagacatgttgcgggcatgtgtactacactacggaaaggattgggacaagtgtctttctttggcagagttttcttataataacagctaccagtccagtctgaagatggcaccttttgaagccttatatgggaggagatgtagaaccccgctgaattggtctcaagcaggagagagggaaatatttggaccagacttggtacttgcagcagaggaaaaggtcagagttattacaaagaacttagaagctgctcaagccaggcaaaagagctatcatgacaagaggcggaagcctctacaatttgaactgggggatcatgtttatcttaaggtatcacccaccaagggcgtccagagatttgggatcaagggcaagttagctcctcgctacattggaccctatgagatcaaagcaagttgtggacccgtagcctatcaattggaattgccacctcatatgtcagcagttcacaatgtgtttcatgtatctcagctgcggaaatgtgtccgcctacccactgaagtgctacctaaaccagaccttgagatagaaccagacttatcttatcaagagcaccccgtcaaagtattggatcagaaagaaaggtcaacgcgggcaaggtcaatcagaatgtataaggttcagtggagtcaccattcagtggaagaagctacatgggaaactgaggattttctacgctctcgcttccccgactttctgcccaaaggagtcagtacgtaa

SEQ ID NO: 178336 - DNA, 335 bp, Zea mays
  Clone ID: MRT4577_9422C.1
gccggcgacggcgttacgcggggaacctctcttcatttagggcactcaagatgacgaagcgcactaagaaggcccgaattggggtggaatatggaaccagctatggcgctagctggcgtaagcacatcaagaagatggagggctctcaacattccaagtactttggcgagctctgggggaaggtggctgtgaagcacaaagccctgcgaatttgggggagcagagcctgcttgaaggagatggcgtgcggggctctgctggcagacgcccatttacttctggcattgggcttgaaactcttgctgctgcgaccgccgacgctggcaggatccttg

SEQ ID NO: 178337 - DNA, 292 bp, Zea mays
  Clone ID: MRT4577_94230C.1
tttttgtgaatataaacacccatagcgacggggtgagcagccagtgccaagaaaaaattggggacacttgaccgaagcaaactctccccaacaccggtggagcccaaaacattaacatcgcatgatacgggtgtcaccgaatccaccaaaacgttgcagacagagactgcttccaaacagaacggattacaactgatctggcgctgtccagtatagcgcatacaaatcaaccagcgtacccttagtaagcagcgactccagaatttgtaatgtcaacgtaccccatttctgt

SEQ ID NO: 178338 - DNA, 359 bp, Zea mays
  Clone ID: MRT4577_94231C.1
ttttaagactgaaatgcggcatatattttgttatgataatataatgatacatgcgcacttgttacatagactttcggctggccaactcccaccaggataaaagagctataccaacctagggggacaaagtcagcatggacatgtacatatctcaaaagagatctgacataataaaacagacccaaaaaaaaactgctcgctttaatctgtctcaataaaggaactgggacccctaagcataccacgctgatactcagcactgggtggaggcggtgctcatctgggggctgttggccagagaagagaagaccctggcagtgtttaccttattcaccagaagcacacatttgatgccatcc

SEQ ID NO: 178339 - DNA, 258 bp, Zea mays
  Clone ID: MRT4577_94232C.1
gttgcctcctaaaacacacattctgtataattatcgctaaatacaatgctgtgaggtctatagttcctgtaacccctttctcctccccaaggacagaagaactaggcataaataatagggaaccctgagtgccctactcttttcccaagaagggtaaagcctacaatatcatcagggggcatgaagcacattaatttgcagtggtgcttcctatgaggagatatggtggacaggctaatttttccttgaatatgtggc

SEQ ID NO: 178340 - DNA, 630 bp, Zea mays
  Clone ID: MRT4577_94233C.1
ccgcggcggtggtgcgcgagctggggcagaggctgcgcaggaacatcccgtggcagcccggtgccgtcgtcgcagagattgccaaggcggtggttgctagtagccgccgagagcgcgacggcacgctgggctcgtggctgtacgtgaagggcagagaccacagcgccacgcggcgcgctgttacggttattgcggagacgtgctgcggctcggctggtcgcgtggtccgcgccgaccccagcaagcacagctgcgcggaggagctgtgctcagatgttgtctccagggcgtccgagatgggcggcgagatggtggtggtggtggtcgtggacggtgtcgagaacgcgccgtgcgacgtggccgactgcctggtcgccgcgtcgaagagcggttccctgaaggatgccgaatccggacaagtgctgcgtctctccggctgcatcgtgatcctggtagcatcgaagttgcctggcggcgccagcgacccaatcagtctgcgcctgtggtcggaggacgaggcgtcgtccgacggcgctctcaagaggaagacggagtcaccgcagggcgaggggcgagggcaagcgggcacggcacgacgccgggctgggcaggcttgatctcaacctctgc

SEQ ID NO: 178341 - DNA, 377 bp, Zea mays
  Clone ID: MRT4577_94234C.1
gttgctcgaatggaaaaaatttttttcacttaaccctgatccttatttgggcgaacagctactactaccattcagccagctagcttctgtctactgtcagtagctacaagctcttccatttaaccaactagccgcacttaacccttctacttatctccagcagtaaatactactaccattttgccagttagctacaacatgcacctcttacttcttgacacaacaacaattgcttccgttctaccagctgtttgtggctaaccccgtaaccctattacaactgcaacagttgttgtcctttgtccaacttgctttgacatacccagctgccttgtactaacaacacattattaggcagagccatcttttagattgct

SEQ ID NO: 178342 - DNA, 360 bp, Zea mays
  Clone ID: MRT4577_94235C.1
ccaaaataatcaccgtctgttcccgttctggttccaacacccgcatgttgtgaatgccccggcgagcactagctttccaatctaagtaccgtaaatcgtcccccgcctgataatcccgtagttcccgaaattccgtacctaaaccgagcttccgcatttgtcttaggttgcccgtggtagcttgggccaggcggatggtcaaggattttaggccgattaaatctgggtggaccgtcaccgtttctccctcccctaccgtccattgttgccaagtcagttgccagggacatagttgccgcacattcaccttgccccaaacgtattccccccgctgacggggttgcacttggtaacttaact

SEQ ID NO: 178343 - DNA, 191 bp, Zea mays
  Clone ID: MRT4577_94236C.1
atcggaggaagggactccgagacgagggacatggcggtggcggacctcgctctcattcctgatgtggacatcgactccgactgcgtcttcaactatgtgctgatccgagtccactctgctctccgctctcgggctcaggctgcagagagcaaggagatcgtgcgcggctacaagtggcctgagtaccatgc

SEQ ID NO: 178344 - DNA, 167 bp, Zea mays
  Clone ID: MRT4577_94237C.1
ttttgtttttttcatactatcttattcagatagggggatgggggttttttatgtactgcaaaaacccaaagcattcgtcgcaacagacaaagagtaggcttggtggacgggacccaactcattttgacgtacagatggcatcaaagccgcccacagaacagggggga

SEQ ID NO: 178345 - DNA, 280 bp, Zea mays
  Clone ID: MRT4577_94238C.1
ttttttttttttttttttttttttgaaaaaaaagaaattgttttgggttgattttttttattatttttacaacctctttcacttttttttgaatatacaaaaaacaaacaactattttgccttaccattttaacaagacaccctttacaccatgtggcatatggcccattttttgaccaagcctttcctttttattctttccggtgaggaatactcattgacgtggttacccttaaacaacattttcatctccaccatataaagaacccattctggatat

SEQ ID NO: 178346 - DNA, 133 bp, Zea mays
  Clone ID: MRT4577_94239C.1
gacaccacgaaaaccctcgtgtttacagcatgaacagctgggaagttttgcatacctgaaaaaaaagatggacctgtacattgaatgagcgtggatccgaactctttttggcggggcgctatggattttgtta

SEQ ID NO: 178347 - DNA, 201 bp, Zea mays
  Clone ID: MRT4577_9423C.1
atcgcgtggttcctttacaacctgacggcctacctgaccgacgtgagccccattttgcggggcgacgcatgtcccttgctagcgcacatggacacgcattgcatgagcgcacattacagcccacatgtacgtagcggatgacgcccttgcggttgcaggtgttgtgactctgcgcgatgtgattatttgctttaatcatgg

SEQ ID NO: 178348 - DNA, 304 bp, Zea mays
  Clone ID: MRT4577_94240C.1
gttaagtgattgcgccacctagaaaggaatacagtgtctggatcggtggctctattatggcttctactcaacactttacagcagagtggatctacaaggaaagtatgacaaaactggaccggacattgtccacatgaagtgcttataagtttttttgggaaattataccaaaaaaaaaaaaaaagttacagagagaatcacaacatggtacataaagaataaccggctcattgaaaaccaatacataaactgtcataataaggttttaagcacaaataacagacacactggctacaattactaa

SEQ ID NO: 178349 - DNA, 115 bp, Zea mays
  Clone ID: MRT4577_94241C.1
acttactcgtgggtggggggatatatctgttgggtggtgtcacctatattcaatactcatgtcggatggtttacatcggcggcaattgggaaataccctgtcgttccccaactta

SEQ ID NO: 178350 - DNA, 2068 bp, Zea mays
  Clone ID: MRT4577_94242C.1
tttttttttttttttttcggcaaaaaccggtcaattcctcttttttcgctggtgaccgaaaaatcaaaccaaaacggtttgttctgatcggaccccagatccagattactgctaaataaaaagcatgtgaaggccttcctccccctcccagtcgcccttcaacttgccagccgatcccttcgcgtttgtctccgtggttccgacgctccgcactccgctcccctctcccaagcaaacacagccgagtccacgcacgcctcccatcattcctcaaccgcctcgccggagcaaggggagtagcggaggatggagattgaccaggcggtgcgcgggtgcagcgaccgccgcatgcgcaccaagtacagcaacgccgtctacgtcgtccagcgggccttcgcgctctacccgtaagcttcccctccttcacatcctgagacgggggcgcgcggattgggttagtggcgccatcggaggtgtgtggttccgcgatgatccagtagggagggagttcgagattcagggtgcggggggcgctcgccgtgcgtgcgatcgggccggttctgggtgccgcgcgccggtgttgaaagccggaagcataaagtgtaaagcctggggtgcctaatgagtgagctaactcacattaattgcgttgcgctcactgcccgctttccagtcgggaaacctgtcgtgccagctgcattaatgaatcatactgcagcctttatgatcaagggtatacttccattgggagcatacacgatactgttccaaatgcactccttagtgattcatcatctgagaaaagttttagaccagcatacatgctaactgatggaaggcttgaaagagctggtagaacaaaaaagattaatcctaaagtagaaatgaattctgctgcaagcaatggcatcaacgatactgagggaggacggatgatctcacgggcggcatcaatcattgtagtcggtgatgaaattttgtttggtacaactgaggataacttaggagcagccttgtgcaagaagcttcatgcaattggctggcgggtttctcatgtagcagttgttcgcaatgagattgattctgttgctgaagaagttgaacgttgtaaatctactgatgacatggtgtttatttttggtggactcgggccgctacattcagacgtttctttggctggtgtcgcgaaagcatttggagttcgtctggctcctgatgaagaatttgaagattaccttagtcaactcatgggaaacaattacactggtgaccgaaatgagatggcacagttgccagaaggtattacagaattactgcatcacaaaacgctaccattgccattgatcaaatgtagaaatgtcattgctcttgctgcaaccaatatggatgaactagacaccgagtgggattgtcttctaggtacccaggagagtggtctaatgccatcaaaaccttttgtgtcaaagcatctcagcactacactttcagatgttcaaattgcttcagtccttgcaaaactgtgcttagagttttctgatgtttacatagggtgtcatcggatatcaagagctggtcctttggttgtgaatcttactggaaaggataaccagagggtagatgcggctgccgagaagctgacaagcagctttgaaggacaattttcccaacttaacagttgcaaataagctgtcagagacacccctctatttttgccaaattctttccgcctgaagctctgagattgtgcaggactgatgatggtgctcaactgctctaaaccgacgaccaaaataaaccacggagctggtactactttgaagctacaaattttatttagggaacataggaattttgtactaggaattggtaactgggttctagcataatgtagctttgcagctaatattttgacattattatacgttccaaattatttcatttatactataatttatagcataactttactgctcaaaaaaaaaaaaaaaaaaagcggcctcgaagaggggcccggtaattcctaaaacaaaatttttattttccctaaaaaaaatatgggcgcccaaaa

SEQ ID NO: 178351 - DNA, 968 bp, Zea mays
  unsure (1)..(968): unsure at all n locations
  Clone ID: MRT4577_94243C.1
ccacgcgtccgcttgccagccgatcccttcgcgtttgtctccgcggttccgacgctccgcactccgctcccctctcccaagcaaacacagccgagtccacgcacgcctcccatcattcctcaaccgcctcgccggagcaaggggagtagcggaggatggagattgaccaggcggtgcgcgggtgcagcgaccgccgcatgcgcaccaagtacagcaacgccgtctacgtcgtccagcgggccttcgcgctctacccatttgaggaagttgccttcagctttaatggtgggaaggattcaactgtgctcctgcatttgattcgagctggttactacctttacaagaaggactctggtgatgtagcccaaacagatgctgttaaaaactgtccactgcgtactatctatttcgaaagcccttgtgctttccctgaaatcaattcattcacttatgagattgtctcaacttatgggttacctctggaaaccatccattcagatttcaagtctggtctagaaggccttctgaaggagaagcccaccaaagcaattttcattggcacaagaattggtgatccaaatgcggttggtcaagaacagttctctcctagttcacctggctggcctccttttatgagggtgaatccaatcttggattggtcatacagggatgtttggtcttttctaataacatgtaaggtcaaatactgcagcctttatgatcagggtatactccatggggagcatacacgatactgttccaaatgcactcctagtgatcatcatctgagaaagtttagaccagcatacatgctaaactggtgggaaggcttgaaaaaagctgggtagaaccaaaaaaaggattaatccctaaagtagnaatggnaattccggccggcaaacaatggggcatccaacggatactggaaggggaaggaccggnnggancctccaanggggngggcattc

SEQ ID NO: 178352 - DNA, 615 bp, Zea mays
  Clone ID: MRT4577_94244C.1
gccggccgggttgggatatccgtgccgaatcctcctctatgcgatatgtcgcctcctcctcgctcgcacgtcttttcacaactcggcagcgcatgctctccgtatcgcgattgacatccagaatatatcgaactgcgactggctacagagagacgatctacatgtcaccaggcaacccttgtagaccggcatgtcaagacaggactgtatcctggagctggcgtgggcctctgggcctcatctggatacctcaacggcgccctcgaacaactaaattgtgaagatcccacttgtagatggaatgactcgacgtgcaccaatactacaagtagagggccaaaacactgctgtgtcggtgtttgaaagaacttctgaaatacacaactgatacacagaccgtgcagtttacaggcgaggttttgaaaactcctgtctcacttgatatgcttgcgcgcatttttaatgcttctggaacacctattgacaatggccccccgatattggccgaaggctacttggatatctctgcaagctctattaaccccagtgagagaacctatccagatgaaaagatccaaactggcatatccaccattgatgtcatgaattccattg

SEQ ID NO: 178353 - DNA, 288 bp, Zea mays
  Clone ID: MRT4577_94245C.1
acccacacgtccggcgacatacaaaatggtcctacagacctttctgcattatcagccgcaccacgagctcgcggggcttatggcggcctatgtagcgcatcagcttacggcgatttgcggcctgcagctgcagcattcatattcctacccttgcaacgcatatgccggcgttgtatactactgacgaaactatgtacttttgcaataatgtaatggagccgctgactagctacctacctctctagcttactcatttagcggcgattaaaaacttagtgtcacccatca

SEQ ID NO: 178354 - DNA, 655 bp, Zea mays
  unsure (1)..(655): unsure at all n locations
  Clone ID: MRT4577_94246C.1
aattcagcacgaggttcctcgcagtctccgaaccgcccggcttcaccaaatccacccctccccacggaacagccaccgatcgtgttcgccgcccccacctccccgcctggcgtcgtgttgctcgccgccctggaagggacgcgtccacaagaggaaaggtcgtgcccccgcccgcccccgcgcaaccgccgcggcgctcgacgtgtggacgtccgagccggcgcccgtgcaggagcggcgccggaagctgctccagatgctggggctcgccggggaccccgccctggcgcgcctcgagatgggccgatcggtcacctacgacgacgggcctgtgcccgtccgcccggcgccggcctcgccgcccatctcccgatccagatcagacggcggcgccgtgccggcctcggcgaccaagccgccgctgggagggcggtcgccgggctcctccgaggccacgcccgaaggggaggaggaggaggccgacccgaggcgtctgatccggaacctcgacgacacagcgagtttcgtggtcagggaggggtccgagctccgcgaggtcggcacgggccggcagctcacatggnaagagtttcgttgacctctgcatncgccgctcgcctatcgtccaggagctcatgcggcgcgagaacgttgc

SEQ ID NO: 178355 - DNA, 343 bp, Zea mays
  Clone ID: MRT4577_94247C.1
gtgcccaaattgggcatacaattcagttaacccgttaaccagggtggcttgggctcttggcaacagttctgaacaacgcctcggacacttggggggggcagagaaatgctttttcaaattgtcccctgccccggcccaaactgggttttggtgccgccaaagtgcgggtggcttcaatcttcacttggcggaggtcccggccggtttatagtccggatctttaatcacctcctctttctccttggggtgggttttgctttttttggtgggctttttggttgccctggctgtccttcttgggggggccgccccctctggtttttctgggctgcccggggggggg

SEQ ID NO: 178356 - DNA, 531 bp, Zea mays
  Clone ID: MRT4577_94248C.1
atatgtagttactggtaaccaaaaatgtcacgtgagtaatacctactgtaaaagtgaggttagaagatcccccgggtctcataaccaaagttaaataaagtctgtaactaccacagattttgtttttgttttgtttctggaagctctgcacaaaagctaccattcacaggattaacgaatatttttaaatattctaggtttttttagtgtttgatttgcaaaatcagttcaactacataaatccctgtctgataagccatagttcacaggcgtaaaactttgcagtttccatagattcagtaaaagggatttcttttctttaaaccctagaagtgaattacagaaatcagatatgcagtttttaaggaaatagttacattcagaaatacccttggaaagttcatcactgattctttctagcatgaaaagtctagtgtaatctggtcccgcgtcgagaaatccattccagtttatagtgcaagacctttgtaaggggctgtccagctgcccaaccattactgtaagtaccga

SEQ ID NO: 178357 - DNA, 229 bp, Zea mays
  Clone ID: MRT4577_94249C.1
tttaaaacaacataaatccatcattcgcatcaggcgaactttatgaagttgctaccatttaataaaactctatgcctaacacctttattactactagtttactacccgggatctaacttatactaacaatgacaattgctagcgattctcattgatcgaacgctgatgagcccttacactagtttctaaactaccttccctctcttgacatgttcaatattttacatcc

SEQ ID NO: 178358 - DNA, 482 bp, Zea mays
  Clone ID: MRT4577_9424C.1
ggcttctgataccgttgtttcgttggcggcctcgcctgtgccaccgccgaccactccctaagcaaccccttcagaagctacggcgaggtgctatagtcgaagacatcctggatcgggagacgcgacagtcccggggcttcagatttgtcacgcttctccacggagacgcgatgcgcaacgcctatcgaggacatgaacggcaaggatcttgacgggcgcaacattaccggtaacgaggcccaatccctcggaagtcctggaagccggggtgggcgataccgtagcgggccccgtgatggaagccgctaccgcggtggcggtggaagctaccgcggtggtggcggaggcttccgcggcggcgggggataccgcggtgcaaaccgcggcggtggctactgcaacaacgaccggaactggaagaactgagcggcggggttcactgaggcctacttataaaattcgcttctgctaccgcgttcacc

SEQ ID NO: 178359 - DNA, 353 bp, Zea mays
  Clone ID: MRT4577_94250C.1
aaactacgccagcaacactggcaaaactaacctagtcatcgtcgacctctgttgaggcaccgtcgctgtgtcgctctagaccatctacgacggcaacttctaagtcacggacaccgccggtgatatccaacagggtggggaggacttcaacatcacaaggtcaatgatctcgactagaagttcaagtgcagtcacaatagtgacatcatcggtaacacgcacgcgctactgcgtctgcggactgactgcgagcagaccaagcccacgctgtcatccacagcgcagaccaatatcgatatctaatcgctgtacgagggcatctccttcgacaccagcatcaaccgagcccagtt

SEQ ID NO: 178360 - DNA, 569 bp, Zea mays
  Clone ID: MRT4577_94251C.1
tcagccatgagcctggcgcgccaagtggaactgatggaggccgaccggctggtgcagcctgcacctcgggcgcccccgcgcggtctgctggccgcaccggcgccacgtccagcgcttccaacgccccagcagccgctggcgctccctgtaccaccgagggccacccagcagggccgtggcgaggacaaccaacggcgcctcacccccgacgagatggcagagcggcgccgcatgggcctctgttttaactgcaatgaaaagtacacgcgtggccacaaccggttttgcaggcgtatttttttcgtggagggcgtggagattgaagacactaacgacgcgcctccggacgctgacggtgaggccccctgtttctccctgcaggccctggccggggtgcctgtggctgacaccatgcagatcgccgtcgcgcttggtgccgcctcgctggtcgccctcctcgattccggcagcacccacaacttcatatccgaggcggcggcgcggcgcacgggtctgccccttcaccagcggccacgtctcatcgccatggtcgccaacggcgagcgcgt

SEQ ID NO: 178361 - DNA, 795 bp, Zea mays
  Clone ID: MRT4577_94252C.1
atctcgcatccagagcctggaatcctccccatcgacaactctcgccggtggttgccactgacctcaagcatggtgcctgcgcggcgctccccgcgcatgtggcagctgtcttctgcagttgccgggagccactgcgtgagcccgccggggccgacctcctcgctcccaaggctgcgctgacgcttttccctcccgccggatctacgcccccctctgccggccagctgggcgtgctggatctcaatctggatctgccgccgccgggctatgcaggggatgagaatatcgaggctgcatcgctaccggtcgcttccccagtaacgccagtgccatctgcaacgtccccacggtgcagcccccgcattcagcgcgcctacgacggcgctcggatgagcccggtggagcgggctgccaagcgcaaggcggcgacggtgcccgatccaagttcgagcagtggctcctccaggcgctccagctcctccaagtcccgtaagaaggcgaaggccaaagccacctccatcgccagcatcctggagctccctctgctctcgactccagcgccgctcaccagggccaagctcaagttgctcgcccagggccgcaacctcaacgttcctgccatcctcgagcaagccagggcccgtacgaccaatcctgtctccgatgcggcccccagctcctctgctgtgagctcctcgtctgcatcctctatgcgcaacattgatgcctccaatgtgtaattcttctgttatcagttgcgttagggtgctagtatcccaattatctctatgcctc

SEQ ID NO: 178362 - DNA, 298 bp, Zea mays
  Clone ID: MRT4577_94253C.1
gcaaaaaaaaaaaaaaaagggggggccctttttggggacccaatctttcctcccccgctgtggcaaattattgtttttttttgggggcccctaaataaaaaacacgggccgggtttttaccacctgttgggtggaaaaacccggggcgccccaaatttaattgctttggagcccatccctttttcgtcgggggggttaattagaaaagggccccctccgttcctctttccaaaattttcccccccctttttgggaaatgggcccccccctcaactgggtcattattgccggggggggg

SEQ ID NO: 178363 - DNA, 320 bp, Zea mays
  unsure (1)..(320): unsure at all n locations
  Clone ID: MRT4577_94254C.1
ggagaaacaggggcgacccacgcgttcgcccattttncgcngacctgttgtccgacgtttaatcatctcaatacattcgagacatggggctggtctggacccaactagcaccacataacaccacacacaatgcaccgtagtgtgcgctgaatacaccatctcccaaccgaaattggacagagtgagcccaggacgggcaaaaactctcctactgttgattgcaaagaacaggacacaaggaggtccggtgacctagcagaggggggacgactgcggaggacccgagcctcacctacccaaagaccagtgcatctgtacca

SEQ ID NO: 178364 - DNA, 592 bp, Zea mays
  unsure (1)..(592): unsure at all n locations
  Clone ID: MRT4577_94255C.1
ccctcgagttttcgccggccctcctcgtcatcggctcctccgcctccacctccgcccgccccctgatccggatcgacgacgccgaccccagatccctttcctctccgccgtctcccggngaaggcgatggaggagcgcagatgtctcctagaccatagaggagacaacgagcctatgatggaggttagcagcgggtacaatgtgatcctggtgctaatattaaggtctagggaatgcttaataacatgtgtcttgctgaactgatcctagatcaaatacgactcgcttatcattatgggcactagctctgacatgcggggtcgttgtttgacggcatcttgggtgcgaaggaatctgatcttaaaaaacatggagggtatcagaatgctgaagtcagcgacaaaggagactgactagtgatcttctctggatttccgcgaccataaaatatacatgtctgcacagagcgtagagatgcctttgttcagaaatgcagtttgaattagcaagcttccatttttatggcaagagctatgtgagtagtctggactagcacttagtagaatcccgtatataccttctcaggtgagat

SEQ ID NO: 178365 - DNA, 254 bp, Zea mays
  Clone ID: MRT4577_94256C.1
tgtacatattttcccttgattagccgttaccatgtggtgggggacaacaaggtaacctatggggataccactgctcaattctatcccttccctgtgctaataactattgagacacacgactgaaaagggtagacctgctgcgagagggagacactgagccagaggatggcttgctcggtttatcacccaccctactcatgtgggtgtctgctgcactggatattatcttttatagacatgacatggggaggata

SEQ ID NO: 178366 - DNA, 353 bp, Zea mays
  Clone ID: MRT4577_94257C.1
tgcgtggcacctgacgtcttatatggtcaacggtacctagggcggcgttctcatcagtcctcgactgacggcatcgatgacctagtcgtccactagcccttcatcaagtccgacggccaccgcaggtctaatgacggcgctgccgtcgatgataccggcggtagctgcaatgacgtccgtgtcaatgccctcgatgtcaccgctcccggcggcgtctcgtgcgccgtcggtgaatgactcgacggcggcaacggcggtggccgattccgtgatggccgcttttacggttgctacctcggtggctctcttcgctgcgacgttcgactatgccaccctgtctactgtcgctgcga

SEQ ID NO: 178367 - DNA, 336 bp, Zea mays
  Clone ID: MRT4577_94258C.1
acacaccactcaacactacaacccacacacattcaaacacaaccaactcacctatactaggaaactttaaaacccactccaggaatatttaacaccaacctcaactcactaaccttcctccaaaatttttaccatgaacttttactcaccccaatctctcaaataccatctctactatttcaccattaacaacactctttaataaccccatacctaatcacaaccccaactcgctcatactcaaattcaactttaacacacaacgtcacacccactataccatccaatcttacaaactcctgcattccacttcatatctttactatattttcacct

SEQ ID NO: 178368 - DNA, 224 bp, Zea mays
  Clone ID: MRT4577_94259C.1
gtgacacgtagcctcatctagaggacgcggctgaatcgacgattgagcacgagcgctaccggctcgttgaatgatgccggggtcaaaaggggccggcgggacactgtcaactgtcgcgctggtctggctgtcataattgactgacctggccctgtccgggacgaacccgacatgagcaacatcacgggtcctaacttgcggctgtagaacaccagaaagcaact

SEQ ID NO: 178369 - DNA, 719 bp, Zea mays
  Clone ID: MRT4577_9425C.1
gctttcttaacgtgtcttgtcttctcctccccctccgaattgggtttgggatcgagaggtctccgggattcgggatcaagagtgagcggatcgagatgccggctgctgtatgctgagtaccgctgcttcgtcggcggactcatctgggccacggatgaccactccctccgcaacgcctttagcatatacgtcgaggacctcgagcccagacatcatcctggatcggcagacgcacaggccccgcggattcaagcttctgaccttctccacggtggacgccatgcagaacgacatcccacgcccatgaacggcaagagacctgaaaggtcgcgacatcgccagatcatactgccgtcacacgtcgcgctgtcggccgtggaggcgcaagaactgcccgatactctggcgcccgcgcaggctatggctacggctctggccgtggctctgatggcagggccggatactgcgctgctcgcgcatactgaggcgccagcatcatctaccgtgtccgtgtgagggattaccctctggtgatccgcgttggtagctaccactactcccaactgaactgcaggaaatgtacggtggataccgcacgtccaatctatcctgatccctaccgcgtcgattaccctagataccagcgattatcttcattctgcgcaagatggtcgatacccgtctgtggctgagtgtgaacgaatctctgtgccacttgt

SEQ ID NO: 178370 - DNA, 653 bp, Zea mays
  Clone ID: MRT4577_94260C.1
aaagggtaaaacgaattttattttaggacggagtgagtattaaacatatcttaaattgatagaagacatcacaaaagattctgaaatgaaaccaaaggaggacatatgtagaaaagttaaggaagccaaaagttttttaaaaaagacatctaaatataattgtcatgagcaacagactaataaagctcacatttgcacaaagcatacaggtatgatagatacttcactctcgcagttctccagccagccgaatcaatccatggctatagctagtttgagtccgggttggctccgctcggcacctgatgtttgctcactgcgttcatgaatggcgccgagccgctgctgttgcttcttgctcttctctccatgctccgtggatgccgcaccaccgtctccttcgcctccacggactgcgccgcctgtaccgtgcgcacggatagaagacgccgcccggccgtcgcagggtcgacgacagcaatggcgtgcgcggaacaggaactgagcagcaacgggatctgcagggcgaagatgaggagaacggcacacacaagcttctggtgatcccgtgctcttgccaatgccatacacgcagatgaattaagaatggaacatcaggtggacattagtgctgacgccatggaccgactcag

SEQ ID NO: 178371 - DNA, 1324 bp, Zea mays
  unsure (1)..(1324): unsure at all n locations
  Clone ID: MRT4577_94261C.1
aacctccaccccacccattcctttccttcttcccatcctcttcctcctcccccgctccccctcccgctccatctccttccattcccgtcccgcctcccgccctctccgtccggtctccgcttccctgctcgcgccgcccggccggctaatcaccccgcatcaaagaaaattgcattggttttggatttaatctgaggttctgaagaaagaaggcctcaggatatttagcttggcaggcccgtaggtgcttgagaggagctatgtcttttgtcgggcgagtagacccatcaacgacatacgcggataatatttatgtacataaatttggcgcacccaactcaaactttgctgcaagaagatttggctctgacacgcagttgttccgttatggccctgaaccattcaattccgaggactatggacatatgggtttccctgaagcaccatctgctgcattccagagctccttttacaaccagcaagcttcactaacaccctgctctgatgcagcaaaagactcaccggtgtgctccaatatctctcaacagaactcccagtctatatcagataatcagagttctggacttgaagtagagttcgatgatgagatcaggctgaagcttcaagagctggagcatgctttacttgatgatggagatgacatcttgttcgaagtttcccaggcgggttgcatcagtgatgaatgggccgatcccatgaaggatgtctcgcttgcaaattctccgaaagaatcagaatcaagcattagttgtgcaggcagcaacagcggagaagcacggaccccaaagcagttgctctttgactgtgctacggcattagctgaatataatgtagatgaagcacaggcaatcataacggacctccggcagatggtctcaatccaaggggacccttctcacaggattgcagcttatctagtggagggccttgctgcaaggatagtagcttcagggacaggcatctacaaggcattgacatgcaaggaccctccaactctgtatcagctgtcagcaatgcaanatcctctttgagatctgtccatgcnntatcgatttggtttcatggcntgctaattatgccatacttgaagcctgcaaaggcgaagaaaggatgcatattatagactttgacatcaaccaaggcagccagtatanttacactgatgcagtttatgaaagatgatgccaacaaaacacgccatttgagaataactgggtgtggatgatcacgagacagtacagaggactgttggaggtctgaaggtcattgggcaacgcctggagaagcttgcggaggactgcgg

SEQ ID NO: 178372 - DNA, 861 bp, Zea mays
  Clone ID: MRT4577_94262C.1
aacctaccccattcctttccttcttcccatcctcttcctcctccccctccccctccctctccttcccattcccgtcgagctgccctccctatccgccctttgccgcctctccgtccggtctccgcttccctgctcgcgccgcccggccggctaatcaccccgcattacagaaattgcactgggttggacctaatctgaggttctgaagaaagaaggcctcaggatatttagcttggcaggcccagaggtgcttgagagaagctatgtcttttgtcgggcgagtagacccgtcaacgacatacgcggataatatttatgtgcataaatttggcgcacccaactcaaactttgctgcaagaagatttggctctgatacgcagttgttccgttatggccctgaaccattcaattccgaggactatggacatatgggtttccctgaagcaccatctgctgcattccagaactccttctacaatcagcaggcctcactaacgccctgctccgatgcggaaaaagactcaccggtgttctccaatgtgtctcaacagaactcccagtctatatcagataatcagagttctggacttgaagtagagttcgatgatgagatcaggctgaagcttcaagagctggagcatgctttacttgatgatggagatgacatcttgttcgaaatttcccaggcgggttgcatcagtgatgaatgggccgatcccatgaaggatgtcttgcttgcaacttcttcgaaagaatcggaatcaagcattagttgtgcaggtagcaacagcggagaaacaccggacccaaagcagttgctctttgactgtgccacggcattagctgaatataacgtagatg

SEQ ID NO: 178373 - DNA, 245 bp, Zea mays
  Clone ID: MRT4577_94263C.1
cacactagcgatccaacaatggtcttcagattggagaacttgacaccacgaaggggctgatctgtaggcgctgtttcctgagccatgctgcgagacgggtcaacagctcatgtagctgctgtggttgccagacaccaccgaccaatgtaccgtctagcgtgtgtaaaccgacttctttatatctgcaggatccaacagggaactcagacatggcattacaccactaaaacactggagcttacaac

SEQ ID NO: 178374 - DNA, 413 bp, Zea mays
  Clone ID: MRT4577_94264C.1
taaaaaagtctaatgatatacgcaagctcggacagtggaggcaatataatgggtcccctccggattcacctttgagacgataatataatcaatctgatgtgcaacgacgaacagctgcgattaatcacaacacgatgctgatggatgaagataaagtggatgaataacccaagggccagggagagagatactcacaaagtgatcgccatttaacgaaactaacatagggctatcccaggctataagtgaggtccgttgtggatggtgctaactgccgcggggctctgccttctaatatacagatatcccatcttcaccttcactatgcatgattggcactaaagctagcatgcatttgaaaacctataaatattttatacatcctacatttgtaactctcattgaaaaatttt

SEQ ID NO: 178375 - DNA, 395 bp, Zea mays
  Clone ID: MRT4577_94265C.1
ggtactcactgtacagtcaatataactgcttgttcagatcatagatcagagggctgaacataacatttggcactcgctaagcctgcagtagaatgaagaatggacatgtatcataccaatccactgtcagtgttgttccaagtaatacagcgtctagtttccaaaaaaagaaaagtaatccagcatcctaatggtattagttcacggctccaggcctacaatatctggttttccatccgacggcagaaaactttccaagcatccaccggtagatacacactttgatgattcgttaatctttccagtttccactccagccagacaaaacccaatctcccatgtacataagtgccacttagtcattcaaacttgcactctctttccccacgcgtccg

SEQ ID NO: 178376 - DNA, 183 bp, Zea mays
  Clone ID: MRT4577_94266C.1
tgtccgtggcgtcccgactggcggccgtgcttgcggatccggtcggggtgcgggtgcccgtcttaaactccctcctttttgcgcttgccgcctccgtggacccttccaacggccacctcccgttctaccttttccgccgccgcctactccggttcggccgccccaatgccttaattttttccg

SEQ ID NO: 178377 - DNA, 123 bp, Zea mays
  Clone ID: MRT4577_94267C.1
ttttggtttttggcgggattgcacacaccgtggacgtgcaagtcaggtatggtagtgttaggattcagagtcaggggacaagtcggcatgcaggcatgacggacataaccacaccacagaacc

SEQ ID NO: 178378 - DNA, 243 bp, Zea mays
  unsure (1)..(243): unsure at all n locations
  Clone ID: MRT4577_94268C.1
cactgctctctcactcccgatttctgcaccactaccgcctgggcgcgtgggccgtgtcgtcaactcttgcggcgaccggcggcggatcgtccgcggcgcaagcgcaaccatggggctcttcaccggacgaaaagccacacccttcaagccgaacccggaccttcggcctcccaagaagtactggttgcnagggcctcattatctgcagaactttgtccanntcaacattcaatggggcccttc

SEQ ID NO: 178379 - DNA, 472 bp, Zea mays
  Clone ID: MRT4577_94269C.1
ggcggcgctcgaggcggcggtactgataacatacactgggactcgaaattacttatctactcatagcgacaacaaccgatcggaccatgaggatgtagctcgctgtcgctgcgctctcgctggttctcgctagcgagagccacgtccacgatatatcaagagaatgcttgctggtgctaagcaccgtcatcagataatctaccgccgcaggtgcatctgtgacctccgaataacctgctgcgtccggcgaaacgcccaccgacggaacagctgccagcgccggaccacatgccaccgccgagccgtgagaagacgccgtgtcatatgtaaccagtacacacatgatcactaccgctactagaccacacaaggtctaccactcatgacacacatacccatggcgaagcctgcagcctaattgaaacacgagtcgcttgcatggaacctgcttggtcgggagaaccccgatgct

SEQ ID NO: 178380 - DNA, 558 bp, Zea mays
  Clone ID: MRT4577_9426C.1
tcgagcggccgcccgggcaggtacttgtaaaaaaaaaaaaaaaaaaaaaaaaaaaaaaaaaaaaaaaaaaaaaaaaaaaaaaaaaaaaaaaaaaaaaaaaaaaaaaccaaaaaaaaaaaaaaaaaaaaaaaaaaaaaagcccctttgggccggaccccccttaaggggcgattttttgggtttttccttccccttggggggccgtttaaccttccttttaggggccccatttccccttttggggggtgtttttaaatttcattggccgtgtttttacaccttggggtttggaaaacccttgggtttccccattttattccttttgaagaaattcccctttttcccagttgggtttttaccaaaaaggccccccccattcccctttccaaaattttgccccccttaattggcaattggcccccccttttacgggccctttaaccgcgggggttttggggtttccccccagggggccctttacttttgcaagccccttaccccccgttcttttggtttttttcctttcttttttcgcacgtttggcgggttttccccgta

SEQ ID NO: 178381 - DNA, 142 bp, Zea mays
  Clone ID: MRT4577_94270C.1
acctctaaaacttcctcaatcgcaaagtgtcgtacgcccctgcgagcatacctgcaaatgcatccgcaagtatgttctatgcgaatagcacctgctattgaaacaaccgcgcgctcgctaacctcacggtttccagggtatg

SEQ ID NO: 178382 - DNA, 306 bp, Zea mays
  Clone ID: MRT4577_94271C.1
ggggatgggtttttttctacaactcacactatacattactctttcttaaaaaaaaaaaacgaactcaaatcccacacaacccgaccaaccggtctttttttaaacaaaaacacactcctcataatctcctattactgctgacacgggtagcagtagaggggaaacaaatttcccaatctttttacggagctgggcgacaccacggagtctccttctacgtaccatatatacaacataccggcgacgctcccgaaatccaccgcatcctggcccagcccttgccctccgtaaagaaggccatctcct

SEQ ID NO: 178383 - DNA, 602 bp, Zea mays
  Clone ID: MRT4577_94272C.1
gcacgaggagcatgcaaaccgcaaaatggtggttactattgctcctactgcaaatcagaagcatacatactaaggtataaattaacatttatgggatccgatggaacagcaacagcacaaatgttctgctttgatactgtagcacgacatgtagttggcaaatcatgtgaaacagttctaaaacaagtcaccgaagcagcgccaatacctccagatcttgcacaaatagtatccttaaaatttacatttcgtgtaacagtatcaaaccagaccttctctcaacgagagcagcgacccactgtgttacaaataaattctatagtcgctgtacatggaagacaacactctctatcaaaagaaattgaaaccatcatagatcaaggtccctcaacaccaaacaaagaagctacgctcaaattattagaagaatcaccttctacttctatggaaaggttatcgacaaaagtattaacagatgtttggcagaaaactcacatattcaacacaggctgaagacatcacaaagtctcaaatcttggatgcaccaaaacaaaccaatggaagttcctgccggacaggacaaagagatcgaatctaatctt

SEQ ID NO: 178384 - DNA, 702 bp, Zea mays
  Clone ID: MRT4577_94273C.1
atggctggccgggtaaccgtcgttccaccgcgcgacccgtggcctttctccaccgtcacagtggatgatatggaggcccttgtcgccgatggtttgctccgtcccctcttcggtgacccgcagccggagtggatggttcctccgagcggggctaacccgaccccgccgctggggtatgtgctgagtttcgtctccttccatgagcgggggtttggggtgccagcaagctgtttcatgcgggcgctcctgcattactacggggtggagttgcacaacctcaaccccaactccattgcgcaagcggccatcttcgcggcggagttggggtgttacaagccttccctgccaccggtcccggaggacgcggtggaccgagccgcgcggagggtcgctacgaagaagaagaaagagaagaaggacgcgaaaaaggtttgggctcgcgagcggatgcgggctcgggacgccttggagaggcgtcgtcggaggcaggagagggacgggctcccgagggagccgtcgccggagacacctgacgacgacgatgacgacgatgatgacgaggatgatgacatggcggcccgccttggcctcagcccggatctgaggctaggccaggggtcgtcgagccaggccccgagcgggctggcgccgtcggtatctgaggccgggacatcagggtcccggttcgaagagcaggggtag

SEQ ID NO: 178385 - DNA, 450 bp, Zea mays
  Clone ID: MRT4577_94274C.1
tccgctgccgccgtgcccagcgctcgagctcctcgcctgccgtgagctcgcgccgcaacgccaccatgtagttcaacatcgtgaacccgtctaccgggtgccagaagaagctggaaatcgatgattactttaaactacgtgccttttattttcctacagatctcccagcaggtctgtggtgatgctctgggtgaggagtttaagggttatgtctttaagatcatgggtggatgtgacaaacaaggcttcccaatgaagtaaggagttttgacttctgatcgtcgtgcgccttctgctcgccagaggcactccctgcttccgcggctatggcaggcgtaatggtgagcgcaggaggaagtctcgccgtggctgtattgagagccaacacctatgtgttatcaacttggtcatcgttaacaagggagagatagatctgcctgggtttaaact

SEQ ID NO: 178386 - DNA, 403 bp, Zea mays
  Clone ID: MRT4577_94275C.1
gtccgcaacacccggcgcgacccacgcgtccggtttttcccctccggattctacacggagaagcacaaggcatgcaggccgccgccgagcgcgcccgccggcggatcgccttaccggcggccaggaagatccacgaaataatatccggaccgagcccacggcgcccatcatacgcagagggggtactcctttaccgcctaaaaggggctcccgctccaccccctttgccgcacaataccaggggcttaaacagcttctggtgcacctaccgaacacactgaagcctcccatcgactaccatagctgatcaatggaagaatgcgaaatcaggacactatcacaagacgaccgcacgcgccccaacggaagcaagtgacatggaccagcctacaaaaaactgaac

SEQ ID NO: 178387 - DNA, 646 bp, Zea mays
  unsure (1)..(646): unsure at all n locations
  Clone ID: MRT4577_94276C.1
agcgacccgtccctagggcgctgctgtggacgaggacgggctgacgaagncggggatagaggcgatggtgtcgcggttcctggcgcaggtgaaggacggnacgtgggncgggcagggttggcccaaggtgtggacggactactcggtctccaagctggccctgaacgcctactcgcggctgctggcgcggcggctgcaggcgcgcggcgcgcgcgtgagcgtcaactgcttctgccccgggttcacgcgcacgggcatgaccaagggctgggggaagcgcaccgccgaggaggcggccgacgtcgccgcgcggctcgcgctgctggcgcccgccgagctccccacggggaccttcttcaagtggtgcacgccgcagctctactccaagctgtgactgtgactggatagctacgcctaccgtcgtcggcagtgtgtgcgtgcgctccgtgaacgctggagtatatatatatagttcggttcctttagctactctgctcagaagtcagaaacgggagtgtcgatctgccaaggtgctttcggttgaacacagctcgtttgtgacctctccgcaatgtaccatgtacctagttgtctaagatctaggtcaactttctgtgcactggttgaatggttgccttgcctctgc

SEQ ID NO: 178388 - DNA, 558 bp, Zea mays
  Clone ID: MRT4577_94277C.1
aaaaaaaaaaaaaaaaaaaaaaaaaaaaaaaaaaaaaaaaaaaaaaaaaaaaaaaaaaaaaaaaaaaaataaaaaaaaatatccaaaaaaatgaaaaaaaaataaaaaaagggtttttccttgggcggggccccctttaggggggatttttgcgattttccttccctttgggggccgttggggtttgtttttagggggcccatttccccttttggggggtgtttttccatttccttggccgtgtttttacaccgttgggttggggaaacccttggggttccccattttattggctttggggcatttccctttttggccggttggtgttttggggaaggggcccccccggttggcctttccaaacttttgcccacctttattggggattggcccccccttttaggggctttttaagcggggggggggggggggttccccccagggggccctttccttttgccggggccttggggccggtttttttggtttttttcctttcttttttggcccgtttggcgggttttcccggtaaggttttaattggggggttccttttgg

SEQ ID NO: 178389 - DNA, 548 bp, Zea mays
  Clone ID: MRT4577_94278C.1
gggggggggggggggggtggtagaacccccgggccgttcgagcgcgccgatctttgacccgcgcagatcgttaccccatcattgcactgcggggtaggcccccaagagaaaggacaccgcaacggggccataatcgaaggagaggacgcgcttgacctaaccccctttcccccccccaactgcgaccacactacgtagagtagggcgcctggcgccaattatacagagcagaagtaccaacctgagacgtaacgtgctgtgttgctaggacgctgctaggagatgggaatacagagaatataaagatccctcagcgtataacgcgttagagaacctcctccgagtgtaggaagacggctgacgatcttgctgctgcttcaaattaatcaggagtggaaagtgaagggtgctctgaaccaggtgggcgcatgttaagcgctggttgatttgagaggagcccctgccgtgacctcgtatcgcctccgggcggacgaaattcgcagccctcagtgttgtacggttactccactgaccgctccttgataaaa

SEQ ID NO: 178390 - DNA, 265 bp, Zea mays
  Clone ID: MRT4577_94279C.1
aggaacaaacgttattagactggggaaagacacagttacaaatgcccacagggaggagcgaatgggaacaggagtgggttgatttggatgagggcgcaggtgctttctttaagcgaatagtgatccgacaccagtacccatgctggttattgtatcacaattttatcacgtgccaagcagcgctctgcagtttgcagctatgaaatggtagcacaaaagctgaggaacaaattaaaaacgcatggaaaggcattgtgatactagg

SEQ ID NO: 178391 - DNA, 180 bp, Zea mays
  Clone ID: MRT4577_9427C.1
atggagcacaaagagttcacaactagaacggagctcaaatcactaacacaatcgatcaagggtcccttttatagccccaaggcagctaggagccgttggaggccaacaaggaaggctatccttgccttctgtcgggtggtgcaccggacagtccggtgcgtcaccggacagtcactgtag

SEQ ID NO: 178392 - DNA, 419 bp, Zea mays
  Clone ID: MRT4577_94280C.1
ggggcccacaggggtcccaaaaaacccctggccttaaaaagaaggttcaacggacagggggggaattaacaacacccacggaggtcagaggggggaggggtggggcgggcaaaaacgggaaccccaactttaaccgggggggccccaaccctgtagcttttaaggaaaaaaagccttttatggtgggggaaacggggttaaaaggggcccaaagggggagacacattgggattgggggaaaaaaaaaaaatattattcgaaaataaaaaaaagagggggccctaccggccagataaacatttgccaaccagaccgagtaaaacccctacccggggcggttgggtccaaaaaagtccttcgtttcacccgaaaaaatgagccgttttctcccgagaagaaaaggggaaaccaaactgggg

SEQ ID NO: 178393 - DNA, 521 bp, Zea mays
  Clone ID: MRT4577_94281C.1
aggatcttggatttccggttacacaattttcgaattctcagcttctgttactctacaaaaggctggacaggaagaagattgctgatgttcttgcaatgatggaaaaggaggatgtgaaaccatctctctttacttacaagattcttgtagatgccaagggttcagttggagatatagaagctatggagaaagtgattgaatcaatggagaaagatagcattgagccagatctcacgtttaatgctacaattgccagacactacatattttatggccagcgtgagaaagcagaggcacttctgaaggcaatggagggtgatgatatccagaaaaatcgtgctgcttgcaagactttattacctttacatgcttttctgggcaatagtgatgctgtggaaagaatttggaacgcgtgtgaggataatactcgcgtagctgagtccgtgtctgctatagaggcctttggtaagcttggtgatgttgaaaaggcagagaaggtttttgaggatatgcttgtgcat

SEQ ID NO: 178394 - DNA, 1822 bp, Zea mays
  Clone ID: MRT4577_94282C.1
gcgcacgggcggctcgccggcttatgcctcaggcttgggatggttgagaaggcaaagacgcacttcacactggctggaagtgcaaaccagtctgatccggctgagtggcagaagctgcatgaggtagagatccatcaaggcagatgcatggatgcaaggaaaattggagactggaagagtgcactcagggaagccgacgcagccatcgctgttggagcggactcctctcgattgcttcttgccttgaggtcagaagcgttgctttggttgcacaaattagaggaagctgatttgactattacaagcttgttgaaactggatgacgcgtcgttgccttcgacgccaaccagagtctcaggcatgtcagctgactcttatgtccatatcgtccaagccaaggtcaacgtgacatttggaaggttcgattcagctgtcgcactggctgagaaggctaagcttattgatggcgtgagctcagaggttgaagtgatcctaaacaacgtgagattagtcgcattggctcgagcccgggggaatgacctttttaaggcaggcaagtttgctgaggcgtcgctagcctatggtgaagggctgaaatatgagccttctaatccagtgctatactgcaaccgggcagcttgctggtcaaagctgggtcggtgggcaaaagctgttgaggactgcagcgaggccctaagagtccagcctaactacacaaaggctctgctaaggcgtgcggcgtcatatgcaaagcttgagcgctgggcggactgtgtgcgggactacgaggtgcttcgcaaggatcttcctggtgacactgaggttgcagagtccttgttccatgcccaagttgcattaaagacagcccgtggagaggtggtatctaatatgaagtttggaggggtagttgaagaaattatcagcttagagcaactccaagatgttatccgttcacctggtgtatccgttctttacttcatggctacaatgaacaagcaatgtgcacaaattaccccgtctgtggactccctttgctccgagtgccctgcattgaatttcctgaaggtaaacgttgacgagcgccctctggtagcaagcgcggagaacgtgcgagtagtcccaagcttcaagatttacaaggacggcacgagagtgaaggagatggtctgccctagcttgcaggtcttgcgctattccgtgaggcactatgctgtctccagctcttgaggtccggcactcagttcgctggccctgttagtgtcaccacatgccaacatttcaccaacaaatctgtccctctatagtatcacagcatttcccccttcccatcgcgtcacttaggctcctcctaccgcaacatctctagaaccatttgatccaagcttaagcaattctcatgcctcgctttccaaagtgatgacttcaactcctgaagaaaggctccctgtggtggtgttcagggaataggtaaacacggctggctggttttctcattacatgtacatatattcccgtatagcaacacatcaaacccattgatagattggttcactgtggagaaaaggcggggttcggacttggatgaagagtacaggtctagttgccattgaatgtagagatggagaagatagatgggtcgtgttgttggtatggtatgtagagagacagaggagggaggtggctggtgtggttcatgtcatttgcatatatatatagtatatgatatgcctttccggtggtctgtggcgctgatactactatacatatagttcatgctgacatttgtttctatgaataaaaagatatatctcggttcttttcc

SEQ ID NO: 178395 - DNA, 659 bp, Zea mays
  Clone ID: MRT4577_94283C.1
cacaataaactttcattctctataattatagttcaatatattcaaataaaatatacccccgcctgcagtccctgcttcctggaatctccaactgatcttcacccccacttgggttcagccatcaaaagagtagacacggcccggccacatccgcaaaattctaagtacgaaaagaaaaaaaatgatcttccataccaagttaccaaaactccacacgagccggcaaaattcaattttctgaaagaccatggctgttgcagcccacgaatctgaaggaaaaatgtcacaatagaaccctcatctcagtactagccttgtactgagaaacgaggggtgtcaccgcgtgcttgtcctgaaatgcacctctttctatcctaaccactaccgaacatacgatgaacatgagccgtgtacatctgaacactgcccagcaagctgctcttggtccacagtgatctttccagacagatggcggaggaaatcagtgtgcagcgcgtgaccagccttataggcaattatatgagcaattggaaagccctggttaccattctgtgcaaacagcgagaagtcaccaataagatctaaaatcttgtggcggcaaggctcatcctcgaaccgcagggtggatcagccagccaccagatatgctgcaaaccaag

SEQ ID NO: 178396 - DNA, 178 bp, Zea mays
  unsure (1)..(178): unsure at all n locations
  Clone ID: MRT4577_94284C.1
aattaatggggtggggtttttttgtttgggggtttncagaacaaatccttttattcaaaacggacccttcagtcattttgtttaggaactgcaggatgcaggtttaggttacattagggcctttcattgcaggctgtattttaaagttttacaacagggttgcacccaaagcgcaagc

SEQ ID NO: 178397 - DNA, 328 bp, Zea mays
  unsure (1)..(328): unsure at all n locations
  Clone ID: MRT4577_94285C.1
cggtagcagtttattttnccccacaaacaaatagtgtgtctggttgttagaaatctggatcctgtttcttgcgattgtgatgctcagcaaagaaaatagaatcccacccatgttcaaccagcacctcaaggagcagcagccaaccggagcagtttccctgagaggcccgagcggcaacagatggcaggcagcgctcgcttcagagtccgagtcggaggccgcgtggtgcttcgaccagcgctggaaggagttcgtcacgccccactccctcacgctaggncacttcctggtcttcacgcgcgacgggcccccccagttctccgcggtg

SEQ ID NO: 178398 - DNA, 294 bp, Zea mays
  Clone ID: MRT4577_94286C.1
ccaaaggagcccccaattatttattaatgacagagagaacaggaacttcgccctcaggggctcatcaatgagcaacctaagcaagctttgtagaactggaacgaggcaatggttacactgtttatttacacaccctggcaaaagaaaagaaaagaatgggaatagagcttaccgctactcgcctactcctgatgcagatggacaagcacagccgttctacctacgaattgaggactgcgccttcggggatagtccaccctgctggactggagttggacatctcgtaccgggggg

SEQ ID NO: 178399 - DNA, 286 bp, Zea mays
  Clone ID: MRT4577_94287C.1
ttgggttgcctggggataccagagttacccctttgagactcaagaagcccggcgggggcttaatttccagaaaatattattccagggccgattggtccacctcgcgtttcggaaggtggaacacacagtcgccttgtccggttggttaaaagaatgggatccggttaattgttggcattttcccccttgtggggccttttgtccggttatccttaaaattgtggcaattacctcctctttttaaggccttttttcataccttatataaagccaaagtcggaggttc

SEQ ID NO: 178400 - DNA, 689 bp, Zea mays
  Clone ID: MRT4577_94288C.1
ggtaccgcggccttccctcgagttttttttttttttttttttttttttttttttttttttttttttttttttttttgtgggggggggtggaacagtatttaatttttgtattattaaaacacattaaaatttggacgtacataagggtaaaaaaggacaggaccggagtattcctttctttctttaaccggttttaaaacaacaaggaatagggcaaaaaaaaaaaaaaaagggggggggggccttaaaaacgttttaaaaacccttggggcatgcatgcaaattgaccgaccgggtcctataccatataaaatatccgatccatccatcggggaagggcaacactggactggtagttagggaagcgagggaaaaaaaaaaaggagccactgcattggaggtacgggttaggggtccatgccccccgggtactgggcgaagcaacccaaccaggggctgcgcgcggggggggccacccggggaacggggccccacaccgggctgttgcacttgaagcccgacccgaaggggagttgccaaacccggcccccgggggggacccggcccttggcctccaggtaccccaggtcgcaccaaatgcttctgtttgaggggtttccaaaagggggcaaggggggccgggaggcctcaaggggggggtggcgcacgcccaagttgctttggagggg

SEQ ID NO: 178401 - DNA, 402 bp, Zea mays
  unsure (1)..(402): unsure at all n locations
  Clone ID: MRT4577_94289C.1
ttccttanccncctaagtaaantcccccaccanagaacaccccccccgggcggggattttaggagggaaaacccggggtttttccccccacccaaaaactggggtaaaaaaaaggtaagccccgaagccccggctctaaaagggggaatacacgggctttcacctcccaaccccgaattcgaaaaaaacccggagagggaaaacccccccccccccaaattgggcgggggggaaacaacaaaagggggaagccccccggggttcggggggccccaaaagactgggccccggaaaattttttggaaaaggcttttttcggctttgggggggcggaaccaaaggcctaaaaaaaattgggggccctcttcgggggttcccccccccttaaataaagagcaacgc

SEQ ID NO: 178402 - DNA, 649 bp, Zea mays
  Clone ID: MRT4577_9428C.1
gttcttttctgtcctattttgtttggttttacccacactggtttcggttccctgcttttcctctgttcctgttttcaatcccactcgattatgcccaacttagtttgaatttccggttattttcaatatggtaaggacatgtttgctacttatatattagatcgcagccacattttcatccacatgctctcacttcgagattttgaccctttttccacgattttcaatacggtaaggaaatgtttgctacttattccctgttgtccattatccaaagtatggtttttaggccaaatttaaggattactgtttatattacagaaaaggacataggaaagaaacgagtaaaaaagaaggaaacaaattctttcagctacttgctgttcgatttacttccacatctaggattagttgttctttttttccacagcaccccccccggggcatgtctcactggaacttttacaaatttgggtttagggtacataaaaggtatgttttttacaccatcaagttgttgattctttatcactttaaattgctattgatgtgtaaaaagagttgattatgtgttccacataaattgctagaatcctttgtggcttcaaaaggattgaatcaattgattattagttttaagctgctttca

SEQ ID NO: 178403 - DNA, 668 bp, Zea mays
  unsure (1)..(668): unsure at all n locations
  Clone ID: MRT4577_94290C.1
caacatctcancttcacaacagcatccaatcttccaaacaatcaaatcaccaacaaatatcaatccaccaaccaacaaaaccaatccaaacaccacaacaacaacaaccatgcagttcaccactctcatgctctctggcctcggcctcgtcgcctctgcctccgcagcccagatcttcgttgacaacaagtgcaacttccctctctacctgcagtcccgtcaaggcgactcctccaccggcgtgatcaccattcccgccaacaagaacaacgtcttctccgccaccatccccggcgccaacgtcaagcagtcctccatcactgtctcccgccagcccgacctcagcagccctctgcaggccgtctacaacgtcggcaccaaccccgacaggacctactatgacctgagcaccgtcttcggcgaccccctcaagagcgagggcttcgaactcctcgctggcagcgccagcaacggctacagcgtctcttgccctcctcgctcctctggcgactgccctaacacttactctcctggcaaccccggtggcaagaacgccgtcttcaaccagggcactaacgccaacctcatcttccaggtttgcagctccaacggcaacagctcttagatggatagatgggagattgacacggggaacgtggcgggcccga

SEQ ID NO: 178404 - DNA, 346 bp, Zea mays
  Clone ID: MRT4577_94291C.1
acgaccataccgatgggcggggtcacaggctctacgtgaaactgtaaccatgctctttgctcactcttgatggtcaacccacaagggggtccatgacatgcgcattgagcaaatagctgggaagcagcccaattgtcgttccatgtcgatagagaaacctaacggatgactggagcatcactacagtaatacgttcggcgcccttggacagaactgatgaagcttccgtcctcaagacgaatgcctaactgtgcaaagactgaatgattccagggtggctagttactgcatcaggcggtgggctctatagagccgcgcggaagagacactgcggactaggaacgag

SEQ ID NO: 178405 - DNA, 448 bp, Zea mays
  Clone ID: MRT4577_94292C.1
aagccagccatccgccggtgggacttattttgttgggacaaaaaaccaatgctccaaagtggggggggacacccacaaccgggatttggggggggggggggtaccaaaaaaaaattgtcagttgggaaaacagaaaccggtttaaaataacttaaaaaggtacattacgcccaaataaaatttggacctttcaaggataaaaccaggctcgctttggttccgaatcaggcgcccaattaagtaaagagcaaaaggtcctgcacaaacgtggtttttacgcgggcttggtttcgtttaaactccttttttttaattgggggggacgaaatgatacttagttttcgggcctgggggggcgcttttttaaccggggttgcttttttaggaatggaaacaggcgccttggtttttttctccccgtttggggtggggaagccaaggcccaacc

SEQ ID NO: 178406 - DNA, 394 bp, Zea mays
  unsure (1)..(394): unsure at all n locations
  Clone ID: MRT4577_94293C.1
nggcccttccgttcggggggggggcttccgggattnnncacacccccgggcaaaaaaaaccgctttttgccgccgacgggggaaacccttgttttttttttttttaancttgggtggccctttttattactgtcgaatagttgcactcatgatctttgggttcacacgcnagcgcacaagagacacccccgacttgccgnnccgagtccgcgctctcctctacgtacgcttcagtttattgatatgaataggcaccacgacggtttctctatttttatttcttaagcacttatgatatctaaaatagcaggagcttgctcgagctactggttgagactgaatgagttctttcactttcataatgtatgacaggtttttgaaaagttttgaatga

SEQ ID NO: 178407 - DNA, 216 bp, Zea mays
  Clone ID: MRT4577_94294C.1
ctctcgcgtgcccaaaccctgcccctggcccgggcccggctctctttcccgacccttcgccacctccgcgccctcgccgcgccgctccgcgcgctcgtctcgtccccgccactagggttcacgtccgcggcgcgaggccccgctccgctccgcgcggcggtgttcgagtccgatcgcgagcaaccggaggctggtgtggaggcgggggaacaaggg

SEQ ID NO: 178408 - DNA, 363 bp, Zea mays
  Clone ID: MRT4577_94295C.1
ggtcaggcgggactacccgctgaattcaagcatataaataagcggaggagaagaaactcacgaggattcccctagtaacggcgagcgaaccggcagcagcccagcttgagaatcgggcgaggacccggatggtagcttgcactctggctaagaggcgttcagtgatactccggcacacggcagtttagaaccactgggttttcaaccaaactcgatctccacttataggaagtgactgttgatcccttgctaaggaggatcactatacggggaacggtgatgagtggggtaacaactaacctttctcacgacggtgtcaggccagatcaccttccttcttgatctttgagcaagtcaacaact

SEQ ID NO: 178409 - DNA, 751 bp, Zea mays
  Clone ID: MRT4577_94296C.1
ccctcgaggccggccgggagcagaatcgcagtaggaagccgggcaaagctacgcaaggagggagaaagcgtgtaaatcatggcgtcctccgcgttcctcaacgctctcgtcatccgatcgccatcaccgtcgctctcgtcctcgtctaaccgccggaggcgagagaggtcgcggagctcaaggcgcagctaaaggacgcgctgtacggcacagagcggggcctgcgggcgtccagcgagtcgcgagccaaagtgctggagctcatcacgcagctcgagacgcgcaaccccacgccggctcctacggaggctcttacgctccttaacggcaagtggatcctcgcgtacacatcattttcccaactattcccactattggggtttggtaacctgcctcagctggtgaaggtggaggaaatatcacaaaccattgattctgagaacttcacagtgcaaaactgtatcaagttttcaggacctttggctacaacctcagttgccactaatgcaaaatttgaaattagaagccccaagcgtgtgcagatcaaatttgatgaagggattgttggtacaccacagttgaccgactccattgtgctaccagagaagtttgagttatttggacagaacatcgacctgagtccactgaaaggcatattttcttccatcgaaaatgcagcatcctcgggtgcaaagaccatatctgagcagcctccgctcaaaataccgatcaggacaaacaatgctgaatc

SEQ ID NO: 178410 - DNA, 1366 bp, Zea mays
  Clone ID: MRT4577_94297C.1
ccggccgggagttagctcaagcaacctttgtccggcctagtcaaatagtttttttttttctcgcacggtcgcacggagggagtatcagtctaccacgctaaacaggaagccggagcaagcgtgtacagtaccggaatccagcaccatggcgggatcagcgttgctcaacgctctcgtcctccgcgcgccatccccgtcgctctcgtcctcgtctaagcgccgcagcgccggcgcctttgtgtcctcgaacccaccgcgcttcccatccctgcgttctgagcgccgcgtcgcccttccgcgggcggcggcgggcggtgaccccgaggacgagtgggtgccggagcctgagggtgggtccgctgtcacggggaccgcggtggctgaggcgccggaggcgggagaggtcgcagagctcaaggcgcagctaaaggatgcgctgtacggcacagagcggggcctgcgggcgtccagcgagtcgcgggccaaggtgttggagctcatcacgcagctcgagacgcgcaaccccacgccggcgcctaccgaagcgctgacgctcctcaacggcaagtggatcctcgcgtacacatcattttcccaactgttcccactgttggagtttggaaagctgccagcgctggtgaaggtggaggaaatatcacagaccattgattccaagaacttcacagtgcaaaactgtatcaagttttcaggacctttggctacaacctcagtttccaccaatgcaaaatttgaaattagaagccccaagcgcgtgcagatcaaatttgatgaaggcattgttgggacaccacagttgaccgactccgttgtgctaccggagaagtttgaagtatttggacagaacatcgacctgagtccactgaaaggcatattttcttcgatcgaaaatgcagcatcctcggttgcaaagaccatatctggccagcctccactgaaaataccgatcagggcaaacaacgccgaatcgtggttgcttacgacctaccttgacgaagaggtcaggatctccagaggcgaaggcggcggcatctttgtgctgttcaaggagggaagtactcttctaaactgagatcgaaatcctggtcgttgaagatgaaccttggagtagttatactgcttatgctttccttttcttatagtagtatactccgtcccaaagtaagtcagtttctagaatcacataaagccaaactatcttaagtttgatcaattttatagaaaaggtaacgtcatctatgaagatatatttcatgacgtgttactgatactaattgagtgtctaaatattgtccactacttatacaaatgtcaagtatatccatctaaataccattacaaaatttct

SEQ ID NO: 178411 - DNA, 381 bp, Zea mays
  Clone ID: MRT4577_94298C.1
gggagagacattggatttaggagcttttgctagatgtgttgagccacttgcctctttgtggaggaactagctttgatttcagcttttgtgctgattttgttttgttggctggctagtggtgttgagccctactttttcctctttgtgaggacaaaccgttttatacttggtcgtgttgagtcgttgcccatttctttggagaccaagttttgcttactttggatgacttgtttggccattttctggcttttggtcatttgagtgagtttctcttcttcttcttcttcctctttctgcttatatatgttcatgtggtggtgttgacattgcactcattaaatgggagattgcgaacacaagattgagttgctccttgtggtt

SEQ ID NO: 178412 - DNA, 394 bp, Zea mays
  unsure (1)..(394): unsure at all n locations
  Clone ID: MRT4577_94299C.1
gcgctcacgcacacagcgcatgattgtggttcgtcaatactggacagctagatcctagctctttagttagctgagacacatcccgcgcagatctgntctgacggtcaccgtgctctctaggcaaggactctatggtgggcgagctctaattccaagcgtcgagcatgacgaatctggctactcacacggggggacacctagtgatccactgtgccatgctagccagatggctgtggtacttattcactaactacttgcctagaacatgacaaaggagctcatgctgctctacattaatgatctgagcaagcgtcttcagagagcaaagggagactcactcgcatactgtggaagatcttactagcatgcctgacactgctgtcaccatcagaca

SEQ ID NO: 178413 - DNA, 810 bp, Zea mays
  Clone ID: MRT4577_9429C.1
agtcagccgcgtgcggcgcgcccgcatcggcacttccttcaacttcttccccttcacacgccggcgaacggaagaaacccaccccaatccccacgcccgacgtcctcccgcgacgaccgcctcgaacccccgcccccggcccccgccctccgatccggcgcggccataggtctttctgtgtcattgcttattacctacatgagtgctgtatctacatgatcccatggagaccccgaatgaagtgacatcgtactcatccctctccaaaattgatagctaccacagccaggcggctcctatgtccgatctagctccagaaaacacatacccggtgtatgactatctctatgagccatctctggaaccagactttccatctgaatatggttcaagagaagatccctttccgacagctcaagctagctcaactatcaacctgaagaccgttctaggtggtcttgctgcaattgtttcgcgtccaagcaagattggggatgatgcatcacggcagcaaagtttcagcacggatgtatcatttctaggtgctggcaaggatggtgatttgcattcatctgtttgcgttccgagtgcaccgccgctacttgaggcaaatgctttacagttcagtgcatacagggaggtgcttcaggcagatcccccggaatggttaccggatagctctaccagtgtatgcctgcagtgcagctgtcctttcacagctctgactcgtggaaggcaccattgccgctttctgtggaggtatattctgcaaagaatgtttccaagggaagatgcttgatgcccatgaag

SEQ ID NO: 178414 - DNA, 928 bp, Zea mays
  unsure (1)..(928): unsure at all n locations
  Clone ID: MRT4577_942C.1
cggccgcgtgggngaaggaatacgactgcgcttcgggcgttaaaaaaaacagcgcactggcttgggaattccacggactggaatcttctgccgtctagccatccctctcaacctggtggctgtggtgggtgtcccagtcgcctttgattccttcccccgtcttcccctcagatctacgatccttatccccggttccccgtattctcctctctcctcaattccgcacgagggacgccgctgcggctctcgtcccatgttccaatgattgttaggtgattgagacttgagagggtctggaggctaccaactggtttggtggctcggccaagccgagcggttccacgctgttcttgccgcctggtgccggagtttctatgtcgaaggctgtgttcggagtttctgcgttgaaggcggtgttctgctgattggagaaactggtttggtgcggatgtttgatgccgtgttggttatagggaccgggagggtgggtgctggcatgaatttggttttctgtcgattcaattggtgcttaatttgagcctttggaggctttttgggatcagggagttggtctccgtcgaaggaggctgctagcttgcaggctcatcgccattggcgccggacctgcctgtcgtacggtctttcctgtgccgaagtttttgctgctgtgaaaacgctttaagcgattacctttggcgacctttccatgcaaaggcttgaccttttgggttccggaactgattggtggtcgaggagtcttggagtgctggtctacctgcattatcaacagggcatttctgcagaacaaaagttgtatcctgtgcagatagccagatactgctttgctagtgtattanattgcttcttgtgtttgacaaagattctattcagccagaagacagtgctcttctttatatccctgtcggag

SEQ ID NO: 178415 - DNA, 705 bp, Zea mays
  Clone ID: MRT4577_94300C.1
actcctatgggcgattgggttcctcgaggccggccgggcaccacggaggccgagctgcgggagaacgagttctggatcacgtgccacaccaagctcgcatgcaccatgggccgctgactggcacctcgccgccatggaggtgcataagtggtggtacctcagcgacatcctggcccgcccctccctcctccccctcacgcctcgccgctacctcggaggcgtgaagcttctcctcccctcttcggcgcaacagtagcagccgtctctgcctccgtcccctgctggaccgtcgaaatccgctcgggtttgggctattcttctgtgatgtgatcacccaattcggtcatttgcggtggttgtgcttaaagatttctcatagtgtacaacagttcccctcaaaaggtctcaagctgcagacgtatctcaagaagagcaaaacaatatcccgaaagatttagaaaaagaagacataatacatgcactacgaagacgtaaaatagacgttgttgattttgaattgctcaccattattttgttctttccatttcaatgtgcgggtataatcccaacatgtgttgttggagttgactatgctgtaaaaagaggtaaaaaagtgtacatctgacaaaccaccttgacttttttattgatgctctatcttaataatgtaatttctgcaaaaaaaaaaaaaaaaaaggggcggcc

SEQ ID NO: 178416 - DNA, 2061 bp, Zea mays
  unsure (1)..(2061): unsure at all n locations
  Clone ID: MRT4577_94301C.1
ccctcgaggccggccggggcgattgctcgggccggaggaggggctttgtaatgtccacgcctcaccatcgcagaagcgcagtaggaagccggacaaagctacgcaaggagggagaaagcgtgtaaaccatggcgtcctccgcgttcctcaacgctctcgtcctccgatcgccatcaccgtcgctctcgtcctcgtctaaccgccgcagcaccggcgccttcgcgttcccgaacccaccgcgcttcccatgcctgcgttctgcgcgtcgactcgtccttgcgagggcggcggcagcgccggcgccgggcgatggccccgaggacgagtgggggccggagcccgagggcggttccgctgtcacgggggccgcggtggcggaggcgccggaggcgagagaggtcgcggagctcaaggcgcagctaaaggacgcgctgtacggcacggagcggggcctgcgggcgtccagcgagtcgcgagccaaagtgctggagctcatcacgcagctcgagacgcgcaaccccacgccggctcctacggaggcgcttacgctcctcaacggcaagtggatcctcgcgtacacatcattttcccaactattcccactattggggtttggtaatctgcctcagctggtgaaggtggaggaaatatcacaaaccattgattctgagaacttcacagtgcaaaactgtatcaagttttcaggacctttggctacaacctcagttgccactaatgcaaaatttgaaattagaagccccaagcgtgtgcagatcaaatttgatgaagggattgttggtacaccacagttgaccgactccattgtgctaccagagaagtttgagttatttggacagaacatcgacctgagtccactgaaaggcatattttcttccatcgaaaatgcagcatcctcggttgcaaagaccatatctgagcagcctccgctcaaaataccgatcaggacaaacaatgctgaatcgtggttgcttacgacataccttgacgaagagctcaggatctccagaggcgatggcagcagcatctttgtgctgttcaaggagggaagtactcttctatactgagatccaaatcccgagtccatgatcgttgaagctgaaccgtgaagtagttatactgcttatgcttttctttcttatagtaatatgctccgtctcaaaataagtcaatttctagaatcacttaaagtcaaattatcttaagtttgaccaattttataggaaaggcaccatcgtctatgtctctatgacaccaaatgagtacattatgaaaaatattttatggtgcattagtgacactaattcagtgccatgctctttttatgaatttggtcaaacttaaaaatagtttgatttaagataactctgagaaattgatttattttgggacagagagaatgtttctgggttgtcttgtaaatacagttcttgtcattagagtatatgatgactaggaccggtttaatccgaattatataaactctctatatatcagcgaaccccttttttatagttaacaaaaaatgttgctgatctatttgagcagcaagaggatcgggaggggagcttcttgtgttggcttgaggcccttggcgctagtgtggctgtggactggagcagatgggctttgtagttgggggtggagcagagattatttccgtttttgccatggcatgaactgtatatattttagctcgctccagctcatgtaacactttgttgctgcgtttgtgcttgggacacgaagacctgtgttgatggcttcgttagtgtgacactgatttggcgtcggatttttgtttgtcatctgtcattcctgtgctgatctgaattgctgtttgtttattattattattaaaaaaaaaaaaaaaaaaaaaaaaaaaaaaaaaaaaaaaaaaaaaaaaaaaaaaaaaaaaaatatttttcatgacgtgttactgaaaaaaaaaaaaaaaaattgggcaaatactgtccacttatacnaatggtaaatgtncagtatatccatctaaatacccattaccaaatttctgcatcatgc

SEQ ID NO: 178417 - DNA, 658 bp, Zea mays
  Clone ID: MRT4577_94302C.1
ccggccgggacaccaccacggaggccgagctgcgggagaacgagttctggatcacgtgccacaccaagctcgcatgcaccatgggccgctgactggcacctcgccgccatggaggtgcataagtggtggtacctcagcgacatcctggcccgcccctccctcctccccctcacgcctcgccgctacctcggaggcgtgaagcttctcctcccctcttcggcgcaacagtagcagccgtctctgcctccgtcccctgctggaccgtcgaaatccgctcgggtttgggctattcttctgtgatggtaaggatgctcacccttcgctcgctcggatccgcttgctgaaatctatatgatttttattgcaatttctaatcatagtgatcacccaattcggtcatttgcggtggttgtgcttaaagatttctcatagtgtacaacagttcccctcaaaaggtctcaagctgcagacgtatctcaagaagagcaaaacaatatcccgaaagatttagaaaaagaagacataatacatgcactacgaagacgtaaaatagacgttgttgattttgaattgctcaccattattttgttctttccatttcaatgtgcgggtataatcccaacatgtggtggttggagttgactatgctgaaaaaaga

SEQ ID NO: 178418 - DNA, 831 bp, Zea mays
  Clone ID: MRT4577_94303C.1
actcctaagggcgattcggacgcgtgggcggggccggggccggcccccacccctccccttcccctgctcctcgaccacctcaacgagcttctgctccgacgacgacgacgtgccgccacagccacatggcggacgacgccgtcgccggcggagcggccgttcgctgcgcagggccggcgccggcctcgctgtcttctagcaggaagcagcagcagcagcccgacgacgccggctgcggcagcagcgacgaccactaccagcacgacgtgatcatgctgaggcggacgaggagcgggcgggcgttcccgccgccgatctccgtgatcggcaagggcgggcggccgtggctctgcctgcgggcgcaccgcgagggtggacgcctcgtgctgcggcagatgcgcctgccgtcgcaggagctgctgcagccctgcaaggaggacggcaggttcaagctcctcatgcacccggaggcccgcgcgcggccgtgcgggggcggcacactgcaggaacggcaagggaatgatagctagcgctcttaattgatcagctgatcagatgatctgccgccacgcacacgtcgtcttgtatgggctggctgctacaatgcaaccggtagatctccctgcttagtttcttgagatcgagggctccagttcttgctttgcattctgcaaccgttgtccaaatgtccacaatctttgccttccgtcaaattttaatacatggtcggaacattgaggcaaaaaaaaaaaaaaaaaaaaaaaaaaggggcggcccggttttctttgtcagtgatcaccccaatacatgttatatagtctgtctgtctat

SEQ ID NO: 178419 - DNA, 376 bp, Zea mays
  Clone ID: MRT4577_94304C.1
gggggggggcggtccgtcctattcccggggggccaccttccctctcccccaacaccctcacaaccctaagcattaaagctccctaaccctctccggcgtcctatccgagggggagagtgatattatctactacaggcagcatccccccttcggcgtcccgccgcagcaaggctacccgggcaaggacggctacccgccagcgtggtacccgccggccggctaccccccgccggcgcagggctaccctccttatggctacctaccgcagtactctctgtcgtctcctccacatgatcagcatagcatcggtcctttcttcatggagggatgctttggcttccctcttctgtttgtgccttttagactccttcttttt

SEQ ID NO: 178420 - DNA, 247 bp, Zea mays
  Clone ID: MRT4577_94305C.1
gccggatactcattcagactattttcactggcttacccatacatatatttaaactatactgtagaaacagtgcaatggaccatacaaaacggtgcaacagtattttggttgaccatacgggtgtaacttacagaaggtcatctatatagtaaccaaaaacaccgtttttgaactgtatatcggactgtgtagagtatagtctgaatattcggataagtgtgagtaagcttccatatgatcatgggtt

SEQ ID NO: 178421 - DNA, 626 bp, Zea mays
  unsure (1)..(626): unsure at all n locations
  Clone ID: MRT4577_94306C.1
gtatctctcgaggccnnggccgggaaaaaaaaaaaacacgcacccgcgacagcgagctctctgacccctgccccactcccatctgcgccaacctcctcatggacctgccgaacggtggacgccagcgccacggcaaggagctcccagactacatccaccacgatcaataaggcggccatccgaacggttcgtggcaatggcgtaccgaacggaatatcactactactacatatgtcaaagccggcgcgtcatgctcaagaactctctcctctcaggaacagtcataacgctgactctccgcactctacaccgcaacacagttcagcgctaagaccgcaacccaccatcacggtctatatcgcctccagcagcatcgacgtacactataaggattccaaggctaagatctgctacacagctggtcaaggaatgaaccgagatatcactatggcgtactaccgcatagcgttaggtgcgctcgtcgatgtactacatcaatcgttctgtcaccttcaaaaacttggagagatgcttgatgcatatctcggaccacacggacgccaacctcgtgatcatgctggttgggaacaaggcgcacctgcgccacctcatggctgtctcgaccg

SEQ ID NO: 178422 - DNA, 348 bp, Zea mays
  Clone ID: MRT4577_94307C.1
ctcgccgagctccacagtcccctctccaagagcacgttggtctactgggacaacgtcagcgccgtctacctctccaccaacccggtgcagcaccaacggaccaagcatgtggagatcgatctacacttcgtccgagatctggtcgctgtcggtgatgttcgtgtcctccacgtcccgaccacctcccagtttgccgacatcttcaccaagggtattccgtcctcgaccttcgccgagtttcgctccagcctcaacatcagtagtggctagttgagtctgtggggggatcctagtccagtctgtaaactccgctgcgacggaagttcagactgcggggggtgttagagt

SEQ ID NO: 178423 - DNA, 280 bp, Zea mays
  Clone ID: MRT4577_94308C.1
cccagcgatcgactgacaaaaaaggtacccttctaaagtcacgacaaagaaatagaggttgataatcaagctggtgatatagtgatagcataccgactcactgatccaatctagttaagatcgaattatgatagggattagcgcaatggttacatgcactgtcattatccattgaactgtgatctgtttttcatgcagaatactgactcatttatgcttatgctcaacatactacaataaagcgagtcttgctatatcattgttaaatgcacgttcatat

SEQ ID NO: 178424 - DNA, 835 bp, Zea mays
  Clone ID: MRT4577_94309C.1
atgacacgctgctcgtggtgttcagaacgttcttcagaattacaaatgcttccaagatattattgccattctgggaatggatgagctcagtgaagatgccaagttgacagttgctcgtgctaggaagattcagcggttccttagccagcctttccatgttgctgaagttttcacgggtgcacctggaaagtaggatgagctgaaggagagagatattagtgtcaaggggggaatggatgagctcagtgaagatgacaagttgacagttgctcgtgctaggaagattcagcggttccttagccagcctttccatgttgctgaagttttcacgggtgcacctggaaagtacgttgagctgaaggagagtgttaaaagtttccagggcgttttggatggcaagtatgatgaccttccagaacagtcattctacatggttggaggaatagaggaggtcatcgccaaggcagagaagattgccaaggaatctgcatcataaggggtctacaggcaacgcaaaatttaacttttggaggtcaacgtgatgtgctttttatcctgtgttatcaagaacttacgtgcaggagaccctgccctgcagaaggatgtttctctcctccgtccccccaccccacaccccaaaataaggattcgcagtgacattttaatttggtttactgccctttgaggaagaattaccttttttgatgaggtgaaactataaccttgttaattctcaaacaaatactcttctcccatgttcatagccattatgaggtcgcctgttcaatttatttttatgagcccaaaaaaaaaaaaaaaaaaggcccctagggcc

SEQ ID NO: 178425 - DNA, 226 bp, Zea mays
  Clone ID: MRT4577_9430C.1
gccgagatctgtcttcggtaatgcaatgtcatcctgaacaagttgcagcggcaatcaaaataggattttccccctgccttttagtctcgtgtattccttttgtgctcttcattttttttcctcatcagctcgatacgacatgtagactttcttttaggttttttttgtttttcatactgtgtgttaccttacagatgtaaaagcgcccccgtacattgcaactgtt

SEQ ID NO: 178426 - DNA, 1213 bp, Zea mays
  unsure (1)..(1213): unsure at all n locations
  Clone ID: MRT4577_94310C.1
aaaaaagnnnnggaacgacccacgcgaccgtttgcttgttagattgaaagggtttccacaccttgaaggttatgctgaaccatacatgaggcaactgtcagtcagtgatgttgtaactggtcctctacagacattcaatggcatagagaaggtcggccatatagttcatgtcttaaagacaactggccacaacggtttccctgtggttgatgagccaccattttcagatacccctacattgtatggtctaattcttcgagaccacctgcttgttctattgaggaagaaggatttcatccgtagttgcacagcgtctacactgaatgctttaaaccatttctcacatgctgagtttgctaaacgtggatcaggaaaacatgacaggattgaggacattgaattatgtccagaagaactggaaatgtttgtagacttgcatccattcacaaacacatctccatatactgtccttgagactatgtctttggctaaggctcttatacttttccgtgaagttggattgagacatcttctggttctaccaaaatcttctaagagggcacctgttgtcggcatactaacaagacatgatttcatgcctgaacatatattgggccttcatcctttcctctttaagagtagatggaagaaggtgcgacttggcaaggtaaaagttaccaacatattttgaagcttgctggtgactggtgatttggggaggtcaccgaaggatcatccgaagctgtatacctggtgtcaaatcatgtattttgcagagaataactcaacttgaaaactagtggatcttacttcaagaaaataatttcgttgtaaatgctaagaaggggatggaacatggctgctaagtgctaacaagttattttcccacgaacaagaggaatctcactgtaaatttattatgcatactttagctaacctttgaaaacaaatgctatctgtagtgcctagatgcattccttattaggcccatcagtgcaaaagtaacttcagttccatcctccattcatataggctactcaaaatagctgctcatatcctgcatatggtgtgataaatacaatgtatttcctcagctttgttccatagcttctttttgcaatattcatgtgcctacattgtggtcccacaatggctgaaagccttagcctggtggttcagcttctgaaaaaaaaaaaaaaaaaaaaaaaaacaa

SEQ ID NO: 178427 - DNA, 1423 bp, Zea mays
  Clone ID: MRT4577_94311C.1
gctattcttgcgttgattcttgaatgaattggagtgtattgtgaaggagagtttaagttgaactctggctactcttagatgaccgtggttcttcatttgagttagacgtaggccttagtgttgctggtcttgttcgacaccgtgataaaggatgagttagctcatataaagcctcttgcgaagtttctgacattcaagtccattgtgttcttaacatggtggcaaggtatagcaatcgcattgctcttcaactggggtttgatgagaggtcctatcgctcaagaactgcagttcaagtcaagtatccaagacttcattatctgcatagagatgggtgttgctgccgttgcccacctgtatagtcttccctgcgaagccgtacgagctgatcggtgatcgtcttgttggagatgtttcagttcttggagactacgcttctgtcgactgccctctagatccagacgaggtcaaggatagcgagcgcccaaccaagttcaggcttccccagccagatgatcatgtccggtgttccactgccataaaagaaagcgttcgcgatgtcgtacttggaggcggtgaatatatcgtgaatgacttgaagttcactgtgaaccacgcggtggaacccatcaatgagaagctgcacatgatatctgagaacataaaaaagcgcgagaagggaaagaagaaaacaaatgacgatagctgcatcggttcacccacatccttgaccagggtcatcagtgggattgatgatcccctcctgaacgggagcctgagtgacaacagtggcccaaagaaagtgcgaaggcagcgcaggaaatcaggctatgcaggcgcggagagcggaggagagagcagcgaccatggcctaggtgggtttgagatccgagggaacagatggattactagctagggagtgacaactaagagcaacctgtggagatgctatacaaatgtcacaggagttagcctagccagtgggttcaagtgtaggatgaggtatctggcatgatgttgtagcatgggcaaatcgagatgagtgagcaatcaggttgttgtctgttgattcttttagctgagctgctgaggccttgatcctgtatttaagatgtcaggccttgattctttcagcaagcgttggaaggaaggaagcaatgtgcctgttctgagctcccgtcagcatcacttgtaaagttcttataagtacagactagaactagacatgcatacaagagaatagacagtcgatgtttctatctgtttttgtttcattctatggcccttgtcacacgagcaccagattttttttttctttccttttggtaccatgatggacgtgagagttccttgagatgatcaaaacatctatctttccaattccatgtgtatcctgataattgaagatgatcgtttggttttc

SEQ ID NO: 178428 - DNA, 564 bp, Zea mays
  unsure (1)..(564): unsure at all n locations
  Clone ID: MRT4577_94312C.1
ttggggtctagnnctccaggtggctttttacactatttacgcgccgntatcgtgtctcncgacgacagtcagcaagccaccgatcacttcctactcctcccaatctcgagaaacgaaatcgaagtgttgtttacttttaaactgagacactcgaaacaatggcgggatcaaatgatctggaggccaacaacaggatgtcgcgtgggtctgaggctgtcgacaatggattctcagaaaagcctctaaaccagggaacaggttcaggaatacacgcctccgtctacataataacatggattttcttttccaataccacgattctcttcaacaagtggctaatcgacactgctggattccgatatcctatcatcctcacaacatggcatcttgtctttgcaacaatagcaacgcagctacttgctcgtactacttctcttctcgattcacgccactcactcccaatcactcgacgactctacataaggaccatcctccccatcggcgtcctctactcggcttcgctcgtcttctccaacatcgtgtacctctacttgtctgttgcgt

SEQ ID NO: 178429 - DNA, 840 bp, Zea mays
  Clone ID: MRT4577_94313C.1
atggcagcagccgcggcggcatcagcggtgcccgcggtggggggccgcgcgggactgctgggcggcggcagtcagggcggcagccgcagcggcagccggggtgtagtggggaggaggcggtgtcgacattacggctcactgcttggggaggaaatccacgagggagccgccgagctgggggagggcggtgcctggaggtcgccgccgcgcagcttcagcttcagggtggcgcagacagagagcggacaggggcgggcggacgctggtcgcggccacgcgggtggcgggctgccggctccgcgacaggggcgagcggtcgccagtagcggccgcgcgtggagatggacggcgagcaccacgtcggtgagcgcgccggcagttccgcgccgggttgacgagggccaccgtcgtatgcttcgtgcggggctactgcagacggaggaggcgctggacgtcgtgccgagaagagggctggggtggcggctggctcatgggggtgacggccggcggcggctggaggtgacggccggcggcggttggagggaggagaggagatggatgatgggtcttcagcgccttacatcactgcagggtgtccgtcagtttatgcaactatggcattacatcaatcaactaaatatctctggtgcaccagatacagttctttggaaattcaatgggaatgggcggtattcagccaggtcggcttacaatattcagtttcacggcagtgtgcaaatggatcactgcaggacactgtggaaggccaagatcacaaatagatgcaagatgttcatatggcttatgattcaaggaaggctgccaacagccaatagctag

SEQ ID NO: 178430 - DNA, 571 bp, Zea mays
  Clone ID: MRT4577_94314C.1
tgggaccctcgaggccggccggggtcgctttctcacactgcctcgagtggccgctgtctcccgttcgaaacgctgagcccccctccgctcaaatggcccccaactcaggtggcacgctccgtcggcgccggccaagattaactacgcataatgtgaccaaccctctgtttgagaagaggacgaaccacctcatgatcagcgacgcgttgacgaccgagaaggacctgtgcctgatcgtccagcggccctgggtcgtgcgtatcctgcgccagcgtccgcatcctcaatcatcgcctcaatgtaccaccggagctcaaccagcttacccgcaccctcgataagaacctccctactaacctgtataagatgcttctcgagcaccttcctgaagaccacgctggcaagaacgaaagtcttcttgagagtacccaagctgaaaatgaaggaagaaactggtgagtcccataaacccattgctgtgaagtatggccttaaccatgctgacttacctcattgagcagaacaaggctcaacttgttgtcatcgctcatgacgtgcatccgattgaact

SEQ ID NO: 178431 - DNA, 225 bp, Zea mays
  Clone ID: MRT4577_94315C.1
gtttatgtgaacattcctatcaatcctaattccctctggagtttcatgttatgcctgtttcaggcaaatgtaaagtctagaaaataatgcaaatgtcacggctactctatatacttttgcttggttcatttattttcccttttagttaagcatgactttagatgggaagcctgtgtatcgtggagaaacaagagaccaactttttcattccctgcccccaatttc

SEQ ID NO: 178432 - DNA, 608 bp, Zea mays
  Clone ID: MRT4577_94316C.1
ccggccgggccgggagccactccgtgagaagttctagtcatcacacacaccaatggcgccctccgctccccggctggtcgccggagctctcgtgatcctggctgctgtagctctggcccgtccaaacgccgagcaacggagccccggtcgctacaatgtcgccgacgcgatcgcgatgggctcaggtcagcatcgtcatcatcaggggcggacaccaccatgccatgtgtcgcctccgcccgtgttgccgccgccgtgtcctggtcaccaagatcggcgtagagaagcactggtgccgccgccaattgttcttggtgtgcagaggaccgcgccggctccgccctcgccgcagcacgcgcaggtggagcattatagggcgctattcccgccacctccagcttgctcattctaggcgatggctcttgttgttactgtacttcctaagcgtctagtagccgtctagtgtttggagttcatttactcagcaagcaacgtaaaagctatcagttttttcattctcacccatttctgttgacacaaaaaattgaacaatttgtttaacgtttgtgtttatggcaaaaaaaaaaaaaaaaaaggcccctagggcc

SEQ ID NO: 178433 - DNA, 565 bp, Zea mays
  Clone ID: MRT4577_94317C.1
gattctggatggccatccagcatcctacgacccatgcatggcaatctagtccgatggctgtgtcgaccgatgttgtgggagcgagacaaccaccatgaccagtcaagtggaaggaaaaggatatgtataaggagagcatcacctgctcttacgtaggcccaaaaatctaacatacctgtgacttcgaacgagggggcgaaatgctccaggccaaccgagtgcactacggtggatctctacgccactgcataacgtaccactgctggaccgttcgtcccctaatgacgcctacgagtgatgccttaagacgaaggtcgctccttactacgacctatttaacgagctgccgatcgacgttctggacttcgtgaaccgcatggtgcacgacacggggcacgaagtgatcaagcacctactggtcacacttgatgcggtgtcatctatgaatacgcaccactcttggacacatctaggcccaacacgagctggcgaccgatgaccagaaagcacccatcacgcgagacatctgagcaactctctgtatgacccatgcgacggcgccata

SEQ ID NO: 178434 - DNA, 476 bp, Zea mays
  Clone ID: MRT4577_94318C.1
tgcgcggcgttattttttctttttttttttttttttgcatattatttttttttttatttttgctttttttttgggttttttgggttatttttgtgttcattattatgcgttggcgcgtaaaaaccaaccttctttgatgtctccaggcgaaaaaattctttttttgaaacagttgagagcacgcgcggaggaacgaacatattttttttgtttgccaatcttgtttgcgaacatcatgattattaatgcataccgaacctggtacactatattgttattttgagtgaaagatgctttttttgtagtattaaagtttgtttctgtggttgagcgattatgaatgtagggtttgtttttttttttgcaggatttgacggttttaatttttagggtgcttaaaattgttttttatttgccgtaagaaaaataatttggaaaacaatttgttggttataaacgattatgatacttttttt

SEQ ID NO: 178435 - DNA, 1143 bp, Zea mays
  Clone ID: MRT4577_94319C.1
atgaagacgacaggaaccagcgatgaagacaacgacagacgttgggcagtcgcgaagacgctccccaaaaacctaattgccgatcccccgagcagggtctcgaacggcaagggcttcggaggcacctgccctctcgcctctctgcgtgcacagtgctttgttctgcccctccgcgcccctgctcgccgatggaaggcgagtcccgccgtgaatgtcgcccaccggcctcccttcgactctgacgctcccaggaccacaccgcccaagccgtcgagcaaatccgcgctgtgcaagtggtggcacagcctcgcgcccgccctgctcgccgccgcactggcggtcacggtggccgcgctgcggccgacgacggagcacgcggacgccaaggggcggccgcctctgtggttcggaccaggaggagtgttcaaagtggccctgttcgcggacctgcattatggcgaggacgcgtggacggactggggccccgcgcaggacgccgcgtccgaccgcgtcatggccgccgtcctcgacgccgagaacccagccatagatgtgcagacatccctattggaagaagatctgaacaagaattatcaagaagacaaaagacaatatacacctcttgttaagaatggagaggttgccaaggatccatcagggaaggacatcaatgcacttgagcagcacatcaagaacctcctgagcccttccaccccatttttcttcaatactctgtacgacccttaccgtgttggcgccgattttgttcgtgggtacccctacagccttcgtgagggtgtcccaactgttgtttctcacgggctttggctcaacattccagactacgatgcccctacccagcttcttaagccccttgagagaaacaccaggtatgtggatgctattcttacgatcccaaagggcaccctctttcctatgtgtggaatgaaccttgcatttgaccgtgagctcattggtcctgcaatgtactttggtctttgggtgatggccagcctattggacttgttttgcagccatttgactggattaagaaaactttcttcgagaaaccccaaccagaggcataaaaggcttgcaagtctgcaactttggtacatcacttttgtctgggatggttcctga

SEQ ID NO: 178436 - DNA, 352 bp, Zea mays
  Clone ID: MRT4577_9431C.1
cccaaaatatctaaagaatatcttttccccctgcagaaaatatcaaacctttggatgtgtttgagcctgtctaccgtggggtttttttttatctgcctttacctctgtccatatccagtgaataggtgggatattttagcagtgagcagtgggcagtagagtatttgttggttttgtttgttgtctgcgatatgggatactggtgagctgagtatgggatatggatgaagtgcatcattgaggactagaagtctcgctccccattaataagtctcaaggtgagctggaatgtgtctgtttgtaggtgcagttttgactgcttgctccttatccatatcaaatagaccagatt

SEQ ID NO: 178437 - DNA, 992 bp, Zea mays
  Clone ID: MRT4577_94321C.1
ccccgtagacacactccaagataccaagaacaccggccacacgcacgcgcgcgcacaccgacgcacggcaggcgaggccgaggacgaactcacgataaaggaagcaatggctccgtcgctcgcgtcgacggcggggctcccgagctgcgcggcgcggcgcggcggccggtgcgtggcccgccgcgcgtccgcggttgcggctccggcgacggcgacggcgacggcgaggacgcactacgaggtgctcggggtcggggccggcgcgagccggtgcgagatcaaggcggcgtaccggcgcctggcgagggaggtgcacccggactgcggcggccgcggcgacgaggggttcatccgcctgcacgccgcgtacgccacgctcgcggaccccgacgagcgcgcgcgctacgaccgcgccgcggcggtccggagccggatcagggcggcgccgtcggggtccggggcggggttccggccgcgaaggtgggagacggaccagtgctggtagcaccgtagcagcagccacgtagacgtagctgcgccggcggtggagtggagtcgccggagcgcgctcggtggtctggtccgttcccagggccagttgcgaccatggggcccatattgaagacagcccacatgaaaaacggaccgcgatcctggcagcccacaatcacatgagttgggatcgtggactccacaatcacatgagttgggatcgtggactttatgggctgcaggcttcgtaggcctttcgcgccagacttggcgctggatgttgttgtaggccatcatagagctgcacgaagaggcatttttaacatctcttttgcactgctgctactccttccactccaaattgtaaaatacttttatctttttattaacatattatgtttactagtatatgtttatatatcgtgtatataattaaaacattgtatctagcgtcttataaaaaaaaaaaaaaaaaacccacgcgtccgcccacgtgtccg

SEQ ID NO: 178438 - DNA, 360 bp, Zea mays
  Clone ID: MRT4577_94322C.1
caattgctagtttggaacttcgaataagaatggtcgtgaagtctactgttggatcaagagtacctggcttcatgcactgatggtaatgaagatattcaccaagaatcatctgccaagtttaatagagatcagatgcattcagtcaagtggaagggcataaatgtgcttctgagccacctttgtcctaagtgttctaagaaacatgatgacacaacttcaggaagccaaaccactggatgcacatgttggcagtggttcttcacaccatctactagtaatgatactgcaaatgtagcaagtgtcaatggtggaaatacttcttaggcagaagaaaaggttcttgctcctagttacaagttg

SEQ ID NO: 178439 - DNA, 310 bp, Zea mays
  Clone ID: MRT4577_94323C.1
cccctggcatcaaatcaaacttaaccaaatcaagctggggggtttacaaaccaaaccgaaagcccatttagaaaattagaaactccagcggacccaacacaataaatttggggaaaaaaggatcgacccatcgttggctgatcaacccggccgttgttacttttttcctcctccggggggcctttttaagtttggaacgacaaaacaaacaacatcctttaatgtggatcttttttaaaaccaccgatgaactggatgctagctcactccaaaacccatgttcacggataaatggacccatgggccgggg

SEQ ID NO: 178440 - DNA, 340 bp, Zea mays
  Clone ID: MRT4577_94324C.1
aggcaacgtgccttgcccacagcaactatcgattccgatgtctgaacaagcccaactgctggggctgcctaaacatgatggtcaaagaaggagctgttccagcgcttgaaactcttgagtatgaaataatatcgcacgagatgcatactgcacacaaatctggtcctgctgatttcggcatcactcacctgtacaccctcaggaatattgtcgtctatgttcactgggatggttcaagggtttaagaggtggaggcattcgaggctgctatccagatgtcaggcagtacgcttactaattatcccacactgcgtttgcacagatgtctcgagtcagaact

SEQ ID NO: 178441 - DNA, 1799 bp, Zea mays
  Clone ID: MRT4577_94325C.1
catcccacgcgtcggcccaggcgggcgcggattcgcgggaccgtatccgagcaggacagcaggttgttcagcgatcactcgagcggtcgagccctcgcgccgcggagagtgtctccagtctcaagtacagcggaggatggagagcggcttgcttgacaccgccgcggctgccggtctctgcccggtggcggccgggcgccgccgcgtcgggagcacgggcacggcgaggtgcttcctcagctgctcctgcgcttccagagactgcagggtgagcgcgtcctactcccactccatcagccggatgctgagcggggtgcggtcggcggcgcgcaagaggctcttcaggagcgacccggccgagctgctgggcgtcgccaactggtcggagacgggcggcggcggcgccgggggccaccagcactggtggacggcgctggagaacaacttcgtgctggaggccaccgacgacgagtacggcggggtcgtcgtcgacgccgatcggctgccggccgacagggccgccttcgcgcgctccctcgcggcgtcgctctcctactggaagtccgtggggaagaaaggggtgtggttgaaattaccggtggatcgagccgacttcgtccctttagcagtgaaggaaggcttcaagtaccaccacgcggaggaagcgtatttgatgatgacgtactggatccccgatgaaccgaatatgctcccagcaaatgcttctcatcaggttggggttgggggttttgtgatcaacgaccaaatggaggttctagtggtgcaagagaagtaccgcggatcgtcgctggatggcgtatggaaactccccacaggcttcattcttgcgtctgaggaaatctacacgggggccagcagagaggtgaaggaggaaaccggggtcgacaccgagttcgttgacgtcgttgctttcaggcatgcccacaacgtggcgtttcacaagtccgacctcttcttcatctgcatgctgaggcctgtgtcgagtgagatcaagattgacgagacagagattcaggcagcgaagtggatggcgctggaggagttcgtgaagcagcccttcatccaggaagaccacatgttccagaagatcatggacatctgcatccagcgcctccgcaagtgctactgtgggctgacgccgcaccacgtcgtctccaagttcgacgacagaacgtccacgctctactacaatgtcgccgagcccgaggacgtgaactgcagcgccgcctgatgtaatatgatgtgagggggagggggagccaccccagcatctactagtctaatttttgctgcgcagaagtttcatgatgcagcagtgttagtcgtgcgattactgagagtgaaatactagtggcagactgcgcgaggcaatagagttgccgagcctgtacatatacgtgtagggcatatgcataaccagagagctgtatatcccggggcggatccccgggcaggaggaaaattttcattgccgccgtaaattacaatttaactttagctcgccctaaaaaaaaaaaaaaactcttttttcttcggcctgcgaccagcctgtagctatattagcttatagctcagtgctcgtgcgttgcaacggatcatataatagctcaatacctcataatccttcccaagaagtccgaatggggcgccaccaggcaggccgtcgcgcccaggccgcccaccgtctccatggtcgtccgcgcctacgcctacgccgatgagctcgtgaagaccgcgaaaacgatcgcgttgccggggcggggcattctgtcgatgga

SEQ ID NO: 178442 - DNA, 1073 bp, Zea mays
  Clone ID: MRT4577_94326C.1
ctctcgaagcttctcgcgtctcctgggtggccgtgtccgtctccacgccaccgccccgaccgccggttcggcacgagggttccaagagcactcgacatggcggccgctaatgttggggaataacaagcggcggcagcagcagcagcggcgccgacgccgggggcggattcgagtgcaacatatgcttcgagctgccgcaggagccgatcgtgacgctgtgcgggcacctcttctgctggccgtgcctctacaagtggctgcgcatccactcgcactcgcccgagtgcccggtgtgcaaggccgtggtcgaggaggagaagctcgtgcccctgtacggccgcggcaaggaccgcgtcgacccgaggtccaagaacgtccccggggcggccgacatccccagccgtccggctgggcagaggccggccacggctccgcaggcggaccccaacaacgcccactttcccaacgccgccaacccggcgaacccgtggttcatgggcggcggcggcggaggcatcccgctggccaacgcgcgctgggggaactacaccttctcggcggcgttcggtgggctgttcccgctgctcagcttccaggtgcacgggttccccgacgccacggcctatggccagccagctgggttcccgtacgggtacggccacggccacgcttttcatggcgggcacgctggagcacatgcccacgccgcagccgcagctcctcggcacgcgcagcaccagcagcagcaggcggatgtgtacctgaaggccctgctcatcctggtcggcgttctggtgatcgcgagcctcgtcacgttctagggcgtcgcctgttggtaggtgttcatcatattgttgctgccttgctggtaataaataagagagagagacagagacaacacgaccgaaactgaattattcagagcggtgcaaggtgttgatgaagggtgttgttgtacatgctgtttgatacatgattgtatactgtggtctttgaacatacattattatcgaataataatctggaggctctgtttgaagtaaaaaaataaaaaaaaaaaaaaaaaagcggcc

SEQ ID NO: 178443 - DNA, 1301 bp, Zea mays
  Clone ID: MRT4577_94327C.1
ccgccttcgcgcgctccctcgcggcgttgctctcctactggaagtccgtggggaagaaaggggtgtggttgaaattaccggtggatctagccgagttcgtccctttagcagtgaaggaaggcttcaagtaccaccacgcggaggaagcgtatttgatgatgacgtactggatccccgatgaaccgaatatgctcccagcaaatgcttctcatcaggttggggttgggggttttgtgatcaacgaccaaatggaggttctagtggtgcaagagaagtaccgcggatcgtcgctggatggcgtatggaaactccccacaggcttcattcttgcgtctgaggaaatctacacgggggccagcagagaggtgaaggaggaaaccggggtcgacaccgagttcgttgacgtcgttgctttcaggctaaatttgtcctacgtaacgtgtgttgccaggcatgcccacaacgtggcgtttcacaagtcggacctcttcttcatctgcatgctgaggcctgtatcgagtgagatcaagattgacgagacagagattcaggcagcaaaggtggatggcgctggaggagttcgtgaagcagcccttcatccaggaagaccacatgttccagaagatcatggacatctgcatccagcgcctccgcaagtgctactgtggcctgacgccgcaccacgtcgtctccaagttcgacgacagaacgtccacgctctactacaatgtcgccgagcctgaggacgtcaactgcagcgccacctgatatatgatgggagattgggagggatagtctagcttttgctgcgcaaagtttcatgatgcagcaatggcgattgctgagagtgaaatgctagctagtacgtagcagattgcgcaaggcaataacagtgttgccaagcctgtacatatacgtgtagggcataacaagcgagagctgtatatcggtagctctgctctgtcgtgtgttctgataaacgatggagccgtgtttgatcgtttgcgacttgcgaaacgaattctccatcgagcctgaggacgtgaactgcagcgccgcctgatgtaatatgatgtgatggggagggggagccaccccagcatctactagtctaatttttgctgcgcagaagtttcatgatgcagcagtgttagtcgtgcgattactgagagtgaaatactagtggcagactgtacatatacgtgtagggcatatgcataaccagagagctgtatatcccggggcggatccccgggcaggaggaaaattttcattgtcgccgctaaattacaatttaactt

SEQ ID NO: 178444 - DNA, 674 bp, Zea mays
  unsure (1)..(674): unsure at all n locations
  Clone ID: MRT4577_94328C.1
aggaaaaatcctcagacgtttcaaaagaatctaggtttttacaatggattcaccaaggatgatgagcttcgccgaaactcataaaagaatagggggacggacaacgggggaaaaaacgaaatgtcttttgtttggttctggagacaaaacatgatgagagactgttacagttacagatcatcagtaacttaaacctcaacctcgtccatagtagatcgactgaaacttcattttcttcgccaccccctttttcccaaaaaaaaagtcagttataatttcaaggtatggtgaatccgatgctttttatcttgagttctccttgaagcctctctggatcacgcacccggccgagtactgctcgcgtttgtcgcgcgagctgcaggggcagcggcctgatcagcaggtggcagcgatccgcctgctgttgtgttgggaggcaatactgccatagcttgcggcggcggatggagcctgaagttgtgctgcgggagcgagggagccgggaagaaaggggcatgaatctgtggcggnggatgctggagcagaggctgcaccgtgacctgctgcgccggcggcggcggatgctgcaccaacggttgcacggcggtgacctgctgcgccgccagcggcggtggtggtggcagtatcatccttggcgttggaagcggcgggta

SEQ ID NO: 178445 - DNA, 165 bp, Zea mays
  unsure (1)..(165): unsure at all n locations
  Clone ID: MRT4577_94329C.1
ctgctgtttttgttggcggttcagaatcatgggaggattaattagccaatcgtgcaattgtccccgcngatagntcaggaatggttaatgatgcacaccttggtccagcgatcagccgacaggcaaaggatcctatcggaaaattagatcaaagtggggttccca

SEQ ID NO: 178446 - DNA, 286 bp, Zea mays
  Clone ID: MRT4577_9432C.1
cggccgaattcgggtcgcccacgcgtcagaatgcacttttgaatgttgagttacacaaacgcactcacactgatgggatttattttctagtttgtgtgttgacaaagggctaacacacattgactgctaagtttatttaagatggcaacagtatatggtgcatatttgttacttcactgctgtggatttggtggtatttaatgctccacggtgattttaattgtgattttatttgaaagaggacctttcccatatgagcagtggctttacagggaaagtggagata

SEQ ID NO: 178447 - DNA, 422 bp, Zea mays
  unsure (1)..(422): unsure at all n locations
  Clone ID: MRT4577_94330C.1
tctgatgcatatctgctccttccccctcatggggcgggggggcgcgtcacctcctcaggaatgcccccctatgtggaatccacaggtctggcagcctattccctacgactttcctagtggatctattatcccatttagcagcacccaccttacatttcccagtttatcacctcatcggggggggggaggatgttttgtctgatcggggcccttggctctctttccttggtctgatgattcctacttatccttgcccacctcccccgcttgctgctggccgtgtgcgcccgcctatcctttttgtcncgctgcctagcgtctcttcgggccctctggtcccgttcttcttggagtgcggggcgtagcacaccgctcaggcggttttctggccctcgctcgccggtggtgcccctgggggtggg

SEQ ID NO: 178448 - DNA, 351 bp, Zea mays
  Clone ID: MRT4577_94331C.1
gccagttgttttatgctagttttagagaataagccatgcgtgggcatgtttgagctatttcgcactgagcatctgggaatgggtcattaaatcatctatagatggtttgatggtacttgctactccgattaccatagtaatggtagagataatacgcgcaacagaccccgacttcctggaggcgcgcatttatttgatcaaaggctgacgcggtctctgaccctagatccgatgattcatgataacttgaccgaccgtacgggcttcgtgctggtgacgcatcatctatatgtttgccctatgaacttcccatggtaggatacgggcctaccatgggggtgacggcatgac

SEQ ID NO: 178449 - DNA, 328 bp, Zea mays
  Clone ID: MRT4577_94332C.1
agcaagaagtggaaacacttcatgaagggcaagggcaagctcgtgccacgctatgtcagccccttccaggtgctggagcgtgttgagtgggtcacctatcacctttagcttctagagggtgcttgtctccacaacacgttacatgtgggctgctcaagccattccgcagggaacctcagatgaatcgaccgcacctgtcgcccgtacaaaacgatcgactattgtatgcgccaaagtcgtgtgttgcacgcccaactacgccttggcgcttagaacgtctgcgtttagtggtgtgacctgccctgcaacggcaccatttgggagtcgc

SEQ ID NO: 178450 - DNA, 395 bp, Zea mays
  Clone ID: MRT4577_94333C.1
agcaaaacatactttcagcaagtatggtaatggtgcgagtcattatcatttctcataaacataaagactgattatttgcacaacaaaattaataaagcactattgtgtaggtacataagtaaagagaacaggcaagcgccattgggttattttctgtacaaaagtacgctgataaaaataatcaaaccctgatcatctcatgcagaatgagtaaatggacaatctctggtaacatcacaagatttcttaactttggcatgaacaaaccttcaacaccgagtagcatataatccaatcacgaaaaaaaaagcatagctgggtaagccctaatgaatgagctagcctgcatcatcaaagaaggggggaaactgttaaaaggatgtcccttgtgaaaa

SEQ ID NO: 178451 - DNA, 142 bp, Zea mays
  Clone ID: MRT4577_94334C.1
gccaatgacatgcattatatattagtgacgacgcagggatggagagtattctagaaaacttcgggggacggagaaaagcttagcttccaacggctatgtgccacacagttaacagtggactggcatggtgataaaccattgc

SEQ ID NO: 178452 - DNA, 316 bp, Zea mays
  Clone ID: MRT4577_94335C.1
tccacgcgtccgtccacgcgtccgcccacgcgtgcggcagcttctgcttgctctggggggaaggagagagagagagagcgagagagagatctagtagagaggctagtaggtggtccttgaacgaagatgttggcggtgttcagcgggcatgtggtggaggtgccggttgatctggtggctgagggcagtcggacgccgtcgtccaatacgaaggcgtggcatctggtggggcgctttctggccgtgtccgatccggccgtgttcgagcagatcggcgaccactatcacctcgcctactcccacaccaaccaggcgc

SEQ ID NO: 178453 - DNA, 492 bp, Zea mays
  Clone ID: MRT4577_94336C.1
gggaattgggaacagggaacaaaactttttttttttcatttcaattggtcattcagggcattggtcacactgaccctgccacccatggggaggcgggacacattattactcaatcatcgccgctaaatgactcaactagctagctagccagggggtatactacagaacaaagttttttcagggggggacaccccccgcagcaacgtaggggcatggagtcggttgttgcaggccccacatcgccgtcagttgctgggctatttgggccgccaacagccccggaacctggcccttttgcggttgctgctgcaggatggactggaggaccaaacccaaaaacccctgggaccggggctggggctccacctgcctgagctggtggaaacactacttttttaattactgggactgaggcgagcaaagggggtccccctcgggctgcactgatgcctcaaaaactcgacccactggcccaggatcggggggctgcca

SEQ ID NO: 178454 - DNA, 349 bp, Zea mays
  Clone ID: MRT4577_94337C.1
ctgggtcttcagaccattagctttatctacttcagagcgcagaaaaacccgatcgacaccaggagggtgttgctcgttgccctcgatctcctggctctcgctgcgagcgccacctccacgcatacaagcggcggctgcggatgccagccaccaccgccggttcatctaccaccggcggtgcatatgccaactgcggttcacctggcacctgcggtgcatgttccaccgccggttcaactgccgtcgcctgtccacctgccaccgccggtccatgtgccgccgtcggttcatttgccgccgtcaccatgccactaccctacttaaccgccccggtcttagccttattccc

SEQ ID NO: 178455 - DNA, 813 bp, Zea mays
  Clone ID: MRT4577_94338C.1
gtgcggcgctcgaggcggcctcatcaaatcagcccactggatcttcagactattagctttatctactccagagggcagaagaacccgatcgacaccatgagggtgttgctcgttgccctcgctctcctggctctcgctgcgagcgccacctccacgcatacaagcggcggctgcggctgccagccaccgccgccggttcatctaccgccgccggtgcatctgccacctccggttcacctgccacctccggtgcatctcccaccgccggtccacctgacgccgccggtccacctgccaccgccggtccatgtggcgccgacggtacatctgccgccgccaccatgccactaccctactcaaccgccccggcctcagactcatccccagccacacccatgcccgtgccaacaaccgcatccaagcccgtgccagctacagggaacctgcggcgttggcagcaccccgatcctgggacagcgcgtcgagttcctgagggatcagtgcagcccgacggcgacgccctactgctcgccccagtgccaagcgttgcggcagcagagttgccagcagctcaggcatgtggagccgcagcaccggtaccacgcgatcttcagcttggtcctccaatccatcctgcagtagcagccgcaaagataccaggtcacgtggctgttggcggcgcacataacgcagcaactgactgcgatgagcgtgctgcagcaggcgactccatgtccctacactgctgccggcggtgtcccccactgaagaaactatgtgctgtagtatagccgctgcccgctggctagctag

SEQ ID NO: 178456 - DNA, 359 bp, Zea mays
  Clone ID: MRT4577_94339C.1
gcgcagaccattagctttatctactccagagcgcagatgaacccgatcgacaccatgagggtgtcgcgcgttgccctcgctctcgtggctctcgctgcgagcgccacctccacgcatacaagcggcggctgcggctgccagccaccgccgccggttcatttaccgccgccggtgcatctgccacctccggttcacctgccacctacggtgcatctgccaccgccggtccacctgccgccgccggtccacctgccaacgacggtccatgtgccgtggaacgatcatctgccgccgatatcatgctactaacctactgaaccgaccaggtactaagactcattaccagccacacccaatgc

SEQ ID NO: 178457 - DNA, 321 bp, Zea mays
  Clone ID: MRT4577_9433C.1
atggtcagccctgttctggccatcaccatcgacgactcgcacctcgacgtgaccgccaggacctcccggacctcacctagcccttcaccggacctccctcgccgccgggggaaggagcccgggttgaaagaaagaaaagccagggggttttgcgagactgtaatctcgccgacgaagagtacgtcctcattccggaccaaggagctgctcaaaggttctctggaggatatggttgctggagtgacttggtcgtctaccttgccaccgggttggacagtcgagtgggaccctacctcagcaggagaggagcaggaggagtga

SEQ ID NO: 178458 - DNA, 302 bp, Zea mays
  Clone ID: MRT4577_94340C.1
ggaaaccctagcgagcgagagtgcccgtagccaaaagaccatccagccatggcgctgggtgccctgtacaacgagatccgtagcgtgaaggtccgcgacgtgccgtcttacctgaagccgtttttgacctggcacaactgtaagaagagcgcccaccagcgccggccaccgctacatagagaagttcatcgacacgagctcggcgaaccctctataccaggtgtgtatggggggggtgatcttctcctactgggtcaatctgccctgggagcgcgcccacctggcccacctggaggagatgg

SEQ ID NO: 178459 - DNA, 444 bp, Zea mays
  Clone ID: MRT4577_94341C.1
aatatccggctcgaggcacgcgtgcgctgacgcgtggggcacattatgttctctgtcataattttgcatatggattatatgaacaggattttggaaaatggattactgtgcttgttaattctgtgactggaaaaataattttcgggatactttatgaatgaacacattaaaggagctgtagtcttcaatgtttcaaaaagatctctgatgctatctcatgttaaattgtcagaaacttccacatctaggatcctttttgtccataactttatctctttacacatcttaattgttttgattttcacttattaacatgctatatatttttttttataaaccattactccttttttttctaaatatttttaaatagcttgatctattttgttccccaatatttttttctttttatctatatatttttttgatattttttcaatattt

SEQ ID NO: 178460 - DNA, 757 bp, Zea mays
  Clone ID: MRT4577_94342C.1
gccggccgggcctccataccaccactgagacttcagaccattatctttatctactccacaacgcataagaacccgatcgacaccatgagggcgttgttcgttgccctcgctctcctggctctcgctgcgagagccacctccacgcatacaagaggcgagtgcggctgtcaatcaccgccgccggttcatctaccggcgacggtgcatctgccacctccggctcacctgccacctccggtgcatctcccaccgacggtccacctgccgccgacggtccacctgccaccgtcgagccatgtgccgacggcggttcatctgccgccgccaccatgacactaccctactcaaccgtcccggactcagcctcatccccaggcacacccatggccgtggcaacagacgcatccaagcccgtgccaactgcaaggaacctgcggcgctggcagcaccccgatcctgggccagcgggtcaagttctctgaggcatcagtgcagtccgacgtggacgccctactgctcgcctcagtggcagtcgtatgcggaaggaccgttgccagcagctcatgcaagaggagccgcagcaccggtaccaggcgatcttcggattggtcctccagtccatcctgcagcagcagacgcaaagcggacaggtcgcggggctgataccggagcacatagcgcagcaactgacggagatgtgcgggctgcaacagtcgactccatgaccctacgctgctgacggcggtgtcccccactg

SEQ ID NO: 178461 - DNA, 271 bp, Zea mays
  unsure (1)..(271): unsure at all n locations
  Clone ID: MRT4577_94343C.1
ccttttacccacatccccctgacccangcgggtgggaaaaaaagtgttgcggaccgaaaaacanccaccaggnatccaatggcctaccctcacatgaaccaaaacaccaccggcaaccaaccaataaacaacaaccccacaaccaacccccaggccatacatcactcaaacactaatatccccaccagaaaccaccccaacaacaacggctacaaccaaaacaaaatcccttaccaccaaaaggctcccaaaaataagtccccaacaaaac

SEQ ID NO: 178462 - DNA, 314 bp, Zea mays
  Clone ID: MRT4577_94344C.1
ggaacaatacttttttcttttcatttcaattgttcattcaggtcattgctcacactgacactgccacccatggtgatgcgtgacacattattactcaatcatcgccgcttaatgactcaacttgcttgcttgccagcggctattctacagcacatagtttcttcagtgggggacaccgccggctgcagcgttagggcatggagtttgctgttgcatgccgcacattgccgtcagtttcttcgctatttgcgccggctacagcccctcgacctgtcctttttgcggcttttgctttatgatttgactggtagacc

SEQ ID NO: 178463 - DNA, 635 bp, Zea mays
  unsure (1)..(635): unsure at all n locations
  Clone ID: MRT4577_94345C.1
atatgaaattttctatataccatatcaagtaagtacattacatttaaaagacttgtacataacgaaaacaccaaaagtccaccattaatccaagtccacaattccaaaattggagagaaggatcttcatttgctgaacaaaatccgagcctgttgcatactctgttagcatccctactgcaaacccaaacatggcccacctgtaagatgtgtagcaaggtgaattagcgcacagagacaagctgtcttagggcccgttcgcttgtatcagaataagccaggattcattccagctcatcaaaatttatataaattagagaagtaatccggttaggaattaatccggggctccaatccggaagaaccgaacagggccttaacgtactcaacaatgtggtgaatccttacgtctacctatcttgcattttttagcatgcttattgtagactcatgttacttattagagccttacacgagtaaatcaagtagcatcaagggggaatgaacatgatagtttgtgatatcttcactaggccttgttccaaatggcttgaaaacaactgattaatcaatctcaaggccgatgtttggtcgatttattggttgctannagagctgctgtctgaaaagctcagc

SEQ ID NO: 178464 - DNA, 679 bp, Zea mays
  Clone ID: MRT4577_94346C.1
ggtaccctccgaggtctcggcccgggccgtggatcaccaccacggggctcttcagaccattaactttatctactccagagcgcagaagaacccgatcgacaccatgagggtgttgctcgttgccctcgctctcctggctctcgctgcgagcgccacctccacgcatacaagcggcggctgcggctgccagccaccgccgccggttcatctaccgccgccggtgcatctgccacctccggttcacctgccacctccggtgcatctcccaccgtcggtccacttgccgccgccggtccacctgccaccgccggtccatgtgccgccgacgggtcatctgccgacgtcaccatgccactaccctactcaaccgtcccggcctcagccttattcccaggcacacccatgcccgtgccaacagccgcatgcaagcccgtgccagctgcagggaacctgcggcgttggcagcaccccgatcctgggcccgtgcggccaggtcctgaggcatcagggcagtccgacggcgacgccctactgctcgcctcaatgccagacgatgcggcagcagtggtgtcaggagctcaagcaggaggagccgcaacaccggaaccacgcgatcttcaggtttggtccttcagtccattctgcaacaacagccgcaaagcggccaggtcgcgggggc

SEQ ID NO: 178465 - DNA, 431 bp, Zea mays
  unsure (1)..(431): unsure at all n locations
  Clone ID: MRT4577_94347C.1
ctgggtcttcagaccattagctttatctactccagagcgcagaagaacccgatcgacaccgggagggtgttgctcgttgccctcgctctcctggctctcgctgcgagcgccacctccacgcatacaagcggaggctgctgttgccatccaccgatcactgcacatctaccgccaccagtgcatttgacagcttcggaacacctaccagctccagcgcatatgctaccaccagtccatctggcgacgccggtacaactaccaactgcccaacatgaaccaccatccgttgatcatctaacaataccataccactacactacttaaccgncccggcctcagcctcattcccagccacacccatgcccgtgccaacagccgcattcaagcccgagccagctgcaaggaacctgccgcgttggcagcaccccgat

SEQ ID NO: 178466 - DNA, 362 bp, Zea mays
  Clone ID: MRT4577_94348C.1
tcgggtcttcagaccattagctttatctactacagagcgcagaagaacccgatcgacaccgtgagggtgttgctcgttgccctcgctctcctggctctcgctgcgagcgccacctgcacgcatacaatcggcggctgcggctgccagccaccgccgccggttcatctaccggcgccggtgcatctgccagctacggttcacctgtcacctacggtgcatctaccaccgccggtccacctgcctgcgacggtccacctgtcagcgccggtccatgtacctgcggcggttcatatgccgccgccaccatgccactaccctacttaaccgtcatggcctgagactcatatgcaggcacacacatg

SEQ ID NO: 178467 - DNA, 231 bp, Zea mays
  Clone ID: MRT4577_94349C.1
ctattatctatactggctctcaccggggtgaacacctcccacattctaccagtagctataaactgaggaagtggttattaacaatcattgtagtgctcaaataaaatgccatgttgcagagcgcttttgtaggcgctgaatacttgtagcatctatcctatctttcctttgtcatttatagtatgttatgctattatatgatcttagtgcagttaaacttgttccgtgtat

SEQ ID NO: 178468 - DNA, 244 bp, Zea mays
  Clone ID: MRT4577_9434C.1
tcgaagaaaacatacaaaaaaacataaaaaaacttaaaaataaattaaactaaaaaaaaaaaagggaaaaaataagggaacctgcctccgttttaaagattcctaccttactatcccttacttccgccactacagatttaacacacggagacgttaataaagttacttgccctccgatttataacattactactgtgaaaacccttgctactcctaatttaatctactatcagaaaatctccct

SEQ ID NO: 178469 - DNA, 253 bp, Zea mays
  Clone ID: MRT4577_94350C.1
cccactcatcctcaaacattatccaaaattccaacctttttcactacctgaatttctcatccaactgaagcattctaaacatgttggcgttaatatattaacctaaccatcctcaactaattcaattctcctttatatttcctaaacaatatttctatcaatcctcttatcctttttacatttattctacatatcttttaaaaattacacatttctctcaatcacctcattaaccaattacctcattaacatt

SEQ ID NO: 178470 - DNA, 369 bp, Zea mays
  Clone ID: MRT4577_94351C.1
attcggctcgaggcgggacgccttttttctccccccccctctcgtgaccacgagtgtgtgctagggttccggcgtccggcgcgggcggtggcggccattccgatggaggcggatacggggtgtcggctggaggcggactacgtcctatacttctccgactacctgttcacagtgctccgtccaagcgaccacttccacgccaactcacagatgatcactggcgcagggttactgcggaccagctgacggtccaagtcctaacacctccacctgcagctgaaagattataagccaaagatatgctcctgcaaggacaggacatacaaaccaaaagctgaaacgatagctgcttatgaactgagagtactg

SEQ ID NO: 178471 - DNA, 339 bp, Zea mays
  Clone ID: MRT4577_94352C.1
ctgggcctcacattcattttattccctctcgactggggaaggggcacccaatgaaacatgcaaaacaccagccaggagctagcttattgggggcggcctgcccgcttaaagcaagggggccggacgggggagccaggaaggatccatcgggtgggccggtggggatgagactaggggatcttgcagccccaattttcggggaggaaaaaggggcccctgaacttgggggggcccttggccggggacacggggacccaatttttgcaaggggggggccacttggggaggaggggtgggaaagtccacacccccaaccagctgggggactggcggcacacc

SEQ ID NO: 178472 - DNA, 1877 bp, Zea mays
  Clone ID: MRT4577_94353C.1
cattggccaccccgtggcgagcctgtgtggactgtcctcaggacaatcgccaaaaccccccgagccaacacctactacgccgccgcgccgccgcgtcaaacaacggcgagaggacgcctatggcattcacttcccaatccctaatcttccgggcacccgcctcgccctcttgtgcccgcataaccccgtcatccggtcgcgtcaccctccgggaccacagcgccgttttcccgctcgtcgcggcggcctccacctcgatggcgtcctcggagagcgaagataagagggaaaccaagctgtggggcgggcggttcgaggagggcgtcaccgacgccgtggagcgcttcacggagtccatatcctacgactggcagctctacaaatacgacataatgggcagcaaggcccacgcctccatgctcgctggccagggtttgataacagctactgatagggatatcatcttagaggggcttgatcagatagagaggctgatccaagaaggcaaatttgagtggaggaaggaccgggaggatgtgcatatgaacattgaagcggctctaattgaaagggttggtgagccagccaagaagttgcatactgctaggagccgcaatgaccaaattgtgacggatctaaggctatggtgccgtgatgctattgacaagattttgattcgtatcaagcagcttcaggtgtctctggttattttggcttcaaaatatgttgacttaatagtcccaggttatacccatctgcaaagggcgcagcctgttctgctgccacatcttctcttatcatatgttgaacagttggagcgtgatgctggtcggctggtcaactgcagggagcgaatgaatttctgtcctcttggtgcttgtgctttggctggaactggacttcccattgataggtttcaaactgctaaagatttgaaatttacggctccaatgaagaatagcattgatgcagtatcagaccgtgactttgtacttgagtttcttgctgccaattcgattgctgctgttcatctttcgcgaattggtgaagaatgggttctttgggcatcagaggaatttgggtttctgataccaagtgacaaagtttcaactggaagcagcattatgccccagaagaaaaatccagacccaatggagcttgttcgtgggaaatctgctagggttgttggagacctcatgactgttctaaccctctgtaaaggccttccacaggcctacaaccgtgaccttcaggaagacaaggaacccttgtttgatagtgtgaaagctgtattaggaatgcttgaagtatgcacagagtttgctcaaaatatctcttttaattcaaaaagaatacaaagttcacttccagctggttatctggatgcaacgacgctggcggattatctcgtgaagaagggagtccctttcagaacttctcacgagatagttggaaggtctgttgctctatgcgtctccaagaactgtcagctagctgagcttgaattggctgacctaaaatctgtccatcctgtatttgaggatgacgtctatgaatacctgggggttgaaaacgctgtaaacaagttcatatcctatggctctactggttcagaacaagtgaaaaagcagcttgaggattggcgcatccagctcggggtgagctcataagggttggcatggttcaagaaataagctcgcaaattagtgcttgcgatttttgaaggtgtatgttgacgtcgtgaactttttctgtgtgtttgttcatacatttcgaaaactggaatgaatgatgtaaacatgttggacaccttgagcctcttttatatattattattgcactgtgttttattttaaaaaaaaagcggcaaaaagaat

SEQ ID NO: 178473 - DNA, 638 bp, Zea mays
  Clone ID: MRT4577_94354C.1
tttttttttttttttttcgaaagtaaatcaacttaattgaaatttaaataggagatttaatcccttaaccactttcaattcacttctaaacgaacaagtacctgtaaagaatcggattcccttgcatctctacgtgccagccagcctcgtggcgccttccaatctgacagttgtggcgctgattccgctccacgacggcaactgcacttgttcggccaagcacgagacgagctagctccatccctcagccctcgtggttgcacccacaagcaggcgccgtcagttgcgcagagcaggccagcccttggcggtgcgcgagcagtgcgagaggagcgttgggcattgtgattggatacggtggccggggaagtcgtccgagcgctgcgcacatagggggcggcgtccgagcgcttccgcgccgatggagccgccgtgcgccgaggacccaccaagctcgcgctggcggagtcgcgtgcgcctgggggctggccgcgtgcgcaccgtggagccggccaagcccgtgccgatgccacctcgcccggccggagccaggggccaaggccatcgcgccgccgtgccatgggtgggctgccccgtcatggctgtcgagtgccgacccgccgtgccgtcgccgtgag

SEQ ID NO: 178474 - DNA, 1900 bp, Zea mays
  Clone ID: MRT4577_94355C.1
acttccagagaggacgctctaaaccctcccatctactccctcgccgcgccgccgcgccacagccgcgcgtgcagcgaacatcggcgccagtgccacgctcatggccgccacctcccattccctcctctctccggcgcccacctcgctcccccgcgcccgcctcgccttccccgccgtcagcgccgtcgccccccgccgtcgcccctctttcccggccgtcgcggcggcggcctcctcgatggcgtcctcggaggccgaggagaagaaggagaccaagctgtggggcggccgcttcgaggagggcgtcaccgacgccgtggagcgcttcaccgagtccatctcctacgactggcagctctacaagtacgacatcatgggcagcaaggcccacgcgtccatgctcgccgcccagggtttgataaccaccggtgatagggatattatcttggagggccttgatcaaattgagaagcagattcaagatggcaagtttgagtggagaaaggatagggaggacgtgcacatgaacatcgaggcagctctgattgagaaagttggtgagccggccaagaagttacacactgctaggagccgcaacgaccaaattgtgacggatcttaggttgtggtgccgcgatgctattgacaagattttgattcgcatcaaacagtttcaggccgggctggttttgttagcttcaaaatatgttgatttaatagtcccaggttatacccatctgcaaagggcgcagcctgttctgctgccacatcttctcttatcatatgttgaacagttggagcgtgatgctggtcggctggtcaactgcagggagcgaatgaatttctgtcctcttggtgcttgtgctttggctggaactggacttcccattgataggtttcaaactgctaaagatttgaaatttacagctccaatgaagaatagcattgatgcagtatcagaccgtgactttgtacttgagtttcttgctgccaattcgatcgctgctgttcatctttcgcgaattggtgaagaatgggttctttgggcatcagaggaatttgggtttctgataccaagtgacaaagtttcaactggaagcagcattatgccccagaagaaaaatccagacccaatggagcttgttcgtgggaaatctgctagggttgttggagacctcatgactgttctaaccctctgtaaaggccttccacaggcctacaaccgtgaccttcaggtgagcctaattctcataagtatgtcctctcttacatgagtgtgtattctgaagttttcgtcctgagcaggaagacaaggaacccttgcttgatagtgtgaaagctgtattaggaatgcttgaagtatgcacagagtttgctcaaaatatctcttttaattcaaaaagaatacaaagttcacttccagctggttatctggatgcaacgacgctggcggattatctcgtgaagaagggtgtccctttcagaacttctcacgagatagttggaaggtctgttgctctatgcgtctccaagaactgtcagctagctgagcttgaattggctgacctaaaatctgtccatcctgtatttgaggacgacgtctatgaatacctgggggttgaaaacgctgtaaacaagttcatatcctatggctctactggttcagaacaagtgaaaaagcagcttgaggattggcgcatccagctcggggtgagctcataacggttggcatggtccaagaaataagctcgcaaattagtgcttgcgatttttgtaggtgtatgttaacgtcgtgaactttttctgtgtgtttgttcatacatttcgaaaactggaacgaatgatgtaaacatgttggacaccttgagcctcttttatatattattattgcactgtgtttt

SEQ ID NO: 178475 - DNA, 1044 bp, Zea mays
  unsure (1)..(1044): unsure at all n locations
  Clone ID: MRT4577_94356C.1
gccgggaataatggccgccgcctcgtcctccaccgcgccgccggtggccgagatgcctgcgccgacctcgtccacctccgagccgctcccgtcagccgcgcccgcactctctcgccgccgcagccgcatccgcgaggtgagctcacgctacctctccacgccgctcccggtcccgtcccctcgcctctcgacctcatcgttccactccgccacgccggccccggccccgtcccctcgcctctcgacctcatcgtcccactccgccacgccactcccagtcccgtcccctcgcctctcgacctccacgttccactcctccacgccgtccgcgcgcgcgcaccatcgcagcattcccgccgcccctaccgcctctgccctcgccgacgaaaaccacccgccgccgcctacaccaggctcacgcgagcgcggcgcagcgcgggacctgttcgaggaaacacaccgcccgcgcctgaaccctcctgctcctctcgccgctgctggtgccttcgccgccacccccagtccgagaccgaggcgaatcctctgcccgtcgtccagagcctcttctaacaccaccacgacggcgcacgaacaccctaggggctgtatgcggccatcgacacgagtgcgcaccagcttcaccatctatagcgcttcgcatgagacctcggccgcagccatcgactcccggccagcatcttcctgccctcgacacgtcccgttccctgagcttaggacatcaccgccatggacaaggacaacagaggggcccggcagaccgtcaaacccattctgctttcaggccctagcctcggcgctgcccagatcgtcaagcaaaaacaccaccaccagctgcagtgaagccggcgccggtgcctgtgcctgcacggaaagagggactggctaagaagggagcagcggcggcgatgggaggtagcaaagatgcggggaagcaggaaggatgtgcacaggnttggcggattctggacaattgctacatgcagtatatagatttttgaatgcccatgcagaggctgcggcgat

SEQ ID NO: 178476 - DNA, 315 bp, Zea mays
  Clone ID: MRT4577_94357C.1
gagttcactagtcggcggccgccctcgacctgacgggcccgagctccgtaccaaaaggcaggctgggaggaagaaagattggatcaggtgtgtcgtagcaaatactacaaaagtaaataccatggtatctactaaaccatggcactactaaattatagtatttaaaacatgagttttacaaggtggccaaacacttggaaaaatactataatatgttgcagtaccacctgtttatttgaaaattgaaaaaacacatactctatggacacatgtaaatgcaggtgcaatgactgttccgtccatagaacaaaaaga

SEQ ID NO: 178477 - DNA, 663 bp, Zea mays
  Clone ID: MRT4577_94358C.1
agtttcataactagtcgcgacttactcgagacagcccatcacgtctcatgcaactcctctctcgctctccgcttctcgctagctctctgactatgatctgtttggcgtctttcttgcagtttgcttgtgcgaagatggctagctactcccttgtgccccgaccatcattcgccgctgctgtgctcttgttgatatttggggaaagaagtccaacaccaagattcaagcttgacaatgcatcatttactaacatggctatgatctggctgaccgctccttctctcactgtaggaaaggctcctaggaagagaatcgctacaaaggtgtccagaaaatctgcacccactactggatgagtggagaagactcacctgtaccgcccagtcgactgtttgtcttcctgagatccgatggtaccagaatagcactgaattattgattaagaggatgccgacccagagttttgtgatgcagattgctcaggagatcaagacggatctgctcttccaaacacatgacaagcttgctttgatggaaggactagaggactacctggttctgtctcttcgaagataccaatctgtgcgacgatacatgtcatctttgcagcactgtatgcccgagtacaatcttctggctataatgatacgcgtggagaggatg

SEQ ID NO: 178478 - DNA, 197 bp, Zea mays
  unsure (1)..(197): unsure at all n locations
  Clone ID: MRT4577_94359C.1
ccgccgccgagccncngcgtagtgtcgtgtngttccggtgagggttggggngagtngtngtgntccgccntgtcgacggaggaggctgttgtggctgnggtcccggtgnccgnggtgccgcngnggtcccggcggcccaggtggccgaggcgccccnggcgangntggcgcccanggngnnganggcgcctanggng

SEQ ID NO: 178479 - DNA, 363 bp, Zea mays
  Clone ID: MRT4577_9435C.1
aattaattttttctttttttttttttttttggggggtttttttttttttttgggtgacaaaaccggaccaaacgaggcacgttactatttacaaagaggctagggtccaattgggggggcgcaaaaaagcaaaagggtttgggttaacccaacaatattgggttgggggggaaaactagaaaagttcggtcggggttccgccttccctaccgtttaacggggcaaagaccaaggggttccagggattagagacctgaccccccccggggggggggacaacccccgggcttgggccctcctcggaaaatggcacccattccggtggggccattaccaccccagtgttcggccacaatgaccccc

SEQ ID NO: 178480 - DNA, 485 bp, Zea mays
  Clone ID: MRT4577_94360C.1
ggggaaactattgcattataatagtagagatgtcatcaatgtcaattagttcttcgggacgacttgtatacacctttgagccttttagggaaaaaagggaaaaaagagaagccttttttcctcttctagctttttgaaaaaagggggagaataaataactaatcctacctctttcaagtaaaccttgatagcagtcatctcatcatcatcataaacaaaaattatgaagccattttaacaacactggcgttttggaacgctggcagtcggatcctgatcactcgtacaggtcgaagtcgaacattggcggagcgtatgcccctaggtcgccgaagaggaatgtgtcaacctccgcgtagacaaatctcatgtcgttatcgttcttgaaatcgaaaaacgactgcacgtcatccgggaagctgcaccgcggcggcgcgccatcgatgaattcagtaggttgctgtagcggcggcgatggcagctcc

SEQ ID NO: 178481 - DNA, 296 bp, Zea mays
  Clone ID: MRT4577_94361C.1
tccgaggaggcaagctcaatccccgaacctccagggctgcgcatgcgctgcctcagctagaggcacatatccccggcacgcagactattcacgtcaagactatcgggcgctcacataaccacagcgacagtgaatacatgtcacgtcagctctacgcatgagcatatgcaatcattgaaaaacccgaacgaccagatatgtggctaattaacacgtaagacagaacaagcatattgagactcttcctactaatgttgcatgcctacgtgcctgcacatactgttaaacaaaacatt

SEQ ID NO: 178482 - DNA, 368 bp, Zea mays
  Clone ID: MRT4577_94362C.1
gggcgtgatccccactttattgggcacctttttggatgagtctacctgggtatgaaaagtcttttcagacagtaaaacaacggggggccttttcagagagtaagagggccccccaaaagaaagggaaaaaatatctaagacataatcaagggatttcctgggggggggcattgcatgtgccaactttaatccagggggcaaaattgaaacttaatttagaagaacaccaggaccgatctatacactaataaagggttaactttgaccatgggtccgtaagtaaaagcttgacgaccggctccattttcctttaaaaaacttttccaggaggtgttggctgcaaagaagtccttgttgttgacaaaggc

SEQ ID NO: 178483 - DNA, 455 bp, Zea mays
  Clone ID: MRT4577_94363C.1
acagggaccaacgttccaaaattgaagacaaccaagtttgggcgctgaaaaaaaccaaaaccggcccggcgggggtattggaacaaaccaagggggggaggatcgcggacaccaaagggacgggggcccccaaacgggcctggctagcgcaaaaaggaggggaaacccccccaaacgggggcgaaaaaaccgggcccaaaaaggggaaaaaatcccccaaacaaaaactcctccaaactgtaccccacaaaatccacccaagggaggccaaaggccccatgctttgggggaaaaaagggcccctcaccttgggcaaaaaaggggccaaaatgggaaggaaacccgggaaatccgggcgggaaaccgcgggaatcccagccctccctatggggggacccaaaaaagcccgccggaaaattggacaaaactgtggcctgggaaaaattgttacccgt

SEQ ID NO: 178484 - DNA, 151 bp, Zea mays
  Clone ID: MRT4577_94364C.1
cgcacgcgtgggcggacgcatggtcggactcgtgtgctgacgcgtgggctgaatttgagggtattacaccgtcaacatccgcaggtgctcatagctgattctacacttatctccattctgtcttcgtccaccacactaatgctcaccccca

SEQ ID NO: 178485 - DNA, 2535 bp, Zea mays
  Clone ID: MRT4577_94365C.1
cttaagggtttggactaatgattgtaattgagattcttagataacgagttcgttgttctaagtgagatggcatgtgtggttgacatttgaaggatttctctatataaatcccggctactattaacatctcaacctcaccatcttctcttgatcgaggcagggatcaagcgaccgatacccgccatggaccttgcacggagaggcggtgccgcaggcgcggacgacgggggggagatcgagaggcacgagccggcgcccgaggacatggagtccgaccccgcagcggcgcgcgagaaggagctggagctggagcgggtgcagtcgtggcgggagcaggtgactctgcgcggcgtggtggcggcgctgctgatcggcttcatgtacagcgtgatcgtgatgaagatcgcgctcaccacggggctggtgcccacgctgaacgtctccgcggcgctgatggcgttcctggcgctccgcgggtggacgcgcgtgctggagcgcctcggcgtggcgcaccgccccttcacgcgccaggagaactgcgtcatcgagacctgcgccgtcgcgtgctacaccatcgcgttcggcggtgggttcggctccacgctgctgggcctggacaagaagacgtacgagctggccggggcctcgccggccaacgttccgggcagctacaaggaccctgggttcggctggatggccggattcgtcgcggcgatcagcttcgccggcctcctaagcctgatccccctcagaaaggttctggtcattgactacaagctaacttacccaagcgggactgcgaccgctgttctcataaacgggttccacaccaagcaaggagacaagaacgcaaggatgcaagtccgagggttcctcaagtactttgggctcagcttcgtgtggagctttttccagtggttctacacaggcggtgaagtttgcggctttgttcagtttcctacgttcggtctgaaggcctggaagcagacgttcttctttgattttagcctcacgtacgttggtgcggggatgatctgttcgcacctcgtgaacatctccaccctccttggtgccatcctgtcatgggggatactgtggccactcatcagcaagcagaaaggggagtggtaccctgcgaacatacctgagagtagcatgaaaagcttatacggttacaaggccttcctctgcatagctctgatcatgggagacggtacataccacttctttaaagtcttcggtgtcactgttaagagtctgcatcaacggctgagccgcaaacgtgctaccaacagagtggcaaacggtggagacgaaatggccgcgcttgacgacctacagcgtgacgagatcttcagcgacgggtctttccccgcctgggcagcttacgccgggtacgccgcgctgaccgtcgtctcagcggtcatcatcccgcacatgttccggcaggtcaagtggtactacgtgatcgtggcctacgtcctcgcccctctcctcggcttcgccaactcctacggcacggggctcaccgacatcaacatggcctacaactacggcaagatcgcgctcttcatcttcgcggcctgggccggcagggacaacggcgtcatcgcgggcctcgccggcggcaccctggtgaagcagctggtgatggcgtccgcggacctgatgcacgacttcaagacgggccacctgaccatgacgtcgcccaggtccctgctcgtggcgcagttcatcgggacggccatgggctgcgtcgtcgcgcccctcacgttcctgctcttctacaacgcgttcgacatcgggaaccccaccgggtactggaaggcgccgtacggcctcatctaccgcaacatggcgatcctcggcgtggagggcttctccgtgctgcccaggcactgcctcgcgctctccgctgggttcttcgcgttcgccttcgtcttcagcgtcgcccgggacgtcctgccgcggaagtacgccaggttcgtgcccctgcccatggccatggccgtgccgttcctcgtgggcgggagcttcgcgatcgatatgtgcgtcgggagcctggccgtctttgtctgggagaaggtgaacaggaaggaggccgtgttcatggtgcctgcggttgcgtccggtttgatctgtggagacggcatatggaccttcccgtcttccattctcgctctggccaagatcaagccaccgatttgcatgaagttcactcctggaagctagaaacagtatggacagttcacggaaatggagaatgcgagatacactgaaggcatcaactgtggttggttgaagccatatgtcccctgtattatccttgttgtgcatgtgtgggttctccaagggctacagcactcgagattttttatagagtttatatgttttgttgtcatgttgggttcaacctatgtttatgttttgggtggaaaaaaagattacaactgtacatttttaacagaaattaatgctcattttggttgtgtataaaaaaaaaaaaaaaaaaaatttttataaaaacacccccac

SEQ ID NO: 178486 - DNA, 2582 bp, Zea mays
  Clone ID: MRT4577_94366C.1
gagatttttagataacgagttgttctaagtgagatggcatgtgtggttgacatttgaaggatttctctatataaatcccggctactattaacatctcaacctcaccatcttctcttgatcgaggcagggatcaagcgaccgagacccgccatggaccttgcacggagcggcggtgccgctgccgcggacgacgggggggagatcgagaggcacgagccggcgcccgaggacatggagtccgaccccgcggcggcgcgcgagaaggagctggagctggagcgggtgcagccgtggcgggagcaggtgaccctgcgcggcgtggtggcggcgctgctgatcggcttcatgtacagcgtgatcgtgatgaagatcgcgctgaccacggggctggtgcccacgctgaacgtctccgcggcgctgatggcgttcctggcgctccgcgggtggacgcgcgtgctggagcgcctcggcgtggcgcaccgccccttcacgcgccaggagaactgcgtcatcgagacctgcgccgtcgcgtgctacaccatcgcgttcggtggtgggttcggctccacgctgctgggcctggacaagaagacgtacgagctggccggggcctcgccggccaacgtcccgggcagctacaaggaccctgggttcggctggatggccgggttcgtcgcggcgatcagcttcgccggcctcctaagcctgatccccctcagaaaggttctggtcattgactacaagctaacttacccaagcgggactgcgaccgctgttcttataaacgggttccacaccaagcaaggagacaagaacgcaaggatgcaagtccgagggttcctcaagtactttgggctcagcttcgtgtggagctttttccagtggttctacacaggcggtgaagtttgcggctttgttcagtttcctacgttcggtctgaaggcctggaagcagacgttcttctttgattttagcctcacgtacgttggtgcggggatgatctgttcgcacctcgtgaacatctccaccctccttggtgccatcctgtcgtgggggatactgtggccactcatcagcaagcagaaaggggagtggtaccctgcgaacatacctgagagtagcatgaaaagcttatacggttacaaggcattcctctgcatagctctgatcatgggagacggtacataccacttctttaaagtcttcggtgtcactgttaagagtctgcatcaacggctgagccgcaaacgtgctaccaacagagtggcaaacggtggagacgaaatggccgcgcttgacgacctacagcgtgacgagatcttcagcgacgggtctttccccgcctgggcagcttacgccgggtacgccgcgctgaccgtcgtctcagcggtcatcatcccgcacatgttccggcaggtcaagtggtactacgtgatcgtggcctacgtcctcgcccctctcctcggcttcgccaactcctacggcacggggctcaccgacatcaacatggcctacaactacggcaagatcgcgctcttcatcttcgcggcctgggccggcagggacaacggcgtcatcgcgggcctcgccggcggcaccctggtgaagcagctggtgatggcgtccgcggacctgatgcacgacttcaagacgggccacctgaccatgacgtcgcccaggtccctgctcgtggcgcagttcatcgggacggccatgggctgcgtcgtcgcgcccctcacgttcctgctcttctacaacgcgttcgacatcgggaaccccaccgggtactggaaggcgccgtacggcctcatctaccgcaacatggcgatcctcggcgtggagggcttctccgtgctgcccaggcactgcctcgcgctctccgctgggttcttcgcgttcgccttcgtcttcagcgtcgcccgggacgtcctgccgcggaagtacgccaggttcgtgcccctgcccatggccatggccgtgccgttcctcgtgggcgggagcttcgcgatcgatatgtgcgtcgggagcctggccgtctttgtctgggagaaggtgaacaggaaggaggccgtgttcatggtgcctgcggttgcgtccggtttgatctgtggagacggcatatggaccttcccgtcttccattctcgctctggccaagatcaagccaccgatttgcatgaagttcactcctggaagctagaaacagtattgacagttcacagaaatggagaatgcgagatacactgaaggcatcaactgtggttggttgaagtgttgaagagcaagtcctctggtcgtcgacatgaagcggagccatatgtcccctgtattatccttgttgtgcatgtgtgggttctccaagggctacagcactcgagattttctatagagttgatcatatgttttgttgtcatgttgggttcaacctatgtttatgttttgggtggaaaaaagatacaactgtacatttttaacagaaattaatgctcattttggttgtgtatttacattctttcaagtttgtggttactgccttgtatagtttgttgtcaacaatggagctgattggttactcgtgtaacc

SEQ ID NO: 178487 - DNA, 430 bp, Zea mays
  Clone ID: MRT4577_94367C.1
cccacgcgtccgaccgcccccagcttccctaccgccctcgttccggagcctagggtttgggaagtcgaaggcctcggcgcttcgcttgccagcgcaatgccggatacgggagcgagaggccgcggcgatgagccggagcctgtgacgccgcagcagcaggcgcaggagacccaggcggtggacgatcggcgcctgctgcgctcgcagtacctcgccgtaaagggccttatcagcgacgagaaggatgaaatggcgagcgcggactctgataagttctgctccattatcaacagagtggagagcctgcaccagcttgttcagaggcccagggagcaaatagctgacgcagaaaccctgctggaccttactgctagtttggtagcatcagtaaggtcccaatcagttctgggaatcacaccttctgatttta

SEQ ID NO: 178488 - DNA, 301 bp, Zea mays
  Clone ID: MRT4577_94368C.1
aaccattaattgaatgttttaccaaatatcccaaaacgaaaaaccaacgctcccccaaaaaaaaccaaaacccctcgaaaaaaggggggaccaaaatcatcaaaaaattccatgaggggctacaaggaccggtaacccccccaccaaaggggcccgggtttttgggggggggttaccaagccccccccacccaaccggcccggtaaaagaaagccccccccgcaaaccattggggtggcccaaaaagggacgcggaaactgcccaaccggggccgggccatctcatccaaataccatccaa

SEQ ID NO: 178489 - DNA, 299 bp, Zea mays
  Clone ID: MRT4577_94369C.1
agcgccgcccggccaccgcggcgtccgcgccgtccagcgcgactacaactcgccgcacgtggatgctcccttcatgtggacggcctttagggtggatgccgaccagaactacgtccgcttgcacaaccaccagcgctggctccgcgccaacggcaggcaccgctactggaacaacgtcgtcaccgtcgataccaggaacggcagcctgaccacgatgatgcagtggagggtcgaggccatcccagtgagcccgcagccgctaccccttccgcctccacctcaacaacctacgattcatg

SEQ ID NO: 178490 - DNA, 431 bp, Zea mays
  Clone ID: MRT4577_9436C.1
aaaaaaagaaggccgggtttgggttttatttgggttaaaaaaattttatgggggggcaagtaatataggggtccggggggggcaatggggtcaaccaacagggggggggacccccggccgtccatgggcccaaagacgggccccaaacatgggggggggggtagcaaacggaaaaactttgttttttttttttttacaccccccaaaaaaaacctttgtgggggagccagctcggccccctttttttttggtcaaccccccccccagggtggatggataaaaattatatccagggggggggatcgaggggaccagcagttgcggggggcgcccttggagttgcccccgcagttggatccggggggggccctcccggactcccgcggggcctgaaaaaactggggggcggccttttttttcggggccacccc

SEQ ID NO: 178491 - DNA, 291 bp, Zea mays
  unsure (1)..(291): unsure at all n locations
  Clone ID: MRT4577_94370C.1
aactatcttctcttttgattacccttttctcactataaccccttctnncctcacgagaaagcttncttttttttagataagctctcatnnncttcttccactcaatccatttccttcccctcattacatactctcctttccttaaccaataaaatcaatttcttataacattaataaatccctttttgcccctttacatataaataataatgccaccattctctcataaactaataaattctaacaatccatcatatctttctatctaatcttaacaccacttattatctc

SEQ ID NO: 178492 - DNA, 765 bp, Zea mays
  Clone ID: MRT4577_94371C.1
ccggccgggatccagggcattttcgggggggtggagcggccgttcaaatacccgacgcccttggccgcttgtgccctcgctggctcgctctgcctccgccgctccccttcgtttccttcccctgcacaccaccgcctccaaacccttcaaaaaccaccaccgcccccagcttccctaccgccctcgttccggagcctagggtttgggaagtcgaaggcctcggcgcttcgtttgccagcgcaatgccggatacgggagcgagaggccgcggcgatgagccggagcctgtgacgccgcagcagcaggcggaggagacccaggcggtggacgatcggcggttgctgcgctcgcagtacctcgccgtgaagggccttatcagcggtaggaccgtgttgccgtgcgaaacccactaaattcccgattgccgtttcggccgttggctgggtttgattttttttttggttacgtttgtgcggctgtgcttgtgtgtagacgagaaggatgaaatggcgagcgcggactctgataagttctgctccattatcaacagagtggagagcctgcaccagcttggtaagcgcgactgcgcatttgttggcctcttgtaaacgcggttttcatgattttggccggtaaactttccgcttatactggcacgcatcatgctagtgtgaaactcgccatttgagtggccaacaggatgagacttgctttgcttcaaaaaaaaaaaaaaaatttgcggcctcgagctcagctttttgtcct

SEQ ID NO: 178493 - DNA, 347 bp, Zea mays
  Clone ID: MRT4577_94372C.1
gaattacccgggctcgactccactgcgtctcgtgcccagctggcaacctgagcaatgtctatgttattatctctctaccgttcatattttattgtgtcgctggtttaagttaacaaaatgaccgacataatatatcatagaaccggactccaagagactcctattagcagctggcttcctttgtaaatgcacggttagagaccgatcgattctgacagtgcttgattactttacggagggattatcgaacggtacgaaatgttgtctcaaagtacttagtaatgatgtagtcatagtcttgatgaccagtatacattctgctttgaacatcgtctagtctattaaca

SEQ ID NO: 178494 - DNA, 262 bp, Zea mays
  Clone ID: MRT4577_94373C.1
attataaagggcgaagcaattggggtgggaatactaaacctaatccaaggctaaaatggcaaaaatccaaactgattcccctctccggctgaaaatgtgaaaaatggggtgggccaataaaaaataatatctctacattgaaaaaacacaccaagagggccagaagcccctttttttgaaaaaaaaaaaactgtttgcagtttactgcaaaaaaaccaatccaaagagctaacggggaaccccaataatctttttttttcaa

SEQ ID NO: 178495 - DNA, 168 bp, Zea mays
  unsure (1)..(168): unsure at all n locations
  Clone ID: MRT4577_94374C.1
aacgnccgggccgagggacacgcctgcggcctcccttctcgaactggtatactagcctcgaagaccgtctttacactctggacggcttgctgatatgatgatccttaccttattgtccacaagttgtgtctccattatagacctgatccactgctccttcagccaaca

SEQ ID NO: 178496 - DNA, 577 bp, Zea mays
  Clone ID: MRT4577_94375C.1
ttttttttttttttttttttttttttttttttttttttttttttttttttttttttttttttttttttttttttttttttttttttttttttttttttttttttttttttttggaaacattcgttttaaaacggggcctttctttggggggccggaagatagggcgaaaggctttacgtttgggccaaaaagctttaggcggggcaaaggcttaaaatccttttttgccgggggcccaaccgggggcaccgggtttttaaaaagaaaggggggcccaaactttttaccccctttggggggttaaaaggcctgttgggaccctgggttttacccccccccccccccaaagggccgggggttgtttgggcccccaaaattggaacccccaaaggggggggcggggtggtcccagcgggggggatccaaaccccccaagagtgttaaaactccgggccgttttttgatgcccaaatggccaaaggcctaagtgggaaaaacggcccaggcaataaaaagaaaacaggggatggcccatgcccgcaacttggaactttaaacgggagggggggaacccccc

SEQ ID NO: 178497 - DNA, 502 bp, Zea mays
  unsure (1)..(502): unsure at all n locations
  Clone ID: MRT4577_94376C.1
agggcaggagaggngaggagaagaggngatnttngggangannttggggggggagaccctnannnntngagggggagagcagcgacaccggcgacaaggtccaggcccaaatccngcgaaaggcaggccttcccccagcncaccagngactgacatctcccctggcacgcagctgcaggangcanggaccctccctgaccacaccatncaacacgccgtcccctccccatcnggcaccccggctcacggccgccaacaagcaccaggccacaccactcactgacaaaacaacacgagaacaacaacgcccccaatgaccccccaatgaccggccccacctacccccctcccgagcccataccccctccctccccccccccccccccccaccccagctgccaacccccccccgccccatcccccccccccctaccccccccccccccccaaccccgccccccgtcccccccccatcgcccccccacccccgcatcgccccgcc

SEQ ID NO: 178498 - DNA, 462 bp, Zea mays
  unsure (1)..(462): unsure at all n locations
  Clone ID: MRT4577_94377C.1
cgggagattccccattctaacactgcctgcatgcgtgcaagagcgctcttccggcgatcgtgctgtgctacagagcgcgaggaacacctcaccacgcagaacgcggcgccatccgcattgctaaagctcatcggtacagngcggggatcgagcgttcccctcctctctccattctcatcacgcgcgcgtgactcgatgaaccgacggttcgagtgcacatactcctgtcagtcgaccgtacgttcttgtttgccacgcttcgaaagatgacttggatgactacgcttcatccccggctggtccctctccctacgatatcaactgaatcccgagcatatgtcgcatttgtgcggtaccaaggccgagtggaatcactgcacatggtcaaccagggttatgttaatactccgctttttcctcattccccatctgcgaggctgatgaggaaatctcccccggtgg

SEQ ID NO: 178499 - DNA, 996 bp, Zea mays
  Clone ID: MRT4577_94378C.1
acaagatttgtgcgaattcttcagacatgtcccatttaaagatgggaatttaaatggtctaatcacacgcatacgcacacacatatataaatgattagcatttaattaatcggcgtcgaatacatgtgccggagagaaataaacacaaggagaagaacgggtcctcaccgggattcgacgacatcgatggcgcatccaccagggcaggttggcgatggaggagaggcgtccatgggaggagaaacagcaaacaaaacttcagacatatccagggcggagctcgctgcggtatttcatcgagcacttggcgagcgtcgcgggtatgggtttggcactggtatgatgctgcagcaagaagggaaagaggagacatccggtctagtggcgtggatgttggagcagggagctcacgacgctgagatgcacaggcgacatgctagcgacgcagggagtggtggccgacatggaggggagcaaggacgagatggaggtcgaagatggcagcttgacgatgatggcgcagcccgtcgagccctgagcagggaccaccatggtgttggagggagtccgatggagatcaacagggcacaaccctggcgcctgcatcgggtcacgacatggggaagggctagagctggactgagcgtggttgggaaggagatggggaaaaaaacaggggcgtcggcgctagggactggacgtcgagcagagggacaacggcgcgcggtgctgggcgagcccaccacggcgcagcggatcagaggcagaggatgcagccatgcgcagggaggagcagaggatgggcgagctcggaccttcctggtggccggcgagctgaagaagatgaagctagggcggtacatggagtccagggcgagcacgtctggggtgctcgacatggaggcaaaggaagggcggtcggcattggggaggcagaagatggcggctggagggaatcacctgagggagggggtggcgtggaaggatctagggtga

SEQ ID NO: 178500 - DNA, 191 bp, Zea mays
  Clone ID: MRT4577_94379C.1
ctattatgccgcgtttctatccaagtgccatggccgttgtgatatggcacatgtgtcattgacgtaacataatgctgctgtgagctctccgctctctgtggttccaatgggctattcccatttgcaaatattgtgtccataagacgaatttcttgacgttgctgatcaatttctaatgttatcacaatgtc

SEQ ID NO: 178501 - DNA, 379 bp, Zea mays
  unsure (1)..(379): unsure at all n locations
  Clone ID: MRT4577_9437C.1
cctcgaggctnctggccgggaaaaaaaaaaaaaaaaaaaaaaatcaccagatgttttagaactccagcagcggcattccccaccgcacccanttctgctcagcctacagctgccatttcccgcgagagcgcccgcctcccggcgttctatcgatggangccgcgtagccgcccttcnngccgtcgcgcctcctcgcccttcttctttcgcccgccggggccccacggcgcaggccccggccctcgtcgcccaagcgcacttccggcgccagcgccgcccaggacggccttcctcccgccgccgccggntgccagggcgcctatggcctccccggcctcgcctcccggggtggcgccggggcccccgccctccgccggcg

SEQ ID NO: 178502 - DNA, 305 bp, Zea mays
  unsure (1)..(305): unsure at all n locations
  Clone ID: MRT4577_94380C.1
ntactacaacttttaccaagccctcttaattttccatgcctnaaaacttcgtgggggggtgattgaagtttttgaggcatattaccattgatacaattgaattcttgactagaccactagctacgattatgaggacaatactttcttctcctacggagctattctcaactacaaaatatcactgaccggtaaacgagtaaagtctaatgttaaggactaactaccttctcctttgagaactccatgctctacgctatcgatagcgtgaacggtctagagatccacagttaaacatcaccgataac

SEQ ID NO: 178503 - DNA, 308 bp, Zea mays
  Clone ID: MRT4577_94381C.1
agatgcatagcagagtattacacgtaccatgcagcgcagcgaaaaggaggcaactactgccaactccgccactcttccctcattcgtcaccttgggtggcgtcgacgctctgaccaatgttcccattcgtatcggttgcgatactctttggtttctcttcgtctgcgtcgttctcctcagcactgttctcagcccgttagatacttgtcgccagtgtctcagcgttctcggctacaactatcttatgcatatgtgtcttcgcgtttgctgttccggacttattatttccgctgttatctgtggcaatt

SEQ ID NO: 178504 - DNA, 444 bp, Zea mays
  Clone ID: MRT4577_94382C.1
cggaccggtgaaaatcttctcggtgaagaccaaccttccataagaccacagggccattcttgggcatgacacatcccatccacagatttaaacacgaacattcttcagcacacaaggcaaatgaaaacccttctttttaagcctttttgggggacttggccccctttttgggggacttgggcttcttttttccccccttggccccctttttcgccgcctttttgggcaggaacaccgagtggattttggggaggacccccccctccccgatggggaccccggccaaaaatttcccaagctccttttttttgcggatcgccaagaacacctggggcgggatgatgcccctctttttgttgttttttgccgggttccctgccaactccaaaacctcgggggggagggactccaaaaaagcggcaaggtaaacgggggccccagtgc

SEQ ID NO: 178505 - DNA, 236 bp, Zea mays
  unsure (1)..(236): unsure at all n locations
  Clone ID: MRT4577_94383C.1
tgtgtccgcggatcggacggctgccaccgggggccgcatgttaacctgccggcgtaaatccacctcnaccatcctcgctgtccaacccttgctcgctgcgccgccgtctccgacatcgttccttcgtccccacgagcaacctataatccgccgtcgttgagatgactctttatcaggatcttctatctgtcgactagctactgtcagattcatacacctacaaggagctcgagaac

SEQ ID NO: 178506 - DNA, 1400 bp, Zea mays
  Clone ID: MRT4577_94384C.1
ctccgggcagtggataggacctatccacatgtcagtctggaccctttcccgaatacccatcattttcctctcttgccttgccttcctcattgccattgtgtaatcctcatcctccgtcgagatcaaggaagaaagaaagcaaccatggcggcaaccggaatgtccccctccccctcggccgcaataactcgccacatccatgctcgtcgttcctgtgctgctgcttccttgtccctccgccgctcgggcttcctggggcgcgtcgtgctggccgcggtgccagtggccgtggacgccacccggcgccgccgcgtctccgtgtcggtgcggatggcctgggacggtccgctctcgtcggtgcgcctcatcatgcagagcaggaacgcgaagctgagcgagaagctcaaggagcacatcgaggacaaggtgggtcgggcggtgtccaagcactgccacctggtccgggaggtagacgtgcgcctctccgcgcgcggcggcgagctcggccggggccccaagacgtcgcgctgcgagatcaccctcttcaccaagcgccatggcgtcctgcgcgccgaggaggacgccgagtccacctacgccagcatcgacctcgccgccgccatcgtcaagcgcaagctccgcaagatcaaggagaaggagacggaggtgcgccgcggcggagacgctgacggcgtctgggacgagatcccgccggccgacctgctgccccccgcggtggccgaggccgacgacctggaggcggccgtgggcgctgaggacgagcagacggtgctcgccaaggtggtgcgcaccaaggtgttcgagatgccgccgctcacggtggaggaggcgctggagcagctggagaacgtggaccacgacttctactgcttcagggacgaggccacggggcaggtgaacatcctctaccgcaggaaggaaggcggatacggcctcatcatccccaagaacgacggcaaagtggataccgttggcgttgtgccaccacccgccgtcgctgcggagccggagccgtcctacgcagtgcacgccgctgacaacaacaactcctgaactgagcactcgtcgacgtctcatccaaccaaaaccaaaacgagagagaatgcttgcttggtactgtaaaaataaaacaaacgcactcgtcgtcgacgtctcatctgcatcagttgcatgcattgctgtgatgaatgtgtctgtgtttgtgtcacccacacaaactgctcatattagctctccatttcatactctccctcctgctattagcaccaattgacacactgccttttggtataatctgtacgcgctgtcagccattagggtatccattaatcggctctgtaccgagattgagttttgtatagcacacaacagctcgcatc

SEQ ID NO: 178507 - DNA, 225 bp, Zea mays
  Clone ID: MRT4577_94385C.1
tgaattccgcgcggttcctctgccctcggctcctcgtctctcctagtcgtcgatcggaatggatcgcaaagatggccgtctcatccgagttaaggtagccatcgagcacaacgatggttggatgcatgccctcgaatgacccattctctgcatcaataactgtggcttcttcggcagcgcggcgatcattaacatgtgctccaagtgccaccaggagatgataac

SEQ ID NO: 178508 - DNA, 542 bp, Zea mays
  Clone ID: MRT4577_94386C.1
ttgggtacctcgaggccggccggaaaaaaaaaaaaaaaaaaaatagctgctagcatgtactgtagtagctaattaagctgctagctcatcgctggatagatgtctgaacaagcttaatttggcacttgtgtattctgaccacgatctcttctagtactacttgtgtggtgctattgtctggagctttaacggaagatgcatccaagagaaagacatgttgtgctggctccgatcgaatacacgcatgcatggcgaggcagccaggggacgtcgtcatggtggcgtcgttgttccggctgcatagtcagccttgtcaacgacgattgtggcagcgttgggtacttcaccgaccaaaggggtttatagtgatgccgagcgaggtcactgaacatggtgtgtaatgttagattgtttttaatgggtagacatattttttatgtacaactaaactcactgcttgcgcatgttcctattatggggcgtgccccgagcgaagattttaattatgattttggcagaaaaaaaaaaaaaaaaaagcggcc

SEQ ID NO: 178509 - DNA, 738 bp, Zea mays
  Clone ID: MRT4577_94387C.1
atctttaagcgcatatattgtgacacaagtatctgaaactttgtacttcaacagagggtggggcagggcagatcagacaattttctgtgtttcttatttccattgtagtctgggatctctgttcttccctccatgccctgtttgtagtagggattattttttgctcgtatatttggctgtagctttccttgtttgttgatcaatacacctgttcagtttgtaaaaaaaaaaaaaaaaaaaaaaaaaaaaaaaaaaaaaaaaaaaaaaaaaaaaaaaaaaaaaaaaaaaaaaaaaaaaaaaaaaaaaaaaaaaaaaaaaaaaaaaaaaaaaaaaaaaaaaaaaaaaaaaaaaaaaaaaaaaaaaaaaaaaaaaaagcggccccttttaaggtcccaatttttccccccctgttttggaaagtaaatattttttttttggggcccccaaatttaatttcctggcccggtttttaaaacgggggggttggaaaaaccctggggttccccaatttaatccttttggaaaaaatcccctttttcccaattgggtttttttcaaaaaggccccccccattcccccttccaaaattttgccccccctttatgggaaaagggaaccccccctttttggggcttttaaaccccgggggggggggggttccccccagggggcccctttcatttgtcagagccctttagcccccgtcttttggtttttttccctttttttttcccccct

SEQ ID NO: 178510 - DNA, 889 bp, Zea mays
  Clone ID: MRT4577_94388C.1
gcccgcgaagccggaccgggacttggcttgacctcgcggcgggccggcatgttctcctgcctccgctccgccgccgcaacaaccatttccttctctagccgccgcctccgatcccctcccgaggctacagaaccagttcatccaggcgcgaatggcggcggcgaggagcctgcttctgaggcacctccgcttggcggcggccccgtcagcggcgtccgtgaggccgacggcgtcgttgcatgaggccctgtgggggcagcggtggatgtcttcggaggatgccaagggctctttcctggacaagagcgaggtcactgaacgcatcatcaaggtcgtcaagagcttcccgaagatcgatgacccctccaaggtgacaccagatgcccatttcaagaatgatcttggcctagacagtttggatgcagtggaggttgtcatggccctggaagaggaattcagattcgagatacctgacaatgaagctgacaagattgactccgtcaaagttgcagttgacttcattgcctcacacccgcaagcgaaatgataaagatgcgttgcctggtatagcaaagctatatcgtcattaatctctgtttatgaagaaagttcagtttgaagatgtacactaccgtgcccatttggatacttctgctgatgctactgtcctttttggaacgaattttgctactgtggattgtctgcactaaataaaatgtttgaacctgagaaggaacttggatgtcgtttggttcacgaaatgtaacgtaaatggtaatggtaatgattgacactcgaataccgacagtaacaaatttgaataagacgatatccatttatagtgtggtatcgattacggttggacttgaaacttgttaatttaggcccc

SEQ ID NO: 178511 - DNA, 346 bp, Zea mays
  Clone ID: MRT4577_94389C.1
gcgacggaaaacatgagatagcacgcaatctgacaaaacgaaaaaacgagaaagacggggagggtgctgctggcatcgggggccacgacctcggacgccggcatcacctgcagtcaggtgagcttcgccatcgcgcactgcctctcctacgcccgcggcacagagtccggcccctgcgaatactgctgtagcggcgtcaggaacctcatgagcgccgacagcaccgtcgccgactggcgcaccgcctgcaactgcctcaagaacgccctcaggggcctaagcggcctcaacgacggcaacggcggcagcattccgttcaagtgcatgttcagcatccccttcacca

SEQ ID NO: 178512 - DNA, 1076 bp, Zea mays
  unsure (1)..(1076): unsure at all n locations
  Clone ID: MRT4577_9438C.1
atatttagcaatttatagactaaaaaggaataaaataaagggactaaacattagtctctagaaaccaaacactccctaaaaatactaaatctttagatttagttaaaagttcaccatatttgcacccttacaacaaatgtttatacatcacgaagtcaagtgcacacctctcaaatttgctctataccactgcacgacgctcatctcgggacaggcaacaacgcatcatctcccagcagcacaaacagtgtcaacagaacggaacagcccaactgctgttcgccctcccggcccctgcccctgcccagtgatctgctgcccccgagccagccagtactgatccggaatccgaatcctccagtgccccccagccgatagtaattgtggttgggtggcggtttgttagggtaggcacgctgctgtgctgtgtcgcctgctctgcagtctgcacggcgttattgagctgcaggagagtggcgcatctgactgacccccttccattcacacaggtgcacccggagacgtacgcgctggtggtgagcacggagaacatcacgctcaacgcctacctgggcaaccaccgcccgatgctggtgaccaacacgctgttccggatgggcggcgccgcggtgctcctctccaaccgccgcgccgaccgggcccgcgccaggtaccggctggtgcacacggtgcggacgcaccggggcggcgccagcgacgagagctacgcgtgcgtcacgcaggaggaggacgccgagggcaacgtcggcgtctcgctctccaggggcctcatgtccgtggccggcgacgcgctgcgctccaacatcacggcgctgggcccgctcgtcctcccgctgtcggagcagctgcgcttcctggccgccgcgctgctccgccgcgtcgcggcggtcaagccctacgtgccggacttcaagctcgcgctggagcacttctgcatccacgccggcggcgncggcgtgctggacgagctggagcgcagcctcggcctcagcgcctggccatggnagccgtccaaggatgacgctctaccgcttcggcaacacctccagcagctc

SEQ ID NO: 178513 - DNA, 352 bp, Zea mays
  Clone ID: MRT4577_94390C.1
ctaaggagtgaggatttattcgcctaaaaagcttttcaaatgcattcatacatctcaaaagcaatcatatatttttatatctaatatgcttaaagataaaaagtacttcgattttgctcttaaaacatactaccttataaattacagccatattccttaagtaagtgataaagtctacgttttcaaattaacaaaaaattttcattaaatataatcctatgctcatgctcttaaattattttaatttttctggctgattaaatcttctcaaaacctgtatttactactttccgagttagatttgatggctgacttgtcgttaaaaacgatgacggcgaactaaacttccctg

SEQ ID NO: 178514 - DNA, 1978 bp, Zea mays
  Clone ID: MRT4577_94391C.1
ttgggtacctcgatcccggccggggattactccccatcacgcacggccacacctgccctccattccatccagcacctagaaaaaactaatcgcaattagttgacgcataatattttgagggaggagaaggggggaattgactagttgaccaatcgcgagtggcgatgatgatgcagttgggggccaggagtttggtgaggaggttctcccgtctcgccgcggcgggggccccggccgagacgacgtcggctggcgtgccgcgaatgccggcgttcgaccacgtcccgctgccctacgacgggccgagcgccgccgacatcgcccgcaagcgcgccgagtacctcagcccgtccctcttccacttctactccaagcctctgaacatcgtggagggcaagaggcagtacttgtacgacgagcacggccggcgctacctggacgcgttcgccggcatcgccaccgtgtgctgcggccactgccaccccgacgtcgtggacgcgatcaccaggcaggccaagcgcctgcagcactccaccgtgctctacctcaaccacgtcatcgccgatttcgccgaggcgctggcatccaagctgcccggcgacctcaaggtcgtcttcttcaccaactccggcacggaggcgaacgagctggccatcctgatggcgcggctgtacaccggctcccacgacatcatctccctccgcaactcgtaccacggcaacgcggccgggaccatgggagccaccgcacagaagaactggaagttcaacgtcatccagagtggcgtgcaccacgcggtgaacccggacccctacagaggcgccttcggctccgacgccgagaagtacgtgcgggacgtgcaggagatcatcgagttcggcaccaccggccaggtcgccggcttcatatccgaggccatccagggcgtgggcggaatcgtggaggtgtcgccgggctacctgccgctggcgtacgacaaggtccggaaggccggcgggctctgcatcgccgacgaggtccaggcgggtttcgcccgcgtcggcagccacttctggggcttcgagacccacggcgtcgtccccgacatagtgaccatggcaaagggcatcggcaacggcatcccgctgggcgccgtggtgacgacgccggaggtcgcgcaggtgctgacccggcgctgctacttcaacacgttcggcggcaacccgctgtgcaccgccggcgggctcgccgtcctcgaggtgctcgagaaggagaggctccaggagaacgccttcgtcgtcggctcctacctcaaggaccgcctccgcggtctccaggagaagcacgagatcatcggcgacgtgaggggaacgggtttcatgctcggcatcgagctggtcaccgatcggcagctcaagacgccggcgaaagatgagatctgccacgccatggaacacatgaaagatatgggcgtcttggtcggcaaaggcgggttctatgggaacgtcttcaggatcactccccctctatgcttcaccaaggaagatgctgatttcttcgtcgaggtgatggacattgcgctgtcgaagctctgagctgtggccgtcaggcggaggggcggtgtgtctgtctgtatatataatcctcgcccgagtttagcagctgcgtcggagttgtactatctcactcaagagaatggcgaaaaaaccttggcagtttgtgactcaaggggaaaaaactaaaccatgcagacgaatttggcttatcgcaacgctagcttttaattcagctttcgtctggagatgacgtgccttgtaacgtgccagagataatgactggggactggggttcattttaccttacttatataaaaacagattttatatgatccttgtaagcgagttgaggcgaactcatatggacgtgatgagttatgaatctggtttatataaaaaaaaaaaaaaaaaaaaaaaaaaaaaagggcggccgctctagagga

SEQ ID NO: 178515 - DNA, 451 bp, Zea mays
  Clone ID: MRT4577_94392C.1
aggtccaaagaacagccaacacaagtagtatagggaatgaaacagggacagcatcatccttgcccatacaacaaatatattttgtgccgccaaacagaacacatctaaggagtggcggctgcaaaaacgacccgagtgtccaagatgcattcggcgctacaagtacacgggcggctgacatagaaagcacgaacacaaagcgttgctaaacaggttcctggagagggcgagcacaacaaaatacctaccctaaccagatgcggcacacaagctatcggaggacccaggcctgtggatgcggaaacagaaaggccaagctcgacacccttctcagaaacaaaaatggcataaaaaagagcttacttggcgctaaaaacaatgagtgcagaataacttagctgatgctaccatattattcaggggaggctatacctgggtgtaacaacacggt

SEQ ID NO: 178516 - DNA, 1536 bp, Zea mays
  Clone ID: MRT4577_94393C.1
atgatgatgcagttgggggccaggagtttggtgaggaggttctcccgtctcgccgcggcgggggccccggccgagacgacgtcggctggcgtgccgcgaatgccggcgttcgaccacgtcccgctgccctacgacgggccgagcgccgccgacatcgcccgcaagcgcgccgagtacctcagcccgtccctcttccacttctactccaagcctgtacgtcggtcggtcgatggatcgaatgcacggcgcatacacatagatagatgcgtctgcgaacgggttcctcgatctctgcgtgcagagctgaacatcgtggagggcaagaggcagtacttgtacgacgagcacggccggcgctacctggacgcgttcgccggcatcgccaccgtgtgctgcggccactgccaccccgacgtcgtggacgcgatcaccaggcaggccaagcgcctgcagcactccaccgtgctctacctcaaccacgtcatcgccgatttcgccgaggcgctggcatccaagctgcccggcgacctcaaggcacgttgctggctgatcgcgtcttgtaccgattctgtcgtcttcttcaccaactccggcacggaggcgaacgagctggccatcctgatggcgcggctgtacaccggctcccacgacatcatctccctccgcaactcgtaccacggcaacgcggccgggaccatgggagccaccgcgcagaagaactggaagttcaacgtcatccagagtggcgtgcaccacgcggtgaacccggacccctacagaggcgccttcggctccgacgccgagaagtacgtgcgggacgtgcaggagatcatcgagttcggcaccaccggccaggtcgccggcttcatatccgaggccatccagggcgtgggcggaatcgtggaggtgtcgccgggctacctgccgctggcgtacgacaaggtccggaaggccggcgggctctgcatcgccgacgaggtccaggcgggtttcgcccgcgtcggcagccacttctggggcttcgagacccacggcgtcgtccccgacatagtgaccatggcaaagggcatcggcaacggcatcccgctgggcgccgtggtgacgacgccggaggtcgcgcaggtgctgacccggcgctgctacttcaacacgttcggcggcaacccgctgtgcaccgccggcgggctcgccgtcctcgaggtgctcgagaaggagaggctccaggagaacgccttcgtcgtcggctcctacctcaaggaccgcctccgcggtctccaggagaagcacgagatcatcggcgacgtgaggggaacgggtttcatgctcggcatcgagctggtcaccgatcggcagctcaagacgccggcgaaagatgagatctgccacgccatggaacacatgaaagatatgggcgtcttggtcggcaaaggcgggttctatgggaacgtcttcaggatcactccccctctatgcttcaccaaggaagatgctgatttcttcgtcgaggtgatggacattgcgctgtcgaagctctga

SEQ ID NO: 178517 - DNA, 350 bp, Zea mays
  unsure (1)..(350): unsure at all n locations
  Clone ID: MRT4577_94394C.1
gggggggggcgatggccacctcgaggcggccgggcaggaaccaccatataggtagatgctatcccttggctgccgcagcctccaagccactcccaaccccccgctcccagaaccttctcgaagctccccgccgcctcctccactcgcnccgcatggccaaagaaccaatgcgcgagctcgccactggcgccgcaggacaaattgcacccgccctgccccccatgcctgccaggcgagccatgcttgccgcacaccaccctgccactctgcacatgcttgacattcccccagcccctgacaccctccccagccagccaccaagccacccgccagaagctagcccccctcct

SEQ ID NO: 178518 - DNA, 328 bp, Zea mays
  unsure (1)..(328): unsure at all n locations
  Clone ID: MRT4577_94395C.1
aaacacaaggtgcaagctttgttgttgtggtgaaggtgatgggcagcgancgscctcaaggggtccaggcgacccacgtaagagttaactttttggaygacmmgaamcggcttcattatgcaggaatgtcaasgggcncgtcggggagggtgamattttmacnctgycggagygggcagasgcgaggccmggccsgtgggcctsaagccctacgcgtttttggctgcggctcttgtttggtttttggtgttttcgaatttgtgttatgtttgaacttctgtgaacttgttttgagagtagtaagcnctggtgataagattgcagtttt

SEQ ID NO: 178519 - DNA, 489 bp, Zea mays
  unsure (1)..(489): unsure at all n locations
  Clone ID: MRT4577_94396C.1
ccgggnctccgcgcccgataacaactattaaccgcgataccatagctaccttggccttgggaaagaccgaaataccgttcgtatattctgtggactcaatggtcaatcatctagcactggtccatgcaccaagcgaactttactcgaatatttatgtctaaaacgttgtcgatgttctcaagcattgatattatgtggaaacgattctccacatctctgtaccatgtgcaacacattcactatgtgcaacttttgataagaacccacgcttggaaaggtccaaagctacaaggcctgctcatatattacaccaactactaaagggtgcaccacctaaaatagattctattggaataattgcacgaacagagactccaaatagtgggcaacataaaatattaggtgtggatcttctgccactctgcaatgctctctgcgtacgctcttattagaaacttgctctctgcacgaaagtttactgatgctata

SEQ ID NO: 178520 - DNA, 226 bp, Zea mays
  Clone ID: MRT4577_94397C.1
acaacgcgtccgcctgtttcgtggtttttcttaaacgtgtgcaccggtgccgatcgcacgcagggaggatgcaccaccattacatgggctgctgtggcctgacggctgaggagctcgctcacgcccttgcgctagcggacgtcgtggggtgcgccggcaacatcttcggaggccacgtgaaccctgacgttaccttcggcgcgctgctcgacggtcagatctgcct

SEQ ID NO: 178521 - DNA, 484 bp, Zea mays
  Clone ID: MRT4577_94398C.1
cccccgcgttttatgatgatggaggcctgcaacgcgcagggcttcgtgtacggcatcatcccggagaacggcaagcccgtcaccggcgcctccgacaacctccgccggctccggcgccaagcaggaggccagcagcagcaggcaacggcagtcgcaggagcaggcgcgccgcaagaagatgtcgcgcgcgcagggcgggatcctcaaatacatgctcaagaaggcctggaaggtggccgtgctcacggccgtcatcaagcacatgtcccccgacgtcgacaaggcgcgccgcctcgtccggcagtccaagtgcctgcaggacaagatgacggccagggggatcgtcacgtggctcgccgtgctcaggcaggaggaggagctctacctccagttgaacccgggtgcccgcccggagccggcctactcatacgccgccgccgagacaaaaatcccggcttgcgccagctccggcgagtacgacgtc

SEQ ID NO: 178522 - DNA, 549 bp, Zea mays
  Clone ID: MRT4577_94399C.1
cggccagccatggcgcggcaccctccctgtttctcctggcgagcggctgggacaggggtcttcttccccaacgccacctctgcttcagccgggctcctgcccagcaacagcgcccttcttccccctcgggtccctgggatgcagcagcacaccatcgcgggagcagggcccccatgggagtgcccccttatccatgacgttcggcagcagtgagctttttcttccctgcgcgcaggagctccatgggcgcgagctccacttcccatggatggcgccctgatttctccagcagcccatggggtccctgtccatggcgcacctgtaattttccccgtcctcccgtagtccacggccagcgggacctcgacctctctctcccttggtgagcaggccctcttcttcctcctccctgagcttcctcgccgagcagcgctagcatcgggtgatctcgaggtgggcaccgggggggcaggacccctgaactttaggtggcttcgtgctgcggcgacggggagggagcccagcggcagcacaccatggggctagggg

SEQ ID NO: 178523 - DNA, 268 bp, Zea mays
  Clone ID: MRT4577_9439C.1
aatgatcgttcacggttgtgactgtgcccctggggctgggatccaaggagccccatgctggtggaagctgcggcaagcgactggattccggagaccatcgacgcctacagtgggctgccgttcgtggacgccatccgaggggaggagataggggagcaaggcggacgagaggatggcccgtacctggacagcatcctgacgcgcatggcaacatatgcaatactgaggaagcagagaatactgctgaacgcggacatgaaggaggcca

SEQ ID NO: 178524 - DNA, 336 bp, Zea mays
  Clone ID: MRT4577_943C.1
ggccgcttttttttttttttttttcttttttttttttttttttttttttttttttttttgcgttttgttttttttttttttttttatttttataggagtagtataaatttttcaaaaaaagaagagaaggataatagatatatacaaactaatttccgggtcaaacgttccctttaaaataacagggggcaaaccacactacttcccgcaaaacccacctccacaaaggggggtcttttttgggaaggaagaaatatataggtagttgaattatattttaagaccgaacgcgcaacttattattcacgccaacttttaaaaattaatttttttttt

SEQ ID NO: 178525 - DNA, 269 bp, Zea mays
  Clone ID: MRT4577_94400C.1
gggggcgtccgcccacgcgtccgcccacgcgtccgaggacgcatgggtgcttggccagcaaccaatgtagacgacatcaaatggtcgggcaccctcaataagctcatcgattcatggctcttgattcatgggctggagacaggcactactcacttatatttgctgtcagtgtgaccgggaaaaatgaaactaccaggaggaaaatcgctcgttgaactaggacacagaaaggaagatgggacaagatcgcgactaatttttggaaggag

SEQ ID NO: 178526 - DNA, 223 bp, Zea mays
  Clone ID: MRT4577_94401C.1
cagttaaatgaggtctttatcacaatttcttgtaatacataaagacaaagtccaagaaacatacatataaaataaagctggtacatttatattaatgttagatggaagcagattttaagaacaaaacgttactaaatacggaggatctctatgtaaagactccaaggcttgagctcacatggtaactataacaactatacacttggatgcacctaataacaca

SEQ ID NO: 178527 - DNA, 461 bp, Zea mays
  Clone ID: MRT4577_94402C.1
caggggaagtacctcgtctcactttattacatgcctccctctgtgctctccctcccctcttggcatttttggatcccttctgtttgagtccttcactttgctgctcagaccgttcgttccctagatcttgccacggcctccttgggtgtgtgtgttagctgctgttttacccaaaccttttctctacaaagggcaaaggggtcaactgaatctgtgttacggttgtactttgtttcttcctcgttcatgttaaccgctataggctaacctctttttccttattttttggttctgcttctcaaggatcagacatcccagagaggagctcaccatgggttagatcccatagtgcgactggctgtctggatgcgagctggtatacttcaaaaaggacgtggatctgaaaccttcagtagagatcacattgaagcatttggtctgaagcgcttttgatctattta

SEQ ID NO: 178528 - DNA, 423 bp, Zea mays
  Clone ID: MRT4577_94403C.1
atgcacacctccgagggctcggaattcggctcgagccaacctactctgcctgccgttttttctgctgcgggcggccactgcttcaagggggggaggaggacattcgattgcatgactgcgcctgatgaggatcgaaggaaccagacacggaggctacgattatcggcgggcacaataaattacccgcatggctcggagggacccgtcctagctcggctcccgctgcctactggcgagggctcatgcacagtcgccgccactttacccttctgaagcgcgcaagacagtgcctgaagatgggatgcacaggctgttgccaggtgtgcttcagaggttcacaactgcagcagcattagaggatcccatgacgcctgtagggcatgtgaactacacaaagctcctgattaatgggaacgtttgtga

SEQ ID NO: 178529 - DNA, 228 bp, Zea mays
  Clone ID: MRT4577_94404C.1
gtgtgtcagaagtatggctgaattgttgcagaagactgcatctgggatacctgttaccataaaggacagcaagtgtgttatcaaaatagaagactgccgtaacactgtatgttggaaaagattgtcatgcagcatgtcttgcataggagggtttttgcagggacttaattcagcattagaaagcacattcaacgatcaccgaatagcaagcccagaggacaggaaaat

SEQ ID NO: 178530 - DNA, 1177 bp, Zea mays
  Clone ID: MRT4577_94405C.1
tcgaggccggccgggccggggagttcaatttcctgcacgctaaggaaatctagagttctgttttgtggaaagggcaacatgttttagatgcaaatttgctttatatgcacgctaaggagtaaaggactgtgcccgttgtcaattttccatgttcttttgaactggtgacaaggaacgctgttcgcaattccggcgccggcaccatgagtaagctgcagagtgattctctgagggacgcgattgcctcaattaccaatgattcccgtgagaagcagcgcaaatttgttgaaaccattgagctacaaattggactgaagaactatgaccctcaaaaggacaagcgcttcagcggttctgttaagctgcctcacatccctcgccctaagatgaaggtttgcatgcttggtgatgctcagcatgttgaggaggcagagagaatgggtatagacaatatggatgtggaagccctcaagaagatgaacaaaaacaagaagctagtgaagaagctggcaaagaagtaccatgctttccttgcatctgaggctatcattaagcaaattcctcgtcttcttggtcctggtcttaacaaggcaggaaaattccctaccttggtgacacaccaggaatcccttgagtccaaggttaatgagacaaaggctacagttaagttccagctgaagaaggtgctttgcatgggtgttgctgttggcaactgcggcatggatgagaagcagatcttccagaatgtgcaaatgagtgtcaacttcctcgtgtcgctcttgaaaaagaattggcagaatgtgagatgcttgtacctgaagagcactatgggaaaggtgtaccggctgttctaaattttccaattaggcttagaatttccaggagactcgagtgcttggacacttgccattttccccacccccccttttttttgagcaactatggattaactagttaaaaacttggtcttgtactggatgttttgttcttgataccgaacctatgaaattgttcccttatttcaatgtttatcaaaaaaaaaaaaaaaaactcgagactagttctctctctcctcgtgcaccttcaactccagctttaggacacccaaccttcccttttttggatttacgggattgtttatgcttttcgcagttagcagcacgaatttggaggccca

SEQ ID NO: 178531 - DNA, 344 bp, Zea mays
  Clone ID: MRT4577_94406C.1
gggttcattggggggttccattttttttggttttgggggtaaaaacatagggcttttttggttggcctccaaaaaaaggtttggggcttggggggggtttttgggggctttttaaaaattttcttctttggccctttaccggtgaaaaacgggccaaagggaaaaggggctttatttttttggaaatggcggggcattacaggggattccaaaggtttttggggccggtgttatttaaatttttggaacttaaattttttttttggttgagttccaaatccgcaaacctatttctcggaaaccagacaggttgtatccgggggcccccgggggatggggggaaa

SEQ ID NO: 178532 - DNA, 376 bp, Zea mays
  Clone ID: MRT4577_94407C.1
tcaagctcaccctcaacttcaagcacctcaacctcaacttccatctggggggggccttccgcaagctcaaggttgacaccttgttctgcactcctcctcaccatggcctccatccacaccgtcatctcccacgtccagaacctcatcaagggggtcaccaaggtctaccgatacaagatgatggtcttctacgcccacttccccatcaacgcctacattaccaacatcatcacctgccatcgatatcagaaactttctcttcgagaatattgtcagttatgtgttcatgcttttatgtctttaccatcctccgattctagaaggtctatggttaggctcatccttaatgtaaacaactttcatgttagtatttttc

SEQ ID NO: 178533 - DNA, 796 bp, Zea mays
  unsure (1)..(796): unsure at all n locations
  Clone ID: MRT4577_94408C.1
cgcaccctccagtaaagnccccatggctgctttctggctgctgctgctgttcgncgctagcgcagcccttgcccttcgnacatggagagctcacagcttccccaacacggcgcggcaggcacggccgaggcacccgccgcngctgcagccgnacccgctgatcggccacctgccacagntcttggctaaccggccccccccgcctcgactgnangaccgaggcgctcgccccccacacgaccacnngcacgnncncgcctgcccccgccccgccccgcccccncngggcnancaccccccaacccccccaacgccnnannacnnnctcccccccaccccnncaccacccccccaccccccccccccccccccccccccccccccccccccccccccnnnncaccgaccccactcctccaacacacgcaccagaccaacacnnngncacgacacaaacaaaaagcccacccccacaccaaccccaaaaacccccccccaccccccacccccccnccccacacnccccaccccccccccacccaccccccccccccccaccccccccaccnccaccccccccacccccccccccccccccccccccccccccccccacancaacccacccccccccccccccccnccncccnccncccccccccccccacaccccnnaaccaccccnncccccccccccccccccnnnnccccccacccccnnnncccccccccccccccncccccccccacccccacccccacccccaccnnncnaccaccccccanncccaccccc

SEQ ID NO: 178534 - DNA, 426 bp, Zea mays
  Clone ID: MRT4577_94409C.1
aaaaacgaacaggccctccttaagtcaagatcaagacaagcccccccccgccgttggaccggggcccccatcacaattcaagcccccttttgaaaacccacataacatttataaaaggggcctcctttcctctaaacgaacaatccaaatacaggcccgggggggcgtccccctagggataattgccccgggatccatgccaccctccaaagcaataaaagatggagctgtttggcaaaaaaaaaacccccgggggggggcagcccctaaaaggaacccccaacatcacatgggggggcccagaaactaggggccatttttttggaacccccactcactgttttttaaggggcccccttgacgagttttaacccacctgctgttgccggggaagggaaaagcatgattacagactccccaagcaac

SEQ ID NO: 178535 - DNA, 259 bp, Zea mays
  unsure (1)..(259): unsure at all n locations
  Clone ID: MRT4577_9440C.1
gcgacgcgtccgaatatgctnaccagatatgagcgacacgtcaatagcaccgatcacgacacatttaacaaaggcgacagccaccacgcgaaccccagccgtgtacctactgggggcggctgtcgcggcactcttagtcacgcctgctgccgtggacgcaacaacactggcggcaatatggaggggaaccgcttttccagacatcagcaccaccacagtggggaccaagtcccagagctccgggttcttagacaccatg

SEQ ID NO: 178536 - DNA, 295 bp, Zea mays
  Clone ID: MRT4577_94410C.1
catccttgcgttcgctctcgtaaacaaggccactgggctcgctatcaagcactccctaggccagtcccaccaagagaggctggagtggttgaacctatagaaccaggactagtgcgtgctgtggacggagagctgcgacgtgggcaaggtcttccgttgcatgcgcatgttgaacatctttcgacagatttctgacgacaggcaaggcgacgggatttgcggcggcgtgcactacggcaccaccgaagtgctgtgggagtacaccaaggacaacatccatagctgtaacatcctg

SEQ ID NO: 178537 - DNA, 213 bp, Zea mays
  Clone ID: MRT4577_94411C.1
ccccctctccctccccctccccatcccctcgagctccagatcccgagcccatggcgaccgccttcgactccccgacctcctccccggccgccgcgcccttccacgacgaccccttcctcagcttcggcgactcccgcgggatgagaagggtggatacgaacgatgaggggaaagcaggagctagtggagggaaggctgaagcaaggggcggag

SEQ ID NO: 178538 - DNA, 369 bp, Zea mays
  Clone ID: MRT4577_94412C.1
gaggcctacgacccacgcgtacgcgtgacgcagggaaccactgcaggatatttcactaatgaagttcaaggattgatgggggatcgaaatccaaagctcgcattaaggcaaagataacacatgacagtgttgtgatgcagacaaaatgaaaacattctatgaaggacattcgtagtcttgctgataacagtaaggagttccttgcataagaagaaagccagataccaatacatgaagtgatttgctacaggtattatcataatgttaccaatgttaaagtgaaacacaaaccgaacgaatattaagaatggatagaagatgtgtacgatgaggaattagaaaagatgatggacacatttgaagatgata

SEQ ID NO: 178539 - DNA, 339 bp, Zea mays
  Clone ID: MRT4577_94413C.1
ttttgtgctgacacaggcacacacccaatcggtggggggttaaatgttatgcgcgtatactacatggaatgctcacgaaaaccaaaaaagggcttctccattatccccattacgggcggaccaattatcttatgctctggggtgcaagacaccaacaccagagtgaccgttccaactcactacagctttcaacctaatggtggccagctatggttgattcaaatgttcatgccacgttggggacctcacgacacttgacgactcaaacttcactatgttttgacaggtaagctgggactaaacccaaaagggagtcagcccagggcacacactggcctt

SEQ ID NO: 178540 - DNA, 444 bp, Zea mays
  Clone ID: MRT4577_94414C.1
cctttctatctccctttcccatccccatactttcttccaccgcatccccgaccccctaccccccgtctcaccggcggagcccatccagccggccgtcgcgccgccgagcgttgacgctacccggcgaatctcacttcttccgagtggaggagaggatacatgggactccgaaggctgcttcaagggattgtcctaccgagcgacgacgggccagcatgcagccccatcctatttccacggaggctggtgagactatccgcgcaaccctgtttcccggagatggcatcggcatgtgagatcgccgagtcggtcaaccatgtattcagtgttgcaggcgaaacaataaaatgtgaataagatcatggtgacacgaaagtgggtcccatacaagacatcgctgtgacctggagacaacctgaagactgtgcttcaaaacaaagttga

SEQ ID NO: 178541 - DNA, 173 bp, Zea mays
  unsure (1)..(173): unsure at all n locations
  Clone ID: MRT4577_94415C.1
aaaccgcggcacccgaggntgaccagccagaaataaagcgcagaaacagaccaacaggccagcgaagcggggcaacaccgaagggtggcgggcaaacacagcgaaacggacaaccacacgcggaccggacaagaaggcaaccctctcttgaagaaacaggcgacagaaacaac

SEQ ID NO: 178542 - DNA, 239 bp, Zea mays
  Clone ID: MRT4577_94416C.1
gatccacctgcaatcggatgggtatgcatctccgccccagggggctcgagccgccgccagcctcttcctcccgtaaccaaccgcctccttcctagtagtacgacttccgactaacgcgctctgctcctggtcctcgtcctccgcgtgatctcttcagtctcgctccgctgcgccgttggtctgtgcagcagcgctcaggttggttcgagctggccgctcttccaatccccccaccgcat

SEQ ID NO: 178543 - DNA, 309 bp, Zea mays
  unsure (1)..(309): unsure at all n locations
  Clone ID: MRT4577_94417C.1
cngcttttggcagctacaaaccacccaaaanccanccccagaaaccggcggtccttgggtgttccggatctganccagcagctgagaagngntgagcgccgtggccgccaatggcgacgttcttcgttgaancccaaacgcggccgtccttaatcccggggggctaaccggaagttgggaggatttctcgcnngantgttatgngtcttcancaccanngcnngtttcngggacgactgnttcggcnaggncnagcaccacgaggccgcgttngcngncgccgccgacgccgngtncgangtngcggcg

SEQ ID NO: 178544 - DNA, 269 bp, Zea mays
  Clone ID: MRT4577_94418C.1
ggggaaaacaaatgatggttctgtttttcctgaagaggccgttttaggaagggctttaagttttacactataaaatttaagggccgggtcaaatattaaacaggctttatttttattttttttctaaccaaaactaattaagggtttaaaagaattgggaagaaacctctaatttgaaggggggttcattaccccccctaagggggggcttgtttcactgggggggaattccttgttttgcccttgggggggcaaacttcacaggggtt

SEQ ID NO: 178545 - DNA, 388 bp, Zea mays
  Clone ID: MRT4577_94419C.1
gacggaaacctgaagaacattatcttgtagcttctattctcgatggaatggatagacgggctatggcgacatcatggagtgccaagcctgctgaccagactgatatgagaacgtactcttatatgcctcgtaacgccaaatacattggggaggtctctgcacactatcagattgatcatggaatgctaaatgtattgcaagagaacgctaaactactcaatcaaatacaagtaaatattttaacatcacaggagtaattttcaattcgtctagataatacttttcaggcccataacaatattgaactttttcatcacgcaagaaggaacatcaatggtcttttacaaagcatgagccaaatttcctgaataatgagcaagatgtcccc

SEQ ID NO: 178546 - DNA, 382 bp, Zea mays
  Clone ID: MRT4577_9441C.1
cgcatgctttcggatcacaagcggccagagtggggggggacttgttcaagaaggtctgttggtaaccaatcacgggtatttcaaacgtggagcatagctggatatgtgacctccaagacgcctttgcactgtccggagatggcatttatactagtatgcaaagaagacttcaagcttctcgacggttccgcttacagcttgaataagaatgctcgcaccaaatgctcacatcgtgcgcacaagtcgcccgttactcgcgacctaccatcactcatgtcgacccagctgctgaaaatgtgattcagctggaggtagcgcaccatcacgtgccctggcactatgtactaggtgattacgcacaatgatcacagaccacctatgc

SEQ ID NO: 178547 - DNA, 605 bp, Zea mays
  unsure (1)..(605): unsure at all n locations
  Clone ID: MRT4577_94420C.1
aggtctgggaaacgtcgaccggttctctctcctgcgccttgaaatgtctactttctctccgtggcaggcaccgtgctaccgcccttgcccagcccgaggcattcagcctcaccgtgctggtctccgccggccagggccaggtcctcggtggagcatcctagtgcccctcgttgccaccaggctcgccacggccttcgccatcgcgttctcgtcctcctcgtctggactctggaagcagccggcggtgggcggggccaaggcatcgccgacgaaggcggcggcggcatcaggggtgacggccgccggcaagggcgcggcgctggcgacgggccccgggaagctgcgcaggtcttcgtcgctgaacgtggcggcgtcgttcacgcgggtgtgcctgtgtgcgcccatctcctcgtacaacaatgagtctccggctataggcaacccatgcatccttccaagcagtgatttttttgggtcctacgatttatgttttttgttgtgggaaacagactgatttttgccattacattttatcgnttggtttgttggaaaannnnnnnnnnnnnnnnnnnnnnnnnnnnnnnnnnnnnnnnnnnnnnnnnnng

SEQ ID NO: 178548 - DNA, 511 bp, Zea mays
  Clone ID: MRT4577_94421C.1
ggccgcttttttttttttttttttccaaatgaccaattaatcataacattactcgtatgattcatctcgattcatccaacaaaccaacgataaaatgtaatggcaaaaatcagtctgtttccacaacaaaaaacataaatcgaaggacccaaaaaaatcaccgctgggaaggatgcatcggttgcttatggccggagggtgctgggagggcgccattgacagccgcggctacacatcttgcccggtcgaggtggctgtggagagattcggcttgacattgagctctggtgcatcggcaagcgggaggcgctcatagaacgcgatgacgaaggccgtggcgagcctggtggcaacaaggggccccaggatgctccaccgaggacctggccctggccggcggagaccagcacggcgaggctggatgcctcgggctggactagggcggtagcacggtccggccggtggagagaaagcagacatttcaaggcacgggagagagaaccggtcgacg

SEQ ID NO: 178549 - DNA, 204 bp, Zea mays
  Clone ID: MRT4577_94422C.1
ctccttcgaatgtgtcccctcaggccgatcgagccgggctttttgcacgtgttggatccttcatggccttgccccatttattgaataaactctctggcgcgtcatcggcccagaacaccaactagcacccccaccatcacacccagcattccccacacgcacttccacgtcacaccgtttgtctgcacacagcacacatccaca

SEQ ID NO: 178550 - DNA, 172 bp, Zea mays
  Clone ID: MRT4577_94423C.1
gccgcgcccaggagccccctttttttctttggttttacttggaacaaattctggccggggttacagtcttcttctttccacatttcatgctggttggtgcttgggtctgctggggccgtgggtgaacacactttttacatctgtcccggggcgacctttggttttaaaacac

SEQ ID NO: 178551 - DNA, 1407 bp, Zea mays
  Clone ID: MRT4577_94424C.1
gcgcactcgccgcgcctgcgccctgcgggcagtctcttcttgccctttctcctgtgcgcagccgcggcggacccaatctcgcattctcgcgttccgagatactgttgttctttcagggagatagatagattctgactgctcgccattggggctgccttggccgcgtgccgtccgtcgcttcgtcgagctgcgtgcggggcgctcctcgtcctcctcacgatggggggctggaaccgatcgcggtacgggacgggccaccgtgaccgctccgccggcgcttcgcgtactcctctgtctccgccggcgcctgattacggagacaagcaccagcaagtcccattatgggagagggaattctgccgccacgttggcaacatcacttgggagcagttctgtgaaaacaagcagtatgttggacaattccataaactcgagccttgggatgattcagcggcatttgattgtttccagaacgcaaaggcaaggttctgggcgagctaccatggccagccttctgacattcctttgctggacgacccggatctgtacatcgacaaggtcgaccaccaatgcgaagtcgacccggagttggtagctgatctggatagcgtagggctaccgttcgagtcggatgataatcctgcctcagccaaagggtggaccaatgctggggccgacaacaagtgcacccagaacgggtctggaaactgggacgccttcgtagaaaagccagctgaagtcagtaagtgggactccgaggccaatctcgcatccaacacgacttggggcggccaggccaatgtagcaacacctgaggcggtttggagaggccaatctttcagtaaatggggcaatgatagcaacaccagccggggtgttcctctggagaagccaagctggcgtggctgtaacaagaaccgctacacacccaacagctggagcagcaactttcatagcagaccatccgacaataggtaccagcagctggaggatccgagctacacttctgggactggaaggaaatggaacggcggcgacggtggcgggtacgtcaagcagaggagctttaagcacaggaaccaggaccaggggcagcaccagcagccgaggagtggcagctggcagcaggaccaaagaggaaggagcaggcagtggcgtccggtgcacagcagggctccctaaaatggtccggcgtcttgatctcgtggcgagaatcgcaggtgtcttctcttgtgcagtcagttttcagctgctgctggcaaagtggtgcctgtaaatagatgttttttttttgtttgagttgtatgctgcagctgctccttcgcagctgcgtccttactttgcttatggtgcaatgttaatatgttataatgttagttaatatggggagcatcacagtttttggtt

SEQ ID NO: 178552 - DNA, 941 bp, Zea mays
  Clone ID: MRT4577_94425C.1
gcctcgtcggcgcgcgctgtcctcatgtttctttcggcgcgcgctgtcctcatggtccccgtgcccaccgccacagctcgcggcggccggcgtgccgaagcactgcttccgacgcagcgccgacggctacctgtactgcgagggagtgagggtggaagacgcgatggcggctgccgagcgcagccccttctatctctacagcaagcttcagatcctccacaacttcgccccttctatctctacaacaacctccccgtgctacgcatcctgcgtgagcttggctgcggcgtcgtcctcgtcagcagcaacgagctccgactcgccctcgaggcgggattcgaccccgccaggtggttgatcagcatagatagcctggagcatatcagcatacgaacactcctggtctgaagtagcgaccttcgatattgttgggccagtttgtgagtctgcagatttccttggaaaagatagggaacttccaacacctgatgagggagctggactggttgttcatgatgcaggtgcctactgcatgagcatggcttccacctacaacctgaagttgaggccgccagagtactgggttgaagaggatggttcgattgttaagatcaggcatgaagagaagctcgatgactacatgaagttctttgatggtcttcctgcttagatgtttatttgtgactgctaggggcgatgttttcttggagataattgaatttttctttgtcaagctcattttgctttcttgtggttgttatggaatgttactggatactggatagttagttcggcctgtaggcgtatcctcctgaacttacctctcattgctgttagttttggcaccaagtttgttcccaattgctatttacggaagttattgcataaagggctgtttggttgtaatcttcccgtaagaataagatgcatgtttttgagtt

SEQ ID NO: 178553 - DNA, 2291 bp, Zea mays
  Clone ID: MRT4577_94426C.1
ccggccggggtcgaggtggacgcaaatccacatgtttgcgtggaattgcgacagtcgcacagagcacttttgctaaatcgctagttcgtttcctaaaccctagcaaagtaggaatggcgtcggcgagcatgctcgcgcgctcccttctccgcaccccagaccctacccaaacgagccacccgaaccgccggagcgccgctgtcgtctccttcccccgccgccaccgccgcctgtccgtgcgcgcctccgtctccacggcctccccttccccaccgccacagcccgcggcggcggctgccggcgtgccgaagcactgcttccggcgcggggccgatggctacctgtactgcgagggagtgcgggtggaggacgcgatgacggctgccgagcgcagccccttctacctctacagcaagccacagatcctccgcaacttcgccgcctaccgcgatgctctccaggggctccgctccatcatcgggtatgccgtgaaggccaacaacaacctccccgtgctacgcgtcctgcgtgagcttggctgcggcgccgtcctcgtcagcggcaacgagctccgactcgccctccaggcgggattcgaccccgccaggtgtatatttaacggaaatgggaagacactcgaagatcttaaattagctgctgagagtggagtatttgtaaatgtggatagcgaatttgatttggagaatattgtcagagctgcaagagctactggaaagaaagtgcctgttttgcttcgaataaatccagatgtggatccacaggtacatccatatgttgccacgggaaataaaacatccaaattcgggatccgcaatgagaaattgcaatggtttttgaactctatcaagtcatactcgaatgaaatcaaactcgttggtgttcattgccatctgggatctactattacaaaggttgatatattcagagatgctgcagtgcttatggtgaattatgtcgatgaaattcgagcacaaggttttaagttggagtacctgaatattggaggtggtttgggaatagattaccatcataccgatgcagtcttacctacacctatggatctcatcaacactgtacgagaattagttctctctcaagatcttactcttattattgaacctggaagatccttgattgctaatacttgctgcttcgtcaatagagtaactggtgttaaatctaatggtacaaagaatttcattgttgttgatggcagcatggcagaactcatcagacctagcctgtatggagcatatcagcatatcgaattggtctctccccccactcctggtgctgaagtagcgaccttcgatattgttggaccagtttgtgagtctgcagatttccttggaaaagatagggaacttccaacacctgatgagggagctggactggttgttcatgatgcaggtgcctactgcatgagcatggcttccacctacaacctgaagttgaggccaccggaatactgggtggaagcggacggttcgatcgtaaagatcaggcatggagagaagcttgatgactacatgaagttctttgatggtcttcctgcctagatgtttattatctgcgactgctacggacgatgttttcttggggataattggattttctttgtcaagctcatttttgctttcttgtggttatgtaatgtttctggatagctagttggtgcatcctcctcaacttccttttcatttctgttagtttcgtcaccaagttcgttctcaattactatttggttgtaacccagctgtaggatgcctggcttgcctgtaaccgcctgagcgtgatttggttgggaactgacggtttcacctggtcctggtgagacatgcctgcgaaccaaatctgtcccctgggctgccgtatgtgtgataccaaaatctgttgtagccttgtaggtttactattgctgtgataatctgttgcaggtttactattgctgcaaaaaaaaaaaaaaaaaagcggccaaagcactgtcaagaacctcactgacaagagcaagctcgatgtgcagacggagctgttcatccacattgtaccagacaaggcttcgaacacgctctccatcatcgacagcggcatcggcatgaccaagtccgaccttgtcaacaacctcggtaccatcgccaggtccgggaccaaggagttcatggaagcccttgctgctggcgctgatgtgtctatgattgagcagttcgctgttggttcccaatctggctatctagcccccgagaaggatatttagaccaacaagcataaca

SEQ ID NO: 178554 - DNA, 122 bp, Zea mays
  Clone ID: MRT4577_94427C.1
agagcatgcacatccgagaagaggattctacaccatccacagtaacatgcatgatggctacttgacttcgtcggggcagcataagctgtaagagcccatatcccctggtggcggctcctctt

SEQ ID NO: 178555 - DNA, 368 bp, Zea mays
  Clone ID: MRT4577_94428C.1
ggcccaaaacaaaaaagccttttaacccaggccaggttttacctttcccttcttttcactttttcccggcctgggaacaaaaatttagggcgggccccccggggcataaattacatatgctttatccagctttttcttttgcgacaaagggggcccggaaatttaacggggagaacctgtcgccatttttggatttgggggccggcttgaacccgtgggggccagccttgggcccccaaacctggttccctttgggggaaaaacctttggcccaaatatgtccttccccctttttgggggtggacaaatcccacgtacagtacaacccccccctccagttggtgggaaaaccttcaggggccgacccc

SEQ ID NO: 178556 - DNA, 2710 bp, Zea mays
  Clone ID: MRT4577_94429C.1
ggtaccctcggagctggccgggaatctctcgtgaagtcgtgaagtcgtgttcgcgtggaactggtacagaacacttcgcttcctggaaggctggaacagaaagaaccctaaaccctagcaatggcggcggcgaacctgctgtcgcgctcccttctccccaccccaaacactatccgaacgagccaccccaccccgcggagcccagccgtcgtctccttcccccgccgccgtgcccgcctgtccgtgtgcgcctccgtctccatggcctccccgtccccaccgccacagcccgcggcggccggcgtgccgaagcactgcttccggcgcggcgccgacggctacctgtactgcgagggagtgagggtggaagacgcgatggcggctgccgagcgcagccccttctatctctacagcaagcttcagatcctccgcaacttcgccgcttaccgcgacgctctccaggggctccgctccatcgtcgggtatgccgtgaaggccaacaataacctccccgtgctacgcgtcctgcgtgagcttggctgcggcgccgtcctcgtcagcggcaacgagctccgactcgccctccaggcgggattcgaccccgccaggtgtatatttaacggaaatgggaagacactcgaagatcttaaattggctgctgagagtggagtatttgtaaatgtggatagtgaatttgatttagagaatattgtcagagctgcaagagctactggaaagaaagtgcctgttttacttagaataaatccagatgtggatccacaggtacatccatatgttgccacgggaaataaaacatccaaattcgggatccgcaatgagaaattgcaatggtttttgaactctatcaagtcatactcgaatgaaatcaaactcgttggtgttcattgccatctgggatctactattacaaaggttgatatattcagagatgctgcagtgcttatggtgaattatgtcgatgaaattcgagcacaaggttttaagttggagtacctgaatattggaggtggtttgggaatagattaccatcataccgatgcagtcttacctacacctatggatctcatcaacactgtgcgagaattagttctctctcaagatcttactcttattattgaacctggaagatccttgattgctaatacttgctgcttcgtcaatagagtaactggtgttaaatctaatggtacaaagaatttcattgttgttgatggcagcatggcagaactcatcagacctagcctgtatggagcatatcagcatatcgaattggtttctccccccactcctggtgctgaagtagcgaccttcgatattgttgggccagtttgtgagtctgcagatttccttggaaaagatagggaacttccaacacctgatgagggagctggactggttgttcatgatgcaggtgcctactgcatgagcatggcttccacctacaacctgaagttgaggccgccagagtactgggtacaaactacaattcatatttggtgcccattggggtctggcgcctcattaactaaaatatcatgttgcgtgcttagatgtttatttgtgactgctaggggcgatgttttctgttgtaaagaagtcaacctaacatgcctgctcatttaagcagtcaaccgtcactgttcatcatgtgcagacagtgacacttaagttcgggaatctcaacatcaaagatgaatttcaaactgaattgtttcagctacattaactttaggtactacaaaatcatttacttgaaacattgcaacatgatttttttagctaataaagagggcgccagcctccctctgtgtgtgtgtgtgtgtttggggtgacactggcatactgccacctactttccctttttctcgtgattattttgtaggaaaaatggaaaaagccactgcaagctagggaatttcaattacttacctggatattgcttccttagagcaactatagcagttttgggggttgattctaagaaatgagtccatcagggctgcaaaccccattgctcctgagtcctgttgagggctgaggagcctactgttggtagcttagacgagcttaaaggaaccaagcctggcaaggcttgaggtcgtagaacatgtaagtcaagaaggtgaaggggatcatgtaaaagagcttgacaacctgcacattctatgtgtttgaaatacccactctgcctattgccatccaatgtttttcagagttctgcatgttaaccatcgaaagcaacttttatatgaaaacgcataaagcttgcaggtggtagactaaccgtaaggagtcgactttggggatgaccattaatacctgaagaggatggttcgattgttaagatcaggcatgaagagaagctcgatgactacatgaagttctttgatggtcttcctgcttagatgtttatttgtgactgctaggggcgatgttttcttggagataattgaatttttctttgtcaagctcattttgctttcttgtggttgttatggaatgttactggatactggatagttagttcggcctgtaggcgtatcctcctgaacttacctctcattgctgttagttttggcaccaagtttgttcccaattgctatttacggaagttattgcataaagggctgtttggttgtaatcttcccgtaagaataagatgcatgtttttgagttagaggaccatgcc

SEQ ID NO: 178557 - DNA, 1238 bp, Zea mays
  Clone ID: MRT4577_9442C.1
tgttgtcgcagtagaccagtgtgctcctcgtctgcggactgtgaagttcctggagcagctaacgaagccagtccgcctcagccacgccgttagccacaacgcggtactcggcctcggcactagagcgggagacgacaggctaccgcttcgagtaccaagagacaaggttgtcgcaaggaacacgacatagccagaagtggaccagcgcgtcgagactcgggacaaccagcccacccggagtcagtgtagatgacaagttcgatggtcgagaagtggcgaaggaggccaaagtcggtagagccctagaggtaccacaggatccgcttcatagcagtgagatgaggctcccgctgggcatgcatatggaggcacacatgctagacggcgtaggcgatgtcaagccgtgtgaagacgaggtaccgcagcgccccggcaagactatggtagctagtgggatcaaccaccgggaaccatcggaggaggaggccttgccttaagtgtatattggagtcatgcagggcttacagtcagccatgccagcgtgctcgaggatgtcgacggtgtactggcgctggtgcagaaacaggccctgggaccgacgctccacggtgatccccgagaagtggtgcagctcacccaggtctttcatcgcgaactcctgctggagggaggaaatgatgcgccgcaggaggtcgtgggaggaggtcgtgaggacgatgtcgtcgacgtagaggaggaggtacgccatgtccaggccgcgacggaagacgaatagggaggtgtccgccatggcctacacgaagccctgtgagagaaaagcgattgtaccaagctcgggacggctgcttgaggctatagagggaccgatcgagcttgcagaccatgtcggggtgcgcctagtccataaagccgaccgaatgagtgcaatacaccgtttccatcggagtgccatggaggaaggcattcttgacatcgagctgatgcattggctaggcccgtgagagagccagagtcagaacagtttggatggtaccaggcttcaccacggggttgaaggtcacgtcattgtgatattctggccctaggggatggtgatatcctggcccaaggcttaatagaattaatagagtactcatcaacaaggtgcatcttctttttcgggcctatatcgaaacaaccttcaagttaagcgtgcttggcttagagcaatttgggatgggtgaccggccaggaagttt

SEQ ID NO: 178558 - DNA, 604 bp, Zea mays
  Clone ID: MRT4577_94430C.1
acaagcttttttttttttttttttttttttttttgcttttttttttttttttttttttttttttttttttttattttttttttttttcttttgtggccccgcttagggccaaacccagcccaaaggcggccaaaacaaagggcggcgcgcagggaaccagcccgcccaaaacaaaggcaaaagcggggcgcaagggaaaaaggggggcccagcacaggcccacaaaagaaaaaaaccaaaaaaaaaaaggggaaaacccggggcgccaaaaaaagaaaaaaaaaaacaggaaaggcgcaggaaaaaaggggcccccccaaagggaaaaaccgggcgcccaaaggggaagaaaaaaccgcccaacccacggaaaaaagggccaagggggaggggccccgctacacgaacccaccccaccaaaagggagggccggggctccgcccgcgagaagggggtccccccccccaaaagagggaactacggggccgcccaaagccaggggaaaaaaaaagaaaaaacacgggaacaaaaagccaaacaaaggcccccaccccaaaaaaggcccaaaaaagggcgagatcaaaagggggggcaccccgcccgg

SEQ ID NO: 178559 - DNA, 375 bp, Zea mays
  Clone ID: MRT4577_94431C.1
atgtgtatttatattacaggctggagactttggacacaacccgaaggccgagtacatgcaaggggggaggcctttgaaatttggggaaccgattatatgctcatgtaaaaaagcaagggggaggggcacctgagtgccaaattagacttaggtccccgctataattgagaaaaaaggatgccctggtcccgaggctatatctatacaaataaaaaaggaatgagattttctctgtcgcatgaaaatgattggcttgggacagacactgttggatcgcagaatgtgctgccgcagcagctcacttttggattgcaggagaatgatcagttctttgttttacattaaaatttaccctggaggccttgcacgtgattt

SEQ ID NO: 178560 - DNA, 1063 bp, Zea mays
  Clone ID: MRT4577_94432C.1
tgggaccctcgaggccggccggggccggccgggtcctctgtaacctctaccgtccgtcgtccagtccacccacgcgggcgaacagtgaaaggcatcgtctccgtctcgtgactcgtgatcgctggactgccgccgcccgccgccctcagcttagctcaatgattgggagcaccaagccgctcgcggcgccgctgcacccgccgtgcccctccggtcgccgcctcgcccccccgtcctgcgcccctgattcctccccagctctcacccccgccgtcgagaggccaggccagtctcagtctgacggcgccccgccgccaccacgcccggatgaggtcgcctcgtccctcgcgctgcgcgctagcccgcaactcaatcggtggtcccgctcgcgggcgctgcggtcgaaccgccggcctgggctggaaagcgcgctctcctcgtcctcggcggcgtcggtgaccaagacgtcgcggcccgaggacgctgcggtggcggtggaggatggcgaggacgacgacgtgtgcgtagagacggacgccgcgggcgggaaggccatctacatagtatcggacgggaccgggtggaccgcggagcactcggtgaacgccgcgctcggacagtttgagcactgcttcgtcgaccgcggctgcgctgtcaacacccacctcttctccatgattgataacatggatcgacttcttgaggtaataaagcaagcagcaaaggaaggggcactggttctatatacccttgctgatccttcaatggctgagtcaactaagaaggcctgcgatttctggggtgttccgtcgactgatgttctacggcctactgttgaagcaattgcttctcatatgggtgttgctccatctggaattccacgaagctctcctagtcgacagggtcagttaacagaggatactttcgacggattgatgctatcgattttaccatcaaacaagatgatggggctctgccacagaaccctcaccgtgcagacattgtactttgtcgcgtttcacgtacagggaagacacatttgtcatatatctagctcaaaggg

SEQ ID NO: 178561 - DNA, 730 bp, Zea mays
  Clone ID: MRT4577_94433C.1
ccagcagccgaaatcttctcgctctgcggccgggaccgatcattgaacacacgatcgactctgagcaactggaccgccaaagttgcccatcatgtcgctcgtctcgggagagaagtcgaacttccagttcattctccgtcttctcaacaccaatgttgacggaaagcagaaggttatgtacgccttgaccaagatcaagggtgtcggtcgccgatactctaacttggtctgcaagaaggccgatgtcgatctgaacaagcgcgctggtgagctcacctccgaagagcttgagcgaatcgtcaccatcctccagaaccccacccagtacaagatccctacatggttcatcaaccgacagcgcgatatcgtcgatggcaaggactctcacatccttgctaacggtgtcgactccaagctccgtgaggatcttgagcgcctcaagaagatccgcgctcaccgtggtctccgacactactggggtctccgtgtccgtggtcagcacaccaagaccaccggtcgccgtggcaggaccgtcggtgtctccaagaagaagggtggttaaactatttatcggtgttggttacgggtggacaggcgtgacggctggtttcatctttctgagcattctgagggttttgctttccggcatacgcagctatggctgtactctagatcagagtcacgaatcaaaagcattcaagtacaaaaaaaaaaaaaaaaacccgcggcc

SEQ ID NO: 178562 - DNA, 178 bp, Zea mays
  Clone ID: MRT4577_94434C.1
cgcgagctatctcgatagccgatggcgccggcgctcaaggtgtacgggtgggcggtctcgccgttcgtggcacgccccctgctgtgcctggaggaggcaggcgtcgactacgagatcatccccatgaaacgcgaggacggtgaccaccttctgccggacttcctcgacaagaacccct

SEQ ID NO: 178563 - DNA, 134 bp, Zea mays
  Clone ID: MRT4577_94435C.1
gtgacagctagctggctaccggcagggcgtggtgggaatcaacttgttgagatataggcgggactgctcgtgggtttttttgcatgcggtgccatggcacaaggccaatcctaaaccggccgccacatgggagg

SEQ ID NO: 178564 - DNA, 403 bp, Zea mays
  unsure (1)..(403): unsure at all n locations
  Clone ID: MRT4577_94436C.1
cggcatttatntggcanncaaaaggtaacttgctgtaanntagggctganntgattgttggagggaacgagagggtgtataaaggtatagatgctcagctagttactctcttggtgcatttttattggcaccaaaacatctagggctacatacaaccttacacacaacttgttgctatgcaaaccgttgcttgcctacatctcatgcaacacgcacgtgttctttcctattcagaccaactatgctgcatatgaagctctgctttcttatgttgcaacaaacaactaattacctattgcagtctagctaccatgttgctctactccccagcnaattttcttccatttcaactcaacttggcagtcatttgtaacctctctctgctttaatttacccagcagca

SEQ ID NO: 178565 - DNA, 384 bp, Zea mays
  Clone ID: MRT4577_94437C.1
gggttgaatacccggggagaggccctggagctcttttagatcgtaaagcgaggttgcctagggcggggctccatttccttccttggcagaagccatcgcatagacagagggaaggctggtccgaccggcgacgaatacgagttactacgtgaccgcacagacagtgaagacgattgataggattaaaatatccacttacagtaacgctaggccggggggaagcaaatgtacaagcatatgcatatggcggaaggacaaccgtaaatacaaagaagaaaaactggaagaaaaaactcgcacgaacaataagaccagccactacaactacagacagatggagcagcatagcacaaagagagagacaaatgtacctaatgagaggag

SEQ ID NO: 178566 - DNA, 374 bp, Zea mays
  Clone ID: MRT4577_94438C.1
ccagcttccctccggtgttggctgtccagcagatgtcgagcacctccctctgccccctgtgcttggcgctccttccctcggctccctgtttccctgtctccatggcgcccagtcgcatgcacggtcgagctccagcttcagccagccagggcgcggtggcccctgtccctgctccttcttcctcctcacgccgggctcctcctcctcgccatggtgctcggcaccccccccacaacagcagatcaccgacgccctctctcccatggtggcctcccttgtgatatctccccctgcagggcgcggggagcctccctgctcggccacactgtcggctggccatggcgccccccctgcaatcttccccacgctatctt

SEQ ID NO: 178567 - DNA, 343 bp, Zea mays
  Clone ID: MRT4577_94439C.1
aattcggacgaggctcgcgagggaaaggcacaatgacggcgtgctcctagcgggggaaggatgcccgcctggccttgctcccggggtgcgcggcgaccgaaacctcgcgcttacagcccacgtagccacttctcttagtgcgtgcgcgcggactcctgctacgtccggtccacctggacgcccgcatacctgtttgctgctacagtggacaccctatcggagccaagctttcctgctccagcctagcgctgaggtgctatgctccttcatttgcgaggagagcttactctgttatatgggggaccgtgacctgccgcactcgttcatgggtatatgctgcagg

SEQ ID NO: 178568 - DNA, 707 bp, Zea mays
  Clone ID: MRT4577_9443C.1
ccggccgggagccgcatcccttctttcattcgccgccgcctgctctctgctgccgtcgccatgatgagaaggactgctagatgatatcgtcagatcatgaacaagccataccccaagtccaggtactgccgtggtgtccctgaccccaacatcatgatctactatgttggtatgatgagaaaggatgttgatgatttcccctactgcgggcaccttgtctcttgttagaaggagaatgtctccaccgaggatcttgatgatgcccgtattgtctgctacaagtacatgatcaactctgctggaaaggatgacttccaccttcttctccggcttcaccccttccatgttcttcttatcatcaacatgatttcttgtgctgctgctgataagatcctcactgctatgatgagtgcctttgttaagactcatgacacctgcgctactatggacattgttcatgtcctcctttctgctcgatgctaggacaacaatgctgctcatgccagtgaagctcttcttcgcgccaacttcaagttccctgctcgccgaaagattattgttagcagaaagtggtgcttctccaagttcatccgtggcgactacctgaagtacaacagtgatgatagaattgttcctgatgatgtcaacgcaaagctgctcgtcaaccatggtagatttgataagagtgctcctgctaaggattttct

SEQ ID NO: 178569 - DNA, 442 bp, Zea mays
  unsure (1)..(442): unsure at all n locations
  Clone ID: MRT4577_94440C.1
acaacagtcacctccaacggggcccatagggaaaaaggcaaaaagggctaccacaaggtttttagtcccaggcggaccatgaaaaaaataggtcccaaaaaaaccggggggcccaggcttttgcccttggaaacccttatccgggaaaaaaaacacaaccccctttctcatttaaaaagtaaagggctccttcccccgaaataggggcagggcccaaaggggacgcctgggccgttattttttggacccccaccctcccggggggnccccaaaaccaactttgggaaaaaaaattaaaaccgggaatttggttccgcagggaagaacctccttccgtttttaatttttgccccccccggcaaaggaaaaacgatcccttccagggttgggaccaaaaaaggaatggcccgggggttccgggaaagctgacccgcccttgtaa

SEQ ID NO: 178570 - DNA, 3784 bp, Zea mays
  Clone ID: MRT4577_94441C.1
tttgaattcggcacgaggaagaactgaaaggacaaactgatcctggaactgtggtagacgctaatattgctgaaaagttagcacaacttaagaatcaaattgcgacacttgaaaaacgtgaagaaagatccaagccggtgtttccagagaggatctcggtattccggaaagcctgctgctcccttttcggtatgtcgatcgatcttaatcagctgccgttggatggaaatgaagatggtgtacctgaggctggtggagtctttccttttgtttctccacatcaaatactccattcttttgatctaaatatcccaatggatgaacaacaagagaacctgcatccagataatgaacttaatgttttggaggattaccttaatgattatggggtttatgccgatgttgacattgtgttcgatcaagatgagttgtcggattcagaagacaatgaagaagagcatgaaattcagctcggtagactagatctgtcacatacacaaaggcaacaaatatatgaagcactactggcgagaagtaataatggaaaacaaagaaagaacaacacaacgatagttgcaaaccagttcaatgttagccttcgtacagtccagcgtatttggaatagagcaaagggatgctgtcaacgtggtgagccagttgatgtttcatcaaggaaaccaaagcgttgtggcaacaaaaaaattggcaaaccaaaaaaggatgacgaaggtaacctaatctttaatggaaaaataggcatttggccttttgttagaaaggaaccagcacaaaggagaagccgtaatagggacagaggaacactagtgaccaagtgcatcaatgttgacagaaacactatgcgatcatttcttattgccaaagttctaccagctatcaaagcaagttggcctagatcagaagcacatagaactatatggattcagcaggacaatgcgaggactcatgttcgtcatgatgatcccgagtttgtaatcgctgcagctcaaacaggactgaatataagactcatgaatcaacctccaaactcacctgacatgaattgtcttgatttaggcttcttcgcttccttgcagtcccttacactaaacacggtctcaaggaatctagatgagttaatttacaatgttagcaaggaattcgaagattatgaccctacacttctaaatagagtgtacctgacattgcaaggctgcttgattgaagtaatgaagggaggtggaggtaataggtataagatcccccatatgaacaaagagaggctggaggctttaggcattcttccaaacagacttgattgtgaccgacaattatatgagactactcttcactccttgtccagcggcaagaacaattgcggcgagatgattctccggactccaccacagcggaagcgccgcgcaggctccggcgccggcgatgacgccgatctcggtcttgtcaaatccgtgggcgtcgcgagcgcgaccggccgtagtccggtctccgatcgccgcctggccctctacgaccgccccaccgccctcgcgcttgccgacgcccccggggagccgttcgacgacatggtctgcacgtaccactgccgccagatggtcaaatccgagttcatggtggcacttgacacggcagagaagcaagttcaggagtatcaaacaaaacttgttgccttggaggaccaattatctaagagtgaggatgaaagaatgcagtttctggataaacttaactatgtggaacaagaactggcagcaaccaaaggacgggagagtgcattacaggaacgcctactaaaggagttgggtgaatatcaggaacgatatcgtggtcaagtacaactcaataaagagattgattctaggatcagtgcagaatcatcagtatcatccgcgaaggcattgatcaaagacttggaaggggatttgcatcgattatctgaaagttcagaaagggagaagaaaacccttaagaaggaactttcatacgtgaaagaagacttatccctatctgcttccaaaaataatgctgagcttgagaaaacaatactcagagcagaaaactatgagagtgaggcaaagttgttgaacgagcagttgaccaacttgaaaaagcaacttgacgagtgtctcagtgagaagaatgaaatggagctcaagctattgaattccagtgctttgcctaatcaacatgccccaacagaagaacagaagttgatcaagcttttgcaagaggagctccggaattatgaaaaagaagtgcatgaagctaaaaggttgaaatcttcccacatgaatgttgagttgctgaaagaaaaactattggaggagcaggggcgcagggaaagagcagaacttgaattatctaaactgcaggaaattggtgctagagcacataagctggagcttgaattagcatcttgtacagcactgctcagcaacatacctgatgtgtcttcttatgctgacataccccaaaagatcgcagatctgcaaaagcaagcattgacatatttgaacgaagttggtgaggtaacatcaaggttgaaagaattagaggttgcactagaatatgctgatctcagcaagcaacaagcagaaggtgaagctgctcttgctaaagagagggctgcaagtgctactagggaggtcaagcggcttgagcttatgcttactgcgatcagtgaagaaagagataagctgagaaaggaacatgctacggagtcggatcagtctgggatggaaaaaacgataagagagctggagagcattatacacgagctgaaagaattgattagtcacaaggacactgaactcaatataatgaatgaaagattaaaccttgaaacaaggaaagtgaagtctttggagcgagagggagatcagctacgctctcaggtggcattactagagtctaagttaggtcatggggattactctgcttcaagcacaaaagtactgcgcatgatgaatactcttggagtcgacaatgaagccaagcagacaatagaagtactgcaagctgagctaaagaaaacaaaagagaggctgcaagcagttgaagaactgaaaggacaaactgatcctggaaccgtggtagacgctaatattgctgaaaagttagcacaacttaagaatcaaattgcgacacttgaaaaacgtgaagaaagatacaaggcggtgtttgcagagaggatctcggtcttccggaaagcctgctgctcccttttcggttacaagatagtgatgaatgatcagcagcagtcaaatgggattcccgtaacacgctttattctgcagtcagtgtatgcccaaagcgatgatgaaaagcttgagtttgactatgaatcaggaagcactaatatcgtggtcaacgattacacatcccaacaagaaattgctcggcaggtcgacatctacataaggaggacgaactccataccagccttcactgccaacctgacaatggagtctttcaacaaaagaagtatatgctgaagacatgaaactagtgtcagggcacattgcttgatttctgtatgttatcattgacgaagagtatgtatatgagcactcacattggtgggtgaaaactgctcctgctaattgaagttgaggctggagctttgattctaaaaaaaaaaaaaaaaaaaaaaaaaaaaaaaaaaaaaaaaaaaaaaaaaaaaaaaaaaaaaaaaaaaaaaaaaaaaaaagcttccggcttgtctagagttgagtgtagctaccaggtaactaggaatccttgattcgcc

SEQ ID NO: 178571 - DNA, 312 bp, Zea mays
  Clone ID: MRT4577_94442C.1
caggtttcccagccaagaacagcatcctggttgtgaaaatggcggctgtgcgtagctacttcttcatcatcgccgccgcgctcgttgccgtcgtcctcgcgcttctcccggccgacgccacaggtgccgacctcaacgtccgcttctacagcaagacatgcccgtccgcggactccctgccgcaccaggcgccggctgccgccttcaagaacaacagcggcatccccgccgccctcatccgcctgcacttccatgactgcttacccacgcgctgccacggctcgccgctgatcgactccacccccaacaaca

SEQ ID NO: 178572 - DNA, 532 bp, Zea mays
  Clone ID: MRT4577_94443C.1
acccgtacgcggacgcgtgggcggacgcgtgggaaaaaaaaaaaaattttatattttaaaaaaaaaaaaaaaaaaacagggggagagagaaaaaaaaaaaaaaaaaaatgggcgccccccctaaaaaaccctactttattgtcccctaaattcaaattactgggcccttaatttacatcacctaaacccatttaaccccccgctgtcccacaaaaaactgactggaaaacccctccctttccccaacttaatccccttgtaaaaaaccccctcccatcccccttgcccacaaccaaaaagcccccaccccaaatgggacccccccatttgcacaaccacaatccccattgtgacgcccccttacacccagaattaatactccacattcctaatgtctaccccccaaacccccgtctcatttgcccgccctctttaggcactatccttttattttccccccacactttaaaattaggtcccccgttttttatctgaaagttttcattttggggcccctttccgggaaaaatta

SEQ ID NO: 178573 - DNA, 700 bp, Zea mays
  Clone ID: MRT4577_94444C.1
aaactgatcctggaaccgtggtagacgctaatatgctgaaaagttagcacaacttaagaatcaaattgcgacacttgaaaaacgtgaagaaagatacaaggcggtgtttgcagagaggatctcggtcttccggaaagcctgctgctcccttttcggttacaagtcagtgtatgcccaaagcgatgatgaaaagcttgagtttgactatgaatcaggaagcactaatatcgtggtcaacgattacacatcccaacaagaaattgctcggcaggtcgacatctacataaggaggacgaactccataccagccttcactgccgagctgacaatggagtctttcaacaaaagaagtatatgctgaagacatgaaactagtgtcagggcacattgcttgatttctgtatgttatcattgacgaagagtatgtatatgagcactcacattggtgggtgaaaactgctcctgctaattgaagttgaggctggagctttgattctattcccaacggattctttttttccctttaactagcaaggcgtacatgagtattactgggcatggcgacgtaatgttgaagcttccggcttgtctagagttgagtgtagctaccaggtaactaggaatacttgattcgccaatcatgactgacgttattcctctgagagaacgagagttttgctgcagatgggcttctctgatc

SEQ ID NO: 178574 - DNA, 882 bp, Zea mays
  unsure (1)..(882): unsure at all n locations
  Clone ID: MRT4577_94445C.1
atattctgctcgtgtgaagtatttatttgcacgcccatgtatgaagacaaaattttcccgttcaccgtcgcttgattttcgaatcgaatcgctcattcattcctcaccgcctccatccccgctccggcctcccctccggaagtcccaaaccctaggaaccagctgaactgccgaagctttcagaaccccaggcggcaagaacaattgcggcgagatgattctccggactccaccacagcggaagcgccgcgcaggctccggcgccggcgatgacgccgatctcggtcttgtcaaatccgtgggcgtcgcgagcgcgaccggccgtagtccggtctccgatcgccgcctggccctctacgaccgccccaccgccctcgcgcttgccgacgcccccggggagccgttcgacgacatggtctgcacgtaccactgccgccagatggtcaaatccgagttcatggtggcacttgacacggcagagaagcaagttcaggagtatcaaacaaaacttgttgccttggaggaccaattatctaagagtgaggatgaaagaatgcagtttctggataaacttaactatgtggaacaagaactggcagcaaccaaaggacgggagagtgcattacaggaacgcctactaaaggagttgggtgaatatcangaacgatatcgtggtcaagtaatgaaaataaatgaacttgaggtacaactcaataaagagattgattctaggatcagtgcagaatcatcagtatcatccgcgaaggcattgatcaaagacttgggaggggatttgcatcgattatctgacagttcagaaagggagaagaaacccttaaaaaggaactttcatacgtgaaagaagacttatccctatctgct

SEQ ID NO: 178575 - DNA, 1374 bp, Zea mays
  Clone ID: MRT4577_94446C.1
atgtcgatcgatcttaatcagctgccgttggatggaaatgaagatggtgtacctgaggctggtggagtctttccttttgtttctccacatcaaatactccattcttttgatctaaatatcccaatggatgaacaacaagagaacctgcatccagataatgaacttaatgttttggaggattaccttaatgattatggggtttatgccgatgttgacattgtgttcgatcaagatgagttgtcggattcagaagacaatgaagaagaacatgaaattcagcccggtagactagatctgtcacatacacaaaggcaacaaatatatgaagcactactggcgaggagtaataatggaaaacaaagaaagaacaacacaacgatagttgcaaaccagttcaatgttagccttcgtacagtccagcgtatttggaatagagcaaagggatgctgtcaacgtggtgagccagttgatgtttcatcaaggaaaccaaagcgttgtggcaacaaaaaaaaccaaagtactttgctaaacaatcccaaattcattgaaatggataatgttatccatatcgatgagaagtggttcaatgcaacaaaaaagacaagaaatttttacatgctaccagaagaggaggacccatataggacagttcaaaacaaaaattcaatagataaattgatgttcttgggagcagttggcaaaccaaaaaaggatgacgaaggtaacctaatctttaatggaaaaataggcatttggccttttgttagaaaggaaccagcacaaaggagaagtcgtaatagggacagaggaacactagtgaccaagtgcatcaatgttgacagaaacactatgcgatcatttcttattgccaaagttctaccagctatcaaagcaagttggcctagatcagaagcacatagaactatatggattcagcaggacaatgcgaggactcatgttcgtcatgatgatcccgagtttgtaatcgctgcagctcaaacaggactgaatataagactcatgaatcaacctccaaactcacctgacatgaattgtcttgatttaggcttcttcgcttccttgcagtcccttacactaaacacggtctcaaggaatctagatgagttaatttacaatgttagcaaggaattcgaagattatgaccctacacttctaaatagagtgtacctgacattgcaaggctgcttgattgaagtaatgaagggaggtggaggtaataggtataagatcccccatatgaacaaagagaggctggaggctttaggcattcttccaaacagacttgattgtgaccgacaattatatgagactactcttcactccttgtccagtgagcatgctagtggaagctag

SEQ ID NO: 178576 - DNA, 583 bp, Zea mays
  Clone ID: MRT4577_94447C.1
agcagtggtaacaacgcagagtacgcgggaaatgggattcccgtaacacgctttattctgcagtcagtgtatgcccaaagcgatgatgaaaagcttgagtttgactatgaatcaggaagcactaatatcgtggtcaacgattacacatcccaacaagaaattgctcggcaggtcgacatctacataaggaggacgaactccataccagccttcactgccaacctgacaatggagtctttcaacaaaagaagtatatgctgaagacatgaaactagtgtcagggcacattgcttgatttctgtatgttatcattgacgaagagtatgtatatgagcactcacattggtgggtgaaaactgctcctgctaattgaagttgaggctggagctttgattctattcccaacggattctttttttccctttaactagcaaggcgtacatgagtattactgggcatggcgacgtaatgttgaagcttccggcttgtctagagttgagtgtagctaccaggtaactaggaatacttgattcggctattttgactgacgttattcctctgagagaacgagatttttgcttgc

SEQ ID NO: 178577 - DNA, 1528 bp, Zea mays
  Clone ID: MRT4577_94448C.1
cgaccagctccgcacttctctacttgttgagctcaatgggctcgggaaagcaaccaaggaacatacctttgtgacagccccattgattggcttcatttttggtttttttcattctggactggtgctttacaacaaatccaccatggccacacccgttaaatcactggtagtagtcggatacatcctgccaaagcctccttggttagcatttgatcgagcaatttgttcagaattcattacacctgcagtactagaagtgcttccttacagtatacattgcaattgtcacctgatgctgggaatattcagaatcaatgtttggatttgtgtttagtaaatttaatcactgggtcagcactgaacgtcatggttcagcagctgcttgtttctgttggctcccctagcaatgctcttgtgctcaagattccaattcagggtgttgtggatgcacttcataggaaaacactccagggcacaggtctgaatgaagagcaaatgagacaggctagcgtcgcagacaatggtcatcgtcagctaaacaagatacttgttgacttggatcaagataacattactgctaagaattatgcaattgcattttacacagagaagcacattcagattccatgcttgggcggtgaacacgaagttactttcttccatgagtatagagattcagttgaacgggtgtttgttgatcatccctcgtatcacagacctggaaatttatatggagctaaagttgttcttcttgggttccaacattatgcggtcatgcttggtacaactgtgatcataccaactgcacttgttccacaaatgggaggaaaatatgaggacaaagttgtggttatccagacattgatgttcgttgtaggtatgaacaccctacgtcagagtttcttgggtaccaggttgcctgcagtgactggcgggtcatacacttttgttctgtataccatttctatcatccttggtggacgttctgctaatgaacctagttcacacattaaatttctgggcatcatgcgtgggacacatggtgcgttgattgtggcttcagctttacagattatagttgccttcagtggcctttggtgtaatgttgccaggtatctgagttcactttcagctactcctttggtggcactagctgtatttggactgtatgagttagaaatttcaagaacagggaaaataaaggctttgtccgttgatgcagtaatagtgtttggatcacaaaggattcctcaggtcattcattcagttatgtggatcatgttcatcctctttagagtcatctggtgcttgcaattttcctgggatcctggtggaagtaattggtggaagtaatgttacacatcggcttgagggcaagccgcattttaagaaaagggggaatgttagggactgccggcccaatagcccatggtgcagcccaactatctgatgtcttgtgctacaaaggagcaaggaaacatagcagcagggaattattcagagaacagactcttggttattatgcttc

SEQ ID NO: 178578 - DNA, 797 bp, Zea mays
  Clone ID: MRT4577_94449C.1
gcctggcgtccatcgcggtggccggtctggccgtcgaccgctacggccgccgctccctcctcatgctgggaagcgccgttctgatcctctcccaggtggccatggcgtggatctttggcgcgcagctgggcaccgatggcggcaagtccatgccgcgtgggtacgcggtcgcggtggtggcgctggtgtgcgtgtacactgccgggttcggcgtgtcgtggggcccgatcaagtgggtggtcacgaccgagatcttcccgctggaggtgaggccggcggcgctgggcctaggtggcgccatatcgggggtgctcatcttcgtgcagtcacagtcgttcctggagatgctgtgcagcttcaagtacggcaccttcttgttctacgccgggtgggtggttgttatggcggcggccgtggccgcgttcctgccggagacccggggcgtgcctatcgagtccatgggcgtggtgtgggagaagcactggtactggaagcgcttcgtcaagctcaggccgtcttccgcgcccaccacagcgatggcaccagcaaaacaggcggatgggcccgtatgagttgggaattacggcggttcacggcgaaatgaaaacattaagggtctgttcggttgtaccggaacgagccaggattcattctagctcgtcaaaatctatataaattagagaagtaatccggctaggaattaatccggggctccaatccggaacaaccgaacagggcctaagacagatgtgttctgttgagtagataattgtgagcacatgcataattttaacttt

SEQ ID NO: 178579 - DNA, 377 bp, Zea mays
  Clone ID: MRT4577_9444C.1
tcgcccactcgttcgtccatttatccgatgaaaatggctcactgagcactggctatatatagagggcggaacgcactaagactaaaacaacaaaggatgctgtaacaaaaactggtacataccaagcatggaatggagatgctgaagatgatgctcaacataaactcacagggaactctgtctcccataagttaccattaatatttccagataaacctcaacgttcaaaggcattgattcaatgtcatggtgactcgatcgatttaactagagatattattgcacttgacaagatagtagtttcaaatagtcctactgcaaaaccagatttgttgttggacctcataggaacaatatacacaacatctatagttcca

SEQ ID NO: 178580 - DNA, 302 bp, Zea mays
  Clone ID: MRT4577_94450C.1
acagtgcatgctgaaacgcctgtgctgagggatggaaccttcacgattgcatgtgtacagcgacaaattgcagccaagttccttggaatctgacggtgacaagaacgatcaatggctaccactatacttgacttgcgattgatgtattgcgcctggtatcatcgcgtactatttggtgagagcattgactacattgatgtcatgcttccacggcgagatcattgtaaagtagtaagacgagcttgacagcaatgtgaatctggtgatgctcgatttcaaacttgagctggacaccttagacc

SEQ ID NO: 178581 - DNA, 388 bp, Zea mays
  Clone ID: MRT4577_94451C.1
gggaaaggaaaacgaaacaacaattcggggaaattttaaaaagtttaagaacaaagccaaaaggggggaaaaagaaagaaagaaagattttggccccccaaactaggaaaagaaaacagaccagcacaaaaaaaggggggggggggccaagccaaattaaacccaatcactaacccggcatgggaggggttgcaattgcagcgggaattgccaaaacccttaaaaaaccttttttccggtaattttttagggggcagcagccagtcactgataaaacacacacattcaggaaaagaaatggttgcgggtaacaccaaaccccggggaggggggtccttatgccccagggaccctccaaaccttaaaccgctgccttggtaaacttggg

SEQ ID NO: 178582 - DNA, 458 bp, Zea mays
  Clone ID: MRT4577_94452C.1
ttgggaccctcgaggccggccgggtaatcctctcaccaatcccatagccctgattatatgaccgttgacgacgactcccctagttaccttccagttctttatccccctcaagactcttgctactaaccactcgaatgatccatgcgccgggcttgtatactactccactatcttccagcgcgaggccccatgatcacacccgacttactgcccagatgatgaaggatacttcaatgacattcttgccttgcactacaattatccacacagaccgccatcaccaagatctactgctgagactgggcgtccgaataaccatcatcatggaagccggtacctttcgattcttcatcgagctgctgaaaatcgcaacgcctatgaaggttgcccgcgaactgattcagaccctaccacaccgctgaaggcatcgctctgaggaacaatcccatcgtctcgag

SEQ ID NO: 178583 - DNA, 199 bp, Zea mays
  Clone ID: MRT4577_94453C.1
aggttatcgaaggcttggacatattgtaacgctcggagatcacagttgccagagtgtcactacaaaaaacagctgtatcatttttacactcatacgaccatacagtgccaaaaaaccaaaaggattggcatttgaaaaggccaaccgcaggttcattaagacttaacccggacgtatacggcgcgaccaccacttttac

SEQ ID NO: 178584 - DNA, 217 bp, Zea mays
  Clone ID: MRT4577_94454C.1
gttgaaagagcgagtactcgcagttgactcgcactctgcgtgcccgaatctgtgccgcggtccggatcagaactaggtgttgaggcgatggcaagcgtaagcaatggctcttggagcatctaatcaattcttgccgaatcactagaggccgcagatgtcaatgctacgcttcacattcgttgcgcgaacgactgcaagttcactgggcatacggacc

SEQ ID NO: 178585 - DNA, 206 bp, Zea mays
  Clone ID: MRT4577_94455C.1
tcgagcattctctatataaaaaggcacgcactcgaacactgtatgttgcatttttctttttatgcaacgcacacaaaaaaacacacaaccctatacggtttcatgcaaggcctacaaatcatcttactagtgaaacacaaacatagccatacatttctctactcaacccaacaaaaaaacctaaatgtatcaagagaagctagcat

SEQ ID NO: 178586 - DNA, 140 bp, Zea mays
  Clone ID: MRT4577_94456C.1
gcgcccactcgtacggccacgcgtccgatcacgcgtgcgatcacgcgtccgcagaaaatggcgtcacttcttcgccctctcgtgctcgtgctcctgaacgggttctgcgcagggcagcaagcaccaccggcgcaggcccc

SEQ ID NO: 178587 - DNA, 916 bp, Zea mays
  unsure (1)..(916): unsure at all n locations
  Clone ID: MRT4577_94457C.1
cgcgtgggcggtcgcgtgggcggacgcgtgggcggacgcgtgggcggacgcgtgggcggacgcgtgggcgaattcggcacgaggcgcgcagtcgcccattccgcatctcgccctcccgtcccgtcccgtgccgtacgtccgttctccgattggccgccgcccgcctcgccctcctcgtcaacaaaagcccaccgcaagcgagcgagcgagccaccctccccgccgccgccaccgcccccgtcccgcccccaccccgactcctcctgaccgccggcgtggggtgcccgggctccacctccggcgacgacaccctccccgccgcgcgcgcccccaccgcctgctccgtttgcgggggtagccggggctccggcctcggcggctttcaaagccccctccctcacaacaggatccaaaatcccgtcctagacttcttctacctccccttccagaacttcctcttttggcatcccggacggtcgatctcgacccccttcgatttcgattcatctcttcttatcgattgatctttcttctagcttatttcgtatactgtcattttgattccttccttcttcccgccgccggtagctaatcccaaatcccaatcgaatcgactcccccctgttcgtcggattctcttcctccgtccgcacccagctaacgccaccgaaaacagaaaatttacccgccgcccaaaaaaaaaacagaaaggctaacctccttttttctctctctatctttctctccatctggggacttctctcggttttgtttgacgagatgcctgcgctcgccgtcgacgccgtcgcccccggggcgcacgcccttcgcgtccttgcgcggcggggcgcttccccccccctccccgcttgggccctctccgactggtccgcgntccccccttcccttgccccct

SEQ ID NO: 178588 - DNA, 344 bp, Zea mays
  Clone ID: MRT4577_94458C.1
ccggccggggaccaccttcccccaatcttcactccttgtacatcaacaaaccaaatgtccgcactacgcaacctgaatctatgaaacctccacggtacttggcagatgcacacaccctgcgaattcctcatcgctcggcgaagcacacggaaaaagaagtgaaactgtcgcgtcacgcgcacatcaacactcagcacacattctgaatgaaattgcaccatgagagtcttcaggctaccaacaatgtgtgtgctgataaaaggaattaccactacacggcgtcgtggattagaccgttcgcaccctggatggaatccgtatgcgataaaatgagacaacctccc

SEQ ID NO: 178589 - DNA, 295 bp, Zea mays
  Clone ID: MRT4577_94459C.1
gactacgatttgggacattttttgaacagagaggagtagaccaccgggcggggcgcttgcctaaaggggcgccttccggttaaaaaactgtgtgaaacctaaaaaaggccgtttttttacactcctgcagcggggcaaccaattcagaggttgcggggccttgacccacggggggcacatacccacggggcccatagccccgccgaggggtccgtactgacccaacggacgggcccgcccctggagaagacggggcccggtccacgaaacccttggagctggggggccctgatcc

SEQ ID NO: 178590 - DNA, 323 bp, Zea mays
  Clone ID: MRT4577_9445C.1
gaggcagaataaactcagggcctttacaggtccggctcccatacagagcgaaattctcttggtcagttccgccacacagtacctgtaccaaagatttggcgtataactctcaaaaaagctgagccctaaaatttcaattgaaaaggccaaggattgattacaagcttcctacatgacgcgcatgactgtatcacataaagccttgttaagctactgtaaggctgagcggcgaacaaatgcggtcttcaatcacatgtggggggttctttggtggcatctattctggctaagaatcgatgctggaatatttaagcaatggcatg

SEQ ID NO: 178591 - DNA, 459 bp, Zea mays
  Clone ID: MRT4577_94460C.1
gatgcattcatcctcaccggcgtctccatcgtaatttcctcagacagccgcaccacaacgtctgcctccgtagggtgcttgcttgaatcattacaatctggtagatttagtggtcgggctttacttcctactattcacaaacacactaccgagaagtctttaggtgcaatcaaagattgtgtcactgaacttacaaaagctccttgccgctagctacctcatgtgtaagaaaagcaaagtgttgcttgacctcaatgaagttagatacgacttgcatggcaaactccaaacagaatatccgcaagttggttaaggatggatttatcatcaagaagcctcataacatccactctacatcccatgcaagaaggacacatgacaccaatcaaaacgcacgccactcaggatatagcaagcgtatgcctaccagggaagctaggctacccaccaagttctatg

SEQ ID NO: 178592 - DNA, 816 bp, Zea mays
  Clone ID: MRT4577_94461C.1
attatatttttttcgaaatcatttcatttcttgccgaatgttttctgggcactgaagctccctgagttatctgatttacttcattgagctattcgtatttcctctttgatagaagctagtaacattttggaaccctaggtaaactagtttcttttcctggatctctgaactgaaatgtggaggtcaggtcacgtttatgcatacaattcttcatatggtggtagaattatcaattgttggtcgcgaagctttggaaaaagagcaagttattctagaacagtatgagagagcagggtttgttatgtttgcttgtatggcatctgtgcttttctttctcttggtggagtcaaagtactaatatgtccaaattcataattactgaagtgcgtattagttgtacttatgctgcatagtactgtggcaatagccaaacaatgagactgaaagtggtactgtaaatgcaacaaaccaagtaggggaaattgtggtaatagtagacaactatgcagggcaggccgttccaaaatgacaagtggtcggtgtttgtaaaagtagcctgggatctaggtctttccttcatatggaactgcaagcttcaaacatcttgttttcttatatatgcagtccatatggatcattcattcaaatggtaaatatgatgagcaatcatagttctttgaagtgaaactatagttttactctttttcatatacattgtttgaaccattcctgccttttttttttggggagataaagagcacactacagtacgatcattttagacggcttgccgacgaaaatagatcatatgatgct

SEQ ID NO: 178593 - DNA, 373 bp, Zea mays
  Clone ID: MRT4577_94462C.1
tcgcgatctagaaccggacgcgagggtttttttttttttttttttttttttttaggccattccaagcttgttgattagcaaactacaggcgttacatggaaaataaatgtaccaacgatgtcattcagacagcaatgcaacagacattgggggggggggggcggggtaccttttcattccacacattcaattccccctattgagggaaaccattcttgtagcacttcccacatgcagaaggtaaaagggacccagttatgccggggttgccttttgtatggtgcggctcaaaagatacattccccggttgccaggtcgattgcagcttcctattttccatgtgggggactggccttcccgggaccctggccat

SEQ ID NO: 178594 - DNA, 648 bp, Zea mays
  Clone ID: MRT4577_94463C.1
gacgtctccaatccttcctctccccactccgcctccttccgccgtccccgctctccgcccaccggagagctcgccgcggcgcggcgcggcggagccgagctctactcctcttcccgtgcctttctttccgctccctcctgagtcctccctctgaatctctcctatagcctataccacaggctacagctgacgcctcgatcccgcccccgcccccacacgaccggccgtcaccgttcttcctcgccgggacgtcgcgttcctgctgtatccaccccgtccgcggtctttggccattgggttttgagaattcaagaagttggaaacatgagctactgccaagctacaacgtacaagcctcttggtgggctcactttggacagaccattaggtcttgggagaacttgcaaaatacttcctcaacattctgtatggcaacatttttctagatcttgcaagctgcaagagaaagtatatccaaggcttgttgttgctgcttgccataagaggcttggtcctgtatatgcctcaagcgggaagggaaaccttgattttgtcaatgatccattctctatggaatctttgaacaaagcaatggatggagcaaaaaagcaacagtctatacaaggcttcctgatggagcaaatagct

SEQ ID NO: 178595 - DNA, 182 bp, Zea mays
  Clone ID: MRT4577_94464C.1
tcggaataaatgaatagaaaatggaattttagtgtaaaaataaagggcttgggcttgttcatgtgatagtaaattcatattgatctccaaatcacttcatttgatttcttgatatttctgtaattttattctcaatcacttaaagatactgtgttgtatgaaaactgtatttttaattattt

SEQ ID NO: 178596 - DNA, 797 bp, Zea mays
  Clone ID: MRT4577_94465C.1
ctcggccggggccgagttctgtagctagagcttgtaacccgagcggaggcattaggctgtctcccgcaacgttctctaaattccatcctttaaaagaatattctccagcatcggacaccatttttaaaaaaaaaaatttatgaaatggggaggagaggggtctcgcctaatctggtcacttatagttcactgattgatggactgtgcaagggtggacgtgccacatcggcattagaattgctggatagaatgatcaaggagaagaaactgccaaatatgatcacatatagctcggtggttgatggactctgtaaggagcacatgctgagtgaggcaatggagatcttggaccggatgcgactacaggggaggaagcctgatgctgggttgtttgggaagctaattgttgggctatgtgatgcaggaagggctgtggaggctgcaaattacctggatgagatggttcttgccggtattgaaccaaaccgggtgacttggagcttgcatgccaggataaacaataccgtgctgacagcattatgtgataagggtgaacttggcagggcttttcaggtctaccagagcacaaggactcgtagtatttctaccgacccaaccactttccatcttcttgttgagagcttctccaaaaataacatagagaaagctgcccgtgttgtgcttgacatgctgtcagagagatgcatccctgagagggagacatgggatgctattatcagtgggtattggagcaagaaaaaggtgaggcaagaagccagggaatctgggaccattta

SEQ ID NO: 178597 - DNA, 186 bp, Zea mays
  Clone ID: MRT4577_94466C.1
cgaattggagtttcgactaggcgtaccgtgacgcgtggtcagactcgttggcacgtgattgcacatcacggcgcttgcagccgtcagcggggggaggcgtaggcttagcatctttagagggcggtccgcgagttctacatggacacgcgctacgtgccatgcctcggcgttacccgaccccagctg

SEQ ID NO: 178598 - DNA, 246 bp, Zea mays
  unsure (1)..(246): unsure at all n locations
  Clone ID: MRT4577_94467C.1
cccacgcgtccgnttttttttttttttattttttttttgtcgcgtgggattgtgtacatgatcggtacgattattgatatttccagtgcagttctagtggctgacgagatcgtggagcatgctgtattcttctaaaaagaaaaaaaaaagtgtctcaaaagacctttggctccacaaaaatgacgtaggggggttcatccctttttataccaccaatggcataatacattttgaaaacttttaaat

SEQ ID NO: 178599 - DNA, 430 bp, Zea mays
  Clone ID: MRT4577_94468C.1
atagactactgttataatcgcaacctgcattgcattcgattgataggcaagcagcggatgtcgtctgctcctgccgctcgggcagatacttcacactgggagcgtcagcagagtaagaggaggaggatgtcgatatctgagagcgtacaccattcaggaggtggccaagcacaacaccatacgacgagaggtgcgtgcacatctgggggaacgagaacaacgcgaccaagcatgtgcacgaccaccctggacgggacgatgtgatggtgcgttgcactgggagcgatgataaggactgtagccaacatccgaagaccagcaccaccggcccggcagtggtggaccacaaccaggtgggcgagatcgatgacgctacaataccaagaggggcgaatttgaaccacaaggtgtggttcccctccgctcgagg

SEQ ID NO: 178600 - DNA, 398 bp, Zea mays
  Clone ID: MRT4577_94469C.1
aaaaaaaaatcctaaggggaaaaaatgggtttatccggcaccccatacatatgcaggtccattaagtatcacgggctaaccattgggcccagggaaacattaagtaggggacaggcccccccatgtaagggtccatcaaaaaattccgattttgggcagtatcacaggctaattttaacagctttcatcacagcccagtttttaaatcctaatgcaaggccttaataaggtatagcctgtcaaaattctaaccaacacccccgttaatatggttgcaaaaactgcaaatctgattagttactaaaaagccccccaatggggagggctaagaaataggctaaaaaaaaggatgggagggacctttttttgggaggggctcctaaccagcggctttcctc

SEQ ID NO: 178601 - DNA, 222 bp, Zea mays
  unsure (1)..(222): unsure at all n locations
  Clone ID: MRT4577_9446C.1
cgtagcttgatcctcttagctgccgccctannttttatcccccnaccttttgggaaaaaagggtttcttttaatcatcatcggggaaacaaacccaatatacctcccgcaaatgcatgaaaccaaattaattccttccaaaaggctaaggctcagccaacactatggttggaacttccgaattactgttgctaatcggggaaaaaacaggtcttttttttac

SEQ ID NO: 178602 - DNA, 279 bp, Zea mays
  Clone ID: MRT4577_94470C.1
cccacgcgtccgcagcaagttcgttaccaggcacatctgggccgatagaagatggagagaggcctgccatgggcgccgcagtaggcaccaatccctcggggatagggaatccgaaagctgcagatagataggaaaaaaaaagggaacgtccactgaaacttagaaacgtgatcaagccatggtcttagttaaaagtgagatatctgaacgagtaaattagctgctagagcgacttccagttccatttcgtgagtaattgtgtcgtcgtaacgtgctaaa

SEQ ID NO: 178603 - DNA, 360 bp, Zea mays
  Clone ID: MRT4577_94471C.1
cccctaaaaaggggggttaattcaagggtcccataaatataaaaaaaaggctttaaggaaaaccccaaaccgattataaaaaatacctacccctccaccaattaattaaaagggcttaaaaaaaagaaaccaccccgcccggtttaaatctgcccaaaaaaaaaaaaaaatttgccttaaatctagcaaaaacccccggtgggttttatttttaagggggcaaccggatttgggggccctaaattcccttttttttttgggaaccaaagtttttgggggcttttttggggggggggagttttgggccttaacagccccaaagccagaaaaaagaaggcccccccctgcctggggtaaaaa

SEQ ID NO: 178604 - DNA, 316 bp, Zea mays
  Clone ID: MRT4577_94472C.1
ggcaattgcacattccaagagcataccgggcggggcgttcatatatgaatgggaattatttgttatcttattaggcctatcctgaagccaaaggaaatgagatcggaattcctcagggaattgcaattccacattttcaagaaatacggatgccaaactgttcatatatgaatgggaattacatgtgttcttataaggcctatcctgaagccaaaggaaatgagatcggaattcctcggagaattacaactccacatcttcaagaaataactgtgtcaaagatattcatatatgaatcggaattatctgtccactt

SEQ ID NO: 178605 - DNA, 205 bp, Zea mays
  unsure (1)..(205): unsure at all n locations
  Clone ID: MRT4577_94473C.1
ccgggcgcagcatgccgttgttttttccgtccgaccgtccccgggtacntgcttacggggaggacgatccagctgacgccgggcgcctgcctatcctatcctatccgtcctcgacgaccggatggtcggcgggcgggagggcggtgcggcgagggttttggccttttgggttctttgtggataatcactaatggggggggggggg

SEQ ID NO: 178606 - DNA, 1667 bp, Zea mays
  Clone ID: MRT4577_94474C.1
cgacgacagaccccaaaatccagtctttgaaaatgaactcttttcaatcttacaacactgactacttttatgctcatggtgctcaaacccaaaacttttgtgccgaagacctactcaacttcgacagcaccgtctttcttgatgactctgaaagtgaatccatctccactctccaaagtggatccaagaaaatcaccaaaacctctcctgctgtccaagccaagcaagccagctacaaaaagagcaagagagcaagaaacccatggactcctaaagaagatgccaaattaatggagctcatgaagaagtatggccaaagctgggctatgatctcctctcaattagaaggaagaaccggcaaacaagtcagagatcgttacctcaacaagcttagaccaaatattaaacttggtgactggagtgttcaagaagatgaacttgtcgtcaaactcttgaaggaagtaggcaacagatggagtttaatcgccaaccatctccccggcagaactgaaggacaggtcaaaaacagattctattctttcatcaaaaagagattacaacctgacggtaccctttgtcaaatctccgacagcagaactagttctgaagaatacactagcttctccaactctccccaacccgaaaccggatttgactttggctatgaatttgatgtcaatgctgctaatggatccgccatcaactttgctccccaaaccttcaactgtgctatcacgaagggcgcttatgttaccgaggaagaaatctattctgaaggaagcaccactcaaggccccacctcccaagttggaaacagccctttcagaggagaagtcgaccctactgatgtcatttcctatgacctccctgaagctttcttctataagcaaccctcccaacacagacatttcaacctcgcccctattgaacatgatagccaagttgatgctattcttaccaatgttaccaactactttgctgaaaacaacaagttctacatgccttctgaggttgattcctttttcactcaagctgaaacccaaggacaagctcctcaggatgatagacttaaccaattgagcatgagaaaggcttatctcgaattagctcttgccaaaaccctcaacgaaatgaaaagcctttaaatgagcggccagtccatttagcaccatgctaaactgaaaaaactatcttgtcttttgtctctcaattttttctttttagtctttcgaatctcagtccagcccttcaaataaattatctttttctgtcttgtttgagcaaaccaatgtcttactttatatgtctagtctagtctcgtctcgtttcatatttgtcttgtctcagttttatcttttgtctcgtctttatttgtcttgttttaacttatgtctctaatcatctttataagtctatacttgcaaaaacctaaatacgaaataaataagtaatccattcattgtcatttatgcataatttgtaatattataattatgcataagactttgaatttaaaatctttctttcttctattcataactttatattggtattacatattttttgtaaagataaattgattaaattcaattcatttgcaaaataaaaaaaaaaaaaaaaaaaaaaaggcgccgtctaaggaccaagcttacgacgcggcaggacgt

SEQ ID NO: 178607 - DNA, 1002 bp, Zea mays
  Clone ID: MRT4577_94475C.1
tgcgtcagcgagcccggactccactgctcgcaccaccaccgccccgccgcggcctccgcctccgccccctccaccgccaccgccgtcctccatcttctccgccacccccgcctccaccggctcgacgatctaagaaaccgccaccgcctccgtctcggcccgcgcctccagcaccaccgccgccgccacaaccagtcaggacacggccgcagcgcgcccacgtgcacgcgtccacacagcagccgccattgtacccgaggcgcgtctactacacctactacccgctcccgccgccgtctccaccgctacctccacctcctcctccgccgccaccgctggtgccagagggcgaggatgactccccttcggtcacggcgtcgccggcgccggcgtactgcgcgagccccgacgtgaacacgaaggcggaccggttcatcgagagcttcccgcgaggggctgaagctggagaagctcaactcgtaccgggagaagtggcagaggcagatccaagagaacgccgccgtcgagatcggggaggaggaggagggggagttcatggtgatcgggtccctcttcggcgacgacgacgaagaggacgaagacggcatctccttgccgcagacgccggcgaccgctgtcgccgtcggcttctaacgacactgacgttgaaggaaaaaaaaaaatccccgagaaaatggagagaacaaagatagcacaaaagagagtttcttctggctgctaatcctggtttgtctacagtaaaagtactgtttttgagtgattttctttttcactagtttcgggtttgggtaaggaggaattgatttcgtgtgtgtgagagctgcggaggccttttgtgcttattttaaaatggcaaaaaaggcgctgtttgggtgttgcattagttgagctgctgtgagtttcatgtctatgcacgagcttttggagttgtaaaaaatatacaatgagtccatgatgaacaaagtaacacatctttacccc

SEQ ID NO: 178608 - DNA, 382 bp, Zea mays
  Clone ID: MRT4577_94476C.1
cccacgcgtccgcggacgcgtgggcggacgcgtgggcggacgcgtgggccccgacgacggcgcgcacgggctgtaccggctgtggacgtgccaggactgcgcgggcgacctgggcgagtttcccggcgacgaggctgccgcggccgacggcccttcggccgcgcgcgcggcccgctcgccgacgacgctgtcgcacgtcgtgttcggcatcggcgcgtcggcgcggacgtgggaccagcgccgcgggtacgcggagctgtggtggcgccccggccagatgcgcgggcacgtctggctcgaggagcagcccgcgagcccgtggcccgcggcgacgtgcccgccgtaccgcgtctcggcggacgcgtcccggttcggggaccgc

SEQ ID NO: 178609 - DNA, 359 bp, Zea mays
  Clone ID: MRT4577_94477C.1
gcgcccacgcgtccgccgtgatttttctttgcgcaacgctgctgtaagcctgtaatggtgaattgctagctatggttatgccgttatgaaggaagaaagtgtatgcatgcatggtagggtaaagagtgggtaattaatatcgttgatcaaaaaaaaaaaaaaaaaaaaaaaaaaaaaaaaaaaaaaaaaaaaaaaaaaaaaaaaaaaaaaaaaaaaaaaaaaaaaaaagaaaaaagaaaaaaagctaattacttgaaaaaaaaaaaaaaacaaaaaggtgcgacctttttaaaattaaatgctgctggacagacaaatggcggggccgtaaatttttatagggttaccaaattttaaaa

SEQ ID NO: 178610 - DNA, 1503 bp, Zea mays
  Clone ID: MRT4577_94478C.1
aatgaaatggctgtaagaatagaagataaagatgagaggatatcaagcctggcgaaactcttctttcacgagttgtcaaagaaaggaagcaacccaatttataatcttcttccggatatcttgggtagactatgcaatcaacacctcaaagaagaaacattttgcaatattatgcagttcttaatcaactcaattaagaaggacaaacaaatggaagctcttgtggataagctgtgcaataggtttgctggagtaaatgatgtcagacagtgggagtatatttcttattgcctttctcagctaaccttcactgaaaagggcctgaaaaaactcattgataattttaagatgtttgaacatgcattgtctgaagattctgtgatgaaccacttcagaagcgtaatatcaaagtgcaagaagtttgcgaaacctgagctaaaaatttgcattgaggaatttgaggagaaacttagcaaggttcatcaggaaaagaaagaacaggaggaaacaacaaaaaatgctgaagcacacagacatagaattgattcgcttgatgaatttctggttactaaggaagttagtgagaacagtgggaattctgctgaagatgaaactagcgaggtagtcgatccttctgtggatagcagcacggaacatatggagaacacgccagaatgcagtgtcaatactagtgctgagaattctcagacaacagccccacttacagaatcagaaggtggcggtgaagagattcaatccgcacaacctgttagcaaaggcatgtcacggttaagggcaaagaaaaccagagatcctgttgtagatccttcggtggaccgcagcaccgaatatagggggaacacgccagagcacagtgcggatactagtacggagaattctcagacatcagccccacttacaggaacagaaggtggcagcgaagagattcaatccacacaacctgttggcaaaggcgtgtcgcggtcaagggcaaggaaaaccagagaccccgttgtagaggactcagcagctccagtgagacgcgccacgcgttcaaccagaagacaaggaagctgatggtgcagcaaagcggcagctcaagccattccgtgccgatctcgcctcgaggtcccggagtactggaccacagcaaagcggtgcctggacgtctggatcggagagttggctggctctatcctttttgcgtgatgcgtgtcggtctagttttagctcgctgattcccggacaggccaataatgatctcccgtgaatctgtctaggggcagtatgtttaactgctccatacgaggagctcttgtgtttggttgttgcagtaggtcggcttccatatggattgtctactacagacaatgctcccttggggagcgtatgtataatatctggcctgatctttttgaggcctgatgacgctatgatatttttgaacgtgttgttcttatgaatccagcaggctcagctgatttccagcctttcaatgtgacc

SEQ ID NO: 178611 - DNA, 324 bp, Zea mays
  Clone ID: MRT4577_94479C.1
tcggcccgaccgaccgttcaacactccatgttccaggcggacgggggcgtcctaccagtccaagcctgaagcctggaaggacaatcctgcgaggcggtggtactcactcctcttccagtgccaggccgcaagcgcagccggacaggcggctgcaggcacacgcgcactggcgcaccggggtaccgggcactcgcgcaccagcaggcagcagccggccagtcccactggttcacaccgccccgaccaacctttacacctagtcgggccaaccccacgcacggacgttgaatcaggctagtccttccagtctcccactcccaggca

SEQ ID NO: 178612 - DNA, 259 bp, Zea mays
  Clone ID: MRT4577_9447C.1
atggcaaagaccagggttccttttgggaagggggatccttttgaaacaaaaaaccgttgacaaaattggggggggggcccaggcccgaccttttaccccggtgcaattttccggaccccaacccaaggggggaccttcgggttagggtaatttcccaagccccctgccatcggtcccacggaattaatcttcccccaaccactgaagggcacaaatcggaaattttttagctctaaaatctcaaggagtccgaacccaa

SEQ ID NO: 178613 - DNA, 765 bp, Zea mays
  Clone ID: MRT4577_94480C.1
cacgaccaaagaaaaccagagatcctgttgagatccttcggggaccgcagcaccgaatataaggggaacacgccagagcacagtgcggatactagtacggagaattctcagacatcagccccacttacaggaacagaaggtggcagcgaagagattcaatcgacacaacctgttggcaaaggcgtgtcgcggtcaagggcaaggaaaaccagagaccccgttgtagaggactcagcagctccagtgagacgcgccacgcgttcaaccagaaggtacgtacgtgtacttacttactcatctctctgctcgctggtgcccgcttcatttccgccctggatgattaaaggaccgcaggttgttgctttgttcacacggcatgccattctattcttctagtcatgttcggttcgtaccccatcaatcacttggtaaaacaaaacatattccgacgaactgtgcagacaaggaagctgatggtgcagcaaagcggcagctcaagccattccgtgccgatctcgcctcgaggtcccggagtactggaccacagcaaagcggtgcctggacgtctggatcggagagttggctggctctatcctttttgcgtgatgcgtgtcggtctagttttagctcgctgattcccggacaggccaataatgatctcccgtgaatctgtctaggggcagtacgttaactgctccatacgaggagctcttgtgtttggttgttgcagtaggtcggcttccatatggattgtctcccggccgg

SEQ ID NO: 178614 - DNA, 202 bp, Zea mays
  unsure (1)..(202): unsure at all n locations
  Clone ID: MRT4577_94481C.1
ccgagggaaagaagcccgcnntnngctcgtcacgcgccgggctaggaagccggaggcaagaagggcagggtcgtcatggtgacgcccagccggcgannnnncatcctgcgcaggctcgacgatgaattcctcaaggcatccagggcgcgcacgaggtgtccaagatgttggaggcagcaaggatgcattatcactccaattt

SEQ ID NO: 178615 - DNA, 393 bp, Zea mays
  Clone ID: MRT4577_94482C.1
acgaagcattagtacaatcttacgagatactcatgctgctataatacacaacgaccaagccattgtcaaggacactaatccagtcatggccaacggaagtcgtactgtcatcacagcgcacaacccatctgccatgacagggcacgatggatcatgtatgaaatgcactcctgtcacaggtaggaaccgcaccagcgtaacagcgaagatgcgagacagagagacaaagactgtaggcaaccgagagctgatgactgcagacaagcagccagtacagaactagcaaaacgagccagaaaaggactgccagaacgccatgatgacacctgtggagtacatcatgatgacacgcatgtcctacatcatcatcatcctcatgatcaccttcttcaa

SEQ ID NO: 178616 - DNA, 686 bp, Zea mays
  Clone ID: MRT4577_94483C.1
ccggccgggtctgaagaggagaagcttgaggtgcccgctatcgagcgccctgttgctgcccctgaagtttctgaacctgttaacgccgcccctatcgatgctgagtttgagtctgaccctgaattcgccttgttccacactgaagccgctaccaccgccaccgagtcacctgaggagtttgactctgaaggtttgtcgcacgtcgacatctttggcggtgttgagtctgagaaggtccttgcgcgcctggaactcgtcgatgctggtgaacaagaatgcacagccgcccttgctatggctcgtgtgcaacgtctcagcgccagctgtgacgctgtgacatcaagattagagttgcttaccatggacctgtaaggtttggcataatggtcgaccggggagggcaaaagggcatacactaagcgctttttatttcttgtttatttctcatttgtgaatattgggaatcctacagcggattaggatggaactcggcgtttggggcacataggatggaccacccacgagaggtgctgctactgcataacatgcatgcttttctttggtttagtttcagaacgaatgatgacacaggaaacttgtgtagctagatagaaaggctcgtcgccgctcgacaccacaatccaatatttgaaggatgcaaaaaaaaaaaaaaaaaacccgcggcc

SEQ ID NO: 178617 - DNA, 533 bp, Zea mays
  unsure (1)..(533): unsure at all n locations
  Clone ID: MRT4577_94484C.1
taaaaaaaaaaaaaaaaaaaaaaaaaaaaaaaaaaaaaaaaaaaaaaaaaaaaaaaaaaaaaaaaaaattttaaaatttaattaaaaaccaccctaaggacaaattttcctattttccttttcccttgggcgtcctttaaaccttccttttgggggggccccatttccccctttttttgggggggttttcttttaattgtgccggttttttccatccctctgcttgggaaaacccggggtttccccccttttttggccttgggtttcacccccttttgcccccttgggctcttaggggaaggggccaaaccctttgtctttcccatcttttgcccttcttgatttttgattgttccccccttttttttgtgaattaagctcccctgtggttgggggtttcccccaacgggaccccttcctttggggggggcttagcccccgcnccttccttttttttcccttcttttttggccacggcccccgggtttccccctccccggttttttcgggggctccctttcgggttccttttt

SEQ ID NO: 178618 - DNA, 522 bp, Zea mays
  Clone ID: MRT4577_94485C.1
gacccccgaggctggccttgtgtttttgttgtctgcttttctcttgaatgaagatgtgatgaactcagctgaagatgtagtgtgtatgttgtcatggtttatttttctattttatttatctatctataatatctatcggagaaggtttgataaaaaaaaaaaaaaaaacaaaaaaaaaaaaaaaaaaacaacaccaaaacctccaacaaccagcacccttaacccaagattaataagcccccctcgccctaaacaaggacacaccccccccctccccccaattgttaccccctcacagttccacacaccacccccaccccgacccccaaaccctcacaccctgccgccgcctaatgagtaacctaacccccatcactcccgatgcgctccccgccccctctccagtcgccacacccgtccccccagctgcataaaccaatcaacccaacgcccccgcacaggcgccctgcgtactaggcgctctcccgcttcctccttccctgactcgcatccctcgccccc

SEQ ID NO: 178619 - DNA, 1417 bp, Zea mays
  Clone ID: MRT4577_94486C.1
gcgatcgagtcgtgcagcggctgcttgcgttcgtgcatttttcgtacaggaccgcgcgcgccgcgggtttgagaggagcgcgtgcacacgtacgatacgagcatggcagactaccacaggatccacccagtgagcgcgggctcgccgccgccgccgtccgcgccgccggagcaggcgtcgaggagcggcaagaaacccagccacgaccagctgccggtgacagcccctgccccggcgccgccgcccccgcccccgcccccgccgtcgcggcgcaagcgcagccgctgctgccggtgcgtgtgctacaccgtcctcgccctcgttttgctcgccgttgcgctgggcgccaccgcggggatcctgtacctggtgttccggcccaagatcccgacgttccacgtggaccgcctgacggtgacccgcttcgacgtgaacggcacgtcggccacggtgaccgacgcgttcgacgtggacgtgacggccgacaacccgaaccgccgcatcgggatctactacgacggcggcgacgtgacggcgtccttcaacggcaccgtgctgtgcagcggcgccttcccggcgctgtaccagggccaccgcaccaccgtgcacccgcgcatctcgctcgcgggggagacgcggctcgacagcgccgtcgcggcgcagctgctgcagcagcgggcggccgggttcgtgccgctcaccgtgcgggcccgcgtgcccatccgcatcaagttcggcgccgtcaggctgtggacgatgacgggcaaggcaaactgcaacctggtggtggacaatatccaggcaggcacgcagctgagcatccgctccaattcctgcacttttaagcttaagatctagatgcgccttcctttgtcggccatgcatggttgttgcctccaatgactacggctacgggggtggtagtggtagaggtgtacagtacattcttttcggcacctgtatccatagcttaattgatggctgtaataaataacatccgatatgcatactattttgctatgagattatttattatataataaatattatttatataataaagcatgattttttaggccaaaaaaaaaaaaaaaaaagtcgtttcccactaccttaagggcaagatcaccggcaggatcaactccttgttcgaggtgattcctgagatcgacgtttgcaagtgctagccttggtacctcccggataagtccctgattcggtccgactatcccgagtggttctttttttccccctaggatcgtaagtaccctaatggtagctggtcttacaggtccaccgttgcttgttactgcaatgcttctgttcatgattttattatcaagttcaagggtgacttgcgtattcagtgttctattggtatgaattttacctttcttttccacctttgtctttcctc

SEQ ID NO: 178620 - DNA, 1029 bp, Zea mays
  unsure (1)..(1029): unsure at all n locations
  Clone ID: MRT4577_94487C.1
cctcctcttcctcgttaattttattgcnatatcacccaatcgtgacgcacagggctgctcttagctccttacctgtaagccaactaacagaggggtaacaccgcaaatcttttttttttttttttttttttttttttttttttttttttttttttttttttttttttttttttttttttttttttttttttttttttttttttttttttttttagggtcaacatgctctttattgagtgtaggatttataatgtgggtctcgctcgaccacctaattaaacagttacagttacacgccgaagtggaacctaacccactgtcacagaagcgacccctgtcccccctctgctcctcacgcgcggctgcaatgcatgtcacgtcgctggcgaagtcggagggcagctgtccttgacgcacgccagcaagtccctgtactccctgtgcatcgtgaagctgtcgtacacctggccgtcgctggagcgcttgtactcgtagaggagggacgagtagttgaacgccgtgagcttgacgaagccgtagtccatctccctgtacacgctccacggcgggacctgggcggtgaagttgctgaggtggctgccgccgcccccgaccacgacgtggatggtgccgttcatagtgcccgagtagtgggatttctccgagctcatgcattgttcctcgtagaccgggcatgtcctctcgtagttgtggacatggccgtagaacgccaggtccacccggtacttctgccagagcttctggaggctctgccgggacatgggctccgcgaacgagccgtcgacgccgtagaagaagccggaggagtagccgagctcgagctgcgcgatgaacaccagccacggctgcttcttccggtcgaccgtggcgaggcagctctcgatgaactcgtactgctccgtgccttcccgccagtcgtgctcgctgtccgccacgcagaaccggaacatgccgtagtctgccgagtaccagtagtttgctcggttctctgtgggtgtgtagtacatg

SEQ ID NO: 178621 - DNA, 1212 bp, Zea mays
  Clone ID: MRT4577_94488C.1
gcacgaccgagcgcgtccgccatctgttggggatcattgacactcagcacgttcggcaacctggagagcacgacggagtggctggagatcgtgttcaacatcatcaccatcacgggcgggctcgtcctcgtcaccatgctcatcggcaacatcaaggtgttcctgaacgcgaccacgtccaagaagcaggccatgcacacgcggctgcgcggcgtggagtggtggatgaagcgcaagaaactgccgcggagcttccgcggccgggtgcgccagttcgagcgccagcggtgggccgccacgcgcggcgtcgacgagtgccagatcgtgcgcgacctccccgagggcctccgccgggacatcaagtaccacctctgcctcgacctcgtccgccaggtcccattcttccagcacatggacgacctcgtgctcgagaacatctgcgacagggtgaaatccctcatctttcccaagggagaaaccatcgtgagggagggcgacgtggtgcagcggatgctgttcatcgtgcggggccacctgcagtgcagccaggtgctgcggaacggcgcgacgagcagctgcacgctggggcctggcaacttcagcggcgacgagctgctgtcgtggtgcctgcgccgcccgttcctggaacgcctcccgacgtcgtcggcgacgctggtgacgctggagagcaccgaggtgttcggcctggacgccgccgacgtcaagtacgtcacgcagcacttccgctacaccttcaccaacgacaaggtgcgccgcagcgctcgctactactcgcccggctggcgtacctgggcggccgtcgccgttcagctggcctggaggaggtacaagcaccgcaagacgctctcgtcgctctccttcatccgcccgcggcgcccgctgtcccgctgctcctcgctcggggaggagaagctccgcctgtacacggccatcctcacctcgcccaagcccaaccaggacgacgacttctagctagcttagctaggccgttccaggccggattctcttctcctcagcgaggagtatatatatcaaacaacatgcatttattagtagtattcattactcgcatgtcgcatgagacacagagccatgaccgcattttgcatccaagttccgatgtggaaagcacgaatttgaggtcaacataaaaaactaaaacgccaataaaaacaaaaaaaaaaaaattat

SEQ ID NO: 178622 - DNA, 317 bp, Zea mays
  Clone ID: MRT4577_94489C.1
attcggctcgaggcctaggaaggcgtaatgctttcttataatgcaaggcgctgtttaagatacatggatgtctgttaactttgtgtgggcgacggataagactggacaggctggacactttgtcatagtctgtgtcatcaagactatggcatgcttcatgacaaggttcaccaccgtgagctccaatcgctattctgatgaagcgtttggtctcattgacgaagatagcgttcatgacatgcttatgctgcatgtgcagaaggctcacgatcacagtttatggttcaggcggtgggctatctagcacatgccacatg

SEQ ID NO: 178623 - DNA, 489 bp, Zea mays
  Clone ID: MRT4577_9448C.1
tacacagagccatgacgtcggatgcgacgcatacgtacgccaggaagacgactcgagtaaaaaaggagcgggcgaacggtggccggacatcgacgacagctatctgcggtgcgagacgcgagaggcagcatgaggcacgagggacaggcgacgccggcgagcgacacccgaaagacttgagcgtagaggctgacgtgactgcacgagacacgagcggtggctctagtgtctactacagaaactgacaaccaccgaacggcgatggtggcggcaaccgaccgcggcaacatccaaagacgatgatcttctccgatctggcgtatctgggacgtccttcgactaagaccacctacgatctggaggcttcagatgcagtagccgaaccggaggccttagggtcgacatccagagactgcctcctatcgaactgtgtttatgtctaccatgatcatgcgcaatgcctactatttacactatttatgcattcta

SEQ ID NO: 178624 - DNA, 236 bp, Zea mays
  Clone ID: MRT4577_94490C.1
ggaattgcccacgcgacccacgcgtacgcttagttgttaggatggcataatcttcccttgggcatcgcccgtgctatcttgaaggacgggtgggatcctggttatagacaaatcaaccaaatcactggatgtcgactacaaggggatccttcagtatgcactggacacagtgatggtgaaccatacagtaatggtcgccccccaccgtctgtcaacgatacaaaatgctggtcata

SEQ ID NO: 178625 - DNA, 343 bp, Zea mays
  unsure (1)..(343): unsure at all n locations
  Clone ID: MRT4577_94491C.1
cccacgcgtccgcggacgcgtgggcgaacgatcagtctgagatgcatgcacgacgatcgatctacagctagcgttgcattgcatgacgatatggacctacactcgcgggcaaagcccatggacaccgncgtcgccgtcgcggtggcttgtcggcgccgccgccttcttcggccgggtgggcaaccccgccttaacaacaagcccaatggggtccaagccaaggccaacattctttttgaagaagtcgggtttaccaaccggcggaaaggcccgggcttcattagccgggccacgtggcaacttccggccgggtcaacgcttttccagcgtggattccagccta

SEQ ID NO: 178626 - DNA, 204 bp, Zea mays
  Clone ID: MRT4577_94492C.1
gtacaactagtcggcgcgtcttcatgcgatctgtcgttcctagatactctggatctttttcatggctgtatcatcatgagattctctatgcagacggtcttctctctttagcaaattggatgccgagtgatttgtgacctgtacgaagacatagacacgggagctgccgtccggtcacgctgcgcacccgcgaattggttccgg

SEQ ID NO: 178627 - DNA, 385 bp, Zea mays
  unsure (1)..(385): unsure at all n locations
  Clone ID: MRT4577_94493C.1
naaaaaaaaaaaaaaaaaaaaaaaaaaaaaaaaaaaaaaaaaaaaaaaaaaaaaaaaaaaaaaaaaaaaaaaaaaaaaaaaaaaaaaaaaaaaaaaaaaaaaaaaaaggggcgggccgttttaaggggttcccaagctttacttacccgcgtgcttgcgaacggtcataagctttatttttagggtgccccctaaatttaaaattacacgggcccgggggtttaaacaacgtgggggcacggggaaaaaccctgggggttcaccaaatttattccctttaaaaaaaaatccccccttttggccagttggcggtatatagcaaaaaggcccgaacggttccgcctttcccaaaaattggcccaccctgattggcaaagggaacccc

SEQ ID NO: 178628 - DNA, 648 bp, Zea mays
  Clone ID: MRT4577_94494C.1
attcattcgaacgtggacaggaagaaagagggcttgaaaactatattttggaatggtgggagtatagttttgctagatttatgtgtaaactttattgaaaattgtacatttaggaccttcagatgcggtgttttctaatcacttgcatctttattttgccctgcttattatttttccccttttgctggactttcagtctttagaaaattcactgtgttactttgtatactagatgatatatctgataccattcacatgtaggtgacccttttttgccgtgtgatgtactgatgtttttgcgaaaatttcgtacataagcttaacatgtttataaacttctcgtcgataatggatctgtggttaatgcagatggacagaagattgtgactgtgtcgcttgatcgtacgataaaaatttggtcatgcagaagtagcacacaagataatgagatggaactggattgagacaattgggttcattgttgccagccccgcttctctattcatcagctagaagtagatattctcccttttgctgatcagacattccaatcagtcattggtgataatgcacggaaatattatcatagcaagtataaaacctatgagactatagaagaaaatatgttaagacaaaaaatatgataat

SEQ ID NO: 178629 - DNA, 440 bp, Zea mays
  Clone ID: MRT4577_94495C.1
cccacgcgtccggccacgcgtccggccacgcgttcggaaaaacagattgtaaatgacaggggcgtatattctttagaatgaactgggcctaaaggtgaatttattccgatgaccaaactaaaccaaaatatcaaggatatgaaatctatcctttacggcaatggtgaatcagagcctgtaactgaagcatgtgtacaattgacccaagaattcttcagggagaacactttacggctattaatcatacatcttccaaaactaaatttggaggtatgtaatttgacctgtttttgcatgtagattgacagtactactggagtagcttttattacatacataatacatacccctcttgttatcgtttttacacaaaaaaactgatacattcgtatggatgtatctctacttctgattgttgcagactaggaaagatgctactc

SEQ ID NO: 178630 - DNA, 504 bp, Zea mays
  Clone ID: MRT4577_94496C.1
cccacagcagtccgtgaacgtcttgggcggggaggaggacgacagggacgaggggtggcggcggtggtcggtgctggtggcgacggtgtggatccaggcgctgacggggaccaacttcgacttctcggcctactcgtcggcgctcaagtcgtcgctgggcgtctcgcaggaggcgctcaactgcctggccacggcgtcggacctgggcaaggcgctggggtggtcgtcgggcctggcgctgctccacatgccgctccacgccgtgctcatgctgtccgccgcgatggggctcgccgcctacgccgcgcagtactactgcctcgtgttcgccggcggcgctgatgcgggagcgggagcgtcgtcgtccgtggccgtcccctaccctctggaaggagtcacttgctcgcacagggtggcttgctgctgcattggtccccatgccaatggcctttttccttatgtggaacaaacaagatggaagcaccctggtagcaggaacagcac

SEQ ID NO: 178631 - DNA, 462 bp, Zea mays
  Clone ID: MRT4577_94497C.1
agctgctggagaggctcaaggaggagacggggctgcacgacttcatcatgtgctcgcgcaggcccatcaacgggaagctcctgccgctccgtctgcagctgccgcccaacaacgccgtcgtgcatatcgtgcttgtgcaggagtcatcaaatgtggcaaaaacttttgcttgaccagttgaccatcccgttcacaaaatcatctgattgaagatggtggaagcaacagcttgtgtatcaaatgcagaattgttcaacaattgtgtatgtattaactttttgatcaaaccgggtccagtgtggcggctaacacaagcagggtccttctgcctctagttgttctcattcatcatctcgtacttgctttgtctgtagatatgtgccatctaattctcaagattcatagggatctgtatagataataaggaacctttgaatattctgggttggtgatcttttttca

SEQ ID NO: 178632 - DNA, 765 bp, Zea mays
  Clone ID: MRT4577_94498C.1
tgggaccctcgaggccggccgggccggggtttatatatcatcagtttagaatgaatggcacatctgaagcctttcttcatgctgttgcaaatgaaaaccagcttaagcagtcaaatgatatgttgcttctgttctcggtgatttacatcattctaaatgttgttcttattaaatcttctggagctgttgggttaattgctgctaatgccattaatatgttgcttcgaatatcatattctgcagtatttataaaagactatttcaagggctcattctctttccggcgctgtgtgcctgcgggctggggcattttactcatttctggtctgaccactgttttctctgagagggttttcttgaacaaaacgaggttcaagcagactgttcccattcacatagcgattggcatcatgtgcttgagcatcgcgttacttgagatataccgtggcgaaaagcagttcttgatgcaaataatcagaactttgaagcataatgacaaaagccagtgatttgaagacacagcgcatttcatagcgtattctctctggaacgcctgatgaaagagagctggtagtatagtgggtgggtaatttggtgtgtatgcaggagatcgggagttaacataagaggggggattaatcggtcagatagataaatcggttgcgtatgggaattgctggatttcttgttgacccaatatttatattacaggtttattgagctagtgattcaataatttataattaaatgaagaagtttaggttc

SEQ ID NO: 178633 - DNA, 576 bp, Zea mays
  Clone ID: MRT4577_94499C.1
tctggagttgatggagagaaatctgtcacctgatgctgttgtctataatgtgtttatcaattgcctttgcaggcttggcaagttcagtgaagcaaaatcttttttgaaagagatgagaaatacgggcttagaacctgatcaagcaacatataacactatgatttctgcacagtgtcgggaagggaatacctcaaaagctctaaagctactgaatgaaatgaagtggagttcaataaagcctaatctcatcacatatactacacttgttgtgggccttcttgaggctggggttgtggagaaggcaaaatatttactaaatgagatggcttctgctggattcactccaacccctctgactcatcgaagggtgctgcaagcatgttctggaagcaggagcccgtacgtgattttggaagttcatgaattgatgatgggtgctggtcttcatgctgatatcactgtctataatacactcgtgcatgttttgtgttgccatggaatgacaagaaaagctacaattgttttggatgaaatcgtggggagaggaaatgcaccagacactatcacattcaatgc

SEQ ID NO: 178634 - DNA, 303 bp, Zea mays
  Clone ID: MRT4577_9449C.1
gcgcggacgcgtgggcgtagccgtggtgcaactctccacgtacttggtgctgtaggcgctgcagtgcgacgggcgcctttgccgggccggctggcagatcctcgtcgagtccttcaccgacttcgccatgctctcgcatacactgtggatcctgttctaccaccggctgctgctgcccaagctccgcaagataaccggtacggaggaggggttcacgctgctccagcgccagggcatcaggatcgtgctctgcactggacccatggtcatcataggcattgtctaggacacgacgccgtgcca

SEQ ID NO: 178635 - DNA, 466 bp, Zea mays
  unsure (1)..(466): unsure at all n locations
  Clone ID: MRT4577_944C.1
cggccgcgtgggtggcgctggcggcgatagggagagaggaaagagtctgcagaatccagcagggcgagggaggcgttagccatgggtcgtaataatgtcagcggaaacggcgcgttataacgtggtgcgtacaaatgggatggcgcatcgggaccattatcgtctggctcggcaaatatcaagtggctcgtggacgaccaggcgcgcaagggcaaggatggacgtgcgtcgctgttttattatgatcaatgccaagatggaaaccaagttcatccaggacctcgagccggtgcgaacgcagaacccttcagtaagaacttttgcatctgaagtgctgcgctatgtctaaagttaatgagcccgtgcgtagggcccacnaactccgtcagcataggatctgccatatataccatgaatttagtgctggaaggccttggcggaagaggctgagagatacatgagaagg

SEQ ID NO: 178636 - DNA, 565 bp, Zea mays
  unsure (1)..(565): unsure at all n locations
  Clone ID: MRT4577_94500C.1
ntgatatgttgcttctgttctcggtgatttacatcattctaaagttgttcttattaaatcttctggagctgttgggttaattgctgctaatgccattagtatccttcgattctaatttttcttgaatgcatttttccccgcataacttgatttgtgccttgactatctgtaaagatatgttgcttcgaatatcatattctgcagtatttataaaagactatttcaagggctcattctctttccggcgctgtgtgcctgcgggctggggcattttactcatttctggtctgaccactgttttctctgagagggttttcttgaacaaaacgaggttcaagcagactgttcccattcacatagcgattggcatcatgtgcttgagcatcgcgttacttgagatataccgtggcgaaaagcagttcttgatgcaaataatcagaactttgaagcataatgacaaaagccagtgatttgaaaacacagcgcatttcatagcgtattctctctggaacgcctgatgaaagagagctggtagtatagtgggtgggtaatttggtgtgtatgc

SEQ ID NO: 178637 - DNA, 535 bp, Zea mays
  Clone ID: MRT4577_94501C.1
gcattcccattgtgcccctaccagaaaaacagagagcgcatacgcaatcgtaaagggtggaaaaagagaagtgcccagcgcaatgggtatcatactggtgtctatgcacatcatgccagccaccccggcaaacatgaacgcccgcacgaagaacggaaacgatgcgcttggctcccagcgcacaccaacaccaaggtgtacaaggataacacacacactgaggctacaccgttcgagacatgcaatagtacaaaggctgcctcctcctcttggcaccgtgcaactactcatgtcgaatatgatatgttacactcactaccgtatcctgaagccgttccacaatgcctcaaatcatgcatgtgtgaggacaccaaccattacgcagactgtcattgtgcaatgtgatactgctccatgcaagcagggatacctcactcactatatgaatatgcattgcgaataataagataacccctgctggaaaacggataaaactgagtgacgatatattgacgccttctctggagcaaactaa

SEQ ID NO: 178638 - DNA, 294 bp, Zea mays
  Clone ID: MRT4577_94502C.1
cccagaagtatgtccgacaagcctggcagaaggcagacatcaatacaaaatgggcagccacacgatgggccaagaagattgaagccagagaaaggaaagccaagatgacagattttgatcgttttaaagttatgaaggcaaagaatatgaggaacagaataatcacgaatgaagttaagaagcttcaaaaggcagctctcctgaaagcttctcccaaaaaagcacctggtactaagggtactgctgctgctgctgctgctgctgctgctgctgctgctgctgctgctgctgctg

SEQ ID NO: 178639 - DNA, 709 bp, Zea mays
  Clone ID: MRT4577_94503C.1
cttcacagaagaagcaggcgaactttaatagaaggttcgctcgccagacatgactacaggacccaggatgacggctggttacaccaagagaaaatctagtgcaagacacaccaaatacagatccgttgtgttgtatgccagcaaggacatcttattgcaaatcatctctgttagcttagcaggtgacgtgggtctgggtactgtttactcgcacgagccgccactgtctggctttgatgtcggcctgaccaactatgcagctgactacttgactggcctggatggtggcttgccgtgtgctcaagacccgtggctgagattaggaatctgagggtcatgttgatgccactggcgaggactggtcatgggcgccagctgatgagaggagggctttgcgcgctctcttggatgttggccttattaggactacatctgggaaccgcatctttggtgccctgaagggagctttgcatggtggactggatattcctcacagcgagaagaggtttgctggtttcaagaaggatgacacgcagctggatgctgatatccatcggacgtacatctatggtggccatgctgctgactacatgaggaacctcgctgaagaggagccagagaagtaccagtctcacttgagtgagtacattaagcagggaatcgacgctgatgacatggaagctctgaccaagaaggtgcatgctgccat

SEQ ID NO: 178640 - DNA, 402 bp, Zea mays
  unsure (1)..(402): unsure at all n locations
  Clone ID: MRT4577_94504C.1
tgcggtcgacccaataannttaattccacccaaggacgaaccaccgggggtgttattttataaagaagaccctttgatcacacacaggcccagaccgcgcgcaacgaaggctgacgagtacatccatacccaccctgcaatacatgagaagagtaggacagaaagtacaggtactcagcctggacaagacacaactagcttcaggcgcgccacgaatggggcaccccgcgcacgtgacaacgcttatccatcacgatgactaccggacgcacactttatttaggccacaacacttcacagtcggggccggacatattcatgctacaggcactgctagctacttaccggggttcatactccacagatacacaaacacacttggagacgactgttacacatgcg

SEQ ID NO: 178641 - DNA, 817 bp, Zea mays
  Clone ID: MRT4577_94505C.1
cggacgcgtgggggagcggcacgagtgcctggactggctcgacctgcagccgccggcatcggtggtctacgtgtcgttgggttctacgtcgtcgctgcgagacgagcaagtcgaggagctcgcatcggcgctgcgcgacagcaagcagcggttcatctgggtgctgcgcgacgccgaccgggccaacatattcgcggaccacggcgagagcccccggcacgccaagttcttgcccgagttcgctgagcacacccaggacagggggctggtgatcaccgggtgggcgccgcagctggagatcctggcgcacggcgccacggcggcgttcctgagccactgcggctggaactcgatcatggagagcatgggacacgggaagcccatcctcgcctggcccatgcactccgaccagccatgggacgctgagctcgtatgcaagcaccacaaggcgggcatcctgatccgcccgatggagaagcaaagggaggtgatttcggcagcggccatacaggaggcaatcgagaagatgatggtctctgatgaaggctacaagatccaacagcgcgcaatggcgctgggccaagctatccgtgcgtcagcagcagtaggcggtgggtcagagaacaaggacctggataagttcattgcccacatctcaaggtgatttggggatttctggttggtttgggaaatgtcaagcatatttcaatagaaaattttaattcaatttcagtgtgatctgtaatgttctcaatttaagaaccggagattcaactttagagttggaaaccaaaaaaaaaaaaaaaaaaggccccta

SEQ ID NO: 178642 - DNA, 461 bp, Zea mays
  Clone ID: MRT4577_94506C.1
gaccatgacggagagaggcctgtgcgagattgaggatatccttgatgtcaacgatgcgcaaacttgtgtaatcaatagggcatggattgtattactgaaggagcggtcacaattgcgagcttttagggaccccatttgtaaggcgcccacatcagtcacacatagctgtgagacatgaatgacgtgagctactggatgcattatcgctactgctctcttggatgcagtcttagaggcttatatatggaagctggtatgctagctatggtaggcatcaaccctcgggccagtggtatggatcatgcggctaggattgacagtgcaggttcatgtactacgagtgacccaaacagctggactgacatgaactacagatgatgcccgaccaatgagggttgctcgttacatacgcaagtgagttcccgagcgtgctccattcttctaatctgaacatcatgaca

SEQ ID NO: 178643 - DNA, 529 bp, Zea mays
  Clone ID: MRT4577_94507C.1
cgctcgaggcggcctgggctgggcagtctcgcagtggcaggtaggtctgcaggctccccctcgctgccgcggcgccatccgccgccgcagccgtcgtcgccagctgcagctctccgcgcgcgacgtctaccacggtccgtctccgccccgcacgctcgccggtcggtccgcaccctgcgccaaactacttctcgacctctcaggttctttagaagaaaagaggaaaaatcatacatggatatcatgcagacaagtgattcttcacaatatggagttgtagaaaacagcccatatagatttccctataataaacgtgtggaagatggcaaccttggtgcttcgtggtattttagtagaaaagaaatagaggagaattccctttcaagaagagatggcattagtctgaagaaggagtctttccttcgcaagtcatactgcacttttcttcaagatctgggagtgaggcttcaagtgtctccagtgacaattgctacaggtattgtattctgtcaaccttttttccttccac

SEQ ID NO: 178644 - DNA, 185 bp, Zea mays
  unsure (1)..(185): unsure at all n locations
  Clone ID: MRT4577_94508C.1
aggttnccgacggataaggggacgctctggcagagatgcttcggcgatggnnctgntgagtcntggggtacattgacttnncagtatagattggtgaggagatttgtatggtnagaaattgattctgtgccggtctcgaatcacattcttcccagcgctctangtgtaatgggttggtgtcctgt

SEQ ID NO: 178645 - DNA, 576 bp, Zea mays
  Clone ID: MRT4577_94509C.1
tttttttttttttttttttttgttttgttttttgtgttttttgtttttcttttgttgtttattttatggggtgtattttggtttttctttttctctttagcttacttccgatttttatttcaaacggcattggccgccggggcagaacccaaaagggcccggccgggggggggcaccccccaagaccccgcccgggggcccacggggggggggggccggccagggggcccaagggaggggggggaaaaaaacgggaacaaaaaacgggggggggatggagctgaagggaaaagccggccggggcccgccatagaagcccttgcccccctccaaaccaaaggagagaacccccgccgacccccagggagggggggggcaccccccaggaccgcgggggggggggggcaaacccggggaaaaaagggggtgggggcaaaaaatgcttaaaaaaccccccccaagccgtggcccgtgggcagggccaactttttggggggcaaaagtacacaaaaaagatcgagggggggggcccccccaaaaattgggccaaaagaggggccccgcagaaggggaacc

SEQ ID NO: 178646 - DNA, 223 bp, Zea mays
  Clone ID: MRT4577_9450C.1
tgtcgggctgacttcacctaacgaggggctgtggctttttctgagacctaagggagactggctttaatacctgatgatagcgatgacccaggttactgagcctgtactgaacggattctttgatgaacgtactaggtaggcgaaaggcctgggaagtgcacacagtactaaggattgttacactcgtcgaaaccgtctcttatgcaggtcgtggttaaacaga

SEQ ID NO: 178647 - DNA, 717 bp, Zea mays
  Clone ID: MRT4577_94510C.1
ggctggaagtggaaagaagtgggttcttgcttgagctgagctcttgctgcccttggatctgtttgggagtggagaacgcagtatggggcgcgggaagatcaagatcaagaggatcgagaactctaccaaccggcaggtgaccttctccaagcgccgggccggactggtcaagaaggcacgggagatcggcgtgctctgcgacgccgaggtcggcgtcgtcatcttctccagcggcggcaagctctacgactactgctcgcccaggacctcgctgtccaggatcttggagaagtaccagaccaactccgggaagatactgtggggtgagaaacacaagaacctgagtgcagagatcgacagagtcaagaaggagaacgacaacatgcagattcagctcaggccagtgtttctgattcagatctgctcccgatctctagctgcgcgcgcacttcactagctcgctgttcgtgtgtgttcttgttgtgattgtgctagcgtgtccgtcacttgtgatggtgcaggcatctgaaaggcgaggacctgaactccctacagcacagggagctgatcgctattgaagagggcctccagaatgggcagaccaacatgcgcgagaagcagatggactactggaggatgcacaagacgaatggaaagatgctggaggacgaacacaagatactgacttttaggatgcaccaacaggctgttgatctg

SEQ ID NO: 178648 - DNA, 698 bp, Zea mays
  unsure (1)..(698): unsure at all n locations
  Clone ID: MRT4577_94511C.1
aattcggcacgaggcggaagcggaaaaacatatacaatgcttggtgaaataagcgatctggaagtaaggcctagtccagaccgagggatgacaccacgcatttttgagttcttatttgccagaattaaagcggaagaagagagcaggagagatgagaagctcaaatacagttgcaagtgttctttcctggagatatataatgaacaaattacagatcttcttgatccttctgccacaaatctcccactccgagaagatataaggaatggagtgtacgtcgaaaatttgactgaattcgaagttggctgtgccagtgacataataaaactcctgatgcagggttctgcaaatagaagagtggctgctacaaatatgaaccgtgagagtagccgctcccacagtgttttcacctgtatcattgagagtaggtgggagaaggattcagcatccaacttacggtttgcaagattaaatctggttgatcttgctgggtctgaaaggcagaggacatctggagcagaaggtgagcggctgaaggaagctgttaatattaacaaatcgttatcaacacttggccttgtgataatgagtttagttgatctagcgcatggcaaacaaagacacattccatatagggactcaagattgacattccttctnncagatcacttggaggggactcanaaactatgatcatt

SEQ ID NO: 178649 - DNA, 3300 bp, Zea mays
  unsure (1)..(3300): unsure at all n locations
  Clone ID: MRT4577_94512C.1
acatgcgaacgtaacaaacacagcaacacgcccacgctagcggtttccatttccggccctgcaatcctgcaccggcgcgaaagccccctcacggcctcacctccactccggtgatggccgcctctcctttacttctcagatctcagtgctcacgccgtccacggtccactagttgcatcggctcccgcataaagatccacaccacttgagcagcagctacctcaagggaaggagaaggctggaagtggaaagaagtgggttcttgcttgagctgagctcttgctgcccttgaatctgtttgggagtggagaacggagtatggggcgcggcaagatcgagatcaagaggatcgagaactctaccaaccggcaggtgaccttctccaagcgccgggccggactggtcaagaaggcacgggagatcggcgtgctctgcgacgccgaggtcggcgtcgtcatcttctccagcggcggcaagctctatgactactgctcgcccaggacctcgtctgtccattgccctctcattctttttattcttttgcttgtttattatcgtccttcttcttttcttgtgtgcaagcaaaactgatcgcaaagacccaaacttggttggaaaggcaaaactgagtaaaaaacacggttaagcgtaaaattgaggacaccaataaaaatgagggcaccagcctaaaaaacccaaatttggtttggtggcaggctgtccaggatcttggagaagtaccagaccaactccgggaagattctgtggggtgagaagcacaagaacctgagtgcagagatcgacagagtcaagaaggagaacgacaacatgcagattcagctcaggcatctgaaaggcgaggacctgaactccctgcagcccagggagctgatcgctattgaagagggcctccagaatgggcagaccaacatgcgcgagaagcagatggactactggaggatgcacaagacgaatgggaagatgctggaggacgaacacaagatactgacttttaggatgcaccaacaggctgttgatctgagcggcggcatgagggagctggagaccggataccatcaggtccagcacgacagggatttcatttcccagatgccgttcaccttccgggtgcagcccaaccaccccaacctgcaggaagacgagtagctacagcctgctggatagtgttctgcatgccgctctgaactgaagctcctcacctgcagcttctatctcgcgtttcatcattcagcgttagctgggtatctttcttttcatggcaccctggaatctgcatgaagtctgtcagttgttactacgatgtggtcttgtcttgtgcgtctcttttgactttgctgggctgatttccgtgcacgtaacttgaccgacccatcgccgcatcgcggacctcgaccccgccctcactgagctaggagcagacgaggcttgagaacgagcgacggagacctagccgaagcaggagctccccatggcgaccggcaacctggcgagcgtggtggtggctgtagacggcagcgaggagagcatgaacgcgctgcagtgggcgctcgacaacctccgcctgcgccccgacggcgagctcgtcgtgctgcacgtccagccgccgcccaacatcgccgcgggactcaacccggcgcccatccccttcggcggccccagcgggttggaggtgccggcgttcacgcaggccatcgaggcgcaccagcggcgcataacgcaggcgatcctggagcacgccctgaagatttgttccgataagaatgtggaggtgaagacggaggtggtggtcggggaccccaaggagaaaatctgcgagattgcggccaaccgcaaggccgatctgctcgtcatgggctgccgtgccattgggccgctaaagagggtgttcttgggcagtgtgagcaactactgtatcaaccatgtgggctgccctgttgttgtgatcaaggggacatgatattccatcagcccagcattctttggtgtacttccattcaaggtttttgaggcttctgctgtgacatgtgtaatcctgtacgatatattactgcacattactatgcttttgttggtgctgctgagggatgaaagttgctatgtggtccctttcgttataaaggaggaagctttgtcggtcgtgtaatcgtggtaataagttggtcctgtggcggattcttgtgtatattcttgtaatcgttcaaagacatggttctgtctgaagtcccaacagcgcaaaattaccagagtctcggtttgtttgtttgaaaaaagcggccgcgaattcccgccgtttctgattcagatctgctcccgatctctagctgcgcgcgcacttcactagctcgctgttcgtgtgtgttcttgttgtgattgtgctagcgtgtccgtcacttgtgatggtgcaggcatctgaaaggcgaggacctgaactccctacagcacaggcagctgatcgctattgaagagggcctccagaatgggcagaccaacatgcgcgagaagcagatggactactggaggatgcacaagacgaatggaaagatgctggaggacgaacacaagatactgacttttaggatgcaccaacaggctgttgatctgagcggccgcatgagggagctggagatcggataccatcaggtccagcacgacagggatttcatttcccagatgccgttcaccttccgggtgcagcccaaccaccccaacctgcaggaagacgagtagctacagcctgctggatagtgatctgcatgccgctctgaactgaagctcctcacctgcagcttctatctcgcgtttcatcattcagcgttagctgggtatctttcttttcatggcaccctggatgaagtctgtcagtacgatgtggtctttgtcttgtgcgtctcttttgactttgctgggctgatttccgtgcatgtagtgatgatgacagcgttaattaagactgaaatgtgcaattaagttgtagcccgtgcttgcttggtctcaaaaaaaaaaaaaaaaaaaaaaataaaaaaaaaaatttaaattaaaaacaaataatgtgaacaaaaataaaaaaatgaaaaaaaanaataataataaataannnattttttgaaanttgaggacacaagtttgatgtacttacaaagagctccactggtcgacttgtatggggggggggtccatttcctccgccttttttcgagctgctgttcggtaaggacaaaattgattaccctcttacttacatcgatggggattatataactattctggacaaggccagtt

SEQ ID NO: 178650 - DNA, 789 bp, Zea mays
  Clone ID: MRT4577_94513C.1
tgagctagtgagcctcgcgtctatggtatgcgcgggaacctcccgtctctcgccacggccagtaatggcgccgccctccctctgtccttctcccagacgaagcagctccacgcgcgcctcatcgtcgcgtcccccttctccgcctctggccctgcctacctccgcctcctagtgctccgctcctatgccgcccgcggagacctttcctccgcccgccgcctgctcgacgaggctccccgcccggcctcgccgcttctctacaacgccctaatccgcgcgcacgcccgccgtctcgaccttccagccgcgctcgcgcttttcgcccgcatgcgccgctccgccactccgcccgacgcgcacaccttcgcctgcgtcctccgcgcctgcgctgaatcctcgcgcccggatgctgttaaggtcgttcatggtatcgctacaacatgcggtatgtgctcccgtccgattgtcctgagctcgcttgtcagtgcgtacgcgaagcttggcctcgtggacaatgctcgcagcttgttcgatggattgtgtgagccggacttggtcatttggaactccattatgtccgcatatgggtaccaagggatgtggtatgatggtctacagatgttctccttaatgcggagagctgggcagcatccggatgggtattcaatggttagcttagtctcatgcttctggaatccggaaatacttgcatttggtcaagcagttcatgggatatgtgtcagggaggttatgactctggacaccatgtgagaagcacacttgtgtcat

SEQ ID NO: 178651 - DNA, 597 bp, Zea mays
  Clone ID: MRT4577_94514C.1
ccggccgggaaaactcatcttgtccgtcctcctctacgaactgccactctgcgctcacggacgcaccaattgagctccctcacccctcgccctcccgacgaccaaaattacaatatatacgcccgccatgctgcgcacatcggccaccaacctgctgcgcaagagccttgtgcgcagcactcccgccctggcctcgcgagctgcctcgactcacgccatctccaacccaaccctcgccaacatcgagaagcgatgggagggcatgcccctccaggagcaggccgagctctggatggctctgcgtgaccgcatgcagtccaactggaccgagttgaccctccaggagaagaaagctgcttactggattgctttcggccctcacggtccccgtgctgaggacccccctggaaccaatgcccgcgtcgcctggggtatcttcattggtattgctgccagtgtcggtctctttgggctggtccgccttgccgccaagcctgctccttacaccatgacccaggagtaccaggaggagaccaacgagttcctcaagaccaaaaatccgatcccttcactggtatcacctctcctggttacgcc

SEQ ID NO: 178652 - DNA, 443 bp, Zea mays
  unsure (1)..(443): unsure at all n locations
  Clone ID: MRT4577_94515C.1
ccctcgaggctcggccggattctcatccccgcgcacaacggcngccggcaacagcattagcaacctaacccgcccaaccgacacacttcaacagtcaacacactgtacacccgaccggatcctcccaccacccatgggcctgtgcgtgtcgctcggcgggatggccggcggcgaggccgcgcgggcggcggcgcccagctgcaagtgcggcacggcgctggtgctcatgcccagcggcgacatgcgggagtaccctttcccggcgacgacggccgcgcgcgtgctggaggacgcctccgccgccgccgccccgggcgacggctggctcctgtgcgacgcggacgggatgggcttcgagggcccggccccgccggcggtgccccacgcggagccgctccgcgcggggcngctctacttcgngctcccggcccgcgcgcgccgcc

SEQ ID NO: 178653 - DNA, 146 bp, Zea mays
  Clone ID: MRT4577_94516C.1
ttattgtcttatgacgccgctcgagctggatcgctcgacaatggctaccttcacagtgctgaattctgacgcatggatctaagccggataaagttggagtgtaacctctttatttaaaaggctgcacacaacaaactacatgatac

SEQ ID NO: 178654 - DNA, 482 bp, Zea mays
  Clone ID: MRT4577_94517C.1
aagccgcgggaatgcacgatcgccgccgccgcggcgcctacttccctgccccgcgtcgctgcggccgtcgccgactcggcttgaggaagcggttgcttgccaatgccagccaggcgcgcttatgggacttcgatgggacagtgatttgtgtggaacacgttaagctgaagttactcactgatcaaaacctgaaagcttcgcccatggacttctgtacctgttcatttttttttgccgtgaacccagcttgcagtcccatagcgatagcgtgtaggtctaattgcaacactgctctgttaactgtgtatgatcagcacactaattgctgcaaagcaagtcttcgttgttgagctctcagcagctcataggtatgtcttttatttttaaacaaggctatttgcttactaggacaggcagagagctatgagcactgcttatggatttttttgaaatgaaccggcaggagatctgcccgttatatt

SEQ ID NO: 178655 - DNA, 1484 bp, Zea mays
  Clone ID: MRT4577_94518C.1
ttgatactactacattgcttgattccgaggattatgatatgatttgtgagcaacacgctttacaggatattctcctgacaattgatgggcttcagtctcgagtccatctgctgcaagatcgtctcagcaaagctcattctgaaggagaaaatttggcattttctggggccgatactgatgtcagagtggctgggaagagacagcgtactcaaaagcactcattctctaatacaaagtctcgacatactaaaccacagaaaaggaagaatctaaatatcttgctgaaggatgatgatgatggacaagctcttgcaggcggacctgctttggctgacggggaaactgatgtgcatatgataggtgctagtaggagtactgaagaaagaagtggagagtgcaatcactcgagggacaaagccatcacagtggacctactgttgggtactggcaattccataacaaatagtgatattggggatttatacaatgtaaacactgatgatgtcctcatagccaatcaagcagccgttgaagcttgtcagcagtttcatgaggcaaagcatctgccttctggaagtccttccaaagacaagatcatttctgctccagcagaaatgaagaataattctccaccagtggaggtgaagaacacttgcggtccagtaaaaattgagagcttgtgttctccagttgaaggagaaaacacttctgatccagcattggagcaagaatcgttccttgaaaagtcaccctcgaggcagcctgtatccccggggaacaagcaggagctgaaacctaagaaaagacggaagaagaaaggctctttatttactaagaagcagcggaaggtggactccagaacacctgatgcaaaggaaaaaactgagggcacgccctctgatgtagcagaggaaactgagagcccactctctggtgcaacaggaccaggaaccatgaggtcttgctgtgctggaaagaagcgcaaatctggaaatgaacctgcagatgcaaataaaactgggaagccatcctcagcagtgaagaagcagaaaactgaaaacccgactgcagctgcaaatgcgacaaagaagcgggccacggagaagaagctagagagcgcgagtgcctcccagaagctgcaggttgagaaagctgtgcttgtcgctgtaaatagcaggaggagccaaagggtccgtaagcccaaagtttttgctgactgaagaagcaggtagaaagtcttaggctctctattgtgtatgtatcttgtagccccgtcatcaaaatcggtggccatagcaacataggaagtgcctggatcgcctcataagttagtgtacatatatcagctatgtctcacccaaattgtagatttgttagtttgttgttcttaacccttctcttctgggctgccagattaacaatgtcatgctgtgttagcgttatatcaaaaagaagaaaaaaaaaggagaaaaaatatgccatgc

SEQ ID NO: 178656 - DNA, 411 bp, Zea mays
  Clone ID: MRT4577_94519C.1
cggccgggctctcttttcagacggcgccgccggcagccgtatttcgccagagccccccagcccttatcaaaccctaaatcaaatactatccaaaaaattccgcaaaaaactagaaaaaatcccaaaaatcaccacttgattgaagatggcggcgcaagggcatgcggcggttggatccgcgtccgagtctggcggctcaccggctgcctcagctgctgcagcggaggcggctgtgttcccggcgacttctctctacatgggggacctgcacgagagcgctcaggaagtacagctcttccacgtcttcagccagatcatgcgttgatcccctccgggcgcgtttttggtgatttcaccccccccccccccggtcgtctactccttacatcaactacaaccacactacccgac

SEQ ID NO: 178657 - DNA, 523 bp, Zea mays
  Clone ID: MRT4577_9451C.1
ggttgtgggggttttttttttttttttttttttttttttttttttttttttttttttttttttttttttttttttttttttttttttttttttttttttttttttttttttttttaacaaaaaaatggaaattagggggtttatggaaagggggggggggggtttgtttttatcaaaacaggggcccccgggaaacactttaaaaacaaaaggggaaacttaaactttggcaaaacactttaaaaaaaataccaagttttgtccttgtcaaaacaggggtctccaaaaaattaaaaaaccttgccgggcatcctatgggtaaaccttaaaggcctcctcccaatgcccatttgacccttccttccaaagggttattttgttttccccaacagtttttcaaaaaattttgccaggaaaggaccaaaaaccccttcaaacaggggaacccaagtcacccatgagctttcccccccaattggctccatcctttcccttgggccaaaaaaaaaccttccctttttgg

SEQ ID NO: 178658 - DNA, 3085 bp, Zea mays
  Clone ID: MRT4577_94520C.1
cgcccgtggtcggacgacacactgcccgcgggcgggtgcgggacggagcctgcgcgctcgagcagcagtaatccccgcagagcgagggtcctcgctgtccgggagaacacaaggttacagggcttccctgactactaccgattgtttggcccgatcaaggaaaagtacattcaagatgggaacgcagtggctgtccctgttgccctaccactgggctactgtctggggcaagccttcctgggtgaatctgaggggagtgaccctctgtaccagctgcctccaagtttcgcgtctgtaggaggacggagtgcgggagaggagagggcctctcctgttggcacccctgcagggggggccgttcagcgggaagtggatgacagatgtgaacggagctggggaccatgcagcgggaggagcatttctggttcggttcgattcgggctcacgagcgcattgtgctgattcgcagggtgcactcgagctcgagtgcggagttgttgtaatgtaggttgagggttcaaaacatccatccatccatcggccccgcctatttgtggagggctacggtcgcgccactgcagcaaagctgcctggttacgaggaagagttcaaggacagatgtcaccaccggagcgctaaggtggacaacgtcgtctactgcctcggggatgacgtctatgtcaaggctggagaaaacgaggcagattacattggccgcattactgaattttttgaggggactgaccagtgtcactattttacttgccgttggttcttccgagcagaggacacggttatcaattctttggtgtccataagtgtggatggccacaagcatgaccctagacgtgtttttctttctgaggaaaagaacgacaatgtgcttgattgcattatctccaaggtcaagatagtccatgttgatccaaatatggatccaaaagccaaggctcagctgatagagagttgcgacctatactatgacatgtcttactctgttgcatattctacatttgctaatatctcgtctgaaaatgggcagtcaggcagtgataccgcttcgggtatttcttctgatgatgtggatctggagacgtcatctagtatgccaacgaggacagcaacccttcttgatctgtattctggctgtgggggcatgtctactggtctttgcttgggtgcagctctttctggcttgaaacttgaaactcgatgggctgttgatttcaacagttttgcgtgccaaagtttaaaatataatcatccacagactgaggtgcgaaatgagaaagccgatgagtttcttgccctccttaaggaatgggcagttctatgcaaaaaatatgtccaagatgtggattcaaatttagcaagctcagaggatcaagcggatgaagacagccctcttgacaaggacgaatttgttgtagagaagcttgtcgggatatgttatggtggcagtgacacgggaaaaggcgtctattttaaggtccagtgggaaggatacggtcctgaagaggatacatgggaaccgattgataacctgagtgactgtccgcagaaaattagagaatttgtacaagaaaaacacaaaagaaaaaaaaacccactgcctggtgatgttgatgtcatttgtggaggcccaccatgccaaggtatcagtgggtttaatcggtacagaaaccgtgatgagccactcaaagatgagaaaaacaaacaaatggtgactttcatggatattgtggcgtacttgaagcccaagtatgttctcatggaaaatgtggtggacatactcaaatttgcggatggttacctaggaaaatatgctttgagctgccttgttgctatgaagtaccaagcgcggcttggaatgatggtggctggttgctatggtctgccacagttcaggatgcgtgtgttcctctggggtgctctttcttccatggtgctccctaagtatcctctgcccacctatgatgttgtagtacgtggaggagcccctaatgccttttcgcaatgtatggttgcatatgacgagacacaaaaaccatccctgaaaaaagccttgcttcttggcgatgcaatttcagatttaccaaaggttcaaaatcaccacccgtccgatgtgatggagtatggtggttcccccaagaccgagttccagcgctacattcgactcggtcgtaaagacatgttggattggtccttcggtgagggggctggtccagatgaaggcaagctcttggatcaccagcccttacggcttaacaacgatgattatgagcgggttcagcagattcctgtcaagaagggagccaacttccgcgacctaaagggcgtcagggttggagcaaacaatgttgttgagtgggatccagaagtcgagcgtgtgtacctttcgtctgggaaaccactggttcctgactatgcgatgtcattcatcaagggcaaatcactcaagccgttcgggcgcctgtggtgggacgagacggttcctacagttgtgaccagagcagagcctcacaaccaggttatattgcatccgactcaagcaagggtcctcactatccgggagaacgcaaggttacagggcttccccgattactaccgattgtttggcccgatcaaggagaagtacattcaagtcgggaacgcagtggctgtccctgttgcccgggcactgggctactgtctggggcaagcctacctgggtgaatctgacgggagtcaccctctgtaccagctgcctccaagtttcacctctgtggggcgacgcaccgcggggcaggcgagggccgctcctgttggcacccctgcaggggaggtagtcgagcagtaaaaggatgacagatctgagctgagctggtattttgattcgagcccatccagtagcatgtttaccaataaataatcattggtcgtgctgattcttatggttggagatgaatgtatgtagggtgtactcgagctcgagtgcttgttgtactgtaggttgaggtttctcatccattggcctgcctatttgtggatgacgtttcatttcagattagcaatgtgcttatttaaggtttcgtcatgtacctgt

SEQ ID NO: 178659 - DNA, 303 bp, Zea mays
  Clone ID: MRT4577_94521C.1
cacattatagtctggcaacagtacatgaattagagtctcgcaagctgtaccagaacagggtagctgctgtagactacaatgtagccctccagaatgatgtattattgtatacatatgatgggaatatggctagagcagtccagggccataggagatacgaaggattccagaagaccataaaccctgacaggcgcaacttgtcgagctcattgacagctatatgacgtaaatagattgacagagttgctatgaggtaatactgacatggtacagtcctgtagccgtatcagagctttcgtcgag

SEQ ID NO: 178660 - DNA, 3219 bp, Zea mays
  Clone ID: MRT4577_94522C.1
ggccgcgggaattcgattttagatctagagcagcagcagctaccgcatcccttgccatggcgccaagctccccgtcatccgctaggcccacgcgcgcctccggccgggagcgctccgccatggccgaggagatccaccagaaccaggaggaggaggaggaggttgtggctgcgtccaccgccaagcgcagacgcaaggcggcgtcttccgggaagaagcccaagccgacgcccaagcaggccaaaccggccgtggcggggatgaagaagaagggggagaccgagaagacggagcccgttgtggacgacgtgtgcgccgaggagcccgacgaggaggagttggccatgggcgaggaggaggcggaggccgaggagcaggccatgcaggaggtggtggccgcggtcgcggccgggtcgcccggtaagaagagggtggggagaaggagcgccgccgcctcgggcgaccacgtgcccgagttcatcggcagccccgttgctgcggccgaggcgcacagcaactggcccaagcgctacgagcgcagcactgccgcaaataaaccggaggaggacgatgagctcaaggccaggtgccactaccggagcgctaaggtggacaacattgtctactgcctcggggatgacgtttatgtcaaggctggagaaaatgaggctgattacattggtcgcattactgaattttttgagggcactgatcgatgccactattttacttgccgttggtttttccgtgcagaggacacggtcatcaattcgttggtgtcgattaatgttgatggccacaagcatgaccctagacgtgtttttctttccgaggaaaagaatgacaatgtgcttgattgcatcatctccaaggtcaagatagtccatgttgatccaaatatggatccaaaagctaaggcccaactgatagaacattgtgacctatactatgacatgtcttactctgttgcatattctacatttgctaatatctcatcagaaaatgggcagtcaggcagtgaaaccgcttcgggtatttcttctgatgatgcgggtttggagacgtcatctaatatgccagagaggacagcaacccttcttgacttgtattcgggctgtgggggcatgtccactggtctttgcttgggtgctgctctttctggcctgaaacttgaaactcgatgggctgttgatcttaacagttttgcgtgccaaagtttaaaatacaatcatccacagactgaggtgcgaaatgagaaagctgatgagtttcttgctctccttaaggaatgggcagtcttatgtgaaaaatatgttcatcaagacgtggattcgaatttagcaggttcagaggatcaagaggatgctgacactcttgacaaggatgaatttgttgtacagaagcttattggaatacgctatgatggcactggaaggaaaaaaggcgtatattttaaggtccaatgggaagaatatggtcctgaagaggatacatgggaacctattgataacctgagtgactgtccgctgaaaattagagaatttgtacaagaagggcgcaaaagaaaaattctcccgcttcctggtgatgttgatgtcatttgtggaggcccaccatgtcaaggtataagtgggtttaatcggttcaggaaccgtgatgagccacttaaagatgagaaaaacaagcaaatggtgactttcatggatattgtggcatacttgaagcccaagtatgttctcatggaaaatgttgtggacatactgaaatttgctgatggctacctaggaaaatatgctttgagctgcctagttgctatgaagtaccaagcacgccttggaatgatggtggcaggctgctatggtctgccacagttcaggatgcgtgtgttcctctggggtgctctttcttccatggtgctccctaagtatcctctgcctacctatgacgttgtagtacgtggaggagcccctaatgccttttcgcaatgtatggttgcatatgatgagacacaaaggccatccctgaagaaagctttgcttcttggtgatgcattttcagatttaccaaaggttcaaaaccatcaacctaacgatgtgatggagtatggtggttcccccaagacagagttccagcgctacattcgacttggtcgtaaagacatgttggattggtcgtttggtgagggggctggtccagatgaaggcaagctcttggatcaccagcccttacggcttaacaatgatgattatgagcgggttaagcaaattcctgtcaagaagggagccaacttccgtgacctaaagggcgtgagggttggagcaaacaatattgttgagtgggatccagaaatcgaacgtgtgaaactttcgtctgggaaaccactggttcctgactatgcaatgtcattcatcaagggcaaatcactcaagccgtttgggcgcctgtggtgggacgagacagttcctacagttgtaaccagagcagagcctcacaaccaggttataattcatccgactcaagcaagggtcctcactatccgggagaacgcaaggttacagggcttccccgattactaccgattgtttggcccgatcaaggagaagtacattcaagtcgggaacgcagtggctgtccctgttgcccgggcactgggctactgtctggggcaagcctacctgggtgaatctgaggggagtgaccctctgtaccagctgcctccaagtttcacctctgttggaggacgcactgcggggcaggcgagggcctctcctgttggcacccctgcaggggaggtagttgagcagtaaaaggatgacagatctgagctgagctgggcaacatccagcggcaggagcatttctggttcggttcgattcgggctcacgagcgcatcgtgctgattcgcagggtgcactcgagctcgagtgcggagttgttgtaatgtaggttgaggtttcaaaacatccatccatccatcggccccgcctatttgtggatggtgtttctcgtgccattttagttcagctgtattgatgcttcgtcatgtatgtgtattgtaccattcgttcttgttacctactggtaaggcaacatttaatccatgttcaacgcgagcaaattttcatccactttaggtactgagatgctcaagtagttaaaaaaaactgtaaaaaaaaaaaaacagtgcccgaaaagccgcaaaaaaaaaaaaaaaaaaaa

SEQ ID NO: 178661 - DNA, 158 bp, Zea mays
  Clone ID: MRT4577_94523C.1
cgtctggctgactattgacggaaccgcggaggaagcgcgcgtgaatctcctggattaacggactcgagcggatgaccgttctcgcacatagcgaaaacttttgtaggcccccaccgatcgcctttcccaacagaagcgcattctcactggggggggga

SEQ ID NO: 178662 - DNA, 535 bp, Zea mays
  Clone ID: MRT4577_94524C.1
gccggggatcaaaacgtaccgagaggtctagcggcgtagctgcactccgattgcggggcgccggccgaatcattatctagttcgagctctccaaagcaacagaggcgacgactgctcgacctgctgccgactcctgacgtgtgtactaagcaccgggtggaagacagataactactgttcaataaactattggctgcaatattgaaatacgggtacgatggaattgtctacagagggtatgagttggacgtgctgcgatccttttgtacgtaatgagcgtgatgatgttgaatacaaacggggccaaaatgtacacctggctctatgaccgttgaggtgaagcatatgtgatgcatgctgtcatgatggcaaaagacaaaaatagcggtccttagacatcacatttcgtatctttaaccgtggatgattggagcacttgctgaaattgtgagtgtaaggagactctgtgtagatacgtatgagcgtaacactaaagaaaacaatattggcctactgcatgtggtatctgaactgg

SEQ ID NO: 178663 - DNA, 285 bp, Zea mays
  Clone ID: MRT4577_94525C.1
ggctcgggctctggctgactggccatgcggacgcgctatgaggacgagcaggccccagctgcaaggaagcctagctgtcatccagtgagctcctcaaatgtgacactctgctgagagttatagctgcaacttatagggtaccttatctattctgttagaaaacagaacttagcgaggcgacactttatcggattgagcacttatgatattccgttaattacatcggaagcttatcaggttaaaggtacatctgttaatctctgaacacaatacaggtcgtctatg

SEQ ID NO: 178664 - DNA, 249 bp, Zea mays
  Clone ID: MRT4577_94526C.1
agtaatttttttttttttttttttttttttttgtgttttttttttttttttttaatttacaattcccagggatttgaagggaccggcaggattttgatcgaggaagaggacaatccacacttggggaacgttgccgggggccgcagtattaaccaggggcgggaggctggcgtctgcaccgcaaagccatactgaggcccaaagataagcgcacctacaaatggcaattcttgaatcaaaccccggggg

SEQ ID NO: 178665 - DNA, 176 bp, Zea mays
  unsure (1)..(176): unsure at all n locations
  Clone ID: MRT4577_94527C.1
tcgtctcgtcccacgtccgtccgtcccacgcccgtccggttcgttctcagagagnngcctgcgagggagggggctcatcttgggggagtcaacannaccttgaggggatgannggtttgtggccnnngtgggttctcaagggcngccagcntttggtcgaccccttgnngtgaagc

SEQ ID NO: 178666 - DNA, 742 bp, Zea mays
  Clone ID: MRT4577_94528C.1
cgggtgattaccgaatccgagggcttgagcacagcgcgggaggaggagggcaagctgaggtggcaacaaattctcccacgtcgtcgcccgtgcccgctgaatcccactgtcgccgtctctgcctcctctccatatccgcgcccgcagagaggaattacttgagcagggagatgaggaggcccatggctcgctggagcaacccatgggcaagaaggcacacgccgattagatggatggggttctagggaggtgcttcctcaggatctatccaaaagtaaatcgtatgcctgctctacaacttttttggatgataagctactcaagaagtagggattgcttggcatctgacttgctcctacagtcctactagatggagaagatcacggcaacaagcatcggatcgatgaccctgaagacgctggtttgacttgctccaacagtcctactagatggagaagataacgacagcaaccatcggatcggtgaccctgaagttgtaaagggctcagtgagtgtcgcgtccctgaagagccctttcagccatgcaaggagacatttcctcgtttgaggacgaggaaatctaaatccaggctaacgacgaggggtcatcttgctctggtctcccaaccggggtcccggcgatgctagagaagagcatctgactctttcttctctgttggatttagaaatgaaattcgttcttgggaaactggctgagtgagtgatcactgaccaatgggta

SEQ ID NO: 178667 - DNA, 316 bp, Zea mays
  Clone ID: MRT4577_94529C.1
ctttattttaggatgtctttttatcagagagccctgtgactgagctggacacccgggagtccaccggcgagatcatatacgagacgttcaatgtgcccgtactgtatgttgcaagctaacctgtccttacgctggatgctgagtacactacaagcatagctgatatgacaggcgttgacgttgatgtgagtgatggcgctacccatatggtcgcggaccctgatgggtttgacatttgaaacaaaaacaactctataccaactgcagtcaaggattgcaccgagtttattcattaaatacctaaggaaatagatga

SEQ ID NO: 178668 - DNA, 347 bp, Zea mays
  Clone ID: MRT4577_9452C.1
cacaatttcacatcctttcaagagatctcataacacacaatgaattacggaagatcatactacggaggctactcatgaagccaaggattcggtcagtctggctatggcggcacttcggtcatagtggattcggaggctacggccagagtggcatcggtcatagcagctggagtcagggcggatatggtcatagcgggcttggaagctacggacagagtggtcttggaggctacggacagagcgactacggtcgaaataacttcagctctgactggaacgacagctacagaggccatagcaactggggtggctatggtggatccagcaacttaggtggctacggtggt

SEQ ID NO: 178669 - DNA, 490 bp, Zea mays
  unsure (1)..(490): unsure at all n locations
  Clone ID: MRT4577_94530C.1
cgttgctgtcggtggtgtgcgccattagatcgtttgatcgacggctctaggtgtgtaccggttcgggccggacccgatctaatcctcgccgttagttatggatcggacggccagatcggcccgataccccttcgcgggtctaaattgcatttgggcccctcggtttatgtcaaaacaacccgtagtccacctggtgggttttctgagtcttagtaacatttgcgccagagccctcgcgctttctgcaattgtatcgcccagtccagagtagattaaaaatagggaaatgatattagaaattcgtttttaatacaaaaacaattgctagaacttggaaaattcatatctaattcgttttagctccaaattgaaccattccaatttctaaaattttgtaataatattctctatcatttagtataactgntttgacatgaactcagttagaaaattaatttctcatctaatcctattttaatcacattaaacc

SEQ ID NO: 178670 - DNA, 636 bp, Zea mays
  Clone ID: MRT4577_94531C.1
ccccccctcgagttttttttttttcttttttttttttttttttttttttttttttttttttttttttttttttttttttttttttaaaaggaggggtttttttactcccttgaaaaattttaagttacaaacccccattttttttttcgggccctaaacccaacaatttttttttcgggcgggggcgggaccaaccacccctaacaaatttggttaaggggaaaactagtaaaaggccccccaacaaaaacggcctaaaaaagtgggcttttttttgtccccaggacggggggctttatactttttccaggaccaaaaaaaaccctccggggggggcaagctccttttttgcccaaaaaaaacaaaagctcttttgtggggtgaaaaaacagttgttgttatttccccaagaggaaagaaactcgggcgaggggattttttttcccagccccccaaaccccggtttggaacccctgcacatcctccctttttaggttatcctgcaacccctcgagctgatttggtgggagggggaacccaggggggcccagggccctttagggcggggcctttttaccccgggaccattgaaacacatcccggagttaatgctccacaaacccgttttggaaaggg

SEQ ID NO: 178671 - DNA, 549 bp, Zea mays
  Clone ID: MRT4577_94532C.1
ggcccaattaaagttagggtttttttcctcccttgaaaaattttaagtaacaaacccccattttttttatcgggccctaaacccaacaatttttttttcaggcgggggcgggaccaaccacccctaacaaatttggttaagggaaaaactagtaaaaggccccccaacaaaaacagcctacaaaagtggagttttttttgaccccaggacggggggctttatcctttttccaggaccaaaaaaaaccctacggggggggaaagctccttttttgcccaaaaaaaacaaaagctcttttgtggggtgaaaaataagttgttgttatttccccaaaaggaaggaaacccgggcgaggggatactttttcccaaccacccaaaccccggtttggaaccactggacatcctcccattttaggttatccggcaacacctgaagctgatctggtggtaggggaaacccaggggagcccagggccctttaaggcagggcctttttaccccgggaccatgggaacacatcccggatttaatgctccacaaacccgtt

SEQ ID NO: 178672 - DNA, 216 bp, Zea mays
  Clone ID: MRT4577_94533C.1
tcgcccacgcgttcgcccacgcgtacgcccacgcgttcgcggacgcatgggtcgatgaaggcaagtgaatgtttcggcggctacttctcttctgacctgtcatttctattgcctacactttaatatttagaagtatgagattctttcataattggactctttggtgatgctttaattgcttgcattatactggtgcttaattatatattgatgatg

SEQ ID NO: 178673 - DNA, 350 bp, Zea mays
  Clone ID: MRT4577_94534C.1
atcacatacaaacatacacagttggccgtaattagccagcgctgacaaattaaccctcgtcttcgtcgctgacccgcgcgaccgcgacgtgaccaccaaccaggctatagatccacctccagcgccggccggcgttgccgcgggtgtacgtacgtctgccgggagccacgccgcggacatggtactcaggccggcgcgccacgacgaccgccgcatgccggaccggacccggacgtcgtcgccgcgactggcgcgtgcgtacggacgggcgcgtgcggttggcagcataagcggcaggcagagcggcggggcgacaggacgacacgggcgcgtggtggggtaggcaccgg

SEQ ID NO: 178674 - DNA, 485 bp, Zea mays
  Clone ID: MRT4577_94535C.1
aaaatgaaattataacaaattaaaataaaatcaaaataaaaataaataacgtggaatggaagcgaacataagatcctatagagcaggacggcctttcttttttttttttttttttttttttttaaaattaatgcaatgttgtttgaattttctcctgtaaaaaaaatacctaaaccttaccagttaaaactaccatttgaaaactgtaatctaaataacttattgtttagaaaaaatattataatgtgttgtatttgtatgttatctaaagggcgattagacaaaaaacaactgcctaataggatataaacctctttctattgggcgtataatgcacttgagttttctaaacatacattctcatatggagattctaaaaggcttttgaaaccaaataaaacaaatcaagctttttggcataaacacttacaatactatacttgttgtatgcaagtaaaaagtggctaaacctaacatatgtgatg

SEQ ID NO: 178675 - DNA, 155 bp, Zea mays
  Clone ID: MRT4577_94536C.1
tggcagaacgtgtactttgttattcaggcctatcacgagcaattaagtgcacgttctgccgcagcaaacgcagagtttcagacaccatttgctgcggcagaacgtgtacttaattgttaccaccagtctgaataacaaaggagtctaaaaggggc

SEQ ID NO: 178676 - DNA, 239 bp, Zea mays
  Clone ID: MRT4577_94537C.1
gcctactggcagcatgcccctcttccttccggcgggtcgctcgctacgcctgcaatggcgcctggaccgggcctggtggacgcacgcccctggcgctgttcggggcggtcgcggcaacattgcggcacgcccgcggacgtcgctggcggggcgccatactcgcgcgttttatgggggcactgtgcccacggcggcctgctctggtcgacacgaggcatcaccaccgccggcatacactg

SEQ ID NO: 178677 - DNA, 348 bp, Zea mays
  Clone ID: MRT4577_94538C.1
atgagtaagaggggcaacaaccggtacattaaggacaggaagcaacagcagacaaacgggactgacaatgggggcagaaccacaacgacagactacaaaacaaaggggggggggggggggggaatacacaaacccctcaaaccacaaacacaaagagagggggcgcaatgggggcacgctcccttactgggccccaatggggcaaggaagagcatcctaacgcacggggcggctggccagatctggtccaggatctgacggactacgcggttagactaccggggggactaacagaacagggttgctgcgtgtgagttcgcaggggaggcggggaatggctcacacagc

SEQ ID NO: 178678 - DNA, 349 bp, Zea mays
  Clone ID: MRT4577_94539C.1
ccccacaatatgtggattaaaagggtgatctgatataggggaacaagttcctgtaatacatgaaaacactcctaccaatccaaaccaacatgcttggccttttcttacttggtcccacccatcaaaacaagaggggagatttgactatcactcgggcacaaaacctatgtaactttcaatcccccttaacacaaatttatcccactacttgacaaaaaagactttacaagggggcttgcttagacagatttctttgggaagacgaacacccacttttgcctggtcaccgacaaagaaggcttgggcctgcaaatagctgtgccggtttgaaacaccgcgcgagtttttg

SEQ ID NO: 178679 - DNA, 1016 bp, Zea mays
  Clone ID: MRT4577_9453C.1
cccgagcagagctcctcttgctcagtggggtcagcacaggtggagctccagggtcaggaacaaacgagaacagaatggtttccgagggctcccgggcagaggcgcccttccttagagaagggtctgggcccctaagacttgaaaccgccagaaaaacagcccattggatttctgcagaccctgttcccattcagattatcctcagtttgagatacttcataatacttacttttgtgtagtgtggggtcatatgtcgtcgtgcttgtaagagaaaatgatcattttactctctgtataaatcttagctctaaagcaaaaatgaaagaagcaaatgcagaaaggatgcctcgtcatcctcaagactcagcagctctccgctctccgatggtgagcgcaccacatgttctgctgctgttgtcgaaaaatatgacagtggaagtcacaaaaatgtcccctgcccagcccccccactgcccctgaatccccgcagaccgtgtgcatattactgtctcgtgatgtccttgcagacgtggtgtgtgctagttccacgcggccacccgctttccttcagagcgtgttccttcccgttaggtgcttcgtggtattctcttctcaaggcttcagaatctcccctgcgcactcagattagttttcaggcctcttctctctgtctcccttttccctcttaagatatcttgtttccttaggacagaactgtaggtgcttgcactggtttgtttcttgctgtcactgcttgttttgttccctccccttgaccaaacagggctcacgcttcagggccttgcgcgttgaacatgttgggttttctttctctgttatttatataaaaataatttatcaaaaggatattttaaaaaagctagtctgtcttgaaacttgtttaccttgaaattctcagaatctcagtgttggaaagtattgaagcacaaacatgtatcatctccgtaccgttctgtactaaagcactcaagtctaataaatcaatcagcacccat

SEQ ID NO: 178680 - DNA, 150 bp, Zea mays
  Clone ID: MRT4577_94540C.1
gtttcacgtaggaccaccagtgctctgggcgcggcatgttcccaaagctaaagctgacacttcaggtgtaaaggtgcctcacgacccggaaaaccattatgggcatgaactcgaatatgtaatggtcgacaaaattatacaagaatccaa

SEQ ID NO: 178681 - DNA, 247 bp, Zea mays
  unsure (1)..(247): unsure at all n locations
  Clone ID: MRT4577_94541C.1
ggaaccaaatttttatggcggaggggtggccaggtggtgggagcgtagagacaggtggacagtacacataataaccaatgtaaaaggaggctaaanacaaatttaggacaggatatgtccttaccaagccggtaggttcccattagagtccaacaagagttacctcacaaacacatatatcaccagtgccagtcatctgacctgcattttagatacaacaaagtactaatcaacagcacggaaaggg

SEQ ID NO: 178682 - DNA, 372 bp, Zea mays
  Clone ID: MRT4577_94542C.1
gtcacccattttgcccatgtaccattgagtggggaatcatttatgtgggaatccacaaaccaacttactgaccaatcatctgaaccctgcaatcaaagtaagtcagcaagaaagggtaccctatacttttagaccacattgataaatcatatctggtattttattgttagataaccgtgagctcttaatacgctacaatctgtgttttacaacaaatagatcctgcttgcgatccccggtgaccagggagctcgacaggaattttaaaaactatgaactttcttcagctagaccctcatgtatgtaatatcaggctgcaccacatatgtatgctaagcaagttgagccatgggtaggattacgacgttcagc

SEQ ID NO: 178683 - DNA, 334 bp, Zea mays
  unsure (1)..(334): unsure at all n locations
  Clone ID: MRT4577_94543C.1
tnntttttttttttttttatcctactgtttggcgggaaaattttactaattccagccggcccaacctcaaaacttgaacacgcggtgctggtgagacaacaaataaaataatgcaacacgactagagctacacttacgtgacaccattctttaatcgggcactgcagaaaaactagctcctactaacaccgcaggctacgatcgaatcgaagcctggtttctactcaccacgactagggatcgtgcttggttttgatgccccacagacattccaacaaaatttttggccgataccggaacttgtactccgttggcacgccctgcaggaagctaa

SEQ ID NO: 178684 - DNA, 614 bp, Zea mays
  Clone ID: MRT4577_94544C.1
gagctcctgcagagatctgggggggggggggggggggggcctggccggaccacctcgtcgtccggtaccccgactccaccttccacaccacattacccacgtaactgtccacgcgacttctaacaccttaccctcttcccggcttagttccacacgcctggaacactcgagcccacatccacgtagcactactctatagctgtcctgtcagccgggagcctaaggaggattttcaggttagtaaggagggttttcaggttattaaggaggcttttcaggtagagaaggtagtaataatagttcataaggagaataacaaggaggtttacttctccaatttggtcgtggttttcttcacaataatgtatatcgttgtcataactcactactaggtaatctagaccatgatggcatccgataacttctacctgtgatatttcatcgtatatgaggaggtggtgaaggataatatggaaattaactagaactacaagattattatcttgcagacctacattattatctcgctcatttttataattgtaaacatatagtatatgcaataaaaggaggtcttgctataaatcgaattaatcattttccagtactaaatt

SEQ ID NO: 178685 - DNA, 2059 bp, Zea mays
  Clone ID: MRT4577_94545C.1
actttctgtgctatttgacgaatataaggatgcacaacaaacagcctagtgcacttgacattaagaattagtgaattactccattcgctggggcaagatgttccagggtctggtggttctaactggactgaccatgagacattgcttcttttggaagcgttagaaattttcaaaggaaaagaatggcatgagattgctgagcatgttgctacaaaaacaaaagaacagtgcatgttacacttccttcaaatgccaatttctgaaccgtttcttgatggcgatgatttcaatgaaacaccccagaagatcacaaaacaggattcagcagaaactggtccttctgatgtacctgacaagatggatgtagatggtaatgcggaaggaaaagagagcactgatgaaaaagcttacaagaaagcagattccagttccgcagaaacaagaacaaaattagctgaccaaaatatttctgctaaagaggatactatgaaattaggtgatgatgacctagttgcttccattgttgatgaaccaaataaatcttcattggtggatcctgcacataagaagaattctgctaatgctgatgtctctggggaacacccatccaactttattactaatatcctgagatccacttttgaagcagttgaccactttctgggtaaagaagacatgggttcgtttgctgaagcaggaaatcctgtgatggcactggctgcgtttcttgcttctcttgtggaacgtgatgatgctgtttcttcatgttgtagttcgttgagagctatatcagagatgtctcctgctctccaactggcaactgaacactgttttattcttccagatccaccaagtgacctcaaagatccggcttccactttcagcccttgcgcaggcggtgagagccaagaaggtgctgatactactcaaaatgtgaatgataccgataaaaacaacagcgaaagggaagatagtgatttagctctggagaaggagagtgctacattcacctcacagaagcagcacctggaagaattatctgacgcaaaggaaacatttattggaggtcctgaggcagaggccaaatccaacagcacaaaggattctgacaatccaattgctaaggtggggagcagtgtagcatctgacaagatgagagatgggtgcaatgctaatgccattccgtgtcctgctacttcaaatcatacaactgaacccagctccgtagcttcccaggaagccagtccagcaagtacaaaagacacagctatccctgaacaagttgaaagaccaagttctgaggaattactagctgatgtttcacttccacaagggaaggtagagccgaagaagactgaacctgcacctgctgcctcgtctagtatccaacagcatgggtgcaaacaagctggaaatggcaacactgaacctaaaagcaaggaaaacgctgcggccgatgatgaccccataacaaggctacagcgagcggccggtactgccatttcggcagctgcagtgaaggccaagttccttgtggagcaggaggagggttacattcggcagctagctgcacttgtgatcgaaaagcagtttcagaagatggaaacaaaaatgtcgtttctcaccgaagttggaaacctggtgttacgatcgagagatttgacagagaggatgcggaagaagcttttgttggagcggagcatgataatcgcttctcgaatgggtgcagcagcggcttccagaacaatccagcacggggctccggtgaccaccagactcccagtagggcatgtgcatgccttgaatccgcagctgaggcgcccttgaagctttttatagtatgtatatgatcagtaagactggcctatgtaggaggtgtgctaatccgcctctgtataaaatgcagtgtactgtagacgcgtctagggttctggagtcagtaggctttgatgctcaccacaccacacgacttggcttttcttttccttttcgtttaaccaagagttttcttctttgatgtcttacctcgccaccgccatacaatgacatgtgtttgaac

SEQ ID NO: 178686 - DNA, 316 bp, Zea mays
  Clone ID: MRT4577_94546C.1
aaaaaggggaaaatttttttccattaagacaggaaacaaccattacaggggcaggaatgcaaaaaaaacaaacaggttccccaacaactgaaaaactttttatccctaaaattttaaaaacaagcccaaggggcccaaaatgcccctgcccccagaagggaaaacaagagaagcacaaggcctacaagcgggcccgaaaaaaaaaccaccccccctggggggaaaggagcttccctatttaaagccctctttcccctgatgcggcccgcaagctggattcccttgggcatgaaggacccccccttggggggtaggc

SEQ ID NO: 178687 - DNA, 251 bp, Zea mays
  unsure (1)..(251): unsure at all n locations
  Clone ID: MRT4577_94547C.1
ccgagcaggtcngaccccgcaaatcgccccccaaactcaaccgggccggccaacacaggcaggggtcccaacagttgttatggaccttncatcgagcgacctcacggcgctgggcgcggaggagctgtaccgcgtcacggcgtctatcccgcgcgcggatacgcacaccttctcgctgctcaccgcctgcctcgtctaccagctatacttcgccgtgctcgcagcactacctattcacccaccacatcctg

SEQ ID NO: 178688 - DNA, 1137 bp, Zea mays
  unsure (1)..(1137): unsure at all n locations
  Clone ID: MRT4577_94548C.1
ggacaactccatggccgagtcaacatccgacctacacagagcttgcgactcgagatctcgaggccgctgtcgcggcatggcactcaaacttcaaccgtctcatcaagtaccaacgcgactacatccgctctctgtacggctggttgaagctcacgctctgccaggtggacagcagcgtgccccaggaagcccatgcctcgatgatctcgcgcgagctcaccagcttctgcgacgagtggaagcaggcgctggaccgcctcccggacgccgtcgcctcggaggcgatcaagagcttcgtgaacgtggtccacgtcatctacaccaagcaggccgaggagatgaagatcaagaagcgggcggagacgtactccaaggagctggagaagaaggccaactcgctcaggtccatcgagaagaagtactaccagtcctactccatggtcggcctcggcctccccggcagcggggcgcgatggcatcgacagccacgctgcgtacgatgcccgcgaccctctcgcggagaagaagaccgagatcgcccagtgccgccggaaggtggaggacgagatgacgaggcacgctaaggccgtcgaggtcacgcggtccacgacgctgaacaacatacagaccggcctgccgggtatattccaagacatagctgggttctcgggggggacagtggtcgaagctcttgatgtggtctgccgccgagctgggtctgtgcggtagaagaagctctttgccatcaggattaccaagagaccatttgctgcctctctttttctctttctgggtcattcagtagtttatttatatagggaaactgcaatatattatatatatagctcaaagtagagtggtcaagtatagaagatggctcccccggatgttttgccctgtcaggatggtatcagttgtagataatgtgattttgcccaggatttgttggtctcctttttctgtggggagtgcgaggggagagatttataatgtacagacattaaggttgccgtgcaaaaaaaaaaaaaaaaaaaaaaaaaaaaaaanaaaaaaaaaaaaaaaaaaaaaaaaaaaaaaaaaaaaaaaaaaaaaaaaaaaaaaaaaaaaanannaaaaaanaaaaaaaaaaaaaanaaa

SEQ ID NO: 178689 - DNA, 390 bp, Zea mays
  Clone ID: MRT4577_94549C.1
tgggccggtggaactcgctacatgggagaatgaagattcaatcaagcaacgttttccaggagctgaggcttggggacaagcctcttctcaaggggaggagaatgtcaggaagcgagaagaagacatcactcaagtcaaaaggccgtctcgtgcgcggaggcacaaccaacagatttatgggccggattggacccagtaaccctgtgtgagagctgtgtgctgttttagggcgttgtctggaggtgagcagggcgtggagaaagacttgagcagtaagttggcagccgactgcgtccagtgtgagtgttcgtgagagactccccaaaactctgtaatgtgatccactcgataatggcttcgtgagaggcattgcaccgggagcggtgctcg

SEQ ID NO: 178690 - DNA, 178 bp, Zea mays
  Clone ID: MRT4577_9454C.1
cgggaaaaaaattctgggcccccccccggtgggaaaaatttgaaatggggtcccagggaaacaatttggaaatagcggtttacacaaaactaaaaggaatagtgggaaaccgcaaaaaccaaaatcctttagatggtttttagggaaagaggttcattataggggggtcccctattta

SEQ ID NO: 178691 - DNA, 435 bp, Zea mays
  Clone ID: MRT4577_94550C.1
ccaaacacttcacctctttctaaaatccatttgacctacataaccaaggtattttcttaaacactacccccaatactcccccctccacaccagggcacaggtaacaaacagccaccgccccacccgcaagctatccccattcctcaacaggcgcaaaccccagacccacaccgttcatgacaccccctaccccccccgccaaatgcccagcttccccccacgggcacgcccccgcataccttttccccccccccacctaaattcaaccccatgcacatttatttacaccgtccctcactgaaaaaacccctccgctacccaaccaacccgtctggcacacagcccccccccgccagcccccataaacgccctgaatccccaaccactcgccctggccaccaatctcccaacctgaaagagcacaccggactcccc

SEQ ID NO: 178692 - DNA, 420 bp, Zea mays
  Clone ID: MRT4577_94551C.1
ataccgggctggctaattacggggctcgaccttatgctgttcgttttaatttaatttttttttttttatatttttttaatataattattaatatattttttaaaaatattaaaagtttgtttttataaaggttataagtttaggtaattttgatagtaaaattttatcttttttagagtgaatttaaaaggaggggattgggggggaattaaaatagtctttgttaaagaaattttcgggaacaccacttaataatcttggaggacatccttttttggaaagctggggaaataaaaaaggggacctaaaaaaaagtttttgctaaagggtgttcggcctgtttgcagaagggaaacctcactggcaaggcgcattaaggaaagggccaattgggggtaaaaggagggtgtaccattaaac

SEQ ID NO: 178693 - DNA, 389 bp, Zea mays
  unsure (1)..(389): unsure at all n locations
  Clone ID: MRT4577_94552C.1
gcaggcaagggngccggggggaagggagcgcgccgccgccganccagcccggggggcctacctcgccggcgncgggggcgcggnccnccncgctgcctccannctcccaggagccgagncgnncngcgngcgagagaacncagnggngagagacagaagccaaaggccgnaaagcaggggggggggggaagganngncacagagaacagnngcnggngcgcncaagcaggggaggaaggaggnggaagnggnggannagacaaaaagnccaggncaaaggacgccaagccacaggcaganccaggaagaaggggnaacaggnccacaaagggaagggnacgcactggaggggagcaagcacagaaaagaacccagggcagccacaggaa

SEQ ID NO: 178694 - DNA, 155 bp, Zea mays
  Clone ID: MRT4577_94553C.1
gctctagatacgcagtgcccatacattcgtgtttgtcttcagaaccgcgctctacctagacgagacattgggatgcgatcatatcggcgcctaaactaggaaactactacttgctctgattgactaacatctcaagaacctccggatggacaatc

SEQ ID NO: 178695 - DNA, 273 bp, Zea mays
  Clone ID: MRT4577_94554C.1
cggtcaagttaaatttacttgctggttgctgtaggggcgcagccgctgcctccaaaagtttatctcctcggcgaattgatatcgcagtcgacgaacaacgcgccccgacctggctgacgaaatgatctttttacggcaacccaccttgccgggcctgggtatcagcagatagtaactaccttctgagaccctgattcacatggtatttggggtgcctcgctatgacgtctgtgggtccttactctgtacctgaccaggagggcggcttcccag

SEQ ID NO: 178696 - DNA, 405 bp, Zea mays
  unsure (1)..(405): unsure at all n locations
  Clone ID: MRT4577_94555C.1
gggcgaccacgcgtncggatgctactatgctgcttgccttgttcttttgtgatggtgtctgatcaagggcgctgcctaattaaaggtgctgtggcctgcaacctgctgtctgctccgtcctccacaaggccggccgcctgcccgcgtcttcttagccacccctcttctccggtcccctacctacattgcttctccacttgctccaccgcagacaatcaatgtcttcagtgccgagcttgaatcactcccagatcaattcgaggaaggagaaactgatgacgaaggtggacacctttgcgccgcacaactacggccacctatggaagaagtgcgtgaagacaaagatcaacaacaccaacttcctcaggttttactacagatgcacgtacaaggacaacatgaact

SEQ ID NO: 178697 - DNA, 423 bp, Zea mays
  Clone ID: MRT4577_94556C.1
cgaccctgagtagagccaatggagagcagtttagtagaaaagaaaccaccgtcgatgtgtgctgaccgtgctgccggactatgggcagagtggtgctatggttgttgacgaggccgtggtgaacctaggcacggagtcagaggaactggagaccaaccgaatcctgcctaattcatcgtcggtgtcaggaaatctcgccgccgtgccgcgcggtatcgtgggtggaactcggaagttgcataatccgaggtcaagaacaagtaccccaggatgaggcgcatggaggatgttgcgatgagttcatgagaggtataggccgttgtctctcagtcaactatggcggtgctggagcgacaaatctttaggatggcatgatttatttatttcgtgcagaactcctattttgtaggaaaggatgtgata

SEQ ID NO: 178698 - DNA, 196 bp, Zea mays
  Clone ID: MRT4577_94557C.1
cggacgcgtggggcaagaaatggatcctaccatgccagtactagcaaaaccacaatccgaaaggattcaagccggggtcccattggtaataagccacctttcaaggattcgaatgatgcaactctgaggaagagcaggggtagcctcaaagcaccattccttaaagaatggcagaccaaaattcttgcaaaggcag

SEQ ID NO: 178699 - DNA, 595 bp, Zea mays
  Clone ID: MRT4577_94558C.1
ggccgcttttttttttttttttttcgataaattggtgtgaccagctttcaacaccaattccatgtcactccaccatcttctatttgtcaaacaatcataagtaaatgcatgatctacttcatctttccatgtgttgtttttccaatcatcagacaccatccattgcataaacttatcttgtctatcctagaatatctaaaggaagataaagacggtgccaaacctagtggcattccacctaatcaactctccaccaattttctccctcatcatagcatgaagctattatggttatagaagaatctacaaattctttttgcatcgtccactacttcagagacctcagaaaagcgacttatatctttcagcatcaaattaattgtatgagctgcacagggttgccatgtaatgtgtgtataccgagtgatgagctgtcgacatgccttctttagttggacccattatctgtccatgaatcacacatgacaacaactccatattccttccgattatctttgaatttggccttgtgagcgtccatatcttcatagttcatatccaaatatttgccatcaaattcctttccaatagggat

SEQ ID NO: 178700 - DNA, 820 bp, Zea mays
  Clone ID: MRT4577_94559C.1
ggattgggttcctcgaggccggccgggaaggatggacgggtgtatgttggagagatttttttttacccgagaagctgcgccgcgcgccaatctgatcatctccatgcgctgaagatcgttggtgcccgccatgcttcccgatgattgctgccacatcgtcgctgaggaaatttcaagccccatagctgcacatatactcgacttctactacggcgacgacggcctgggcgatgacctctttgccgcggtgactgccacctctggcccattccctgccactgacgatgatgtttcttcgtctaccgctaccacccctcctatctgcggctacagtgaagacaccgcagctgctggtggagccacagcctacaccccgttgacatccttcgacaccactctcacagccctcctggaggaagagcagcaccatggccttgacgccgggttcctcccgcagatcgatggcctatcagaggtagcagcatactatccaactgccaccgatgaggccagcatagggcagttcgaccagatgggacttccagagaccttagacgagcaggtgcctcctccagtgcagatgagcagcagtgcatctgccttgatgccgctcgctacagactatgatgagtgcttcatggcagccgtagcagctggagggttcatgggtctggatggagccatgtatcagcaaactggagcagttcttccaggctgcagtgcagatgcatcacaacaggaattcttcagcagtgccggcagcaacagtatggtgatgattggcgagtatcaaaagatgatgggaaggtgaaaggctgac

SEQ ID NO: 178701 - DNA, 281 bp, Zea mays
  Clone ID: MRT4577_9455C.1
ctgcagctaacgaacgaggccccgagcaggcggaagtgctcctgggcggggcctcgttcgttagcttggcggcggtcgctctcctcaccgctctgcagctgatatggttgcggtggcgcagtgcgaggcacggggatttcccggacgttttacatgaacatggcataatcattgtaaagacccttcatacatcaaaagcaatgtatgacagtaatttggcaccacatctaactcagggtagtcactggctttcagagccttgtgtttctggaagaatgact

SEQ ID NO: 178702 - DNA, 389 bp, Zea mays
  unsure (1)..(389): unsure at all n locations
  Clone ID: MRT4577_94560C.1
cccacgcgtccggtacgcggtgcgccactgccgggtgcgctccgagctcctcgcgctgggcatccgccagcgctacacgctcgccgacgcgcaccacgcctacgccgagtcgctgcgcgccgtcggcgccctgctgcacgacttcctccgcggggtccagtcgctgccgccgncgnncgccgagcccgcgctccgnctnccgcagcagcggaagggcgacggcctccctgccgcgtcgccgccggccgcgatggcgtgctcctccggcgccggcgacgcgccggccgtcgccaagcaggtccgcatcgcccccgacgacgggcatatccagttctncgacggcgactccgattccgaggatgggcacatcaagttccactccgacgaag

SEQ ID NO: 178703 - DNA, 284 bp, Zea mays
  Clone ID: MRT4577_94561C.1
acttaagggggaatcattatcggggacatttaagttacattttgggaaccaaacgacacataaatggaaaaaacatttcctgcctcaggtctgaaaacaatgcagctttcacattttggaaaggattttttaaaagtttaaataaatttcccccaaaaaattaccaatggttaacattaattttccctgaatcccagccaccaccaacttttaattatttaacttaagcaaccaaacggcattgagaagtctcaagtgggagttccatttattcatcacccaaa

SEQ ID NO: 178704 - DNA, 168 bp, Zea mays
  unsure (1)..(168): unsure at all n locations
  Clone ID: MRT4577_94562C.1
acagcaacttaatgacagtattcattcaggagtgcgaatctccacttcaatattcagaatacaattatttgggccaacatttttctaaagctcatttcacttactcgggcaaggagatgagaccgtcactattagtgtctaacagcatanagaactccgatggagcac

SEQ ID NO: 178705 - DNA, 719 bp, Zea mays
  Clone ID: MRT4577_94563C.1
cccacgcgtccgaaactcccttccctccatcggtccatccatcctaacagaaacaggacgcgcacgagacgaaaccgccgccgcccatggccgactccggcgccctcgtcgtgacggaggcgcggcagcagcacccgctgagccagatcgcggccagcgggacgcaccggctgctgctcaagcagtgggtcaaggaggaggacctgctggcgcgccgcgtggcgctgcgggaggcccgcctcgacggcgcccacacggagatcgccttcctctactgcgccttcttcgccttccacgccgcttccgtgctgctcctcttcctctcctcctcctcctccgtcgccgcctcggcggccgcgacaacagcgtgcagacggtcgtggatcccctgcctcgtctcgctgctctcctcgctcgccatgctctgggcgctgtggtacaagtccgacacggaggccgtcctggagcgcgtcctcgcgcgagagcgcgaggatgcgctgtacctggccaggtgcgtctccgagctcaagcgcaagggcctccgcttcgacctgctcaaggaggtggacacactgcgcagggccaagaaccttcgcgctgaggccaagggcgcagcagacaggcccaggaggtggcagactagggacctggccgtcttcgcgctcttcgccgccgcctgcggggtgctcgtgctcaccaggttcttgctctgcaattag

SEQ ID NO: 178706 - DNA, 147 bp, Zea mays
  Clone ID: MRT4577_94564C.1
cttcagcagcggagatgtgataactaaatattacaggggacaacaagtataacatagaccatgatggatgtggttacaaaagtgatttatagaaatatcattggagcagaggtttattatggtgtgttttttaaacatcggaaagat

SEQ ID NO: 178707 - DNA, 859 bp, Zea mays
  Clone ID: MRT4577_94565C.1
gggtacctcgaggccggccgggtattccttcgtgtttgctagattggaaggctaaatagtacttcccacctatcaaacgtctgaattgtgaaaatgtgttaaagattagggtattttgagccttatgtttttagacaatgctaggtatgtaaataaattgacataaggatcagtcatacaatcttaggtagtacatgagctgaaatcatcagaactatattaggacacaaaatgttgtagtgcttatgttgtcttttcctaaccattggttcctggttaccataattaaataaaatgattgttgctcgcttatttttcacatctgactagctaaggcggttagtcctgatgaacttctaggtagtgctgaaatataaagtgaatttgtcgaccctttctagcaggttaagcttttaggctgaattggtcggtacctgggggcatgcagctcaatgctatatattgcttcagaaaccaatgccttcagtcattttagcatttcctttttttctaatcaatttcagggcacatcttggggcgaccatttctggaattttctttggttatctgacatgcccaagtgtagaatttgacaattctgcaaagaacggtcaaaaggaagccgtggctcttattaggcaacaagctcatccatgcaaatccgctgcagtctttttcataaccatacttgcgtttgctgtactcgccttcgcttatgggacacaattcaacaatatggatctggaataggcaaatagctaagtgttgtcatggttcacttcatatatatatatgcatgcatgtagcccgacagctatatattcgggaatgtgaatgagcccgagatgtaagaaacgtt

SEQ ID NO: 178708 - DNA, 335 bp, Zea mays
  Clone ID: MRT4577_94566C.1
ccggccgggtggccgagctcgccgccatcgaccccaagcgcgccaagaggtaccgcctcctcgatcgcggcaattcatccacttctttagttacggaggtggcgaggaattgactaaggcgtcgaggacaatcatgtgctcatgcttttctgatgggaattgctggagattaataagttgttttgtttgagggataagctagcctcactttttttggtttgtggaatagattaaattgatccatcatcactttattcctcgtagtcagtcagtactaaaatgagaaataatatcatcccatcaatcccaccaaaaaaaaaaaaaaaaaagcggcc

SEQ ID NO: 178709 - DNA, 162 bp, Zea mays
  Clone ID: MRT4577_94567C.1
gaaattcggctcgtgtcacccctgtattaaaaaagggctatttttttgggattctcaacagtatatgggacttgatcttagctccctagtttggttagcaaataaacatcctttttcgtctaaatgtcgaggctcatttaggcgtttgatgtccatcaatgg

SEQ ID NO: 178710 - DNA, 282 bp, Zea mays
  Clone ID: MRT4577_94568C.1
gactagttctatcccgacagcggcccgagaagcacccctcagagggctctcatgcgtttcatcatgctgtggggggctgtggcctctttttcgcgcaaagagacgtgccgcctgtgctctgtgtctaagacacacgcgaactctcgtgaggaacgcatttgtgaaggggtctatgtggagacactaaaaaccgactgtggccgctactctcatatcctttgtgtctcctctgtggggggtgtaacagtgattacacgagatagcgggactcgtgtttttccc

SEQ ID NO: 178711 - DNA, 449 bp, Zea mays
  Clone ID: MRT4577_94569C.1
tgggaccgcaactacaactcgactcatcaacaaccgcaaatatgggaaaggttcacggatccctcgctcgtgccggaaaggtcaagtctcagacccccaaggttgagccccaagagaagaagaagacccccaagggccgcgcgaagaagaggctcacatacacccgccgtttcgtcaacgtcaccatgaccggtggcaagcgcaagatgaaccctaaccccacctcataagccaagcacgagaggaagggcgcatgaaacgagcacgatgagctagagaatacggtcatgaattcggtttcctcagtacagctatgactctggatcagagggagtgggaatcacggacgtcgctacggcacgttcctttgcagaagcatgatcccacactttgggatgatgggggcatattcatggcgtaaatgtatattctgctttttgcacggctgc

SEQ ID NO: 178712 - DNA, 757 bp, Zea mays
  unsure (1)..(757): unsure at all n locations
  Clone ID: MRT4577_9456C.1
gtggtacgcctgcaggttccggtccggaattcccgggtcgacccacgcgtccgatgggcctggtataaaaaacacagaggcaggcctgcctggcctacaaacgatggtcaccgatatccctgaagtagctgcagaagccacaccaaggaccaacttccatagctgtgtggccttcatgttccgaaaattatgatactccgtactgcgcccgtacctgactctattgtcttatctccccctaccccggctcctgtccctgcgcctgcccctgcacagactgtacccaaccccgcggctgtgccagtgggactgtggatcctcactcactctttgcacagtggcatgcttcaacctggcgcctgcctagcccaccacccatagtggcctccccgaccccagcgctctgctccaactacatcacgcaacttctgcttctgctcaggcctcgggtacttttttctcttggtaactttatgaaatcaccaactcaaaagattaaaaaggattgggtatggtagtatatagcactagggagacagagatcggtgcccatctaaatttgaggccaagactatacagtaagatctgtattaaaaaaataatactatacagagaaaccctgtcttgaaaaatcagaaaaaatatattaataataaaaaaatcccaagttgctctgcatctgtagacccanaaactcgggagactcggtcaggaggatcaattcagtccctaaggtcaacaacctacacagacctac

SEQ ID NO: 178713 - DNA, 589 bp, Zea mays
  unsure (1)..(589): unsure at all n locations
  Clone ID: MRT4577_94570C.1
cggncgcgtgggtgcagatccattggggtgaggaaataagatggagtctgagatcatccgaagtcccaaaaaatcagacacatggaatacagggagatcaaatgaaagtccatgggataatactgatgcaccgcaggattcctgggttaagagtgcagctcgcaataacaacactcaggatggttcatgggataaagtagtatctatgaaggatcttgattcactccaagattcatggagtaaggcgacaatccagacgaatgatgcacagaatgattcttgggacaatgtggccaaaaatgccccggattctgccgcagaagactcctggggggctgcaacaccagcggagacaactgattctggtaacaaggagtggaaatcagatggatggggggcaaaatctggtaactggagcagccaaagaaataatcctgggagacccccaaggagaccagatgagaaggggtccacctccaccaagacaacggttcgaactaacagttgncggagaagaacattcttctaaaagttgaacccattaaattacgtgtgagaagcatcttccgtgaagcattgaacggtgtta

SEQ ID NO: 178714 - DNA, 205 bp, Zea mays
  unsure (1)..(205): unsure at all n locations
  Clone ID: MRT4577_94571C.1
aattacccgggtccggacccacgccgtctctngatcacctnncttcgcctaagctagggcctgccactggccanngcaggtgccaccntngccatctctggctctggcgtctcgcaagggcacacgacccggcccgtcctggcacacagtntnggccatggcntgaccanntagccanncgatggggcgctgctnnngaagcccg

SEQ ID NO: 178715 - DNA, 377 bp, Zea mays
  Clone ID: MRT4577_94572C.1
gacgagaccgccgttgagcccgaggaggatgcttcacccgccgaccctgacgctatggatgttgacatgcctcctcccgccaaaccttcaaagtcgagcagcaacatttaccaaccacccgatatccccgcgaaccctcaattccccttcttcacacagaccgtctcactctacgagcctcttttccccattggctgggcgcagcctgtcacaagctgccagcaacagcacctctcacatctccgaaacaagtacgtgccttcgctgcgcggtgttctcctcgactacaagaatgtcgctttcggcgaaaaccctggacgaaagggtgcggctacagatgatgagtcgccggcgactgtcatggccaatggcgagtc

SEQ ID NO: 178716 - DNA, 202 bp, Zea mays
  Clone ID: MRT4577_94573C.1
atgccgtaacgcccggctcctgcaggcgctcggcgtccgctcattcctgaccccgcagtgggcgcgatggcagaggctgtactgagggtcgctcgacggcagctgagccagcgcggcgggtctggatcccccatcctcctgcggcagatgttcgagcctgtgagctgcaccttcacgtacctgctgggtgacagagagtccc

SEQ ID NO: 178717 - DNA, 374 bp, Zea mays
  Clone ID: MRT4577_94574C.1
caaatctgtacgtctaccatctgtttttccattactcggcctgtacatttgttcttggtgggaggctcgttttaaatacaaaacaaactttttaatgtcacggtcttttaccagatccactgtagtactctactagttttcaattcactaataataaaataaccatggtataaatttgacctaccattgacctattctttgttttcttttatttaattgaatttgtattcaatactataattcatcttacttattcttataattaattttaactacttttctattatattatagtatttctctttcattactactaatcattatgtatttgtaccctctctcttttgtagattattccacatttctttttatct

SEQ ID NO: 178718 - DNA, 241 bp, Zea mays
  unsure (1)..(241): unsure at all n locations
  Clone ID: MRT4577_94575C.1
acgcctgcagtaccngtccgnattccncggctccattcttcccttcaaatacagatctctctcggccccgtgcccagcgctccgaaaccctagcgccgccgcgggtgccaggtcgcgagcgtggncatgtgcattgtgtttataggggggttntgaggtgggttgggtggtgtgtgtttttgtgaggagggttaggtttgtggttttggtgttggtgggttggggggtggggagtatgagt

SEQ ID NO: 178719 - DNA, 423 bp, Zea mays
  Clone ID: MRT4577_94576C.1
gggttggggaaaaaaagcgaccgcccgaatttgctttaacaagttcattacatacccgattccctcttttggtttccaaaggtttccatgggatacatcccccttcccaagatccatgagggggggcggcccccttgcaggtagacccttgaatcactcgggctgggcgtaccaaaccccctggatcttgacatccttgggcgccttggccccgaggtcggtgtcggacgggtgcactcttttaaagaccccgatgaccttgccggtcttcgggttgcttttggggaccctcaacgtgatgtttccgggggagggggcggggtttttgaaggccttctttgggagctccttcttgtaacctttgccctcgggggggagcgcgacggctttttcttatccggtggagcccccccggcccttggg

SEQ ID NO: 178720 - DNA, 457 bp, Zea mays
  Clone ID: MRT4577_94577C.1
tatttacctttttttttttttttttttggggggttttttttaacattgcggagggtatttaacccaggattaaggaaacaagaaacatatgtccatggtgcacacggggcgccccccaaaaaggaaaatccccgggaggccaagcaaaaaaaaaaaaaaactccaccccactcgaaagggggagatcaaaaagagaacacaacctacaacccccccccaaaaccgggaaaagcaaaacccccggcacaggggacaaagaaaacgacctgggcctctaactttcccacgacaacaggggcaaaaccaaaattgggggccaaacaaaaaagaccctcctggggcccccccccccttgcccggaacaaagggcccgcccaaactggccacaaaacaggaagggaccccgcaaaaacaaaaggggggccaattgccaccaaggggaaggcccaaccccccc

SEQ ID NO: 178721 - DNA, 130 bp, Zea mays
  Clone ID: MRT4577_94578C.1
aaccaacgccggctggatccgcgcatcgcttcaaaggcgatgactgctgtaagagggtctgcatggtgatcagacagacggtggaccccacgctgagtctgtggatgaccgcgttgtctgtccgccccgt

SEQ ID NO: 178722 - DNA, 547 bp, Zea mays
  Clone ID: MRT4577_94579C.1
agcttgagatatttattcaattcttttctttcatctgtgttcataaatatctttagcttgagattaaaaaaactcaattacaggggggtaacggatcattcacatgcacgtacgagcggggatcgatggattggattcgggtgtgtgtcgagtcaacaatcagtcgctgtctggaggcttatggtcgaccagcttgtgggtgagggcgggggcgtcctgtatggtggggatgctctgggcattgtcctgctcgacggtgatctatgaactcctactacagcgccctgaccatctgcaccccgtccagcgagtcggaaccgaagaccgtgaacttggtctccggcgacaaacccaggtccgccgccagcgacagctggtgcttcaccaaaaccatcaccttgctcaccgagttctccttaaacgggtagactctaaacacgaggggattcgtgtcttagggagacaatgcctcttcgggtggtggacatggacaccacaatcctgactgggactccgcttaccttgcagctcaaggttggagccttgc

SEQ ID NO: 178723 - DNA, 278 bp, Zea mays
  unsure (1)..(278): unsure at all n locations
  Clone ID: MRT4577_9457C.1
agtcccgcttccccgtaacgagcgacgcagccaagcccgttccaacaagacagcggcaccagccctggcctttcggcggcggcgagtcccggtctccggtcgctggcggtgcgcgccgccccttttgaggcgccgcactgtcctcctccgtccacgacgacgcctaatgagacggccaagtgggagaagatcaacctaacgccgggatcgtgacctgcaccctcctggcggcgtacaaacctgtccaagggccacccccacttcgatgagccngccgg

SEQ ID NO: 178724 - DNA, 356 bp, Zea mays
  unsure (1)..(356): unsure at all n locations
  Clone ID: MRT4577_94580C.1
cgcagtccggccggaattccgggtcgcccagcgtcgcccacgcttcgagctcgcagcacctgaaccacttgagaaccagccagctgctaaccaaccggcggagccaagaacaggaagagcacttgcccgtcaggcaacatgtgcaactcacgtcaagtccggggcgtcgcccagatcgacngcgccggtgctgcagcgggggcaaccgttggcggcccggacgccgccgccgtcaagagtctgccaagtctttcctgccgcttcctacgacaacatgcaccgtgcccgccctcccgcctgccgagaacacccgtgcggggcggcccggggcggctttctgctgctcctacgacgcc

SEQ ID NO: 178725 - DNA, 1622 bp, Zea mays
  unsure (1)..(1622): unsure at all n locations
  Clone ID: MRT4577_94581C.1
tgagaaacaggtgaaagaaaagctatattactggcttatccataagatacatgatgatggaaaaggtccaaatgtcctaggcaaggaaggacaaggtgccattcatttagtagccgcacttggttatgattgggctatcaaaccaatagttgcggcaggagtaaatataaacttcagggatattcgtggatggactgcgcttcactgggctgcatgttgtggaagggagcggacagttggtgccctgatagcaagcggagctgcatctggtgctttaacagatccaacgcagcagtatccatctggaagaactcctgctgatttagcatcagaaaatggtcacaaaggcattgctggttttcttgcagagtctgctttgacaagtcacctctcagctcttacattaaaagagtcgccaagtggcaatgtggaagaaatatgtggattaacagcagctgaaggttttgcagcatcaagttcttcccagcttgcttgtgttaattctcaggaagagtccttaaaagattcacttggtgcagttcgtaaatcaactcaagcagcagccagaatatttcaagcttttagggtggaatcattccacattcggctcgagattgaatatggagatgatgattgtggattgtctgatgaacgcacactttcacttgtttcccttagaaacccgaaatctggacacggtgattcacattctgctgctgttcgtattcaaaacaagttcagaggatggaaaggaagaaaagagtttatgcttatccggcagaaaattgtgaagatacaggcccatgtacgtggacatcaggtaaggaaaaactatcggaaggtagtctggtctgttggcatcgtggagaaagtcatactgaggtggaggagaaagggaaggggtctgcgaggtttccaacctgagaaacaacttgaaggtccatcatggcagatccaacctgcaaaggctgaggctgaggatgaatatgacttcttgaaggatggcaggaaacaggctacaggcaggttggatagagcactggctcgtgtgcgttccatgaatcagtatcctgaagcaagagaccagtaccgcaggctgcaagcctgtgttaacagcctacgagagtcccaggcgatgcaggacaggatgctggctgattcagctggcaccgatgggggtgatttcatgactgaattggaggagctatgccgggatgatggcgatgccccgatgtcgactatttcttgacatggagcttactatagatcagttaggcagtgacatgttctttaccagactagatgtaaattgttgttactaaatggtctctactcaccgttgaacaccataatataatgatatatagcagctaatacatggacttctacagattatgatataaaaaaaaaaaaaaaaaaaaaaaaaaaaaaaanaaaaaaaaaaaaaaaaaaaaaaaaaaaaaggacnnacgcgtgaaggcaacaggctatctctcctatggtgccacctaaatacaatttatatgggcgccactttacaaccataaattcggcgaatttcttggcgttccccaactgaataacctgggaacacatccaattaaccccctttggcgaaaaac

SEQ ID NO: 178726 - DNA, 635 bp, Zea mays
  Clone ID: MRT4577_94582C.1
ttgggggtaccgccgcccctcctcgagttttttttttttttttttttttttttttttttttttttttttttttttttttttttttttttttttttttttttttaaaaaccccatacgggcttttgggggttttttttcaaaaaaaatatccgcccgggcccccaaaaacaaaagtcccccccccgaaaaaaaaattacaatttttttttagggggctcacatgcccctcacaggggaatgggaaggcccatgaaaattccaaaatttagaccccagggggggggactaggttgggcagttcctgggacatgtccttggaaaaaacgggggaggacaaactttgtttaaaaaccctcagggccattgacctccttgttttaaaggccctcccctttgggaatccccaacttccctccaggctgggggaaaattgcccccttgcccttggggggaattccagagccaaaccaaacttccccaaaaccctttaagctggaaagctcaactttgggggggggggccttgacccgaccaaggaaattggcaccctttttgaactcaggcccaagctcaatggaggggttaccgggattccctctggagggggggcggatgacaaacccttcacccagggg

SEQ ID NO: 178727 - DNA, 285 bp, Zea mays
  unsure (1)..(285): unsure at all n locations
  Clone ID: MRT4577_94583C.1
ggaattcccgggtgcgacgccacgccagtccgactcgattcctccgcaacaaccactctcnngcctgcgatcgttcgtagccctccgtcagcagtcgagcagcngatcagtgtcggctctacnntgcggaaagtaccaaggatgagccctcatcaagaatgccctgcctacattggcatcccccggcaangggtatttccttgctgctgatgaagtccaaactggcaccatnntggcaagcgccctttccaaagcatcaatgttcgagatacgnnttgaggagaa

SEQ ID NO: 178728 - DNA, 195 bp, Zea mays
  Clone ID: MRT4577_94584C.1
tccccaatttaaaccgatcggctgggggggctgcggcgccgcacacacataatgatgtgcataccaaaccatctcgacccctagaactctccttacgctactactgctctcatccgccgctgctccagaacgctgactcacaccggaccaccaccggaccaccccttaccaccaccgaaccatgctggcagcagc

SEQ ID NO: 178729 - DNA, 279 bp, Zea mays
  unsure (1)..(279): unsure at all n locations
  Clone ID: MRT4577_94585C.1
tataacttgtgaaggtccagtgtacaaatacagtatcatcaattttcactgaaacagatacagtatattgaaaaaaaaaaaaaaaaaaaaaaagaaaaacaaatttagaaaaaaaaggcttaaaacgtgtggaaaaaaaaaaaaaaagaaataatttggaggatggatccaatacaatctggcggggttggtaggagggtttttggctcacatgtggcnggcccctctgagtgccgtgcagcaaggagcaactggggccttttagcaggctaggggcgc

SEQ ID NO: 178730 - DNA, 380 bp, Zea mays
  unsure (1)..(380): unsure at all n locations
  Clone ID: MRT4577_94586C.1
gggccacattctaaatccctgggattttttttttaaacaaaaggaaataagggtttgaagcggccggggaaaaactccaataacaatggggaacccagttttttcccccgccaaaaaaagatatgccttttggtgatccccctaaaaaacaaaatcctggaattcttctgatagttctggaaaaaccatgcccgccttaatttttagcaattttgagacaggcaactgggatttacatgaggaacacgggatacagcgccagggccttttttttggggttaacagcagcccttatgagggggtttgctgcccaaaagctccatgccaatgttaccgtnacccaaaccatttttagtttgaccctggcccttaagcatgca

SEQ ID NO: 178731 - DNA, 411 bp, Zea mays
  Clone ID: MRT4577_94587C.1
aatatcttggtctccattgttgctctattgttgctacatgtgttgctaacgcgacgattttccttaattgctaacaggctccaatagcttccttttttccccaatactttccatcaataatagcttcagtttgtgaaaaccaagctcttaaaccatataggcttaaacaagcaatcgcagcaagcaacatacctttatcgcccttgttgtgtcaacaatcgccagccctatctttggtgcagtcattggtacaaaccatcagcacacaacatgtagaaactctcgctctacgtgatatcaaccaagcatctggggcaaacctttcttactactctcagcaacaactttttctattatacaaacaacttactatgctgaacgctgcttattatatgcaacaactattaccaa

SEQ ID NO: 178732 - DNA, 209 bp, Zea mays
  Clone ID: MRT4577_94588C.1
tcgttcactcgtacgtgaaaactagtagactggggcagattttagagatcagtccggaccttgtcgaccgaccgagtatgcaacttatgtcatcaatccgaaccttattctagtctcaaatcaagcttgtgtctatacagacaattcacgatatagaatatcgacataacccagtaagagttgaatacggaacaatcagaagcggagac

SEQ ID NO: 178733 - DNA, 236 bp, Zea mays
  Clone ID: MRT4577_94589C.1
gttttggatcgtgggcggccgtcctggagtttctttgctaacgaccgcttgcttgcaacggatgggtttttttttggggtaaccggaatcaaattaattggccgcggtttaacaacttcgggcctgggaaaaccttgtcgtaacctaacttattcgctttgctttacatccccctttctctggtgggggaatttttgaaaaggcctttacctatcgcccttcttaacaattggcaa

SEQ ID NO: 178734 - DNA, 280 bp, Zea mays
  Clone ID: MRT4577_9458C.1
gtgctccggggcacaggtcgccccccaccccagtgggtgaggaaccggcttgtacgaccaccctcactttaattacgaacgccaccacgaactccaagctggactccactaggaactacctgtacccacacctgatgcttatcactgaacggaaggccgtcctggatagcacaaacctctagtgcaaaaacagctcgcactgcgtgaacatggcgctgaagagcacgacggcgctggctgacagaccttaccacatcagccaagagacgaacatagcctt

SEQ ID NO: 178735 - DNA, 336 bp, Zea mays
  Clone ID: MRT4577_94590C.1
gggtaccctccgggttcgctcggggaagtagcaccacttccctccgtccggctgccaaccccagcactttgcagcagcaggcctctctcctctcactctactgctgcagctgccccacccctctcccaaaacctcaggtcaatcccaggtttcaaatccgccaccttttgcacacacaccacatttgcctacccccagagctgagctagctagctgctctctctctctctttcaccgaacagagcccaagaggcctcatatgagccactgctgttccttcgcatagctagtagccctctgtctcctctcagtccccccacactccagttaccaccg

SEQ ID NO: 178736 - DNA, 170 bp, Zea mays
  Clone ID: MRT4577_94591C.1
gccacgcgtgcgggagcgagtgtcggaacagactcctaaacctccagcaggatcttactcggtctattgctatataacaacatgtctgtactgctgatcatagcacttagcattgtaccatgactagagcagtccatataactgcctttagataaaagggcggacgatat

SEQ ID NO: 178737 - DNA, 997 bp, Zea mays
  Clone ID: MRT4577_94592C.1
agaaagccgcgaaaagagcgcgcgggcgaggaggtccccctctccgagatggctaggtgtttttcgcgggaccctcctcctgatgtccccgccggcggcgcgaggggccaagaaggcgaccctcgaagccgccggggacacccggccggggcgtacactccacacctcgcctccgtgcttccgtctcgcacttccggacataaagtgcgaccatggccatggcggcgctgcgggaaacctcccgctgtttggcgtccagggggagatctgcggcctggcgacccgtgctcctcgcgcagtcccgcggcatcacttacaagctcttcgtcggaggtttatcacagtttgcgacggaagcaagcctagcagaagcattctcacgttacggacaactgttaccaaagccgggcttctttcttgagtgcagctaccgtcgtcagggataaggtgaccgacgtaccgaaaggattcggcttcgtgaagtttgcttccccggaggaagccaataacgcgagggaagagatgaacggcaaggcattgaacggtcgggtcatatacgtggacattgcaaaggccagacaggaccgtgctgcagatgccctcccaatagcgagaggccctcctaagcctatcagcaacgactgatagaggaaggccttggtgtgcgctcccaatagcgagaggtcctcctaaaccaattagcaacggctgttcaaggaatgcctggtgtgtagttccctcccgtcctcagctggcatactagttcgattctcagatacggaggctcttagatgatgaaacgtgccgtgaaatattctgcggaactttgaggttctggttgaacacaagtagagtttatttagatttaattacccggagtactcgtgtcatgcttgtccggatcagacactgcgtttgcttgtcatgacaggtgctgctttaataaatccgtggtgctagccacacgaaacaaaaaaaaaaaaaaaaaagcggccct

SEQ ID NO: 178738 - DNA, 184 bp, Zea mays
  unsure (1)..(184): unsure at all n locations
  Clone ID: MRT4577_94593C.1
actaaagcagttggctgatgcgagggagacgaagacnnncgacgatgactatgacgtcgttgatgatttgcagaacatggacgacctggagctgcgggtnnnnnnnttcgccgacgnnntgttcgacgaaaagcgccagagaaacagggagaccttcgtccagaccttgtccaggttctcggcc

SEQ ID NO: 178739 - DNA, 264 bp, Zea mays
  Clone ID: MRT4577_94594C.1
ttcctcctttttttgttttttttcgcactttttgtttggtttttttattaatcagttctatcactaccagggaacattgtaccaatctgggccaaagaaatctatttagctagttgtaaggtctgtcagtttacaaacatatgacttgaaggatatggtcgaaagcctggaagtttcttttcatttgaggggctgaatatgctaacttctataagagggtccatcaaccaaaatttccattgacccctggggggaggaacttag

SEQ ID NO: 178740 - DNA, 333 bp, Zea mays
  Clone ID: MRT4577_94595C.1
gttccggtcctgattttattcctgggtcgacgaattcatcgtcggcggccgccgtttgaggtgccggggttttttgagctttcctccttgtttctcctcagaacgacgcgccacgagacggacgtgcacgccaccgagaccgggccgagggcggatacggcggggatcaaacccgtcttccacctatgttgcacgtgacggatggccatgccctcgaagatgttgacgacgcccaccacgatgacggtgtcaccgaccgagcgggggcaggcgggacaggacactcagccctagaggtccttcttcggcactcaggaggagcgcgaagatctg

SEQ ID NO: 178741 - DNA, 340 bp, Zea mays
  Clone ID: MRT4577_94596C.1
aaaccaagccaacggttttggattttttttttattggaccccttaaggtctcctgatcttattttattcggggtttccaaaaagacaggtacaggggtccagccaggagagggggaggggcacaaaagcgggggtccaattttttttttttgaacgaaaccaaatacatgctttttttgaaaagttttaaaggaaggttgaaacttctaccccgttttggcctttttgggggggtggataaaacggggaactttttcgttaataacccttcaagggccccaaaaaaatttgggggggatgatcggcaccccctccccggggggatcctcccaatactttt

SEQ ID NO: 178742 - DNA, 343 bp, Zea mays
  Clone ID: MRT4577_94597C.1
gagtggtgtgttataacagcgccaccatcgggatatataagatacaatcggactctacttctcactttgtaccgctcgcgtcgtgagaattctgctcctcaccctgaggacgagtttagggtgaccgacccgcggaacgacgttactagcgctagcatactagggaggcccgcactgagggccccttgaagaagttgatgcacgacgcccacccaattacagactccaccgccacgtccaggtgctcccggccgccgccgacgatcgtgtgagttccgactgccgttgacgccccgtggagtggatcccctacacggcctcggagttgaggaggcagctaccg

SEQ ID NO: 178743 - DNA, 546 bp, Zea mays
  Clone ID: MRT4577_94598C.1
ccggccgggactgactgcctgctgatcctggatcagaatccgagaatgggtgatacagatcaagtattcgacaggtgtgttctccgaccagaacttaaagtaccaattcctcatcgccgcacgattcgaaacttcacctcgccggtcagcctccctagaagagattcaaccctgtccaggttgctatcatctcctaggaggcatgtggatccttaccagagtcctgccctaagcaaaagatacctctttcctacgaatgctgcaagactcccaggatttctatgcatgtgtggaaagtggtgaacacaagtattgcctgagtgcgactcagatatagtgttgagatgatacttactaccgaaattggcataggtgatctttccaccaagactctgactagcgcacatggagcaaactttacatatgacatcttgctcatagctacaggctcctccgtcatactaatcatcgactttggcacgcaaagagctaagtctagaaacattctatatcaaacgtaaattattgaggctgacaagatgtgtg

SEQ ID NO: 178744 - DNA, 277 bp, Zea mays
  Clone ID: MRT4577_94599C.1
tcttggcctaaattttattctttttctctctcacacacacaaatatatcagtataccgttctccttttattagtgccagtatgtaatggcatgttcggctgcctttctagcagatttttattttagtcttttttctaaaactgttattgttgttacttgacttcaattatcaaaaatcaaggcaatataagttaaatattaggaccttcgttctttggtttaacactttttcaaagtgttaacgagaagcaacattgcatagtataatatgatagtc

SEQ ID NO: 178745 - DNA, 122 bp, Zea mays
  Clone ID: MRT4577_9459C.1
gagggggcataaaaaatttctttcccttgggaccctccttgggaggggaatctcattttgttttacagctgggggatatttaatctaatcaaatgccccaaaagtgccctacccttgggttt

SEQ ID NO: 178746 - DNA, 402 bp, Zea mays
  Clone ID: MRT4577_945C.1
cccacactttcgagaacacgttatcgctatcctctgatgtcccgagccacttgctaggggacgtgaattataatctagtggactcataccaacattaaattatatatttaaaacactaaccatatatagtaaacacgcttgtacttaataaccttaaacttagagatcatgccatgactgttctcaccaaaaaaattgctttgattatcatttacatcacttgtataatctatgctgtgacacataatgagcagtactgacagggagcattctatttacaattattagacttttccactaaaatttctatttaacaatatataatatattattacaatctatttgattattgaccacttatagattagtcctttcttgtgtattgacctttccatatctacc

SEQ ID NO: 178747 - DNA, 657 bp, Zea mays
  Clone ID: MRT4577_94600C.1
gccgggagccgtagcatcgtaaggccttgttcggttaaaaaaaaaaaaaaaaaaaaaaaaaaaaaaaaaaaaaaaaaaaaaaaaacccccgccgcccgtagggtagggtaaggtccttattcttaacttaaaaaaaaaaccccccacccttttgggggggccccggtttttaaaggggaaaacttttaaggggggaaaaccctggcccaagggggaaaacttgcgggttcgggttccgccccctggtggacccttttaaaagctttttaagggggaacccaaagccgtttggcccttcttttttaattaaagccctcgcttttttatttttccggggggcctttaatttttttattaaaagaaagggccggaaaaaacaaaaccgcccccccctcccttagccggggggttttaaatagcgggccgcaattgttgcaataccaaacgcgggttaaacctcccagaaaaaaccttcaattggggggggcaaccctccgggggaccggcccgtccccaaacccgccaagggggaccaggtagagtttcctggggcgcgtggagaaacccttgtaaaaggacctggaaaaaaggcccccgaaatttggggaaagggggggcccccctatttttggataaggaaaggggcacatcccaggg

SEQ ID NO: 178748 - DNA, 399 bp, Zea mays
  Clone ID: MRT4577_94601C.1
cgcccgaagcacgccccgcgacccggacagagccggcgccaccaccgagcgagggacgacacggcggggagagggacggcgctgggggcaggcgcgcccacgaaggcggcctgccggagcgggaggagggccccgggccggtgcaggagcgagccacaggcacgaggcggccaggggcgcgcgccgggggggcgcgaccggcgccaagtcgatctggcacggggacttgtgggcgccgcagcgggcggcgatcaccgactgcgcttcgcggctcgcggcggcagggcccagccgcggcgaacgcgcagcacggcggggccacgtggctcaagacggcacgcaagatcgacgccagcttcaaggtgccgttcctggccctgggcctgggcgcccccgccg

SEQ ID NO: 178749 - DNA, 690 bp, Zea mays
  Clone ID: MRT4577_94602C.1
aagtccaccaacatcctgctcgacgaggactacgaggccaagatcgccgacttcggcattgccaaggtcgccgaggattcctccgactccgagttcagctgcttcgccggaacgcatggctacctcgcgcccgagctggcctactcgctcaaagtgacggagaagacggacgtgtacagcttcggcgtggtgctgctggagctggtcaccggccggagcccgatcgacccgcgcttcggcgagggcagggacatcgtgttctggctttccagcaagctcgcctcggagagcctccacgacgtcctggacccgcgggtcgccgtgcttcccagggagagggacgacatgctcaaggtgctcaagatcgccgtgctttgcaccgcaaagctgccggcgggcaggccgaccatgagggacgtggtgaagatgctcaccgacgccggcacggggccctgcagcccgcgcggacagccgccgtcaagggtctgcagcaacaagagctgctgctgaatttttggagcaggctctgcgtctagccaccgacacatatgcctctgtttcttcgttggattcctggtgccacctgcgttatgtggtaggacaattcgtaggatcatgtacttgcaggtattttgtacaatgattaaactgcagtactccatcctcattaatgtaagccataatctggtt

SEQ ID NO: 178750 - DNA, 911 bp, Zea mays
  Clone ID: MRT4577_94603C.1
tttcaaaaaaaaaaaaaaagacaagcaccgaagatgacttgacggggggaatacccaccctcgtctgttatggcggcgccaccgccgatactcgagctggacccgtcgcacgatcgagccgtcagcgttgtcgaggacatcgtgcgtctagagcggagaatctttccgaagcacgaatcgctggcgcggtccctgcacgacgagctaaagcggcggaactccgggctgatctacaagacgtccagcgccgacgagggggaggtcatcgggtatgccatgtacacctgcaacacatccctctgcgccaccatcaccaagctcgccgtgaaggagaactgcaggcggcagggccacggcgaggcgctgctggcgggcgcagtggagcggtgccggcggcggaaggtccagcggctctccctccacgtcgaccccacgaggacggctgccgtggcgctgtaccgcaaggccgggttccaggtcgacaccaccgtcgagggctactacgcgcctcacagggacgcctaccggatgttcttggatctgtagtagaaccgtcgaggacgagaaaaccagcccatgtgttccggctagctgctgccggcttgtagctggtctggtctggtgatacaatacctcgtgagtaggatacagccaacagccgagcagggtggatgattcgaagctgtaagaacgatctgctagaaagttttcataccaccaaggtaattcccgctggattctgaaaataatgtttccgtattatatgagcataaggtttcagtaactgcaactgtagttaggatatcactttggctgtatggtagtaattcagttcatagatgctgccacatcagttcctcctccaaaaaaaaaaaaaaaaaagcggccaaaaaaaaaaaaaaaaagcggcc

SEQ ID NO: 178751 - DNA, 329 bp, Zea mays
  Clone ID: MRT4577_94604C.1
ccacaagaacaattccggatcccctttaatttttgttccggaggaacgatcctagaaatgctttaatctttctgctgggcttattatttcagacactatgagcttggttacaagctcttttctatcgcccttctgtttttctgagttactgggagggcattgttccgccgccgagaattcaggggcattcggcgacccctctgatggtggccaggttgctcttctgcctccgggcccagggtggggggaaatccctttttgtccttcccgagggcagcccggcaggtcctttagggggcccttcatctgggcctttcgggcccgggggg

SEQ ID NO: 178752 - DNA, 322 bp, Zea mays
  Clone ID: MRT4577_94605C.1
atacaatgggatctattgagctataaaatgtgcatatatacagtggtcagcactgtctaggaacttctcttgaatccgtttataatatattgcgcatgctggggagttatatagactcttcaaggcgctgttaccctggctataaatttatataataaattgaaaaattcatcattcctctgtactcatgaccaaagcacataatgctaatgtaggctcagaggggaaatacagttctcctgcatatgtgaggaaatgtggagtcctgtcaagaaaatgtaataaacataatcatcgtagcctgctgacaccaaggaaaaag

SEQ ID NO: 178753 - DNA, 308 bp, Zea mays
  unsure (1)..(308): unsure at all n locations
  Clone ID: MRT4577_94606C.1
agcagtggtaacaacgcagagtactcggtttgtttgtgtgtgtgaggctgctgttgtctaggtggtttgttagggccttcaccggtttttctaccgtgcgccctgtgtaggttttgggtccggttttccttaaaactggatcaattctattcttcttaattgagaggcagagctcctgccattatgttaccacccatatttgacgacaaaatatgaattaatcgttgtccctttccatatttaagnaagaaaacccactctgcgattaacaccactgctcaacgccatgattccccccactgactctg

SEQ ID NO: 178754 - DNA, 739 bp, Zea mays
  Clone ID: MRT4577_94607C.1
ccggccggggtttgtgtagcttcgccgacctctggccatctctccgccatggaggattgctacgccgccgtgtggtgtattgggtcggtgtgatgatttttgggccgtcggatcggaaatatacgatcaggatcgactcaagcatagcgactcagccaaaaccatgggggctcgtccgatcagaatctatgggtcacgattagatcccaggccatgacatctagcccgtcgatttaaccacctgcggctccaattagatactggttagatctgctcgtggccgtccgaatctaatctgacggcccaggcagccccgtaccccttcgcggatgcatcttgctaaagagccccagggtttcaccgaaatgaacccgccgtccacctcgggtcatggctgtgtcggtagattttatagaataaaccccgaccttttctgtattagtgcgcccagtctaggaattaaagaaaataggaaaaagagagttagaaattgattttgagtataaaaataattataaaacttgtataattcatagaaaattcatattaagtccaaattagtccattccagttcctataattttgtaataatattgtttatcagttagtgccactgtttttacatgaaatctacattaaaatttatatcctaattaatcttgtacaaaacacatagaatctttggaaatccataacttaaaatctataactcccaaaaaaaaaaaaaaaatttgcggcc

SEQ ID NO: 178755 - DNA, 313 bp, Zea mays
  unsure (1)..(313): unsure at all n locations
  Clone ID: MRT4577_94608C.1
cccctttagcgccccatcttatcttcctcgctctnggcaaaacaggttgttttataaataattttttcgtccacaaaaaaccatnataataataaccaccaatccataatcttcgtcaacaggctaactttaatcagcatcaattttcaaaccaattcaatcacaaccatcatcataataatcgaaacaacaatataatgcctttcctacacaaccaaaatgatccagttcaacaaaatgccatttctccaccactaaatcatcaactatcacgtactccaatgcaaactcctcaacaaattaacgatcccaa

SEQ ID NO: 178756 - DNA, 347 bp, Zea mays
  Clone ID: MRT4577_94609C.1
ctttttcttcctttttattagagaccaataaggggtacggtctcaaaggaaccatcctgcaagtcgaacactcttgtatctaattcttagcttgagcacgaaaattcctttcctgccacagcgaccaaagtagctttgaaggccatacccattttatacttatgacgctgaacagatcacccccacatcatataaatacctctctccagcgtgtaggcactggccgtcaatcttcatatacaaacaccatgattcggcatcttgcatttatacggttcaccactatatctttactcggtgaccaccatttatcatttaaaccaactacccgcaaaatgacttcaacc

SEQ ID NO: 178757 - DNA, 672 bp, Zea mays
  Clone ID: MRT4577_9460C.1
gatcaacaagccgtgctgggagtcttatctgcttccctgtctctctgggccgctgcagcggcgcgggagaagatggggcaatcgatccgcacgacggggaaggatgccaaccccgagtacttcttccaggcctactaccgccaggtccccggctgcttccacacgctcctctctgagtggcgtgacattgacctcactggcaggttcaacgaccttcttccttatgatgctgactgggactacatcacgaatgcctcttttggacagacaatctacctaaagcaacgcatcgaggtgtttggctttcacaagatcttgtacagcgcgcccagatcgaactgtactgccgcgctcgcaccgacacctatcctgtcataccagtcaggtcgagacgctttcgttgccaccgtcacagcagtcgcatgcccgtcgagcgtgtcgaccattcatgcgtgcatacatccgatgcaccatcccaagggagcgacgccgtctcccccagcacctaaggggagtactgcattgagagcatgcacaagcctgatgacgaaacgtcaacgagtcatctgtctctgaatgctagaatatgtgatgagtgacatgactgctatctatttgctcttttgggttaggattttcgactgagaaggccttgatcgatgattgcatcta

SEQ ID NO: 178758 - DNA, 627 bp, Zea mays
  unsure (1)..(627): unsure at all n locations
  Clone ID: MRT4577_94610C.1
tggggtaccctcggagtctggccggggtgcgcatcccggccatcgccggaggagacccgccgccccgtggcatcatctctttctacggcggccactgctgcagcgatttcatttacagctggaactcactggaagaggaagaagacacctcgaagcaaacctgcgacagccagcccgcaagccggagaagccgctgaggacgacgaggacatcgggaggataatctgcgactgcatcggcgacgacttctccaactacaacagggccatagtcgagactgtccaaacgggctatggcctcgctgaagtgatctatgccgtgctgaacaacggcgtccaaggccgggtcgctgtcaaacttgctcgcctgccggtgtccaaagccggagaagaagacgccaccgccattctcgggaggatcgttgctcgcagcaagctgttcgacgtcggctgcgtgctcttctacaaagagggtgacaatggagtgagcgtgcgnaccggggggctgattcagctggcgagggaagcgctcgccgtgccgctgcacatgccgctgacgattaagcttgacctgcatcgttgttccggcgatgaaaatggtggaggggtccttgagttcaatcctgcg

SEQ ID NO: 178759 - DNA, 632 bp, Zea mays
  Clone ID: MRT4577_94611C.1
ctcgaggccggccgggagcttctttcgacagtctagcgctaccacaaaccactactaatcccttcattcaagaccagacaagatgcgattcaccgccattgttgctgcctccttggcttgcgctagctctgtctcggcgttcttccccttcgacttcggctccttcggcaaccccttcggtgcccagatgtccggctgtggtaatcaggccggcatggttaacgttggagctttgaactacaacaactgcggctttggccccggagtgagtggcctcggtggcatgtcctgcggcaaccaggcaggcttcatcaatgttggtctcctcaactccaacagctgtgcgggtatgggtgcaggtgcccccggaacgtacttttccaagaacgacgacatcaaggctgatcacaccgcatagggccccgcaattctgataccactgtgttcaagcagagacctggtatattttttcccaataatttgatacagcgcctgttgtctagcctcctatcgcgcgccatatttttctgtaatctccaaacctttctttcgcatctcccctcattttcttgttctccctacgcaatgattatgaacatgatgactggaaaaaaaaaaaaaaaaaagcggcc

SEQ ID NO: 178760 - DNA, 941 bp, Zea mays
  Clone ID: MRT4577_94612C.1
ttctttcgtccgcccacgcgtccgggttctcgttttcttcattgttaggtctgtttaattaaatcgtacgagacgttatgttaattgtatcacaacatctgtcgtctatgagcaggcaggacagaagtgatccactttcttcatgcattcttgtaccgaaacagggtaacctcgtgctaactgggccatcaatggccacctcggcagaaagtccaattgccttcaccttctacctccatgatggcagcccgcaagccggagaagccgctgaggacgacgaggacatcgggaggataatctgcgactgcatcggcgacgacttctccaactacaacagggccatagtcgagactgtccaaatgggctatggcctcgctgaagtgatctatgccgtgctgaacaacggcgtccaaggccgggtcgctgtcaaacttgctcgcctgccggtgtccaaagccggagaagaagacgccaccgccattctcgggaggatcgttgctcgcagcaagctgttcgacgtcggctgcgtgctcttctacaaagagggtgacaatggagtgagcgtgcgaccgggggggctgattcagctggcgagggaagcgctcgccgtgccgctgcacatgccgctgacgattgagcttgacctgcatcgctgttccggcgatgaaattgttggaggggtccttgagttcaatcctgcgattgacggccagcacacggaacgacttgttggacaaaatggcgctgaattggaagtggcaatttcatggtcggagtacccttggtaatgcctattattattagccattaattcaagagtgcatttttatatgtatcaatgactaagggttttaaatcatgtttcatacaagacagttgcactagagcaagataacatttcgtggtgggaacgccaaataaataaaaatagagcgagtatc

SEQ ID NO: 178761 - DNA, 280 bp, Zea mays
  Clone ID: MRT4577_94613C.1
cctgctgaaaccaataaaggagagtcatggggcaatgtggctaagacttcaagttaaagagacaaatcttaatggagagaagagaatctctctctatggttcttaaattataatcgctctgatgcgcactatataactgatattcataggatgaaacgtacatgaactcaggaacataaaaaggatattgtttgggtggagagacaacaacagaaagcaaagcagagagatagacgaaaggagtgctctctactcttctatgtcatgtatgtcctattag

SEQ ID NO: 178762 - DNA, 981 bp, Zea mays
  Clone ID: MRT4577_94614C.1
cattcttgtaccgaaacagggcaacctcgtgctaactgggccatcattggccacctcggccatcagtccaattgccttcttcctctacctccatgatggcagcccgcaagccggagaagccactgaggacgacgaggacatcgggaggataatctgcgactgcatcggcggcgacttctccaactacaacagggccatagtcgagactgtccaaacgggctatggccccgctgaagtgatctatgccgtcctgagcaacggcgtccaaggccgggtcgccgtcaaacttggtccaggctactagctagctattaagtccggccaaccaagcagctcgctcaggtcgaccaacggcggggacagttcggagggaggaggcggccggagaccgaaaaattaaaggaagaggagcaaggctgaccgatgaacgatcgttatcttcatcatcagtcgtcgatggtgacaccggcagcagcgagcaagatgagcaagaagctgcagggcggtggtgagcgtagtagtggcagtagtagtaggggcagcggctacagcgacgccccaaccgacgagcaactgctggcgtacgctgagctgcccaaacatggccgcgacatggcggaggtgttcgccgtgcgcatccccgccaccgtcggaggaaacctgccgccccgtggcagcatcgttttctacggcggccactgctgcagcgatttcatttacagctggagtccactggaagaggaagaagacacctcgaagcaaatctgcgacagccagggtaacctcgtgctaactgggccatcattggccacctcggcatacagtccaattgctttcttcctctacctccatgatggcagcccgcaagccggagaagccaccgaggacgacgaggacatcgggaggatactctgcgactgcatcggcgacgacttctcaactacacaggcccatagtcgagactgtccaaacgggctatgg

SEQ ID NO: 178763 - DNA, 1469 bp, Zea mays
  Clone ID: MRT4577_94615C.1
agggggcaatttgcggcgcgcgttggccagcgcgttggccagcccactgcgggatctgggcatccggcgacggcggcccgagcgacgcctctactgaagggaagccagggagggaggagcgacacagcgtctggcaaaagggcaatccggaagttggctggctcgccggcgcggcttcccctccgtagatcctaaaccctaaacgccatcgccaaagccttcgtcagccagtcctccactcctccaaggcacaggaaagttgagggaagcacgggtggagataagaccaccacgcatccaatccatccctgtcttctcttcccacttcccagtccccaatcgcgttctcttcctgggcgacatggcggccgccaccggctacagcgacgccccaaccgacgagcaactgctggcgtactctgagctgcccatacatggccgcgacatggcggaggtgttcgccgtgcgcatcccggccaccgccggaggagacccgccgccccgtggcatcatctctttctacggcggccactgctgcagcgatttcatttacagctggaactcactggaagaggaagaagacacctcgaagcaaacctgcgacagccagggtaacctcgtgctaactgggccatcattggccacctcggcagacagtccaattgccttcaccttctacctccatgatggcagcccgcaagccggagaagccgctgaggacgacgaggacatcgggaggataatctgcgactgcatcggcgacgacttctccaactacaacagggccatagtcgagactgtccaaacgggctatggccccgctgaagtgatctatgccgtgctgagcaacggcgtccaaggccgggtcgctgtcaaacttgctcgcctgccggtgtccaaagctggagaagaagacgccaccgccattctcgggaggatcgttgctcgcagcaagctgttcgacgtcggctgcgtgctcttctacaaagagggtgacaatggagtgagcgtgcgacccgggggggctgattcagttggcgagggaagcgctcgccgtgccgctgcacatgccgctgacgattgagcttgacctgcatcgctgttccggcgatgaaattgttggaggggtccttgagttcaatcctgcgaccaacggccagcacacggaacgacttgttggagaaaatggcgctgaattggaagtggcaatttcatggtcgcagtacccttggtaatgcctattattattagcctataattcaagagtgcatttttatatgtatcaatgactaagggttttaaatcatgtttcatacaagacagttgcactagagcaagataacatttcgtggtgggaacgccaaataaataaaaatagagggagtatcactttggttttttctaaaaaaaaaaaaaaaaaaaaaaaaaagggcggccatcgcggttctagaactagaaaaaaaaaaaaa

SEQ ID NO: 178764 - DNA, 682 bp, Zea mays
  Clone ID: MRT4577_94616C.1
ccggccggggtgccgttgcgctgcgccaagcctccccacctctctcgtctctcctacacccgccgccctcgtgggagcgaaaccctagctagggttctgcccgccgccgccttcgatcaagacgcgagcagccttaccgcgagccctccatggacaccggacgcaagcgcatcgcgccggggggcgccaacggcgcgggcggcccgaagcgcgcgagagaatcggagacaactcaaatgggtgtaggaagcaaaaccaagccgtgcaccaaatttttcaggttctaatctagcttaaaatgaactctcatctggtaacatctactatcattatatgctattccttttaattaaaatttgctatgttattaaatgctgttcttgatgctaacaaatgggtcagcctagattctgatacaggttggttttgtctaatcattgcttaagaacactcaacggagtaaaaattggaatctactgctgtttatcactgaaaactgatgcaacaagggaacatactgctgtatatcactgaaaatctgaaccatccaacaatggttacaaggaaacaaactccctctcaaaaggaacaatcagtcagtaacaccatggaacaggttcacttgaagaaatcaagaagattagattgaacatggggactgtgattcagttttttgtgaatc

SEQ ID NO: 178765 - DNA, 266 bp, Zea mays
  Clone ID: MRT4577_94617C.1
caacccaaccctttagttcccctaactagtaagatgtcctggtccttgactgggaacatattatccatagctgcttttgggaacaatataaccctctggaaggaagggtcatatgtgcaatggtaggaggtgatgaacgctgaaacatatgatgtccgtcaagttttcttaagataaagagtgttatactagtgtttcctgcataaccatgtttcaactttgacaaaatttgccttttttgcttctacagaacatccaaattcact

SEQ ID NO: 178766 - DNA, 361 bp, Zea mays
  Clone ID: MRT4577_94618C.1
cactattagatctagcaggcagaacatcattaaagatcacagtctttcacaaaaccacaactttaaaccaaaagacctaaaacactaatgtgcaatgcccactatgcagtattaagatttcaactaaagcagacctagcgatgttatttgcttcgagatacttggagaagcaatcaacatccatctatgacatttaaccggtcactaaggccctgtttggacagctccagctccagaaaattcggtagagttggtggagcaggtcattaggtgctccataaaatcgtggagttggagctgtaagccttcagaagacattttgtctttgataagtcatgcccccgcagtctaatcgggagca

SEQ ID NO: 178767 - DNA, 290 bp, Zea mays
  unsure (1)..(290): unsure at all n locations
  Clone ID: MRT4577_94619C.1
acaaggatgagtttttatcctatgaagaccgcaccacacgtttctttccttcctcctcctgtgatgcctaggataggtggactacgttctggagatactggtcttgcggatgagaacgaagaagctattccagaattttctagtgcttcctgtcagcgttttaacattctgtgcagtggtggcaaagatggttgtgtttgcttcagcgtttttggaatatttcctgttggaaagatactttatgcctttgaaatttcagaacataactanaatcccaatcaatgttggat

SEQ ID NO: 178768 - DNA, 323 bp, Zea mays
  Clone ID: MRT4577_9461C.1
gcggcgtgtactacagcggcggtggcatggcgacgccagggtacgctggggtggttccgtacgggatgtctcaggtgaacatctagggcaactggtgcgggcgggcgctgtcgacgtagccgaccgggaaggtgtactggcgcgccaaccccaactacgccatgagcgttctcgacaggaaggtggtgctggcgcctgctaaccccaaggacgagtaccaacactggatcaaggacatgcgggggagcacgagcatcaaggaccaggaaggttaccctgcgttcgcgctcgttaacaaagcgaacggggaggccatcaaacac

SEQ ID NO: 178769 - DNA, 124 bp, Zea mays
  Clone ID: MRT4577_94620C.1
ctcacgtatggcgactactgactagtgatggtcatgcattgcatcttactatggagatgctcatgcaattctgatctgttgctcgcatcgatcactgatgacactcagtgttactcttgccctg

SEQ ID NO: 178770 - DNA, 2864 bp, Zea mays
  Clone ID: MRT4577_94621C.1
gtaacatcctgccgtgggagtcacgatcatcggctccgcctcctccgagggaagtacagatcccttcaccgctgctcgaatagatcgtctgcagtcgcgtgactcgactttaccccgccccacagctcgaagccgacgaggtggcctcagcacacgcgcgcgcagccatggcagctgctcaaggtggcactgttgtgtgttcatctgagaaagttgagtttctgaagcttcaaaatggcagtgatattcgtggtgttgctgttgctggggttgaaggtgagcctgtcaacctcacggaagatgtcactaaagctatagctgcagcttttgctgcatggctgttaaacaagaaaccagatggctggagacttttaagaatctctgttggacatgattcacgaatttctgcacataaattgcagaacgcagtcactcatggaatcactgctgctggacacgatatcctacagtttggattggcttcaacacctgcaatgttcaacagtacacttacagaagatgagagaagtcatttacctgttgatggagccataatgataacagcaagccatctcccctacaatcggaatggtctcaagttttttacaagtgatggtgggctaaataaagctgatatcaaagatatcctggagcgtgcttccaaaatatatgaggaatctgcacataataacctgaaagaacagggggaagcttcgaagggagttgtcactaatgtggactacatgtcaatttatgcttctgatcttgtacaagcagttcgtaaatctgctggagacaaagaaaaaccattggaggaactgcatatagtcgttgatgcagggaatggtgctggtggtttttttgtggataaggtactcaaaccattaggagctgttaccactggaagtcaattccttgagcctgatggtttgtttcccaatcacattcccaaccctgaggacaaaaccgcaatgaagtttattacacaagcagttcttgataacaaggcagacttaggcatcatatttgatactgatgttgacaggtctgcggctgttgattccaggggtcgtgagttgaatcgtaaccgattgattgctttgatggctgccatagttcttgaggaacatccaggaactacagttgtgacagatagtgtgacttcagatggattgactgtatttattgaaaataaacttggagggaagcatcaccgtttcaaacgagggtacaagaatgtaatagacgaggctattcgtctgaactctattggtgaggagtcacatttggccatggaaacaagtgggcatggagcgctgaaagagaaccactggcttgatgatggagcataccttatggtcaaacttttgaataaacttgctgctgctagaacactgggttcaagtattggtagtaaagttttgactgatttggttgagggccttgaagaagctgatgtgacagttgaaataaggttaaagattgatcagaatcatgcagatttgaaaggagggtccttccgtgactatggagaatccgtcttgagacatttagagaatgcaatcagcaaagacccaaatctccataaagccccggtgaaccatgagggcgtaagggtttcaggatatggtgggtggttcttgctgaggctctctctgcatgatcctgttcttcccctaaacattgaggcacagagtaacgatgatgcgattaagctggggcttgcggttcttgctgctgtgaatgaatttccagcactggatgtgacggcactgaacaaattcgtgcaccagtgaatataagggacggacattggcatcataatgtgatcagcttcgcatggtgccgtgttcgccccggtcgaacatgttctacatgtgtggcacgagtatcgtacagaaatataccagtttattacttgcacaggcttgttagtctggaaggacaagggagattccagtgttgagatgattcttgtgtgtgtttataccagctatcaaagtaagaatatgcgtgcgtactgttgaggctgatctttacttgagaataaggtttgagttacccgaatattttttgtaaaaggatcaggaggcttgctgtgatgtgaggccacgaatttgccaataagtacctctcgatttttcttcagcgtgatctttacttgagaataaggtttgagaaacatgagtatttttttaaaaagatcagaaagattagtgatgtgaggcccgaatttgatttttcagtcaaggggagattccaaagagtggtggattgaggagaaagtgaagctcagttcaaagttcgtcaggtgttcgattgaaggcttcaatcagagactgtcgtcattcttgcaaatattaagtcaagttgattatgcagccccttactcctcgtcgtcgatccacgccgcgtccacgacatgcccgtcgatcccgacgatctatctttctatgcgcgccacttgcgttgagatccgaagttcccctgtcatgctcgaccctggaggtctccaacttgtcgacatcccttacgtcgtcttaaaatcccaagagtttggataaaccaacacatcccgtgtggtgcttgccgggtgctccgcaaaaaggtcttaacaagaatcattgacgtctgcgcgaatttatggtcaatatggtaatcatactctgattcgctattttggctaattaatttgatagatggattagagggatatttatcgtaataattattttatttgtagcttaaacgcgtcgtgggtgtatttgatgcatgataaaggtcgtaattgtatgctgcatggttaccaccataattatgaagtagtcgagaggtgtaagaaaaaaaaaaaaaaaaaagcggcc

SEQ ID NO: 178771 - DNA, 156 bp, Zea mays
  Clone ID: MRT4577_94622C.1
gaccggccggatattcggtcttctccacgcgcccgctccactgactgactactgtaataccagagagggaacttcttggacctgcagctcaagatgagagttccgcgcattcgggggccgggggcaagagagagagagagagccatggaggctgac

SEQ ID NO: 178772 - DNA, 726 bp, Zea mays
  unsure (1)..(726): unsure at all n locations
  Clone ID: MRT4577_94623C.1
ttgggggtaccctccgggctggccgggctaagaaagttgaatttctgaagcttaaaatggcagtgacattcgtggtgttgctgttgctaggattgaaggtgagcctgtcaacctcacggaagatgtcactaaagctatagctgcagcttttgccgcatggctattaatcaagaaaccagatgacttgagacgtttaagaatctctgttggacatgattcatgaatttctgcacataaattgcagaatccagtcactcatggaatcactgctgctagacacgatatcctacaatttggattggcttcaacacctgcaatgttcaatagtacacttacagaagatgagagtagtcatttacctgttgttggagtcataatgatgacatattattcagtcaaggggagattccaagagtggtggattgaggagaaagtgaagctcagttcaaagttcgtcaggtgttcgattgaaggcttcaatcagagactgtcgtcattcttgcaaatattaagtcaagttgattatgcagccccttactcctcgtcgtcgatccacgccgcgtccacgacatgccncgtcgatcccgacgatctatctttctatgcgcgccacttgcgttgagacnccgaagttcccctgtcatgctcgacccttggaggtctncaacttgtcgacatcccttacgtcgtcttaaaatccccaagagttttggataaaccaacaca

SEQ ID NO: 178773 - DNA, 2407 bp, Zea mays
  Clone ID: MRT4577_94624C.1
gcgatttcacctattttttactgtaacatcctgccgtgggagtcacgatcatcggctccgcctcctccgagggaagtacagatcccttcaccgctgctcgaatagatcgtctgcagtcgcgtgactcgactttaccccgctgctccgcttccctctctcgtgctcgccgccccacagctcgaagccgacgaggtggcctcagcacacgcgcgcgcagccatggcagcattatcagcgaagaccatacaaaatgcattcttggcacaacacacacggaataggcatggtgcaagatatcccagtgatttttgttctctcaatacccgcagcatgcattccgtccaggaatgtagattggcagtggctgattcttcagccaaatggttaaataccacatcgacactatggactagcttcaacaaacaagcagacattagctgcaatgctgctcaaggtggcactgttgtgtgttcatctgagaaagttgagtttctgaagcttcaaaatggcagtgatattcgtggtgttgctgttgctggggttgaaggtgagcctgtcaacctcacggaagatgtcactaaagctatagctgcagcttttgctgcatggctgttaaacaagaaaccagatggctggagacttttaagaatctctgttggacatgattcacgaatttctgcacataaattgcagaacgcagtcactcatggaatcactgctgctggacacgatatcctacagtttggattggcttcaacacctgcaatgttcaacagtacacttacagaagatgagagaagtcatttacctgttgatggagccataatgataacagcaagccatctcccctacaatcggaatggtctcaagttttttacaagtgatggtgggctaaataaagctgatatcaaagatatcctggagcgtgcttccaaaatatatgaggaatctgcacataataacctgaaagaacagggggaagcttcgaagggagttgtcactaatgtggactacatgtcaatttatgcttctgatcttgtacaagcagttcgtaaatctgctggagacaaagaaaaaccattggaggaactgcatatagtcgttgatgcagggaatggtgctggtggtttttttgtggataaggtactcaaaccattaggagctgttaccactggaagtcaattccttgagcctgatggtttgtttcccaatcacattcccaaccctgaggacaaaaccgcaatgaagtttattacacaagcagttcttgataacaaggcagacttaggcatcatatttgatactgatgttgacaggtctgcggctgttgattccaggggtcgtgagttgaatcgtaaccgattgattgctttgatggctgccatagttcttgaggaacatccaggaactacagttgtgacagatagtgtgacttcagatggattgactgtatttattgaaaataaacttggagggaagcatcaccgtttcaaacgagggtacaagaatgtaatagacgaggctattcgtctgaactctattggtgaggagtcacatttggccatggaaacaagtgggcatggagcgctgaaagagaaccactggcttgatgatggagcataccttatggtcaaacttttgaataaacttgctgctgctagaacactgggttcaagtattggtagtaaagttttgactgatttggttgagggccttgaggaagctgatgtgacagttgagataaggttaaagattgatcagaatcatgcagatttgaaaggagggtccttccgtgactatggagaatccgtcttgagacatttagagaatgcaatcagcaaagacccaaatctccgtaaagccccggtgaaccatgagggcgtaagggtttcaggatatggtgggtggttcttgctgaggctctctctgcatgatcctgttcttcccctaaacattgaggcacagagtaacgatgatgcgattaagctggggcttgcggttcttgctgctgtgaatgaatttccagcactggatgtgacggcactgaacaaattcgtgcatcagtgaatataagggacggacattggcatcataatgtgatcagcttcgcatggtgtcgtgttcgccccggtcgaacatgttctacatgtggcacgagtatcatacagaaatataccagtttattacttgcacaggctttttagtttggaaagacaagggagatttcagtgttgagatgattcttgtgtgtgtttataccagctatcagagtaagaatatgcgtgcgtactgttgaggctgatctttacttgagaataaggtttgagttacctgagtatttttttaaaaggatcaggaggcttgctgtgatgtgaggccacgaatttgccaaaaaaaaaaaaaaaaa

SEQ ID NO: 178774 - DNA, 534 bp, Zea mays
  Clone ID: MRT4577_94625C.1
gccggccgggccgggccgaacttgtcgccatttctgcggcagcgagcgaaatggcggcgtacgagaagcagcggccggaggctccgatgaacgccgcgtactacggccagccgatccgtccgctgcagccgccgtactatccaccgccgccgccgccaccgccaccaccacaaggtccaccaccgccacgacccgtcccacgccttggcggcggcccgcgctgcctgctcggctttctcgtgacccttatcgtcgcgatcggcgtggctaccctggtcctacggctcatctcgcgcccgtacagcctcaaggcgtacgccgactccgcggcgctctcccgtttcgatctcggcagcggcagcagcggcggaggggacgacctcctccagtacaacctcaccgtggacatccgcctgcggaaccccagccgcttcggggtccgctgcgactacgccgaggcgcaggggttctacggcggcgaccgcttcgggttcgacccgctggcgacgttctacctggacgggaagagcgacg

SEQ ID NO: 178775 - DNA, 417 bp, Zea mays
  Clone ID: MRT4577_94626C.1
gccggccgggctgcgagccctagccacacaacgccgcactgtgtccgccgccgctctgccacctctgcgcgtgagcgcgtcgatcatccaccgccctgctgcctctacggctctacgcgtctgccgcacgaagcaccagatctacaggcctccactctgtatcggtctccgcggtctcggctcggcaactcgactccgcaccggcgactccacaccggcgactcggcccgcgtcgattcaccgcaccgcgttctggacttctgctccaactccggcttcggcgtcctgctcctcggtgcccacgacctcgctgcagaccgacccagcacgcaaggtgactattgaagaccaacctcactgagtgggtgggaagcatgcctccccgcacccatggaaacttgcacctgcgacgacagc

SEQ ID NO: 178776 - DNA, 662 bp, Zea mays
  unsure (1)..(662): unsure at all n locations
  Clone ID: MRT4577_94627C.1
atccttatctctgcgcctctaatttcttctctctctgctcatccgcctccgactgatctctacaaaagagtgatcgccatgacgaactacaaaagagcaccacttcgaatcgaacgcctacgctgtagcgtccaagaactacccngcaaatagactggctacctgtccgataagaacggtctctcctcgtcatcaaaaactcgatccctgcatattgcgacacggcactacctccacaagtgtgacatttgatcactgcataaggcactttggcttcatagacatattacccgtgaaaaagcttgagatatattgactccttcataaatcaactgcgagattccgcatagcaaccgtactgatctataacactgattgatatttctgagtatggattctcgattctttctacttcctatggaacactaacgatgatcttagactccctactgatgatactcttgtctgcctcattaaggaattgctcaaaaacatcaataatcttgatgtgactgtacagtctgcgatgttggacgagcatatctgcgcgatcgatgatgatgacccccagcaacttccttagttctggagacggaaccctactgcgtctcaacttatatcggataagaaccgtatcaccaaaggattgctaccgagacatt

SEQ ID NO: 178777 - DNA, 312 bp, Zea mays
  Clone ID: MRT4577_94628C.1
ggctcatatagatgagcaccctgcagctgagcgcttgtttctggctgcctactcttggcaaccaggatgcctggtgccggcagctgtggtgatcaacaccattgttccagagccatgctatgtgaacattactaaggtccgtgctgataaaggctacaaaagcatgtgctttttgtgcgcaaaaatgttaaactttcatacctttggatggtatataccacttgtctttaattcgtcataaattgtggctttgttcgcttatatttcagatgctgagctaaaggatcacccacatttctatgaagatcttct

SEQ ID NO: 178778 - DNA, 263 bp, Zea mays
  Clone ID: MRT4577_94629C.1
ggccggcgtctaatatagtgagcgcaatcgatgcctacgaactaggtctcaaagctggggtcgctcaacttgtactacagaggcgaagcttgagggcttacgcatgaacatgtcaaaggtcgcttcagagtatcaaagctgacagggataagttgcactattagcgttgtacccgtacagcatacgatcactaatatcgaacttggcattgtccgtaatatactacgctgaagctcgataggagagtctaccaggagtaccat

SEQ ID NO: 178779 - DNA, 505 bp, Zea mays
  unsure (1)..(505): unsure at all n locations
  Clone ID: MRT4577_9462C.1
ttttttttttttttttttttttttttcgacgaaccatccttctcaagctttgcatagcgctcggggggtcaaggcatctaccgcatgacagttacagggatatttgaatacgtcttgatgtcctttggagatatggtattccccaaacactgacaacaacccatacaaccaaaatattgggatcacaattttgcagcctgaaactcttgcttgtactggaaaccatgctgagaccaccactcctatgtactcctggagtcctggggtcgttacgcgaccataattgnctttacggttaaattaaagcaagacgatgggatcagctggttttgcataatctgagtacagacatctacaggccaggcctcgaggctttccctattttggagcatcaaaatggccaaagggttgttgcatgatgttgctgccttgagcaaattcaaaataccatgtcttccacgcatcaacataatgggcaaaaagatcactgagggcttggttcttg

SEQ ID NO: 178780 - DNA, 122 bp, Zea mays
  unsure (1)..(122): unsure at all n locations
  Clone ID: MRT4577_94630C.1
acacaatcaaaacccancaatatgtgtcctcctcaattttcgacttggggggggtctacacaaagcagcggcaggggttgttttgttcctcctcgtcggacccagcgttccagtcgagcatg

SEQ ID NO: 178781 - DNA, 309 bp, Zea mays
  Clone ID: MRT4577_94631C.1
tttttcctaaccttttcgcgggtggcatacgctcatatctaagtggggtctgtgacactcaccctttgcctctctctccgggcgtggtgtttgccgccctccctctgtgcctatctgttgtctccgtcgcccgcccagccccgccgttataattacaaaagtcctctggtcgggtgacgcaccattcgaagaagttgttgagagaggcacccaaaagaacgcccagaagatgcgacttgtacagcccatgcagcgcgcgggctcgttgattgccaccagcgtgctttcaagcatggccggaccaccacc

SEQ ID NO: 178782 - DNA, 319 bp, Zea mays
  Clone ID: MRT4577_94632C.1
tcctaatagtgcggtcgcccttttttactaagtttatttgtttttaacatggcaaataaacaagatacaaaaacaaagagttcaatacacgaattatacacgcatctcaaaatattccttataaccccttagggcaaatgaagagtctgcgcggtatgaggaacagagtaaaccttggggacgccggaggcgcctcagcggagtgagatttgacaggaggggactgaaccgggagaaccacctcatcctcaaagtggcacgccaatgctaagtgggatattctagcccctaggatggtgatatcctggccgaaggctta

SEQ ID NO: 178783 - DNA, 696 bp, Zea mays
  unsure (1)..(696): unsure at all n locations
  Clone ID: MRT4577_94633C.1
tcgaggccggccgggaacccatcaacgaagcatcgaatcaccaaggacaatcaacaacatcataatgaacctgctcggaaagttggcacccttgatcctgttcatggtcgggacggcctcgtgcgcattgacgccggagaagctcgagatcagtgcggccttcccttcggataatcaattcgggatcgtcttcaatggccaacccaataaaattcttttgaaggttctcaatttgggtagtgatcccgtcggagacgtcatgcggattcatcaggtctggcacgagtttcgcgagatcgggggcaaggaacgattgctgagaaaaggagttccggtgccttctaagaggctactgccacccaaactggagccatacatcataccattcatgttcagtgccgaggagagagaaggcaatcttgggttaagggtctgggttgaatggagtggcccgcaagggaaaaagcatcgatcgatggcttacgattctacgatcaccatcaaggagcctcctactcgngtggtttgatcctcagcttatcatgctgtacattatacttgggatcgacgttcggagggctaggatatatggtgtacagcttcgtacgtttgtgccggtgaagccagcgcgcacgacgttgaagnccgaagcggtccgccgaaggctccaccatccaatcgagctcgaaagtgtca

SEQ ID NO: 178784 - DNA, 190 bp, Zea mays
  Clone ID: MRT4577_94634C.1
ggtcgacgccacgcgtccggggaactactggcagcccaagtgcgccgagccgtgggtggaggtgaagttcgaggacgacaagcatgggaaggtgcatgtggtggcctcgacgctcattcgccttaccaacaagcccaacgtcacgatcgaggacatcgggagtcccgagaggctgatctccttgctgggt

SEQ ID NO: 178785 - DNA, 837 bp, Zea mays
  Clone ID: MRT4577_94635C.1
atgaattgaatttgcaaatagtttatcatcctatgcattggcttaacactataaatactcccccctctccccctttggccatcagcaagtgtgccatattccagctaggcaaatggcttcttcaaggatacttgctcagcaactccaccagtctctcggaggtggagggggcggtggaggtggaggtggaggaggaggaggaggaggcggcggcggcggaggtggcggcggtggaggcggtggtggtggtggtactggaggaggaggtgggggtggaggaaactagattgccttgttgctcatcacttgtctctgtttcaatcgtttcaatcattctgggatggtggaggtagccgtatctatgttcatgtttatggccaagccatgcatgtttatgcatgcatgtgtgtagtgcaaagatgaataaggacgtcgagctaaatctatgcaaccctcgacgtggtgtgattgtattttgtatttgaatcttgtgaagcatgtgtgtgtgtgtcatgtactcagttatattatgtggtgctctcacattacatatgataaaaaaaaaaaaaaaaaaaaaaaaaaaaaaaaaaaaaaaaaaaaaaaaaaaaaaaaaaaaaaaaaaaaaaaaaaaaaaaaaaaaaaaaaaaaaaaaaaaaaaaaaaaaaaaaaaagggggggcccctttttaaaggaccaaattttaagaacccgggattggaaagaaaaattttttttatggggccccaaaaattaatttcactgcccgctttttaaaactggggaaattgaaaaaaccctgcctttccccaattaatccgcttggcacaaaatcccctt

SEQ ID NO: 178786 - DNA, 321 bp, Zea mays
  Clone ID: MRT4577_94636C.1
caatggccgagttagtcttttgcgtatactcatgattgatggctactgaagtgatgtaatactagcatgtgtgttaaagtatatagagcttggtggcttaaggagtggcgacaaccctatacaataaaatcaaatacacaaatttaaaagtgacaggtcctgcaatacatatatttacttggctatgataggataactgaacaggacacctctctatataagctctataatatcagaattttatggtgaaaatgagacaaagctattcacaaaaagaatgtttatgaccaatgtataacccgctgattacattactaaata

SEQ ID NO: 178787 - DNA, 291 bp, Zea mays
  Clone ID: MRT4577_94637C.1
gcgatatacacaaaggttgtttttctttatacacacaatttatactaacatacatacatgaacgtgcacgaaagggaaaccctgagcaaggaaaacacccaagaacgccattagttcacaaggagcttaaatcccagcagacaccagttataaaaaaggattagcactggaagggctctaagagctataccagtttaaatggaaagataacctttgtggtaaactttatggcggcataggaagttcgagcggtaaccatgtaaaaatcgctgatgttgatgctttacctat

SEQ ID NO: 178788 - DNA, 292 bp, Zea mays
  Clone ID: MRT4577_94638C.1
agtcaggggtacgctggtatttgacagccgagtttccagtctccagcctcaaggatcgcgtacgggggagggggtacccagatcggcagacgtgcatccaaatgtacacacgtcgcgttccaatagaggacgatcagaggatccacgctagctaccaaaggctctatgacagaagggtcaaacgagtgctcgatctacggtagaacagaagtgttagcgatggcgagaggcctcataagtagaacgtgccttgtcaacactagcggcgggaactctgaccagcttgtcgagg

SEQ ID NO: 178789 - DNA, 244 bp, Zea mays
  Clone ID: MRT4577_94639C.1
acatccaagaagaaaaaagaacaaactgtttcaatctgagtttacatcaaaaatgaaaaaagaagaaactgtttcaatctgtacaccgtctactgatctagctaggcatgcatggtcgccgtggcaggccggagcaaagggtactgcagcgcaaggtgttcctctttcagtgggaagacgaggcatagcatggtgaggagcagcgccagcagcaggcaggccaggccgacgacggcgtacccgc

SEQ ID NO: 178790 - DNA, 358 bp, Zea mays
  Clone ID: MRT4577_9463C.1
cgtagaatgttattcaagtaaagacagctttgtaaccggaggcgctcaattaacaggaagatgcaacatcaccgtctacgtggacattccggtttgcactgaacttgccgcgcctttggtggataattgcatctggcgccaagtaaggggatctggcgctgaggtctttggttctgatgggccagacacggccacagagaaggggaaaacacgctcccttcttttttccaaagtttgcactactgggggttttttccctctaatagttcgctgcagtcctacagctagcaaaagtctaacccctttccttgggcgaacgcacatgccatcaggtcggcattgcgcagcagtggtacga

SEQ ID NO: 178791 - DNA, 652 bp, Zea mays
  unsure (1)..(652): unsure at all n locations
  Clone ID: MRT4577_94640C.1
ccgggnaaaaaaataaaaaaaaaaaaaaaaattaaaaaaaaaaaaaaaaaaaaaaaaaaaaaaaaaaaaaaaaaaaaaaaaaaaaaaaaaaaaaaaaaaaaaaaaaaaaaaaaaaaaaaagaaaaaaaaaaaaaagggggcgcccgttttaggggaccaaattttccttccccggccttgcaaggtattactttttttttggggccgggggggtcaattccccggcccgggttttaaaaacgcggggctgggaaaacccttgggttccccaattttattccctttgaaaaaattccctttttccccagttgggttattacaaaaaggcccccccccgttcccctttccaaaaatttgcccaccctaattggaaatgggacccccccttttaggggccttttaagcccgggggttggggggtttccccccagggtaccctttacttttgcaagccccttagcccccgcccttttggttttttccctttcttttctgcccccgttcgcggtttttcccggaaaagttttaattgggggcctccttttggggtcccatttaagggttttacggaccctgaccccaaaaaaatttgtttggggggagggttcccctaggggcccttccccctattaaacggtttttccccctttgc

SEQ ID NO: 178792 - DNA, 798 bp, Zea mays
  Clone ID: MRT4577_94641C.1
gccgcttcgagccggccgggccggtgattctaactgaggcgcgcgcatcatcacaggccaaccagccagccactacactagctttcctaggagctagtagtcccatggccatggccaactcgactgtacctccatgcctcttgctgctaaccatcgtgtcccttgccgccgcgaacggcggtggcaacaactccaccgactccgggcaggtccgccttagctgcggcgcgtccgcctcagccaccgactccgacggtcgtgcgtgggacggtgattcgacgtccaagttcttgacatcgacgaacgccggcgtcgcggctcgtgcgtcgtatcaagacccatcgctgccttcttccgtgccttacttgatggcgcgcgtgttcgcgtcgagccacacgtacaccttcctcgtccgccccggccgcgtgttccttcgcctcttcttctacccgaccgactacggcaaccgcaacgcttcgagcgccctcttcggcgtcacggccggcggcgtcatgctgttgcgcgacttcaacgcgtcccagagcgcgctcgcgctcgacgccgcctatctcgtccgcgagttctcagtgatcgtcaactcgagcgggaggctggatgtcaccttcgcgccgtccaccggcgcctcctcccactacgcgttcgtgaacggcatcgagatcgtgcccacgccggacgtgttcacggcgcccgtgccgaccttcgccaacggggggcgcccggacccgatgcccatccgcgccgacacggccttccagaccatgtaccgcctcaacgtcg

SEQ ID NO: 178793 - DNA, 226 bp, Zea mays
  Clone ID: MRT4577_94642C.1
cattctcgtgccaaatcaggagatgcttgggctaactgggagagaattggggaagtcggacatgagttcaagggccttctcactgtaccttcatggcggaacaccgtaagcctgggacgcgactgtggtcaagatgtgcatggggcggttaccccgctggtggagtgtgagggacttgtcctattacatcaggggcaccgtctatagtgtatacacggtttatggg

SEQ ID NO: 178794 - DNA, 223 bp, Zea mays
  Clone ID: MRT4577_94643C.1
actatcgatcgtgatatagtatgccaagtacatcaacgaaccccgacgatcacctagcgctcgtcatcgtggtcgtcgtcgtctatgcatgcgttcttgccacgggggtcgccatcgtcgtcacctccgtgcaccgcctcgtcgacgacacccacaccacctgcggctgctgcggcagagatgccgaactgcagactgagccggccgtcctcgcgcgtggcct

SEQ ID NO: 178795 - DNA, 909 bp, Zea mays
  Clone ID: MRT4577_94644C.1
tgggaccctcgaggccggccgggacgagacgtccagagaaccagattccgttcccctggacccgatcgagatggagtcggaagctgacagagccgcggcaccggcgccggcgccggcagttgccgcggagaccagcgacgacgccatccaggaggagtctccagccacggccccttcctcagacggaaagcccggatcaggggcggcggcggccccggcgccggaggtggaggtgcagctgttccggcgcgggcgtccggtggcagtgttccggtcgcagctgggcgggtatacgcaggaccagctggaggtgggcgacgtcctggagcagcacggcctcaagtccgtcttcgccttcgaccctgccgcccgcaaacgcggcgtcgccatccgcttcaaccctcgcaacggccgctccctcctcccctacgcccctggttccacgatcttcctagacggcgagcccaaggattctttgctgaagcccatcacgaagatggtgattggggtcgccgctatgactgtggtagctgcagtcctattgaaggaggccaagatgcccgagtggcttcagtcatccaagctgggcgccgtgagcttcccaccatgggtgctggcttgcatggtcatcgtgttcatgaggctccggaagagaaccatggatgcaatgaagaagtttggctgggtctcatgaggtagcaacacttttacctttattttgaggaaaatctgagtatacttaaaaggcagatgcagaggcacaaccgcacaagttgttgccatcaaaactctgttgctctaaaaactcaagttaattgaattgtaataattgcagtccatatgccaataggaggtgaaaaatttgttctcagggtgaatgtgtgatataaatttctgtgcatctcttat

SEQ ID NO: 178796 - DNA, 1043 bp, Zea mays
  Clone ID: MRT4577_94645C.1
caatatagataagtacttaatttcttctaacgtctaaaatatatagcgaataatagggattatacagcacgaacgatacaaaatgaatgtgaatacgtgaactgccagcagaaagaattgggacaatatgaaaaccgcgagcactacacgtttagcacacatgcatttcatgcttagcagactctaatgagtacaaaagattaggaacttatgcgaccaaaccatgttcaaatcacatccttgtcttaccaaaaacagatcccaccacacaagctatcccctgaacccgatcgagatggagtcggaagctgacagggcggcggcgccggcgccggcgccagcagtcgccgcggagaccagcgacgacgccatccaggaggagtctccagcgacggccccttcctcagacgggaagcccggatcaggggcggcgccggagctggaggtgcagctgttccggcgcgggcgtccggtggccgtcttccggtcgcagctgggcgggtatacgcaggaccagctggaggtgggcgacatcctggagcagcacggcctcaagtccgtcttcgccttcgaccccgccgcccgcaaacgcggcgtcgccatccgcttcaacccccgcaacggccgctccctcctcacctacgcccctggctccacgatcttcctagacggcgagcccaaggattctttgctgaagcccatcacgaagatggtgattggggtggctgctatgactgtggtagcagcagtgctactgaaggaggccaagatgccagagtggcttcagtcatctaagctgggcaccgtgagcttcccaccatgggtgctggcttgcatggtcatcgtgttcctgaggcttcggaagagaaccaaggatgtcatgaagaagtttggctgggtctcatgaggtagcaacagttttacctttattttgaagaaatctgagtatacttaaaggcaaagacagaggcaaaagtagttgccgtcagaactctatgtcactctcaaaattcaagttaattgaattgtaataattgcagtct

SEQ ID NO: 178797 - DNA, 869 bp, Zea mays
  Clone ID: MRT4577_94646C.1
aaatctaatcgtactgtccagaacggaaactgccctcgcttcgcttcctcctgttcttctctcccctcctgctactgccgcccggctccgctccgctccgctcccctcccgaaccccgttccacctccacccgccgctcccgtccatacccgcgccgcttccctcttgccgcactcgagtcgctcctcgacctcgaggctacctacctcgacgggccccgcaccgtacccgcccgctagctcccgcggctgcagcagcaggacgagctcgccgccgccgtgcactagaagaagaggtcgctgtcggtcgccccgccccgcccaatcctggttcctggacctgcgccgcgtcgtttcgcctcaggttccagtgtctcgatttgccaggataacttgtataattgaagctttcctttgtacgatgatgggggcatgccatggaccagaactgagggggctagggtttgctatgtggtagtagctcctgcttcaggtggcgtcagctgttctgggtggggtaatatgatgaaacagatatttggacggcgcaaggcgtccaaaaccgcagacaaggagttcactggtgggaggacgttcagccagctgtcggggtccggatttgctgacctgagtggccagccgccaattctgtcaagtactgggcacgcctatgggagtggaaaccgtatggggttccaagactcgaggataaatgataatttgttttcttccaacttccgtccgttgccgagcctttaaggatgtgccgaatacagagaaacagaatctgctcatcaaaaaggttggacgtttgttgcgctctggttgactttacggatgcgtcaaagaacatgagggagaggaataaag

SEQ ID NO: 178798 - DNA, 254 bp, Zea mays
  Clone ID: MRT4577_94647C.1
aattcggcacgaggcgcacgcccccaacgaacagggcagatcccttccacgacgacggtccttatagaggggccatcggccgcgatctcagatctggagcgcctaacacagggacaaccacgagctatgggcacatttgcggctgccgatccagcaatagtggtatgaggacaccgagaacatgccggcagccaagaaattaaagcgagcattgcactaggtgctcctgcacggggataaggcacaatgagtgc

SEQ ID NO: 178799 - DNA, 276 bp, Zea mays
  Clone ID: MRT4577_94648C.1
gcctgcttctctggcccctggtcctgtcctgttctccagcatggtgtgtctgaagctccctggaggctcctgcatgacagcgctgacagtgacactgatggtgctgagctccccactggctttggctggggacacccgaccacgtttcctgtggcagcctaagagggagtgtcatttcttcaatgggacggagcgggtgcggttcctggacagatacttctataaccaggaggagtccgtgcgcttcgacagcgacgtgggggagtaccgggcggt

SEQ ID NO: 178800 - DNA, 1244 bp, Zea mays
  Clone ID: MRT4577_94649C.1
gacgccgtcgttcgtgaggtcacagagtgctggcagaggcagagccgtccttgcaggtcagcagacctccaaggggtctccagggaagaactcctacaccagtctactactccaccgagcacaccgtcgacccgtggcaagtccgcgagcttagagtcgctgatacgagcggacaacgcgacgagcagcttcaggatccttgaggaggaggaggaggaggaggaagatatcgtcgtgcccagtacctgcccgaagctgaagccggcgaacgtgctggtgcagctcatcagctgcggctcgctttcggtgaaaggacacgaagacgccgccggacctgttcgggcatacaagccgaggctcccaagcatgaagctcccctccccgtttgtttctcgcgccatggcgatgggcgagcttgactacctgtcagagaactccagcaggttggtgggagtgaggctggaggagaaggaatacttcagtgggagccttgttgagacgaagacgcatcgagatggtccggctgagaggtactcggcgctcaaacggtcttcttcctacaatgcagaaagggccagagacgctctggattgcacgagacgtgaagagggtgacacagacgacagatcgtcgtcgcgcgcgaggtgcctcccgcggacgccgatgatcctggcatccttcctgcacccgaggggcgacccgctcaagtctcccgtctcggactgccgccggagctcctcggcccgccagcaggactgcgacgcggcctccggcgacggcgacagcaggaggttcgccgccgacgcctctgtcgtcgcgtccgcggtggctacagtgaaggaggagaggctcgtcagggtcgaggaaagttaagtgccgcccgcccgtggcctttctttacctcaaacgtactgtgaactctgtcagtgctgggctgtcgtccggagcccgcgtcgtgatccactgcaccatcgcttgcaacgacagcgacgaaggctctgaacgctcagggtcaggggagtcacgatggctgcagggagatcatgctgctgctttggaaaattagtgagagtttacattgcttgaaacgtgtattcagctagatgatccttttcactttcttaatttctttccttagaaattttatttaggtccccttatcattgtatcagctatgcgtttcgccaaaaaaaaaaagatgtgtcgtttatatactgtcaaaaaaaaaaaaactcgaggggggg

SEQ ID NO: 178801 - DNA, 429 bp, Zea mays
  Clone ID: MRT4577_9464C.1
ttttgaacccatgatctaactattttgctgctacagccttttaaatatgttaaacacattcgtaggctaaggcagatgatgcccacttcattctaattcaaacaatctttctgggaaggatttttttcctagttcacggggtattcacttattccgctgacacccctgagttttttttccttccaagctagtacagaaatactttgccctccattactcttcgtatactcatgaccatgactttccttctggtatagcctctaatggacaatttggaagctcaaacttatgagacatttgagaaggatgttgagaagtacactcaagttactgctatatgacgtgaatatgcctttttgtttatatattataccctgtgaagtagctcctttttttcacatttatttgaatatatgaatgtaaaattta

SEQ ID NO: 178802 - DNA, 357 bp, Zea mays
  unsure (1)..(357): unsure at all n locations
  Clone ID: MRT4577_94650C.1
aaattaatattatatatttttattgattaaaataaaaattaaatttttttttatatttattttacaacactatgtaaaaaaagcatgcataaatttaagagggacggaaattaataaaacaaagtcattcnaaacagagggggggaccaaaacaacttcacaaaacttttaaacacaaactacacccaaaaaaggaatttaacaaactgccagatccaaggccaacccgagaatacaataaagatctcaaaaaaaaaaataacatttgaaatcctcaaacaacaatagaaagggagcaacacaacaagaaacaaagcacggggaccagaccgggcaaacaaatcattactgaaaaac

SEQ ID NO: 178803 - DNA, 544 bp, Zea mays
  Clone ID: MRT4577_94651C.1
ataattgcataaccatatatcagggacaacccataactttatactaaaaactttattacttgaacatataactggtaacaaaaacgaaatgagggcaccctgcacagacggggtgatgggtagaacactgctgggtttgccacaataagtgggttgaatggcaacattggtagcaagtgaaaaagggcgccaccgttatgctcaacgagctggtataacggcaacaacagacggtgggtcaataaggtagcagggctcacaccatctatctggctgaatggtaccagacgttgctgctgtaaataaccatgagagttcaatgctgctagttggttgaatggaataaatgttgtgggtaagcaacaagtacctggctgaatggtagttgttgttgttgcaaataaaaagctcagttcaatgaacctagttggatgaatggaagaaactgctgttgctgatagtaggcaccaaggcttgctagcacaagttgttgtagctgttgtgccctgatgttttgcgccaataaatgcaccaaaggcaactg

SEQ ID NO: 178804 - DNA, 367 bp, Zea mays
  Clone ID: MRT4577_94652C.1
ggctgccggtccgacagcaatcaatttgttcgtcaggctggtaattcttcatggcttacggtatactacaatgaggtccaatgggtgcgcacgtcatattgatggatggacatgtggaatatcgtctgagccgacctcttctactgatcagatgcatgctaggctctcgcctctgatgctccatcttcacgatgatgaactaagtgctccgcctggcctgctcgaacacattccagcttcttgcgacattgatggatgtagagggcttgcttgagctactgagcaagcagtattctgcttctgatcggccttctgactatcaggacttcattagagacttcacaagacaactctttcggatgtcttc

SEQ ID NO: 178805 - DNA, 908 bp, Zea mays
  Clone ID: MRT4577_94653C.1
ccggccggggtctgtgaattctaatggatcgtgacgcatgggtcgaattccgacgggcaaacagtgagcacgcagcccttcgagaggagacacgcacgcaccagcaccctggtgtggccggtgcccggcggccaaacgcgatgccatctccgtctccagccccgccgccagtgctgccgatctcggagcacgaggacgagatagtcgccgcggtggacgcgaacccagtggtggtggtcatcggcgagactggctccggcaagagcactcagctctcccagatcctccaccgccgcggatacacccgtcggggtgccatcgctgtcacccagccccgccgcgttgctgcggtttccgtttccagaagagtagctcaagagcttggtgttccacttggggatgaagttggttatgcaattcgatttgaggacagaacttcagaaagaacatgcataaaatacctcacagacggcattcttctccgtgaaagcctttcaaatcctgagttgaagcagtactcagtaatcatactggatgaagctcacgagcgtagcttaaacactgatatccttttaggtttgatgaaaagattgatcaaggaccgagcttcagatttaaaagttttaatcacctctgcgactcttgacggtttaaaagtttcaaagttcttctcaggatgccctgtgttaaacattcctggaactttattccctgtggagaaattttacagcactgatcgcccaacaaattatatagaatcttcactcagaacagctatagatatccatgccaaggaacctcctggagatgtcttaatattatgacaggaaaaggatgatattgacagatggtatcaaaattggaggaaagaatcgaaaatcttgagagggctctgcatcgatgctctt

SEQ ID NO: 178806 - DNA, 2501 bp, Zea mays
  Clone ID: MRT4577_94654C.1
atgccgccccttcccttctggtcgctgttccgttcaccatgccccctgcccctcctggcctcctccataacttcccctgattttctaggtggtgctggtagtggtggttatgccttcacgacatcttccaccggccctgaggacacagctaagagaaggacccaaaaaagcaaaagtttcaaagaggttgaaaaatttgatgtttttgtgctggagaaaagttctggttgcaagttccgatcgatgcaacttttgctcttcgctatcatgtctgctgcatttctaacaatcctatacacaccatctgtgtatgaacatcagttgcagtcaagctctcggcttgtcaatgggtggatatgggataagaggagttctgatccccgatatgtatcttctgctagcattcaatgggaggatgtatataaaagtatccaaaatctgaatgttggtgaacagaagctcagtgttggactcctgaattttaacaggactgagttcgacgcttggacacacatgctcccagaaagtgatttttcaatcataaggctggagcatgccaatgaaagcattacctggcaaactctctatcctgaatggatagatgaggaggaagaaactgagataccatcttgtccttcgcttccagatccaagtgtcccaagagcaacgcattttgatgttattgctgttaagctcccctgttctcgtgtggcccgcgcgtccggagatgttgcaaggttacatttgcagttatcagcagcaaaattagcagcgaccacagcaagaggcaatagtggaatccatgtgctgtttgtgactgattgcttcccgattccgaacctcttctcttgcaaggacctagtgaagcgtgaaggcaatgcttggatgtacaaacctgacgtgaaggcgttgaaggagaagctcaggctgcctgttggttcctgtgagcttgctgttccactcaacgcaaaagcacgactctacacagtagacagacgcagagaagcatatgctacaatactgcattcagcaagtgaatatgtttgcggcgcgatcacggcagctcaaagcattcgtcaggcaggatcaacaagagacctagttattctcgtcgacgacaccataagtgaccaccaccgcaaggggctggaatctgcggggtggaaggtcaggataatacagaggatccggaaccccaaagccgagcgcgacgcctacaacgagtggaactacagcaaattccggctgtggcagctcacggattacgacaaggtcatcttcatcgacgcggatctcctcatcctgaggaacatcgatttcctgttcgcgctgccggagatcacggcgacggggaacaacgcgacgctcttcaactcgggagtgatggtcatcgagccttcgaactgcacgttccggctactgatggagcacatcgacgagataacgtcgtacaacggcggggaccaggggtacctgaacgagatattcacgtggtggcaccggatcccgaagcacatgaacttcctgaagcatttctgggagggcgacgaggaggaggtgaaggcgaagaagacccggctgttcggcgcgaacccgccggtcctctacgtgctccactacctggggaggaagccgtggctgtgcttccgggactacgactgcaactggaacgtggagatcctgcgggagttcgcgagcgacgtcgcgcacgcccgctggtggaaggtgcacaaccggatgcccaggaagctccagagctactgccttctgaggtcgagcctgaaggccgggctggagtgggagcggcggcaggccgagaaggcgaacttcacggacgggcattggaagcggaacgtaacggacccgaggctgaagacctgcttcgagaagttctgcttctgggagagcatgctgtggcactggggcgagaagagcaagagcaactcgacgacgacgcggaacagcgccgtgccggcaacgacaacgacaacgcctgctgctgcgagcctgtcgagctcgtgagacttgtagatagctctgtctgccgagagtagtataccagtaccagatacagaacttctgaagctccatacatacatagcgacagctctgtaaaggtagctatgtaggccttttccttccccgaatgactatataccttcgtcttcaaaaaaaaaaaaaaaaaaaaaaaaagctcgtgaggcctgttgtgtagatacagctttgttgagagtagtagtataccagatacgaaacttctgaagctcctccatacatacatagcaacagctctgtaaaggtagctatgtagaagccttttccccccgaatgactatactcttgttcgccgtcacggctgcagcgccccctcctgctgcttcctgatggctgacaattcttttggtttttgccaataattcatcagtatagcctgtttttcaaaaaaaaaaacaaagggactagttctagatcgagagaaaccgctcgcgcccacgcgtccg

SEQ ID NO: 178807 - DNA, 234 bp, Zea mays
  Clone ID: MRT4577_94655C.1
ccgggccgtctacccacaccgtgcgagatctccgaccctaggccaaatgcaggatgacgcggtgcagccatgagtaagaaggagtttgagtctgtcaaggatgccatcttccaaaatggtggggatgccaagggagaagaataggaagagtacatgagtactgtgggaacattcaagatatggggatgagagaattatagataccacaagagagagagcaggacgctgtttaga

SEQ ID NO: 178808 - DNA, 515 bp, Zea mays
  Clone ID: MRT4577_94656C.1
gcgccggcctgcggcgacaccgtcaagatgacgatgcgagtctacctcaactccggggagcatcctggacccctgcttcaagactcttggctggggctcctcatactgtctctcgcccggccctctgaatgaggcgaagcgtaaaaccagtgcgggaagttctgacaatcaagaacacagcacatcgtgaatcactggcgccttccaccagtgcagctccatctcgcagaatgcttcgccgtgtgatgctattacaagctggtgctaaagactacgaagccaaaacgccaaagatggggccaaaaggcgaacacagcccttgacacaaagctgctgaagcatgaaagggtctggcgcgaactctattgagctgataccttccttagaccatgactccccgtcgcatattgccaaagatcaatgcttctgtatgagagagcgtgggactgtgtgcaacgttcactaactgtggtggtgcgggctgtgactcaaccgccctaaggatggtgatgacc

SEQ ID NO: 178809 - DNA, 442 bp, Zea mays
  Clone ID: MRT4577_94657C.1
attgggtagctaaggtacataagcaaccctgtcatatagtatacaccgactatagagggacacctcttcaggagctatgggtgtccttctggaggggacggattataccttgtagtggatgagaagggcaagttcagagaggacagttttcagaaagcattgaacgcccttgtccctgctagcgacagtgccaagaagaaggaaaatgggaagcggcagaaatttaccatggcaggtacatctagtgaggaaagtgacatattcaagatggtgaagatgataattcagcgccaatatgatcctgtaatactttttagctttagcaaaagggaatgtgaatttcttgctatgcagatggctaagatggacttgaatgaggatgatgagaaggcaaacatcgaaacaattttttggagtgctatggatatgctttctgatgatg

SEQ ID NO: 178810 - DNA, 605 bp, Zea mays
  Clone ID: MRT4577_94658C.1
cattgggaccctcgaggccggccgggaagaggtctccatctcccctgttcggttttaggagacctgcgccgcccctccggccacgagagctcgtcgaaatggtcgcccacaggttccatcagtaccacgtggtggctcccgcgctgccgacccccaccgatgagcacccctcgatcctaccgcatgaagctctgggccactaacgaggcccgcgcctagtcgaagttctggtacttcctgagaaagctgaacagagtgacgaagagcaatggccagatgctcgccatcagcgagatcttctagcgcaacccaaccaccatcaatgaacgtacggaatctgggtgcggtaccatagtgggacggggtaccacaacatgtacaaagagtaccgtgactcgaccctgaacagcgtcgtggagcatatgtacaactagatggcctcgcgccaccgtgtgaggtccccctgcatccagatcatcaagacggcgacggtccacttcgagctgtgcgagacggacaacactaaacatctccacatctctgcgatcaagttcccactcgtgtaccgcgacgagatgccgcccaccaggaagctcatgaccacc

SEQ ID NO: 178811 - DNA, 1070 bp, Zea mays
  Clone ID: MRT4577_94659C.1
cattgggtacctcgaggccggccggggacccgccctcccctttgcccccggagcgccattcgcgccccctgcccgtgtggctccgctctgctgtgctgcctgcgcggcgcgatcggcctcgacccgctgggtctgggtgagagagtaaaatgggcaacctggtctcgggtgccgcggcggcgagcggcggcggcgggaagctggtgatggcggacggcagcgtgcgggcgctcagcgagccggtgtccgtggcggagctcatgatggaccacccgcgccacttcgtcgtcgacgcgcgcgtgctcaaggcgctggcccggcgggagcgccatcctcagcagcagcagcagggcggcggggccagggtcgcgccgctgccggccgaccacgtgctcggcgccggcggggtgtacgtcctgctgccggccacgcggggcaaggtgtcggccgaggaggcgcgccgcgcgctgtcggcggcgcggtcccgatcgatgcggggcctcaggcgccagctgtcgtcgtccaagaagagccagcaggcggaggcagctgccgcccaagagcaagagtcggcgcagcaggacgcgaccgcggagtcctcccctgaggacgaggacgacgcggaggcggcggcgaggccggacgggttcgaggaacaccggccggcgtccctgagccgggagctgtcgtgcaaggggtggaagcccagcctgcggaccatcgaggagcgcgatctgcccaagaagacgcccccccaattggctcttcttctggtaaagctccattgcctctgatgatccgtgagccgatcgagaaggtgtcggccgaggaatcgtctttgttgttttttttcttctattcttccttgtcaaaatcagatgtggttgaagacgttgaacccgtcgtaagaccaacatgtttgtatttaggaaaacaccaaaaaaaacccttcaaattaggggttgtcaactacccacctgcatctttttttttgtgtcaaattcctccctctaagttcagaaggattgtaatcttatactatccggcaaacaacaaaaaaaaaaaaaaaa

SEQ ID NO: 178812 - DNA, 256 bp, Zea mays
  Clone ID: MRT4577_9465C.1
aaaaaataattttcatttttacattttctaaataacccaaacttaatcatcatgcaagctttgatcttattcgctgctttgatcggctgtgccgtcgccatcccatctggtttgtacccagctccagctttggctgccgtaccagtggtatcacacgctaaagttggtgccattgcccacactccactccataccgttcaccaggttcatcataccgtgcatccagtgtccatcccagttcatcatccagcagtca

SEQ ID NO: 178813 - DNA, 550 bp, Zea mays
  unsure (1)..(550): unsure at all n locations
  Clone ID: MRT4577_94660C.1
gcattgaaccggcaaggctagctggnnacgtgccgcaacatttcaccgnntcaacgagggcccagtncnnccgcggcggcccgtggtagggcggcgnnngcggcgggctgggtaccgggtggnttggccgtggtaggggcggcgtgctatcggnncggtgggcgggcccgccgtgtatggtcttgtttgtcggctaccggnncggtggtcgtgcgtggctaccgnngtggtnnggcggcngnngcggctacccggtggnntggtggcngnngcggctaccggcngnngtggcaaccccgtggnncggcggtcttacggcatactttctcgacgggnaacctgggaggtaactttgagtgnngtggggcccgcgccggccccaagttattcctttgttcgcttaccnnngtgttgtnnttaccctttagtccagaagnntgtttattttttcgtnntcgtcttcgtgtttttgttngnnttgcccattctttgtgtnnttttgattnnngaaggtcgcttcttgtgntttcagttgttttagtgctttgtg

SEQ ID NO: 178814 - DNA, 434 bp, Zea mays
  unsure (1)..(434): unsure at all n locations
  Clone ID: MRT4577_94661C.1
caagctgcgatccgattctcattcaattcactcaaacctcttccccaaatcttcgattagattctggccgacaagaacactatgaaccgatcctgaccatgtcgctgatccgccccaacaacgtgttccatcccttctccatggacctgtgcaacctgtttcaaggcgtccccttccacttcggcaacagcacgcatctcttgcactgcgacccccgcaccagctgcgagacccaggtcatctctagctcactgatgcacttgaactgaatcatcgagcgtctcgagttcctcgacgcggacacgtgcgagtgcaaaaacacgctcatcgagggcggcggcgtcggcgtcgccatttaaactgcgacgtcgcacatcaaggtggagcccgcggacgacggccgcagtgtgccgaaggtcgagtccacntacaag

SEQ ID NO: 178815 - DNA, 326 bp, Zea mays
  Clone ID: MRT4577_94662C.1
atgcggataacggtcaagctccggaggctctttggggttcgcaatggcgggtgatcggatggggatgggggcgttttgaagtagagaacccttcgattagtagaagggcaaccctgcgcaaaaggacaaccacatccctccacaacgccaataagcacctacaagcgaggtcctcgagtccaagaagcatactccatcgggagacgcagacggtcccgcagcttcagctatcgacaccttgtccacggaggacgcgatgcggaacgccatcgagggcatgaacgagaaggagatggactgccataacattaccggaaacgatgacc

SEQ ID NO: 178816 - DNA, 281 bp, Zea mays
  Clone ID: MRT4577_94663C.1
gccggcctgttctgtacctgcatcaaaaggagcccaagtcgcatccaacagacttttgagcatgaagttcatgcaaaggtctttagaaaaagaagtgcaagaacaattagaaaaggaacgtaaacgagtcatttcagaagctgagtgggtcctagacacaaaagataccgaaatacagaaacctaaaatacaaatagaatgtcaatcgagttttcttgcattcactcctgattcaaccgtcggcagaagatctttcaagccatttatcaagttaacagaaa

SEQ ID NO: 178817 - DNA, 701 bp, Zea mays
  unsure (1)..(701): unsure at all n locations
  Clone ID: MRT4577_94664C.1
gcaatggcaggctattcggctcgctggacccgcgtatggcgacgagatcagaatactgggcgcggcggtctcgnacgtgtgcgtgctagaactagaagcaaatctgggaagaagtaatggaggctgcgctggttccatcgacgccgcagattcctctcatgtccaaaagcccgtgtcgagcagcgcgtcggatgatgcggacgattcagcttccgcagatgcaggcaatgcgcgatcggtagtactgcgtcctccacctgaagatgaagacgaagacggcggtgctgaggaacacgtcgtcgttgaaggagaagaaggctccatgagcgaggccacctcgctgttcaagtgccgcatggagcaagtgctggtgcagtccgtttcggaggccggcgtagggcagcccctggcggttagacccgggcgtgagcggctgagcgatgctctgttacctcctgcgacccctttggttgttactggtgaggcgagaccgtcggcagaggagctgctgagctcacggcttgctcaggtggatggagaagaagagctagcgctggtggtgcctgctgctgctggtagcccagagtcggagcgcatgtgtgttgttggttgcggtgtgctgggtcgtgacgcagaacctgcttcggaggacgacgccaacgaccctactactactactactcatgtgccgtcaagcatcg

SEQ ID NO: 178818 - DNA, 165 bp, Zea mays
  Clone ID: MRT4577_94665C.1
gccggcggttcgggtcgacggactctccattccagaaccatggtccaatttgtccgtaaccttgtggagaagaccccggcgctggtgaacgctgctgagacttactcgaagcctcgattggccacattttggtactacgccaaggttgagctggttcctcccacc

SEQ ID NO: 178819 - DNA, 386 bp, Zea mays
  Clone ID: MRT4577_94666C.1
gcctgcgccgaggctcgggtaaatacacgaccttcgacggacgacgcgccgtgtgccacccggcccttatcaactgcgcatctcattatccatttcagtaacaggaatacactggggctctcataccctttcaggctctgtacccatccaaggaactattgatgtactgacaggggctctttgaccacacttttctctgtcagagagagatactatcatgagcatatgtcactcagaaaccatcgtgctgtacaagataggcaatcaattcaatcgctctatcaatgcctatccgtaaccatgctcgttgtccacagataaatactgtcccaaagattgtctcctttcctacggatgctcgaaggatgactatacttacacaacac

SEQ ID NO: 178820 - DNA, 290 bp, Zea mays
  unsure (1)..(290): unsure at all n locations
  Clone ID: MRT4577_94667C.1
cagttatttaggattgaaggactaanaagtgtcttctttggaccagatttcatcactgtcacaaaggataatgaagaattagactggaatttactgaaaccagatatttatgcaacaatcatggacttctttgcatctggcttactcctggttactgaggaaacaccttcaggagaagcaggatctgaagaagatgatgaagttgtggcaatgattaaggaattgttagatactagaatacggccaactgtgcaggaagatggaggggatgtaatctacaaaggctttga

SEQ ID NO: 178821 - DNA, 297 bp, Zea mays
  Clone ID: MRT4577_94668C.1
ccgcgtaacatgagacgcatccagtctccagcagagggctcctgaaatctagcaagacgatggatggctcggtgatctgtgtggacatcctcatcttcataatactgcccccactcgacggcttactgaagtatggatgcgaggtctagtactggctatgaatgtttgccaccttcgtcacatatgttccgttgatgacatgttggaaggcccccaccgcttggcctagtgtcatgaagatccgggcgagagctgcactgtcctcctcttgtgacattttaatctactactactgcc

SEQ ID NO: 178822 - DNA, 420 bp, Zea mays
  unsure (1)..(420): unsure at all n locations
  Clone ID: MRT4577_94669C.1
ctatgctttcgctcattctttctttttttttttttttgntnaaaaacaaatcataaaaaaacaattttgggggggcaaccaaaattggggaggaaaccgtccttttcccgtttgagattaggggtttaactttttttccaaaatgattggtgcacaaggaaaaggcaacctgacaaaaacacaaaaccgggtaaactttcttttccctcaataaaaggcgggcctgggaaaaaaggggtgaatttaaaaaaaaaacacccttggtttttacattttgtgttttcccaaggcaaaaacccgcccccataaataagagcccccagggccgcactttttttttgtcttgttttgggccctaatcaaaaaaataatggctcccaccacccacccgaaagttttggggagggaccccttattttt

SEQ ID NO: 178823 - DNA, 467 bp, Zea mays
  unsure (1)..(467): unsure at all n locations
  Clone ID: MRT4577_9466C.1
tgagtaagcatatttattatttcttacctagcacagtagcactagcagccacacgcacatagcagactagcagcaggaagcagtgctagcacacggttccgttgaccttcactggttcagctgttcagagaatcaggccggccacaggcgttgggattagtacaggagtgccggagtcagctangcgctcgaggttactaacttcatggtggcggagtctggagcagagaagggacggagaggagaagggtgagcaggtggtacgaggacggtaagtctgtaatatacagaagagtagctaaggaagagtgggaatgctggggatggcacaagggtgtaggatcgaaggagttatgcggatggaagaatatgttaggaggttttacaaaaccagtggtgtattgatatacgatgttggggtattatggacctgtattgagttaatgatgtgtgagacaaactcaaat

SEQ ID NO: 178824 - DNA, 299 bp, Zea mays
  Clone ID: MRT4577_94670C.1
ctgacattgcagtaattgctgcagatttgagcatcatgtctcacgtgatatagcgaaacacagtgttacttgctatatgttacttattttgccctttggataatctggctgatttactgtagttgtgatttgtaatatgatgcggtaacatagtggttaatgatgggcatgtgattcctttggctgtaacatttcaaattgatgtttgctaatggtagcttgttgctcatggttaaaatcatcatggatattgctcctggttggctatgtcctcctattagttcgtatatgcagaactt

SEQ ID NO: 178825 - DNA, 402 bp, Zea mays
  Clone ID: MRT4577_94671C.1
cccacacatccaaaaaaaaaaaaaaaaaaaaaaaaaaaaaaaaaaaaaaaaaaaaaaaaaaaaaaaaaaaaaacaaaaaaaaaaaagaaacaaaaaaaaaagataaaagataaaaaaaacaatgcaagaaaaaacctagttcaaaattcccggggggcggccctaaagtttcaggccttcgttccccgtcttggaaatctggaccccctcaaaatgtgcccccaaaatcaattttgggggcggtgctttaaaacctcgtggcgggaaaacccctggggttaaccagcttaacccccctagaaaaaacccccttttcaccagcaggggtaaatcccaaggggcccgcacattatgcccttcccaaaaggtggccacccctaaggggacaggggaaccccccat

SEQ ID NO: 178826 - DNA, 218 bp, Zea mays
  Clone ID: MRT4577_94672C.1
aaataaatgggggaatgcaaacaaacccgatctactagccattttgccaattaatttggtgctggcaaaaaagcatatcacacacttgccttaaactggcgaatcgtgataaaaaatttgaacactcttccgaagaaacacaatgctcatgaacataggcactcgtggcaaaaaggaaatgccgtcatgcgcttatggcgcaccaactcccctaaaaa

SEQ ID NO: 178827 - DNA, 695 bp, Zea mays
  unsure (1)..(695): unsure at all n locations
  Clone ID: MRT4577_94674C.1
ccggccgggagtttagaaaaaccacccaaagctctccctcttacaggtcatgcgaccgtaggccactcttcgtcgccctcaatttatattaacgccccggacggaaggcgattagcccaaggcgacgactaaagatgtcggttgtaacaaagaacccttttgcctacctcggcaacgacagtgacggcgaggagaagcccgtcgttcctgtcaagaccgttgacaagaacactgctcgcactactaagcgcaatgtcgagccccaagctcccgtaaaggccgctggtgctggaggaaaccgccgtggccccggtggtaacgagggtgctttccaggaccgtgctactggtagccgacgcaaccagggccgatccactgaggagactccccgtgatggcnncccgaggcggtgctggtgcccgtgtcgntgggtggacgtggcgccagacgcgcccacgagcgcgatgaccgacaccctcccaagttcggtggccacggtggctccgacaagcaggctgcccaggtcctggggtgctaacgaaggctaggctgagcttaaggacgagcaggccggcgaggctatcgctaaggacgagcagaaggacgccgctgctgaagaagccgctgccgctgaggctgccgcccgaggaggaggccgagaagcaagtctcctacgaagaaaccctcacccagca

SEQ ID NO: 178828 - DNA, 591 bp, Zea mays
  Clone ID: MRT4577_94675C.1
ttttttttttttttctttcttttttttttttttttttttttttttttttttttttttttttttttttttttttttttttttttttttagctttaacttttttactttggtggggggggctccatattgggccccacatagttcctccaaacttagttaatccctaaacggggggggggctaatttgccttaaaaaactcggcttaccggttagcccttggctatgtttgagccataaaagcttcctttccaaaccaaaacacagacgggaacgaacttatcatacagttccctttcttcccttggggccccggccaacaaggaagtcccacaagctaaaaaaacctctcgggtcccaaagcggagttcttcggacccaggggcgccctctgtgtcccaatcctggaaatcccgtgcgtttcggttgtggcttcgctccgttgggaacctgttggggcccccttgcttggagcccctgccgttgctgggcccccccccgggggtgctggggggcttccccatctggggcttggccccccccctctctttggggggagactctaaatcctttcggccgtgtgttccgcccccc

SEQ ID NO: 178829 - DNA, 286 bp, Zea mays
  Clone ID: MRT4577_94676C.1
aacgaggtctatctaccgacatacgtaaatgcgatttctgcatcacgcgactggaagtataagagctggttaatggggactagccaaagtagcccgacgtctgcttgcagcgtgcctcgatgaccaggcctataggatccgtgcgatgacatgcatccacatggcccccatggttgctacgtcttcattgtagagcttgcccgaggcatcacggatgtggatcctcctgatctgtacgaaccgctcgcagatacatatgagctgaggctgacctaagatgatgaca

SEQ ID NO: 178830 - DNA, 306 bp, Zea mays
  Clone ID: MRT4577_94677C.1
accacactgccgctcaacgcagtggcagtaactaacaactgcgttatgttcatgcagggagcacaaggaaggagaacacttgtagagactacggaaacagcgcactgtcgacgctgggcgacggggccgggcgtgcgggcggcatcctcacggaccacaggtacgaccacgtggacgcccgggcgctgacggccgtgagctgcaccatccaggtgagaccggcgctcttcatctaccgcgccaacaggaacgtcatgctggacgggaacaccgccctcatgctcatcacggagatgctgatgaacg

SEQ ID NO: 178831 - DNA, 420 bp, Zea mays
  Clone ID: MRT4577_94678C.1
tttaacatagatactttacgttttatatttatattaatcatatctgaaaagaagtaataactagggggtacataatgacaatacagctcgcaaagcccccaagaaagccacaacatatggaccgggagttaaatgtatgcttcacattaacaatggaccttaaggggggtaagccaattccaaaattaaagcctttattggggtttttaactcaccgggggcacttgcccccatataaaaacaacccttaaccaagaattttggctttaaaaaattattcgccgaattttttaacctttattgtttaaggaaaaaagttccttctggtcaaaaacaatcaacggggagggcaaaataaaacggcgaattcaaaaatccactgttttttttccaaggttactcaggctttccttgtttttt

SEQ ID NO: 178832 - DNA, 275 bp, Zea mays
  Clone ID: MRT4577_94679C.1
ccggaaaacccggggggacccacgacgccggcgctagagcgatagctacccgacccagaagcaagctcgggggggtgaaccacaacagaggagagccagcgggagggcaacccgacaagagagagaagatcggcggcggcagcactaaggagaccggccacgagaggcccgacgaaaccgcagacaagaaagcgcgccggtacgccccatgcccttaaaacaagcgccagcacggcccgttcaagaaggccgaagagcccgccccgctgcgcgac

SEQ ID NO: 178833 - DNA, 300 bp, Zea mays
  Clone ID: MRT4577_9467C.1
ccgtgacttcatcaagaatatgattactggcacttcccaagctgactgcgctgttcttatcattgatgaagtcactgtgtccagtggcatcaatgacagtgcagtagtacttggtggtctcgaacttccacaaagacaatatcatttgtcattgatgcccctggacaccgtgacttcatcatgattatgattactggcacttctcaagctgactgcgctgttcttatcattgactccactactggtggttttgaggcgggtatctccacggatggacagtcccgcgagcatgctctcctt

SEQ ID NO: 178834 - DNA, 265 bp, Zea mays
  Clone ID: MRT4577_94680C.1
cagcggtaatggtgattaacacatagcaaacaagatacttacatatctagacatacattgcttaaaaaagaaccgaaaacccactgctgctgctctcgggatcacgatgatcctatactgcaccaagcagatgaaccggaagagttgccgaaaccctcaactgctcatgtggctaagcatgcatggtggtagtccaacgcgagcctgggggtgtgcttgtgtaccttgcaccaaactgccgactgctgacacacgaaaaatgctg

SEQ ID NO: 178835 - DNA, 161 bp, Zea mays
  unsure (1)..(161): unsure at all n locations
  Clone ID: MRT4577_94681C.1
ttaatgtaatactctctccctcgccgccggccagcttcgtcttctgccacgcgccagctncgggacaaaccactgaaggggggagaggactcgctcatatcgtcccgtggggggggactcgatcaaggggatgatcttcgcgatatcctgggggcccaagg

SEQ ID NO: 178836 - DNA, 223 bp, Zea mays
  Clone ID: MRT4577_94682C.1
aaaaaacgtgagcagattcgagtagaattttatttcaacgccctgcaacaaggtagcggggctgattgctatataacatgcacgaacattatcatagcaagccatatgcaacgggccaaatagttcacgtggaagagtatgaacatgagtcagagtggctcaaatcgataactcgccgacataaacgataaaggctaattttcagtacatgcataacctgtat

SEQ ID NO: 178837 - DNA, 111 bp, Zea mays
  unsure (1)..(111): unsure at all n locations
  Clone ID: MRT4577_94683C.1
cgcactnggttctatngaggacaactccggtttgagcacaacnnccaacctcaaagtcnnctctccttcaaaggacttttcactgtccctcatgtttcannagagctgcac

SEQ ID NO: 178838 - DNA, 674 bp, Zea mays
  Clone ID: MRT4577_94684C.1
ccggccgggattgaaatctcttcacacctcgatccatctttgatctcgtcaaaccgacgtgatacctaagcaagacacttttttatacacacctaagcagacaacatggctcccatcaaggtcggcatcaacggcttcggccgcattggacgtatcgtcttccgcaacgccatcgagcaccccgaggtcgagatcgttgccgtcaacgaccccttcattgagaccaagtacgctgcctacatgctcaagtacgactccacccacggcatcttcaacggcgagatcaagcaggagggcaacgaccttgtcatcaacggcaagaccgtcaagttctacaccgagcgtgaccccgctgccatcccctggaaggagaccggcgccgactacgtcgtcgagtccactggtgtcttcaccaccaccgacaaggccaaggcccatcttcagggcggtgccaagaaggtcatcatctctgctccctccgccgatgcccccatgtacgtgatgggtgtcaacgagaagtcctacgacggcagcgccgacgtcatctctaacgcttcttgcaccaccaactgcttggctcccctcgccaaggtcatcaacgacaagttcggcatcgttgagggtctcatgaccaccgttcactcctacactgctacccagaagaaccgttgacg

SEQ ID NO: 178839 - DNA, 538 bp, Zea mays
  Clone ID: MRT4577_94685C.1
tttttttttttttttttttttttttttttttttttttttttttttttttttttttttttttttttttttttttttttttttttttttttttttttttttttttggggaaacggggaaagaatgttcatttgaaggaagcccaccgcaggggccaagggaaaatgaccatgccccaacgagacaaacaaacagttcctaccttaccatgggtttttttacatcaactacaaacatactaaaccaaccctttttgatgggaataatccccccccccaaattgaagccccaaattggtgggaagccccataattcctaaagtgggggtaaatctcaacacattttgcttaaaaacaagccagctgatcatactaagtttcaggaaactaacagttcaacaacccaacatgcagcacttatttttttattgaaaaattgctgagcgtttaaaaaactgtcttgcagttctttctcaattttttcagtttcacaaaaacaaaatgaaactgcgttgactcaccgacaagggcattttttgtat

SEQ ID NO: 178840 - DNA, 550 bp, Zea mays
  Clone ID: MRT4577_94686C.1
cgagtgggctgcaacttttgactttctagggcataatgcgcctattgtggtagttaagtttaataactcaacgttccgtaagaatttctcaaatgaccaagacccaaaggctgcaccagttggatgggccaatggagcatcaaagacaccaactaaagagcagcaaccatataatgttattgctattggaagtcaagatagaactattactgtttggacgacagcgagtgcccgtccactatttgttgctaggcattttttctctcaaagtgtggttgatttatcttggagccctgatggttattcactttttgcctgctccttggatggatcagctgcaaactttcactttgaagtgaaggagcttggacacaggttaagtgactctgaaatggatgaatggaagaggaacaggtatggtgatgttggaggacgacagtcaaatctagctgaaagccctgcacagttgctgctagagcaagcatcagcaaagcaatcagctggagaaaaggtgacttcaattgtcgagcaaggtaaagcgcccccaaag

SEQ ID NO: 178841 - DNA, 214 bp, Zea mays
  unsure (1)..(214): unsure at all n locations
  Clone ID: MRT4577_94687C.1
ctcgatccctcaaaaacttaatatttaggcggcaccattcggttttggcgggtcttcancacctaacttcaccttcattttgcggtcatccaaacgcacactagattacgcatgaatcaacttctgctcaacaaaaaacctcatacgcaccaaccaacttattcccccctccgtttccctaaaccatacactacaccttaattacgtataccac

SEQ ID NO: 178842 - DNA, 647 bp, Zea mays
  Clone ID: MRT4577_94688C.1
ccggccgggaggcgacactagcccagcacagcgattcggcgaggtggccatgacaggatctagaggtagatagacgtggcggaggaagcgtgtgcggctgtggtgcatacgcaaccgccgtcgccgaagatgacgatggggccaggggacagacgacagcgagcacagctgctacgcgctgcactgagactgcagcacttctgcccgccgcgccagacgcagcagtaccggctcgacgtcggcaccgccaagctgaccgacgatctccgccgtaggactcgtgcggcccagtacgcgcgcgcatgagctgccgtacgcgcacgtggatctcaagcgatccgccctgcccgtccccgaaaaagtcacaacgcctctgcacacagctgagcgacactgagtttgaggtgatgaatccggacgctatgaaggccctctgagaggatgtcgagacgcacggggtcgagatgctcgtcctacgctgacctgcctacagaaacatcaccaacgatgttcttgtaagtgtgagagactactgtgcccatcacgcgcactggagcgggatgatatcacagaaggccaagcagcacaagcactagagcaatgtcgactgatcacaacgcgtactgcaaagtatatgtactactgca

SEQ ID NO: 178843 - DNA, 624 bp, Zea mays
  unsure (1)..(624): unsure at all n locations
  Clone ID: MRT4577_94689C.1
ttgtattccaaagtacagatagcaagtacgcctatagagacgtcacgtatgagttggatgcacactgcggtgataacagctctgctgggactagctgctacagtcaatcaaccgcacagaacagctttccctgcaacagctgtgtgatgttaaagagcctacctgctctcctccatatatctccataatgagatccttacccgtgctgcagagtgccactactgtactagtgcgctggcaagacactattatgctcatgaagaaacagcgtgataggttgattatagacacaaggacttatggtntacgcnctcggaagtatgctatgtactgtccaanattgttctcgtcatacacgttgcactattgttggctctgctctcttgtgaggcacattaactggcacacggaggtaattcttaatgagtaggatcatacagatccttcacatttacactatcagatgatggtcaactgttgaatgatgtacctgggacatggaacatggacaccatgctgatgcatagcatgacatggatctatgccgttcacacattcagatctgagacgttcgagactatactcaccggattgctcacttgatccttaattgaggcatgctac

SEQ ID NO: 178844 - DNA, 269 bp, Zea mays
  Clone ID: MRT4577_9468C.1
cactggctctcataatattataccgcagattttctaccgctgctgagcggaagccgcacggagccatgtcctacggtgagcacggctgcacctacaccgctatcatcctcagccacgatagtgtcggcataaccgcccagaagaactccacgatcgggaacgcggtcaacatcaatgtagagtgctactgaccgggcctattcgacaagctcctgaagaagcgcaacgtctaagacctcatcctctgcggtgcatctgcgtgcggagct

SEQ ID NO: 178845 - DNA, 516 bp, Zea mays
  unsure (1)..(516): unsure at all n locations
  Clone ID: MRT4577_94690C.1
cttctccgccgccacgctagagaggaagagcgcgcggagagcgagagcccgggagaaacagcggccggcggcaaaatggtgcagcggctcacctaccggaagcgccacagctacgccacaaaatccaatcagacccgcgtggtcaagacccctggtgggaggcttgtgtaccagtacaccaagaagcgcgcgagcggaccgaaatgcccggtcaccgggaagaagatccaaggaattccacacctgagacctgctgagtacaagaggtctaggttgccaaggaaccgcaggactgtgaaccgtccatatggtggtgttctgtctggtaccgcagtcagagagaggatcatccgtgcctttttggtcgaggagcagaagatcgtgaagaaggttttgaagatccaaaagaccaaggataaggcctccaagaactaggcgattatttttttaaaatctcggtggaatgtttttcactcgtctatgtggatgtcagatattntgctaatgttgcctgtc

SEQ ID NO: 178846 - DNA, 838 bp, Zea mays
  Clone ID: MRT4577_94691C.1
aacaactggagaagctcaactcgccgacggatcggaaacaatggcgagccgccagccgcggccggtggacgcttccctgagatcgctgtcgattgcatctgcgctgctgacatggagcgtttgctgtgccgcggtgagtgtgagggcactacctgaacctgacggttgtagctccaactccaacatgacagaactccagatgcatgtgtcattcttcgacaggaacaaagatggcatcctcactcctcttgaaactttccaaggatttgttgctatcggatgtgaagttgctttctccaccgcggctgcatcgacaattcatactgctctcgctcctttgaccaaccctcctggtgcactgccaccttacataaatatctacgtggagtacatccacaaagcaattcatggaagcgacaccggtgcctacgattccaaaggaaggtttgtccaggcaaaatttgacgaaatatttaagaagcatgctcatatcagaaaagacgccttgtcgctcttggaggtagaagagatgctcacagtcaaccgggacgttcttgatcctgcatcatgggctgctgctgaggccgagtggcagctgatctaccagctagcccacgacaggtatgggtttcttaccaaggaacgcgcgaggggcatctacaacggcaagatcttcgttgagcttgaggaacgcatcagcaggagacctcttcacagcaacgcatgatatctatcattaatttggcagctgcagcaacttgtatgcttcacatgatcacaattaggcagccgtggtagtaccagcatattgtatactggaatggaacctgatttctat

SEQ ID NO: 178847 - DNA, 647 bp, Zea mays
  Clone ID: MRT4577_94692C.1
tccacgcgtccggagcgcgcggagagccagagcccgggagaagcggcggccggcggcaagatggtgcagcggctcacctaccggaagcggcatagctacgccaccaaatccaaccagacccgcgtcgtcaagacccctggcgggaggcttgtgtaccagtacaccaagaagcgcgcgagcggaccgaagtgccccgtcaccgggaagaagatccaaggaattccacacctgagacctgctgagtacaagaggtccaggttgtcaaggaaccgcaggactgtgaaccgtccatatggtggtgttctgtctggtactgcagttagagagaggatcatccgtgcctttttggtcgaggagcagaagatcgtgaagaaggtgttgaagatccaaaagaccaaggacaaggcctccaagagctagacactattgcaatataggcatttaccacaatgtttaagtcaaattcgaatttgtttcggcaagaaattttctcgtgggtttggggaatcctggtacttatgctagtatgtgagatggatgtggttgtttaaattttgagcgtaagttgcagatcctttttaagttttgtaactcaggttcggtggaatgttttttcacttggctatgtggatgtcagatattttgtt

SEQ ID NO: 178848 - DNA, 881 bp, Zea mays
  Clone ID: MRT4577_94693C.1
ccggccgggccgggactgactctcggcaacggatatctcggctctcgcatcgatgaagaacgtagcaaaatgcgatacctggtgtgaattgcagaatcccgcgaaccatcgagtttttgaacgcaagttgcgcccgaagccttctggcggagggcacgtctgccggggggccgggcccttctccgccgccacgctagagaggaagagcgcgcggagagcgagagcccgggagaaacagcggccggcggcaaaatggtgcagcggctcacctaccggaagcgccacagctacgccacaaaatccaatcagacccgcgtggtcaagacccctggtgggaggcttgtgtaccagtacaccaagaagcgcgcgagcggaccgaaatgcccggtcaccgggaagaagatccaaggaattccacacctgagacctgctgagtacaagaggtccaggttgccaaggaaccgcaggactgtgaatcgtccatacggtggtgttctgtctggtaccgcagtgagagagaggatcatccgtgcctttttggtcgaggagcagaagatcgtcaagaaggttttgaagatccaaaagaccaaggataaggcctccaagaactaggcgatataggcatcttccacaatgttcaagtcccttagaatttgtttcggcaagaaattttctcgtgggtttggggaatcttgatactctcgctagtatgcgagatgatgtggtttaaattttgagcggaagttgcggatccttttatttttttgaaatctcggtggaatgtttttcactcgtctatgtggatgtcagatattttgcgaatgttgcctgcccatttgctccaataataaaaaaaaaaaaaaaaaaaaaaaaaagcggcc

SEQ ID NO: 178849 - DNA, 708 bp, Zea mays
  unsure (1)..(708): unsure at all n locations
  Clone ID: MRT4577_94694C.1
gggaccctcgctcgaggccggccgggcccttctccgccgccacgctagagaggaagagcgcgcggagagcgagagcccgggagaaacagcggccggcggcaaaatggtgcagcggctcacctaccggaagcgccacagctacgccacaaaatccaatcagacccgcgtggtcaagacccctggtgggaggcttgtgtaccagtacaccaagaagcgcgcgagcggaccgaaatgcccggtcaccgggaagaagatccaaggaattccacacctgagacctgctgagtacaagaggtctaggttgccaaggaaccgcaggactgtgaaccgtccatatggtggtgttctgtctggtaccgcagtcagagagaggatcatccgtgcctttttggtcgaggagcagaagatcgtgaagaaggttttgaagatccaaaagaccaaggataaggcctccaagaactaggcgatataggcatcttccacaatgttcaagtcccttagatgatatggtttaaattttgagcggaagttgcggatccttttatttttttaaaatctcggtggaatgtttttcactcgtctatgtggatgtcagatattttgctaatgttgcctgcccatttgctccaaaaaaaaaaaaaaaaaaaaaacaaaaaaaaaagaaaaaaaaaaaaaaaaaaaaaagggggggggggggnggcggtaccc

SEQ ID NO: 178850 - DNA, 429 bp, Zea mays
  unsure (1)..(429): unsure at all n locations
  Clone ID: MRT4577_94695C.1
ggataaaggaggcccgggccggccctcgagtgcggncgctattttttttttttttttttttttttttaaaagggggggccaaatgattattattttaaaatttgggtacaaccaattttgttggcattaaaattagaggcattaagctggaatggatatataccaaaaccagaaattgagtttagcaaaaatgggaataggagttgttcagtaatttcagattacaaatcaatttaaagaaacaaaccccatgcttacattgattgtgccacagatttaaacttcagtagtgcattagtaaactgttcacatttagatcttcaccttgagatttgacagctgtttcttgaaaaaaatctcagtaccttgtgcaaataaaatcggtcttccatgtgccttagcacacacttaaaatttatccattgtata

SEQ ID NO: 178851 - DNA, 514 bp, Zea mays
  Clone ID: MRT4577_94696C.1
caccaagcggcgaccgggcggaatctcctgcgtgcgagtgcgaccccggccgtagatcccgacgtggcctgcagacggaagaagcttcagttctgtagtagttcagggcgttgcagtgcagatctagtacaagcggaggcagacgcagattgttattaatcagcagggtggggggtcgcgccgcgtgcatgagcatgacgagaagaggcaacgaccaaggaatcccgtgcggtgcctactggctactgtttcgccgcttgcttgccaacattgcaaaaatgctgttgcgctttttaagaaccgcggatcgtttctgccgatcctccgagcccggcaggctagttgatacgacatcttttgttcatattcgtccactcttaccaactacaataaactaacgcccatttgagtttggagctaattactttaattttgcgtttagttcacatgtttggacatgttcagcctaaagttctttagaaacggatgcctacacagatcctaatccaactaa

SEQ ID NO: 178852 - DNA, 1719 bp, Zea mays
  Clone ID: MRT4577_94697C.1
aattcggcacgaggctccaccgccagaaccccgaagaagagcatccccctccttggagattttcagtaaccgttcctgctcgacgccgacggcatgccgaccgagcgcgtcgatgtcgcggtctcctcacggacgctgctgcgggcgtccgacccgcctccggacttccccgcggtgctccaggcgtccaacctcgacctcatactcggttccttccacatctacctcatcgccatgtaccccgccccggccgcgggcttccccgccgtggtagctgccgcgcgggccgccatgcccgctttcctctctcgcttcttccctttcgctggccgcgtcgtcgccaacgccgacaccggcgtgcccgagatcgcgtgcgacaacaccggcgcggagctcgtggtggcgcgcgctggggtgaggctcgcggacgtcgacttcgcggacgccgaccgctcgctgggccgcatcgcggtgccgttccagcaggacctcgcgctgtcgctgcagctggtgcggttcgcgtgcggcgggttcgcgctgtcgtgggggaccaaccacctgctcgtggacggccacggtctgacggcgctgcccagcgcgtgggcggagctgctccgcaccggcggcctctcgtgggagcctcaccacgagcgggcctcgctcttccggccgcgggacccgccgcggtacagcgcgtcgctggacgccgagttcacgcggtacgcgccggcgggcctcccgaactcgctcctgacggccacgctcgtgcgccgcaactacgtggtgtccgccgcggacgtggaccggctccgcgccgcggccagcacccccgcgcgccgcgccacgcggctcgaggcgctgtcggcgcacgtgtggaagctgctcgctgcggccgtgggcgggctcgacgcgcactgccgcatggcgtggctcgtggacggcaggccgcgcctggacgccgccaggtacgacggggccaccgtgcggcgctacctcggcaacgtgttgacgtacgcgtcgcgggaggcggccgtggaggccgtgtcgtcgtccccgctggccgacgtggcggccatggcgggcgcggccatcgcggaggtgttccggtcggagcggtacgaggagctggtggactggatggaggtgcacaagggggtgttccgggagggcggcaagtggacggaggtggtgggcacgggcatggggagccccgcgctggtggtctctacgttcgtgccgttccgcgtggagggggactttgggttcggccggccgcggttggtgtttccgtgggtgcgcccggggcggctgggttccgcggccatgacggtgtcacggagcccgcgggaggacgggtcgtggctcatcaccgccaggatgtggccgcgacttgccgacgccgtggacgcggacccggacgccgtgctcaagccggccaccaccgcgcggctcgggttcggcgcgcccgatccggcagacgtgatgcagcatgctaccagtcgcatgtgagtcatagagtggtttgccgtgcgcgaggcgagccggtgggcctcagccctcagactcagggtggcacgggcggacagaacagcgcccctgtgggcctgcgtatgacatggcggcatggcgctgacgggagtttcatgtgcgcccatcgatctggtacagttttgtacatgttttatcggcatgatccaagaaaatattttggacattcac

SEQ ID NO: 178853 - DNA, 145 bp, Zea mays
  Clone ID: MRT4577_94698C.1
agggggccctttcaaattaaaaaaaataacaagagcccagtttgttcccccttattattcagaacacaccgggggggtgatatacatttacggaaacctaacccggcgttgttccctcagctccgagcgcggagcaaaacgggcg

SEQ ID NO: 178854 - DNA, 262 bp, Zea mays
  Clone ID: MRT4577_94699C.1
ctttccgcagagcactgaacaatcattgtgactgatgcctaacactgaatggtgatagagttcagaaaatacagcgcaccgcgatagctggtagatgctcctgtactgctctattccctctatacttctgtttcatgatctgtcagctttgctatggcactggaactgatatcctatgtctgacgaagctgtaggcatcagttgatcccgagaatacgtcagaatggatattcaataacgatacagagggatccatatgtgg

SEQ ID NO: 178855 - DNA, 504 bp, Zea mays
  Clone ID: MRT4577_9469C.1
aggcacccaaaatcgcaagaaccccaactccggggagggttcgggcttttccggccatggagccgccgtccaggccactgggaggcaggtgggcactatccttccctttggaattcattgggaaccattcgatcgaaatctaacggaccaagaggggtgggaccccttaactcgcacttttggtaaagagggggtggaaggtttacaaaccaacccggagtggaaagggcataggaggaatacgctttttagattggaaaaagtaaattaattggggttgtttaaaaatacgtttttagtaattaccaaattgccactggatttggtttacttataaaatattgattttaattttattttgacccattgaaattgggttggattgggaataatgaggttttattgttggtaaaattggttatttagtttgaaattttttaattggggggagtttattaattaattgtttttgtattgaaaatttttgaaaattcataacccccc

SEQ ID NO: 178856 - DNA, 1233 bp, Zea mays
  Clone ID: MRT4577_946C.1
attgggacctcgagccggccgggcatttcgttgtgtaccgcaaacagcagagagaaaacggaatcccagatccacccttccccatctccatccgcggccatggcctccgccgacgccggcacctgcccgtgggatgccctcccgttgcacctccaggagcgcatcctctccctcctccccatcaccgaactagttcccgttgccgccgtgtcccgcgccttccaccgccttctgcgctccccgaccttccatgccctcctctccccgcatcgcctcgacgccttcttcctcctttccccacggctcgccgtccacccgctgtcccgccgcgtccgcactatgcccgcgttcgccgcgctctctcctccttcctacccgctcgtctcctccccgtccccatcactccttatcacctgcgcctcactccagttcctcccgccgatccccgacggagcctacctcctatccgctatcgtcccgtcaggcggctcctccacctcctgcacccttgtcgccgtcatcaccggcgcagccgcacgttcttacaccctggacaccggcgatccctccccgcagtgggcgtctagaggcgatctcccgctgtctctcacgctcctggaaaacgccgcggtctccggtgaccgcagcaaactcttcgtcctcggccgtggccccgaggcgctcttggtttttcatctcgtgacggggacatgggaggtgctgcatgttgtgatgccacaaggtctcactacggcgcacctgtttctttttgatgggagcctattcttagtaggtggtattgagagctttggagtagtggatcgggtggtggtctggcggttggacgacgataaggtggaggaggtgtggtggagggaggtgagcgtgatgccgacggaggttttcgatgagttgctagctggtaggtttggcagattctggcattttcaggctgcagacagattggggattgtttgcttgtacaatgctgtggatcggaggctggtcatgtttgatgcggctgatggcatgtggacagtgctgccacgattgtccgcgttggatgcatgcgagagcttcaggtggtttggacatgtcttggagccaggagttgaaatcttgatgggactacgttggtgaggctttgctcttaacttgtagtatttcagttgagtcctggcagattcagctttatgctccttgagtcttaatacatcccgatgaagatttcat

SEQ ID NO: 178857 - DNA, 317 bp, Zea mays
  Clone ID: MRT4577_94700C.1
cggggcatcgattcattcgtgcaggcacgcagtcgtacattcgactttcgcctctacgcgtatggagagggaaaagacactagctatcaaaaatggcaatgctgatggacttccttgacatggagtatctggcagcataggaataagattgtgtttgaagaagaaaggattaatgctagtaagatcttgaaggatgccatattcccctgctggacctgggttaaaaatctggttaaaggttttgacatgccttttaatcactggtccagcaacatgaaggaggcttttacaggatgagggggggataataattatag

SEQ ID NO: 178858 - DNA, 728 bp, Zea mays
  Clone ID: MRT4577_94701C.1
tctcaccactcggaagttttaaccgacacagtacggcaggagacacacgctgtacaatacatccatagttcttcatagcacgagttattttcgacagatttaaggcccaataggcatcaagagcgtttgaacttgtagtatatgttcatgccctcttgaacagaacaactaggatgaccgccatggcaagagccatgaaagatccaccagctgccatctccgcgaacgaaggctttttagaggatgagcccggtccggcctcagcttctgccgggttgtggaacatgtcttggaaaaagttggttatgttgtcaaccatctccatcatcgtcttcttcgcactgtccacaaagtccgacaaaggtgaggcagtgggtagtgcatattctggggatgcctcttcaaatttctccggtgactctactgagtcagtagagccagtttcctcrggaaaagtattgaccagrgtttgckggtgactcttgtaaaattccataaccctctcgttcttcaacacggsgtcccacacatttttgtctgrkgcargsggggcaacaacgctctgagcctckgggcttgatttcaacaatgtaaaagcctgtgctacatgtccsggcatagcrggaatcaatgcatsggctcccagcttgctaagctcttgatcatgttccttaacaacttctacgggagtctccgaaaaataaaccctatcaatagcttcccggggc

SEQ ID NO: 178859 - DNA, 205 bp, Zea mays
  unsure (1)..(205): unsure at all n locations
  Clone ID: MRT4577_94702C.1
gtaaaaaggagatataacatcatacacacacataccttaatcccactatcacggagagaggcccantatgggggggctccttcatctcctccttcccatcccttgttcccgacggacataatcgttacgtgaactacttctacgacccgaatgtgatcaactactacttacttcagtgtcaaccaatgtaacctgacagtattcg

SEQ ID NO: 178860 - DNA, 441 bp, Zea mays
  Clone ID: MRT4577_94703C.1
ggccgccctgcgcatatgtcgcgcccacgaatctcgccatttgatccgatcgtagcatcgcgcggggttgttaaatcatgtggcatggttcttccggggatatatatgcgcaagccgggagggcctggctctacctgggcaaaacgccattaccaacgtgtaggcggtaagggagtagtggtcgccgccatcgggtgcttacacgaccgcttgcagtccgggtggaggtttgggagcttcgcgagcgcgataggaaagcatatcaaccctcaatttggcaaggaacgtcgtggtctggtggggattcttcaccggaattgggtggcagcgcggagctttcccaccccgtggaccagtttgggcacccccgcaaccccgacgagcaagtgaccgatgacccaggtgttcagcatgagaaaattgctaggcatgagctcgttg

SEQ ID NO: 178861 - DNA, 403 bp, Zea mays
  Clone ID: MRT4577_94706C.1
acacatggcccaggggcggttaaactagaaaacgtagctccagcataaaacacatgtgttgctacacataacataagcgcctataacactaaatatacaagagccgttcacaaaacttctagaatctacacctagacccgaaaaaaataccgacgtgcttgttctatggagatcacttgtggaacactaaggttccttattaacactaatgtgatatatcctggggactgctctggcttgaggccttgtttgtatatttaacatagggggaaccgaggttattttccacttcaatcaaaacaccaacctttactactggtgtgaaaacctgaactgatgttgctaccgtgtaggatgttatcgtcccacctccgcgcattggccttctctatgagggcctgta

SEQ ID NO: 178862 - DNA, 425 bp, Zea mays
  Clone ID: MRT4577_94707C.1
gaccctcgaggctggccggaggcacttacagcatgcaccactctcaagctcgtaccgaggtgctacgagcaggctgacgcaagtgtcaagagactaaactggtacgacatggccctgcacccatatgctgccgtagagggcggcgtgtcggccgggttgatggtgctagaaagttgggagggagaacgtgtcctggcagcatgatgaacggtgaggctaggctacttgattgctcgcctgcgttgggaacgccagcccatgcggtgaggatttgactgccattgtggagacagttggctgagaagttgacaatgaaaggatggaactcctgctgggccaactgagcggtaaggacatcacgagagctcattgccgcgggcagggagaagtttgctgcagccccatgaggatgcggtgtaattgcg

SEQ ID NO: 178863 - DNA, 276 bp, Zea mays
  Clone ID: MRT4577_94708C.1
ttttgtgttcaccataatatcataaggggggagggggattattttttatcgtgaaccccaaaaaccaaaaggaatgggctagacagaccaagattaagcttggagtacgggaacgaactcatcatggcaaacacgtagcatcattggggctcattgaaatggggagataccacctacaggtgcaccggtggaaaacaagtttttcaggtgacgggcagtggcattaatgggatactagctgggtgtacgcttgccagagggggctcaagcctagga

SEQ ID NO: 178864 - DNA, 446 bp, Zea mays
  Clone ID: MRT4577_94709C.1
gccgggcccggagacataatggccggcgtgaactccagcgtcgtcgggctaagcccgccgcggcagtgccgcaggccgccgccgcctcatcgccggcgaagcgggtgcagctgaccgcgacccgagggtcttcgcgccgttctgctcggcctgttaatctgctatccatgccaatggcaccacctatctcgtgcaacacccctgatgtattcactattaggtctccgtagacaacgtcatctaccttcatgaccttacctggacccgataccgcacgatctaccgcatctacaagagcaagccaacggagggcttccagtcggtgtccgtacgtgtagaccctgtttagcggcatgctgtggatcttctacaagatgatcaacttcatcgacacgtacctcatcaccatcaacgagggcgactgcatgatctagaccctctacgac

SEQ ID NO: 178865 - DNA, 446 bp, Zea mays
  Clone ID: MRT4577_9470C.1
cttatcgcaactccattgccgtattcatcgttattatcagtcgcgtccactcgacctactacccccacatcatcccagagctgagctcctccagcgggatgacgccgtctccaccacctccctcttcttctttttcatccttctgtctctttgtttctgagctttcctgtctttccttttttctgagagattcaaagcctccacgactctgtttcccccgtcccttctgaatttaatttgcactaagtcatttgcactggttggagttgtggagacggccttgagtctcggtgcgagtgtgcgtgagtgtgagccaccttggcaagtgcctgcgcagggcccggccgccctccatctgggccgggtgactgggcgccggctgtgtgcccgaggcctctccctgccctcgcctagtctggaagctccgaccgacatcacggagcagc

SEQ ID NO: 178866 - DNA, 365 bp, Zea mays
  Clone ID: MRT4577_94710C.1
ggtgagcttccacctctttggcttctgttcgtcaccggcgcgcagaccgccctcctcctctcttggtctgcatccagttcatcccacccgcgcctcctttggcttcctatccaccatggggacggtaatgttccctcgctcgggcgttgggcctatgacgacaggcacctgccaagataccgtgtgaatcctagtcctagctcatccatggcttctctagctagtagtatcccactagaccacatcaatgtcactggtgtcgtagcgccatggcccatggttgcatgcttgtgcgaagagaatacagactgagtacgacatgttgtgttgctttcccattgaataagaaagtgtaatttcttttc

SEQ ID NO: 178867 - DNA, 643 bp, Zea mays
  Clone ID: MRT4577_94711C.1
cggccggggggcgcctcatcggccccctgcacggtttactggtttcttattgccaccatatcgaaagggggggaggaattaaattgtggagtcgggtggtgagatctgatttatagattatttgattagcccggttggtagtagcagtcggtggtggtggtagtggctcaaatctctgttcgggtttgtgaagcgcgggctctataaatacgactcagatctgagaggcctcctcggctcctcctcgtccgccccagtctaatccgattcaaaccgcccgtcccccgtgtccgtgccaagcaagccgagcccaacccccaagagccagctgcccggtgctccacgcgatggcgcagaaggagactaatggcagcaacggcgatcacatctccacccgcccgccgccgaccccctcgcccctccgcttctccaagttctttcaggctaacctgcggatcctggtcactggtggggcgggcttcatcggctcgcacctcgtagacaagctcatggagaacgagaagcacgaggtcattgttgctgataactttttcactggttcaaaagacaacctgaagaagtggattggccacccaagatttgagctcatccgtcatgatgtcaccgagccgcttcttgagga

SEQ ID NO: 178868 - DNA, 399 bp, Zea mays
  Clone ID: MRT4577_94712C.1
tttttgtttttttttttttttttttttttgtttttgggtgggcaagccagcaagatttgcataacaactgccacagcaaaatgaaggctgcaacttcaattaggtggccactcatctaaccacctactaaaccctacaaggaaggccaagcatttctcaactatctattcgactactttagcaaaagacttaacaagctcacgtttgtctgggatcaaacacagaccatgcacaagtccaatgcgcatgcagcattctaacaggtggacaccagaagctccagagaagctgatatggtgccgccgcctagttagataaacagttcctgcgctgccacccttcggttcgggccacaactgaggtgattctactataccaaggccaagcactggtaccccc

SEQ ID NO: 178869 - DNA, 1937 bp, Zea mays
  Clone ID: MRT4577_94713C.1
ccggccgggagcagctttgcttccttggaagcgcaaatgtctgctccatcctccgcctcatcgcccccctgcacggattactggtttcttattgccaccagatcgaaaaggggcggaggaattaaattgtggagtcgggtggtgagatctgatttatagattatttgattagcccggttggtagcagcagtcggtggtggtggtagtggtgcaagagcaagaccctgaccgacggcctctgcctccttgcatctctgttcgggtttgtgaagcgcgggctctataaatacgactcagatctgagaggcctcctcctcgtccgccccagtctaatccgattcaaaccgcccgtcccccgtgtccgtgccaagcaagccgagcccaaccccaagagccagctgctcggtgctccacgcgatggcgcagaaggagactaatggcagcaacggcgatcacatctccacccgcccgccgccgaccccctcgcccctccgcttctccaagttctttcaggctaacctgcggatcctggtcactggtggggcgggcttcatcggctcgcacctcgtagacaagctcatggagaacgagaagcacgaggtcattgttgctgataactttttcactggttcaaaagacaacctgaagaagtggattggccacccaagatttgagctcatccgtcatgatgtcaccgagccgcttcttgtggaagttgaccaaatctatcaccttgcttgccctgcttcaccaatcttctacaagcacaaccctgttaagaccatcaagacaaatgttattggtaccctgaacatgcttggacttgcaaagagagttggagctaggattttgttgacatcaacctctgaagtttatggtgatccacttgagcatcctcaaactgaggcctactggggcaatgttaacccgattggtgttaggagttgttatgatgagggtaagcgtgtagcagagacgctgatgttcgactatcacaggcagcatggcattggtaatacttcatcttgcacttaaactgtaatattagctcatagccctctttattgtgtgataactctaggctgatgatttgtcctcagcaatatttataatctatgtctgtagaaatccgaattgccaggattttcaacacctatggaccaaggatgaacagtgacgatgaccgtgttgttagcaacttcattgctcaggctgtgcgtggcgaaccccttactgtccagaagccaggaacacagactaggagcttctgctatgtcgccgatatggttgatggtcttattagactgatgaatggaaacaacactgggccgattaacttggggaacccaggtgaattcaccatgctggaacttgctgagaatgtgaaggagttgattaacccagatataacagtgacgatgaccgagaacactcctgatgatccccgccagaggaagccggacatcaccaaggcaaaggaagttctagggtgggagcccaagatcgtcctgaaggacggcttggtgctcatggaggatgatttccgggagcgcctggccgtgcccaagaaaaccaaggcctaaactgccctgcggtgggcgaagaatatccacgggggagcatactcatagttggcttgtcattattcgtggccacatttcattacggaatttgagttccaataaacggaatataccttcgtcgatcaccttgaaggattgtatcattagaattttcatacagggctggccttttgagtctctgcctacgcacgcagatgttgtggttcttgtgtttgtagcctatatgtactccctgagtcgattatagaaatgtttattccattttgagctttttgttccttccttttgctttgccgtctaagactaaaatgacgccagctgcgctgcaaatttgtgattgtaatggactggccc

SEQ ID NO: 178870 - DNA, 328 bp, Zea mays
  Clone ID: MRT4577_94714C.1
gaatccgggttcgaccacgcgtcacgcatgagagtcgtggagagagcagtcatggttcttctgtggactcactgctagcacattaatgggtacccgtctggttgaccctgtgacacacaactggcgcatcatgggacggatagagatctggttgccccacaagtcgaattctgcatgcaataaagtgacgaagacatggacgctactatgaccggccgatgtggttccccggcaccgtagctcccgactacctgtactgatcaatggtcggggactactggtaatacccgttcggtgtcagaaagtccttagagttccatcagtttga

SEQ ID NO: 178871 - DNA, 401 bp, Zea mays
  Clone ID: MRT4577_94715C.1
cggccgggctcgtccccccagggtagtccgattcaaccctgtgtccgagccacgcaagccgagcccaatccccagaggccgccagagccagctgctcggcgctccacgcgatggcgcagaaggagaccaatggcagcaacggcgagcacatctccacccgcccgccgccgaccccgtcgcccctccgcttctccaagttcttccaggctaacctgcggatcctggtcactggtggggcgggcttcatcggctcgcacctcgtggacaggctcatggagaacgagaagcacgaggtcattgttgctgataactttttcaccggctcaaaagataacctgaagaagcggatcggacacccaagatttgagctcatccgccatgatgtcacatgagccactcct

SEQ ID NO: 178872 - DNA, 472 bp, Zea mays
  Clone ID: MRT4577_94716C.1
ggggggaaaaaaaaaattttttcgggaaacccgggccccccctaaaagggccactgggggcccccttaaaaagttcgacccccccaaaacgggccattttttttttttaacaaaaaggtcccatttggccatcccccccagggggggagaacccccaaatttttaacccccccctgtttagaaacccgggccccaaataatttcccggtccctatgggcccttgttaaggggcccccccccgggctttttccaaaaaaaaaccgggtgaacccctacccgggggaaaaaatttacaggggcccccttttttttcccccccgtttccccaaaaaagagccctccttgtctggcccaaaagggcacccgccttttgaccccccccacttttttgggggaccctccttttggcccccccgggggggggttttttccaaaggggttcacataacccttaaggggggggccccccca

SEQ ID NO: 178873 - DNA, 1031 bp, Zea mays
  Clone ID: MRT4577_94717C.1
cattgggtacctcgaggccggccgggaaaacctccgtccgccccagtctagtccgattcaaacccgcccgttccccgtgtccgagccacgcaagccgagctcaatccccagaggccgccagagccagctgctcggtgagcgccgcgcccttcgcccccctcaggccctcacgcttcgttgcttgatcgtctgatttctctgacgggtggtttggtttggatctgggcggaccaggcgctccacgcgatggcgcagaaggagaccaatggcagcaacggcgagcacatctccacccgcccgccgccgaccccgtcgcccctccgcttctccaagttcttccaggctaacctgcggatcctggtcactggtggggcgggcttcatcggctcgcacctcgtggacaggctcatggagaacgagaagcacgaggtcattgttgctgataactttttcaccggttcaaaagataacctgaagaagtggatcggacacccaagatttgagctcatccgccatgatgtcactgagccacttcttgtggaggttgaccagatctatcaccttgcttgccctgcttcaccaatcttctacaagcacaatcctgttaagaccatcaagacaaatgttattggtaccctgaacatgctgggacttgcaaagagagttggagctaggattttgttgacatcaacatctgaagtttatggtgatccacttgagcatcctcaaaccgaggcctactggggcaatgttaacccaattggagtcaggagttgttatgatgagggtaagcgtgtaccagagacgctgatgttcgactatcacaggcagcatggcattgaaatccgaattgccaggattttcaacacctatgggccaaggatgaacattgacgatggccgtgttgttagcaacttcattgctcaggctgtgcgtggcgaaccccttactgtccagaagccaggaacacagactaggagcttctgctatgtcgccgatatggttgatggtcttattaggctgatgaacgg

SEQ ID NO: 178874 - DNA, 1692 bp, Zea mays
  Clone ID: MRT4577_94718C.1
gggaaaaagcgtactgcacacggcattcccctcccctagcgttatcgtcgcaccataaataaccatcctctcctcgcctttccccacatctcatcttcgtctgtgttcttgggcgtacgcggacacagccccgatccgaatcgtcgtccttgcgagcctcgccgatcccccactcccctcccctcgcttcaagatgcagatctttgtgaagaccctcaccggcaagactatcaccctcgaggtggagtcttctgacaccattgacaatgtcaaggctaagatccaggacaaggagggcatccctcctgaccagcagcggcttatcttcgccggcaagcagcttgaggacggacgcacacttgctgactacaacatccagaaggagtcaaccctccacttggtgctgcgccttaggggaggcatgcagatctttgtcaagaccttgactggcaagacaatcacccttgaggtggagtcctcagacaccattgacaatgtcaaggcaaagatccaggacaaggagggcatcccacctgaccagcaacgtctcatctttgccggcaagcagttggaggatgggaggacccttgctgactacaacatccagaaggagagcaccctccacttggtgctgcgtcttaggggtggtatgcagatctttgtgaaaacccttactggcaagaccatcactcttgaggtggagtcttcagataccattgacaatgtcaaggccaagatccaggacaaggagggcatcccgccggaccagcagcgtcttatctttgccggcaagcagctggaggatggacgcacccttgcggattacaacattcagaaggagagcaccctccacctggtgctgcgcctcaggggaggaatgcagatcttcgtgaagacattgactggcaagaccatcaccttggaggttgagagctccgacaccattgataatgtgaaggccaagatccaggacaaggagggtatccccccggaccagcagcggctgatcttcgccggcaagcagctggaggatggtcgcaccttggctgactacaacatccagaaggagagcaccctccatctggtgctccgcctgaggggcggtatgcagatctttgtgaagaccttgactggcaagaccataaccctggaggttgagagctctgacaccatcgacaacgtgaaggctaagatccaggacaaggaggggattcccccagaccagcagcgtctgattttcgccggcaagcagctggaggatggtcgcacccttgcagactacaatatccagaaggagagcaccctccacctggtgctccgtcttcgcggtggttattaagccatcagtcgttgaagctgctgctgtatctgggttatctagtgtctctgccattgcccatggatggtgctgtctttcaaagtatttgtatggtttgtgtcgtgagtcgtgactgagctggtttcatggaccagttgtgttctcgttacccaaaactatcgtgcgaccgcatatggcttaatcatgaataaatgttgtttgaatttaaactaaaacgacgcccagcagccgacgtggagggaggtcgcgagcgagggccctccgctgccgcggtcctggcacagctcatgtaccctggacggctcgaactcgtggtctcaggtggctgcgccgagtctggtgtcctcctcagc

SEQ ID NO: 178875 - DNA, 609 bp, Zea mays
  Clone ID: MRT4577_94719C.1
accgagccgcttcttgtggaagttgaccaaatctatcaccttgcttgccctgcttcaccaatcttctacaagcacaaccctgttaagaccatcaagacaaatgttattggtaccctgaacatgctaggacttgcaaagagagttggagctaggtcagtgttcatcatgccattgattcttccagcgcctcatgtgaaaaactcaattacagaatttatttttgaattgcaggattttgttgacatcaacctctgaagtttatggtgatccacttgagcatcctcaaactgaggcctactggggcaatgttaacccgattggtgttaggagttgttatgatgagggtaagcgtgtagcagagacgctgatgttcgactatcacaggcagcatggcattggtaatacttcatcttgcacttaaactgtaatattagctcatagccctctttattgtgtgataactctaggcttatgatttgtcctcagcaatatttataatctatgtctgtagaaatccgaattgccaggattttcaacacctatgggccaaggatgaacattgacgatggccgtgttgttagcaacttcattgctcaggctgtgcggtaa

SEQ ID NO: 178876 - DNA, 462 bp, Zea mays
  Clone ID: MRT4577_9471C.1
agtaaacatttcttagggcctactaacacaatccttgcttgcagaatgcacaatgagggacctaatggaacacacgcctaaccagagtgcgctatgctgccttcatgacaccaaactgacaccgtgggcgcctccctaaatgggctgggaccatactaccggcactggcccaagctatagccagctacggactttggacatgtggttgggacaggaccagaaggcccctcttcctgaggaccatgggccgaagaacgaattcgcacttggacactctggtgagggggccgaacttgaactacttacccttcatctaagcactggcctgggacaactgcttgacgccccacaggaccgaacctgcctcctgttgatagccttgattataactctgccaaagacccaacaaggaaactgcacccctttacctgtaccatgaagaccagctggaatggcaacata

SEQ ID NO: 178877 - DNA, 1616 bp, Zea mays
  Clone ID: MRT4577_94720C.1
cctgccgggtcccttcccacgggcggcgtgctgaatcctttgcagacgacttaaaacgcgacggggcattgtaagtggcagagtggcctatctcatcttcgtctgtgttcttgcgcgtacgcgtacacagccccgatccgaatcgtcctcctcgcgagcctcgccgatcccccactcccctcccctcgcttcaagatgcagatctttgtgaagaccctcaccggcaagactatcaccctcgaggtggagtcttctgacaccattgacaatgtcaaggctaagatccaggacaaggagggcatccctcctgaccagcagcgccttatgcttcgccggcaagcagcttgaggacggccgcacacttgctgactacaacatccagaaggagtcaacccttcatttggtgctgcgccttaggggaggcatgcagatctttgtcaagaccttgactggcaagacaatcacccttgaggtggagtcctcagacaccattgacaatgtcaaggctaagatccaggacaaggagggcatccctcctgaccagcagcggcttatcttcgccggcaagcagcttgaggacggacgcacacttgctgactacaacatccagaaggagtcaaccctccacttggtgctgcgccttaggggaggcatgcagatctttgtcaagaccttgactggcaagacaatcacccttgaggtggagtcctcagacaccattgacaatgtcaaggcaaagatccaggacaaggaaggcatcccaccggaccagcaacgtctcatctttgccggcaagcagttggaggatgggaggacccttgctgactacacatccagaaggagagcaccctccacttggtggctgcgtcttaggggtggtatgcagatctttgtgaaaacccttactggcaagaccatcactcttgaggtggagtcttcagataccattgacaatgtcaaggccaagatccaggacaaggagggtatccccccggaccagcagcggctgatcttcgccggcaagcagctggaggatggtcgcaccttggctgactacaacatccagaaggagagcaccctccatctggtgctccgcctgaggggcggtatgcagatctttgtgaagaccttgactggcaagaccataaccctggaggttgagagctctgacaccatcgacaacgtgaaggctaagatccaggacaaggaggggattcccccagaccagcagcgtctgatcttcgccggcaagcagctggaggatggtcgcacccttgcagactacaatatccagaaggagagcaccctccacctggtgctccgtcttcgcggtggttattaagccatcagtcgttgaagctgctgctgtatctgggttatctagtgtctctgccattgcccatggatggtgctgtctttcaaagtatttgtatggtttgtgtcgtgagtcgtgactgagctggtttcatggaccagttgtgttctcgttacccaaaactatcgtgcgatcgcatatggcttaatcatgaataaatgttgtttgaatttaaactaaaaaaaaaaaaaaataaaaaaaaaaaaaaaaaaaaaaaaaaaaaaaaaaaaaaaaaacaaaa

SEQ ID NO: 178878 - DNA, 1569 bp, Zea mays
  Clone ID: MRT4577_94721C.1
tgggaccctcgaggccggccgggacctcgtccgccccagtctagtccgattcaaacccgtgtccgagccacgcaagccgagcccaatccccagaggccgccagagccagctgctcggtgagcgccgcgcccttcgccccctcaggccctcacgcttcgttgcttgatcgtctgatttctctgacgggtggtttggtttggatctgggcggaccaggcgctccacgcgatggcgcagaaggagaccaatggcagcaacggcgagcacatctccacccgcccgccgccgaccccgtcgcccctccgcttctccaagttcttccaggctaacctgcggatcctggtcactggtggggcgggcttcatcggctcgcacctcgtggacaagctcatggagaacgagaagcacgaggtcattgttgctgataactttttcactggttcaaaagataacctgaagaagtggatcggacacccaagatttgagctcatccgccatgatgtcaccgagccacttcttgtggaggttgaccagatctatcaccttgcttgccctgcttcaccaatcttctacaagcacaatcctgttaagaccatcaagacaaatgttattggtaccctgaacatgctgggacttgcaaagagagttggagctaggattttgttgacatcaacatctgaagtttatggtgatccgcttgagcatcctcaaaccgaggcctactggggcaatgttaacccaattggagtcaggagttgttatgatgagggtaagcgtgtagcagagacgctgatgttcgactatcacaggcagcatggcattgaaatccgaattgccaggattttcaacacctatgggccaaggatgaacattgacgatggccgtgttgttagcaacttcattgctcaggctgtgcgtggcgaaccccttactgtccagaagccaggaacacagactaggagcttctgctatgtcgccgatatggttgatggtcttattaggctgatgaatggaaacaacactggaccgattaacttggggaacccaggtgaattcaccatgctggaacttgctgagaatgtgaaggagttgattaacccagatataacagtgacgatgaccgagaacactcctgatgatccccgccagaggaagccggacatcaccaaggcaaaggaagttctagggtgggagcccaagatcgtcctgaaggacggcttggtgctcatggaggatgatttccgggagcgcctggccgtgcccaagaaaaccaaggcctaaactgccctgcggtgggcgaagaatatccacgggggagcatactcatagttggcttgtcattattcgtggccacatttcattacggaatttgagttccaataaacggaatataccttcgtcgatcaccttgaaggattgtatcattagaattttcatacagagctggccttttgagtctctgcctacgcacgcagatgttgtggttcttgtgtttgtagcctatatgtactccctgagtcgattatagaaatgtttattccattcgaaaaaaaaaaaaaaaaaagcggcc

SEQ ID NO: 178879 - DNA, 1818 bp, Zea mays
  Clone ID: MRT4577_94722C.1
ccggccggggaaagcgtcactgcacacggcattcccctcccctagcgttatcgtcgcaccataaataaccatcctctcctcgcctttccccacatctcatcttcgtctgtgttcttgggcgtacgcggacacagccccgatccgaatcgtcctcctcgcgagcctcgtcgatcccccactcccctcccctcgcttcaagatgcagatctttgtgaagaccctcaccggcaagactatcaccctcgaggtggagtcttctgacaccattgacaatgtcaaggctaagatccaggacaaggagggcatccctcctgaccagcagcggcttatcttcgccggcaagcagcttgaggacggccgcacacttgctgactacaacatccagaaggagtcaacccttcatttggtgctgcgccttaggggaggcatgcagatctttgtcaagaccttgactggcaagacaatcacccttgaggtggagtcttcagacaccattgataatgtcaaggctaagatccaggacaaggagggcatccctcctgaccagcagcggcttatcttcgccggcaagcagcttgaggacggacgcacacttgctgactacaacatccagaaggagtcaaccctccacttggtgctgcgccttaggggaggcatgcagatctttgtcaagaccttgactggcaagacaatcacccttgaggtggagtcctcagacaccattgacaatgtcaaggcaaagatccaggacaaggagggcatcccacctgaccagcaacgtctcatctttgccggcaagcagttggaggatgggaggacccttgctgactacaacatccagaaggagagcaccctccacttggtgctgcgtcttaggggtggtatgcagatctttgtgaaaacccttactggcaagaccatcactcttgaggtggagtcttcagataccattgacaatgtcaaggccaagatccaggacaaggagggcatcccgccggaccagcagcgtcttatctttgccggcaagcagctggaggatggacgcacccttgcggattacaacattcagaaggagagcaccctccacctggtgctgcgcctcaggggaggaatgcagatcttcgtgaagacattgaccggcaagaccatcaccttggaggttgagagctccgacaccattgataatgtgaaggccaagatccaggacaaggagggtatccccccggaccagcagcggctgatcttcgccggcaagcagctggaggatggtcgcaccttggctgactacaacatccagaaggagagcaccctccatctggtgctccgcctgaggggcggtatgcagatctttgtgaagaccttgactggcaagaccataaccctggaggttgagagctctgacaccatcgacaacgtgaaggctaagatccaggacaaggaggggattcccccagaccagcagcgtctgatcttcgccggcaagcagctggaggatggtcgcacccttgcagactacaatatccagaaggagagcaccctccacctggtgctccgtcttcgcggtggttattaagccatcagtcgttgaagctgctgctgtatctgggttatctagtgtctctgccattgcccatggatggtgctgtctttcaaagtatttgtatggtttgtgtcgtgagtcgtgactgagctggtttcatggaccagttgtgttctcgttacccaaaactatcgtgcgaccgcatatggcttaatcatgaataaatgttgtgtttgaatttaaactattcgctgaatattgttgttttttgtcatgtc

SEQ ID NO: 178880 - DNA, 1501 bp, Zea mays
  Clone ID: MRT4577_94723C.1
tagggcgattgggtccctccgaggttcggccgggcacctcgtccgccccagtctagtccgattcaaacccgcccgttccccgtgtccgagccacgcaagccgagctcaatccccagaggccgccagagccagctgctcgctcggcgctccacgcgatggcgcagaaggagaccaatggcagcaacggcgagcacatctccacccgcccgccgccgaccccgtcgcccctccgcttctccaagttcttccaggctaacctgcggatcctggtcactggtggggcgggcttcatcggctcgcacctcgtggacaagctcatggagaacgagaagcacgaggtcattgttgctgataactttttcactggttcaaaagataacctgaagaagtggatcggacacccaagatttgagctcatccgccatgatgtcaccgagccacttcttgtggaggttgaccagatctatcaccttgcttgccctgcttcaccaatcttctacaagcacaatcctgttaagaccatcaagacaaatgttattggtaccctgaacatgctgggacttgcaaagagagttggagctaggattttgttgacatcaacatctgaagtttatggtgatccacttgagcatcctcaaaccgagggcctactggggcaatgttaacccaattggagtcaggagttgttatgatgagggtaagcgtgtagcagagacgctgatgttcgactatcacaggcagcatggcattgaaatccgaattgccaggattttcaacacctatgggccaaggatgaacattgacgatggccgtgttgttagcaacttcattgctcaggctgtgcgtggcgaaccccttactgtccagaagccaggaacacagactaggagcttctgctatgtcgccgattatggttgatggtcttattaggctgatgaatggaaacaacactggaccgattaacttggggaacccaggtgaattcaccatgctggaacttgctgagaaatgtgaagggagtgattaacccagatataacagtgacgatgaccgagaacactcctgatgatccccgccagaggaagccggacatcaccaaggcaaaggaagttctagggtgggagcccaagatcgtcctgaaggacggcttggtgctcatggaggatgatttccgggagcgcctggccgtgcccaagaaaaccaaggcctaaactgccctgcggtgggcgaagaatatccacgggggagcatactcatagttggcttgtcattattcgtggccacatttcattacggaatttgagttccaataaacggaatataccttcgtcgatcaccttgaaggattgtatcattagaatttttatacagagctggccttttgagtctctgcctacgcacgcagatgttgtggttcttgtgtttgtagcctatatgtactccctgagtcgattatagaaatgtttattccatttcgaaaaaaaaaaaaaaaaaagcggcc

SEQ ID NO: 178881 - DNA, 1947 bp, Zea mays
  Clone ID: MRT4577_94724C.1
ctcgagccggcgggaccgatctttgcttcattggaagcgcaaatgtctgctccatcctccgcctcatcgccccctgcacggtcacggattactggtttcttattgccaccagatcgaaaaggggcggaggaattaaattgtggagtcgggtggtgagatctgatttatagattatttgattagcccggttggtagcagcagtcggtggtggtggtggtagtggtgcaagagcaagaccctgaccgacggcctctgcctccttgcatctctgttcgggtttgtgaagcgcgggctctataaatacgactcagatctgagaggcctcctcctcgtccgccccagtctaatccgattcaaaccgcccgtcccccgtgtccgtgaccgtgccaagcaagccgagcccaacccccaagagccagctgctcggtgctccacgcgatggcgcagaaggagactaatggcagcaacggcgatcacatctccacccgcccgccgccgaccccctcgcccctccgcttctccaagttctttcaggctaacctgcggatcctggtcactggtggggcgggcttcatcggctcgcacctcgtagacaagctcatggagaacgagaagcacgaggtcattgttgctgataactttttcactggttcaaaagacaacctgaagaagtggattggccacccaagatttgagctcatccgtcatgatgtcaccgagccgcttcttgtggaagttgaccaaatctatcaccttgcttgccctgcttcaccaatcttctacaagcacaaccctgttaagaccatcaagacaaatgttattggtaccctgaacatgctaggacttgcaaagagagttggagctaggattttgttgacatcaacctctgaagtttatggtgatccacttgagcatcctcaaactgaggcctactggggcaatgttaacccgattggtgttaggagttgttatgatgagggtaagcgtgtagcagagacgctgatgttcgactatcacaggcagcatggcattgaaatccggattgccaggattttcaacacctatgggcctaggatgaacattgatgatggccgtgttgttagcaacttcattgctcaggctgtgcggtaatgctttgttgaatgtctttattttctcctcagctactgcagatagattggcggctaatcttttcacaatctttagcggtgagcccctgactgtccagaggccaggaacacagactaggagtttctgctatgttgccgatatggtttgtcttccactgcattctcaattggtttgttgttggtcagaagactgtcagtgcactatatcaactatgccattcattgcaggttgatggtcttattaagctgatgaatggaaacaagactggaccgattaacttggggaacccaggtgaattcaccatgctggaacttgctgagaatgtgaaggagttgatcaacccagatgtgacagtgacgatgaccgagaacactcctgatgatccccgccagaggaagccggacatcacaaaggcgaaggaagttctgggatgggagcccaagatcgtcctgcgggacggcttggtgctcatggaggatgatttccgggagcgcctgaccgtgcccaagaaaaccaaggcctgaattgccctgaagttggggaagaatatccacacgggggagcatactcatagtcgggctcgtcattatttgtggccacatttcattacggaatttgagttccaataaacttaatattcctttgtcgttcaccttgaaggattgtattgttagaattttcatacagggctggccgttcgagtctctgcctacgcagatcttgtggtacttgtgtttgtagccaatgtgtgagtaaaagtcgattatagcaatgttgatgccattttgggcgaaaaaaaaaaaaaaaaaagcggcc

SEQ ID NO: 178882 - DNA, 370 bp, Zea mays
  Clone ID: MRT4577_94725C.1
cgggcctcgttgaggctgttgtggacggtctcgtcggcgtcggacaaggggggcagcccggacgcagcgagcagccgctgcgtcatgccacgctgcgccatcaagctcacgcggatctggtcgatcagctcctgcgggtagagggataattaaccatggcaaatcgttaattatcccgcgtgtataaaaaattatcgaacacggaaataaaaacgaaatgtcgagccaaaatcaattaaactcattcttaaataaaaaaaatagcacggttgtcagcatcggcagcaggtaaggcgcggattggtgaaaacataggggggaagaggatacctgcttctgggtgaggaggtcgcggcacatctccttgagc

SEQ ID NO: 178883 - DNA, 232 bp, Zea mays
  Clone ID: MRT4577_94726C.1
agccttccggttcctttcaattccacaaaccattacctggggtctgtgctggggcggtacgatgggaatgtgtacccagcgctgtaccaggaggcctggaaaggaccctctgaaacaaaacgtggtgcccgagggtaccacgagtacctcgcccctgcttaacgcagctaagctctcagcttatctgacgtacccctgaatttcatgggtgctttaaaattaccactcatga

SEQ ID NO: 178884 - DNA, 124 bp, Zea mays
  Clone ID: MRT4577_94727C.1
tgttgtctcagaagtcgtggaggcaaagggtggatcaggctcctttttctgtgtcaatggcttttgctgcttctatattcgctgactcatgcttgcaagctatgcgtatttattctgaattttt

SEQ ID NO: 178885 - DNA, 236 bp, Zea mays
  Clone ID: MRT4577_94728C.1
gggaaacgggtcacaaaacttgacttttcccagataaccaactggaaaagcgggttttcgggtcaaaaaaataaattgaacaggggaccccataatgggtttgaacatgggaaaagaggatttgtttgaaaattaacaagggtattgtttcaccccatcaaaaaagggaatttttcctcaaaggggggtaaaccaaattaaaatggcactgggaatccttattttggggggggggt

SEQ ID NO: 178886 - DNA, 397 bp, Zea mays
  unsure (1)..(397): unsure at all n locations
  Clone ID: MRT4577_94729C.1
ccgcagacgggttggagccggcgcgccgncacgcggnccggagagcagaggcgagcagaaaccacaccacgcnacggacgcccgacgagcaggggaacannnnccnncagccaggggnaaggagaagacncacancaacanggggggcangggccangncgacnctggcaaggcgaccaccacgggccggggggggacaagcnnggaggganngacaagcgagnganngagaggggcgagaaagaggcngccgagangaacaagcggncanncaagnangcgngggggcnngacaagcncaaggcngagcgngagagaggnannacaanngananngcccngnggaagnncgagaccaccaagnacaacggcacngnnanngangccccgggacacc

SEQ ID NO: 178887 - DNA, 1000 bp, Zea mays
  Clone ID: MRT4577_9472C.1
cattgggtacctcgaggcggcggactcgtccgctcccccatctcaattctcccacccggccgccggcaccacacgcgcgctccgggagccacaacgaccgatggcgagggcgcgcctccctctcctcctcctcctcctcgtggcgttcctcgccggcacaggctccacggcggcccgacacgccgcgcccgcacccgcgtccgcgccccgggcgtcgccgtccatctccgcggcgcccgagtacggggcgccgctcccgcgcctcccgaaccagcaccagcgcccctccgcgcttgcgccgtcgcaggcgctggcgccggacataatgcccgtgctgccgtctccggccgaggacggcgccgcgccgccgcccgacgcggacgagcccaccatcccgtccagccccagcccgcccaacccggacgcgctggagcccgcgtgggcgctggcgccgttcggctccgcgcccgccgtcgccgcgcagtcccccgccgccgcgccggccccggcgtcggcgctcgtgctgctggccgtgccgtggctgctgctggtggtggtggtgtagcggttcggtctagcggcgtgcgcgacctgcctgccgtggaccacgccggcctctccacacagctgctgctcctcgtggatcatgtcatgtgcatgtctcggcggcaggcgtgcagggtgcacggaaaaaggtggtcctcgcgggttggtcggcctcggccgggctggctggctctgcagctcgccttgccgccactactctctgcgtcctcgtgaagaactgctgcttctgctgctacatctcatcagcttttacttctctatatctcctgtaaatcttagcttacttttcgggtggggttacggccggcgatttcgctatagactttttttgttttgtttttaacttttgttcagcggagattattatttgggtgattcttgcagtaaaactggacgggtggttccgtattcgtgctaaaaaaaaaaagcggcc

SEQ ID NO: 178888 - DNA, 507 bp, Zea mays
  Clone ID: MRT4577_94730C.1
cccacgcgtccgcccacgcgtccgtttttttttaagtcgccaatgatttcattcaaaaatgtcaacatcttgtgcaaacatcatttaactcatgtgaaaccaacattaaaattattcgtcaatagctgttttaaacaccaaaaccatgccatgtaacgttaaaattattaagtcttctcgaaatcctaacgaggaaactagctattgttgggtaatttcttcgaactttgctggggaagaaatgccataatagcttttattcccccaaaagacacatcatttatcctttcgaaaggatgggatctacacaacagattcaagtacctttggcaggctctacgatggcctctcttgcatcacccatcttttccgtttccctgggaaagctcgcagccagcacgcgcgctggcgccgggatgcgccgtgaggcgcgccatcaccgcggccaccgtcaccggggaccccatcaacgccgccgaggccgcgcggacgggagcgcctcgtgcc

SEQ ID NO: 178889 - DNA, 337 bp, Zea mays
  unsure (1)..(337): unsure at all n locations
  Clone ID: MRT4577_94731C.1
gacggggccggcgcganccccgacnnggagacccgcnngaggggcgcggagaacnncgcggncgggccgggccggaccagcancaaccccgaccncaagaaaggcggcgacggccgccaccncgagacggcggccgacggccaccccggaagggggggggcngacnccaccggggaggcggagaagccacccaaggcggagaaaccnncngccgaaggcggccnnngccccncaggaagaagccccggggggccggccgggcccaancacgccnncagacggcnncaacagggggcggnncccgcccgancggcaccgcgcnnancgnnggcgnngg

SEQ ID NO: 178890 - DNA, 1773 bp, Zea mays
  Clone ID: MRT4577_94732C.1
ccggccggctcttcccctcccctgcgactcgtcgccccctgcctcatgtccctccctcacgccgccgccgctgggttcccctcccatcccatctcctctcggagactgtggcgttaatacgggctttctctgctagtaaaaaaatgacaatagattttgaatggaacctgtagtgcatggccataagtgtactcgatatgcggcagggcggggtccggtccattccgagggaagacaaaacacgcaatacaatagtattagaatttagaaatgtatgtctctatcctactatttaatgttgggatcgatatatatgatgcccaaggtgcctgctgcctagagtccattgttcattagcaagaagtgcccgaaaacagccggcgacacagctgaggcggcagaagcagcttctctcgtcgtggtgtttgagtttcagcaggcagcatggcgcatgctcaagaaattcagctccagatcagaggcattccggacgaggaatccgtcgacgcccgtgatggacccaaggtcgccacggggcggtccacgagaagcagcttccgatggtggatgacggtgctggtggacatgctgatggttctctgcgggacgactgtggccaccctcctcggccgcctgtacttcaactccggcggcaacagcaagtggatggccacgctgacgcagtctggcggctcgccgcttctggtcgtcccgctcctcctgtcgccggcgcgctcggcggaggagcgccggccggcggcgctcaagatggttgccatctacgcgggcatcggggtcatgatcggcttcgacaacctcatgtactcgtacgcgctgcagtacctgccggtgtccaccttctcgctcgtggccgcgacgcagctgggcttcaacgccatcacctcgcgcctcatcaacgcgcagcggttcacggcgctgatcgccaactccgtggtcgtgctcaccttctccgccgcgatcctcggcgtcggatcctcctccgacgagacctccagcaacgtgccgcgcggcaagtacccgctggggttcgtcctcgtgctggccgcctcggcggtgttcgcgctcattttgtccctcttcgagctcaccttcgagaaggtggtcagggtgcggacggcgcggtgggtgctgcggatgcagatgcacaccaacctggtggcgtcggcggtgtccgtggcggggctgctcgcgtcgggggactggcggacgatcccgggggagatggcgtcgttcaaagacgggaggacgaggtacgtgctgacgctggtgggcacggcggtgtcgtggcaggcagcggccgtgggcttggtgcggctgatcatgagggtgtcgtcgctgttcgcgaacgtgacgtgcacgctggcgctgccgctggtgccagtgtttgcggtggcgctgttcggggacaggatgaccggtataaagatcgtggccatgctcatggcggtatgggggttcctctcctacatgtaccagcactacatcgacgcacggcggcgggccggggccgagaacgccgagtgccgcgtctgcgccacacgcacgggaagccacgcggtcttgcccgcttgaggctccgttgtgggcctgtggctcgacagtgtgtagtactcaatgctacatagatagctagatgcctaaagatagcaaaatgtttagggccatgggatccatgttattttctaggatagtaattccaaagaatatcatttgaataagatattaagttatttatggaaagttttttccttc

SEQ ID NO: 178891 - DNA, 481 bp, Zea mays
  Clone ID: MRT4577_94733C.1
cgccctttaccacggccgggcgggggggtacaagctttttttttttttttttttgttttttttttttcttttttttttttttttttttttttttttttttttttttttttttttgttcttctaaaaaatcggatggtaatttttttttttagagttggcccaattttttggggggggggggggttttttgaattaaaaaggtaaagccctttaagcgggggccccaagaatagatatgttctactgagggggcatctggactgggcggggcccactttaagtatatatttcaataattgtggtggttgttgatttgattccaaatttggcatcagtcttgacttatatatggcattaggtagattcatggtgaaattagtattgtagttcacattcctaggcgttttaacagcggtaaatataaaggggaaaaatggggggggttaaggaggaagttaagggaatctatttctgttgattt

SEQ ID NO: 178892 - DNA, 390 bp, Zea mays
  Clone ID: MRT4577_94734C.1
gggaacccaaggggggcccccgggatttttttccaaaaaaaaccaggggggggtaaaaaaaaaaattgggggaaacccccacccggggtaaagggaaaaaattccgaaaaccaacaaaggggggcgggctgatttttagctttattagcgggggggggtttccaattgggggccccacccaaaaaaaaagggggcccgaaaacttcaccctcaattttaagaaaaacagggggggtgtcccccctatgggccaccaccacgctaaaaatgattatccccaaaaaaacattccccccaatttgggggtttgaacccacgccccccaggaggcccccctcctcattgttaaagccctggtatgggtggttaatgggcccacccccttttttc

SEQ ID NO: 178893 - DNA, 611 bp, Zea mays
  Clone ID: MRT4577_94735C.1
aaaaaaaaaaaaaaaaaaaaaaaaaaaaaaaaaaaaaaaaaaaaaaaaaaaaaaaaaaaaaaaaaaaaaaaaaaaaaaaaaaaaaaaaaaaaaaaaaaaaaaaaaaaaaaaaaaaaaaaaaaaaaaaaaaaaaaaaaaaaaaaggggggggccgtttttgaagaaaccaaattttattccccggggtgggggaggtaaaattttttttttggggccccaaaattaaattcccggggcgggtttttaaaaaggggggggggggaaaacccgggggttccccaatttaaagcctttggaaaaaaacccctttttcccagggggggaaaaaagaaaaagggcccccccgatccccctttcaaaaaattgcccccccttaaggggaaaggggaccccccctttaaggggccattaaagcgggggggggggggggtttccccccaggggaccctttattttggcagggccttaaggcccggtttttttggttttttcccttttttttttcccacgttggggggttttccccggaaaggtttaaaagggggggtcccttttggggttccaaataaaggtttttggggcccttcccccaaaaaaattggtttgggggg

SEQ ID NO: 178894 - DNA, 188 bp, Zea mays
  Clone ID: MRT4577_94736C.1
ggttctagaagcacctgacagggatgcatggcgagcatccttgggctttcctagcacgggatagcaggggcctcttgcttctcacaggccatgctggaaatccttttctgtggaggtgctggctctaggcccatgaggatgagaactggccaggagagttgctcatatgaaatgtgttaccgtttccc

SEQ ID NO: 178895 - DNA, 342 bp, Zea mays
  unsure (1)..(342): unsure at all n locations
  Clone ID: MRT4577_94737C.1
cgtgccgcgttatagtccagcatcatgaagttgtagcgcggacctgatcacgtgcggcgtgccgtggtcgctggcctcgtcgtggtgcgtgggccacctggacctcagccacaaccggctgtgcggcnccattccctccggcccgccgttcgaccgtctctgccccgcgtcgttgggcgggggcgggtgcctctgtggtggcccgttcggcacgtgcncgtgacgccccttgcccgcccgtgcgcgggncggctgtcgccctgttcgtgcggcttggtttgcatgtcctgcttgttgctggtctgccggtgctgtctgtgcctgtctttctctttcttgctt

SEQ ID NO: 178896 - DNA, 289 bp, Zea mays
  Clone ID: MRT4577_94738C.1
tttttaattttcccctgggtgttttttttgggaaaccggcccttcccccccccgggagggttattacaaaaaactcttctgaggacccaaagcttaacccccaattgtttgtgctgttggacttttctgcaacaaccgatgctgaaatgcccccggaccatttaccattgtcacacgcctctgtttctggtggctttccctctaaccattccagttcccctgaatccttccgataaaatctgggcggccgaatggcaacccgacgggctaagcccgattttctcaataa

SEQ ID NO: 178897 - DNA, 302 bp, Zea mays
  Clone ID: MRT4577_94739C.1
aaagcctttcattattcataatatgccactttcgagcaggtaattgcacctgaatacttgctgcctttttgccaagaaaggatgcatatcaccatccttttgcactgcatacatatcttctgtgaagaccagtgtatcccaatccaaaagagagggagcgaacttgcccactgcgcacggcattactcaacccagcagacctcatgtcgttcagtgatcctacaacaagcctttgcttccaactattctagtgccatacatccatgacagcgcttagctgtagcgctacacccgcttatgca

SEQ ID NO: 178898 - DNA, 539 bp, Zea mays
  Clone ID: MRT4577_9473C.1
cacgagaatcaaattaacattcaacactaccaaacagtagtaaaaaacttgtaccaataagaacgcccaaacaaaatacagaacagcacaaaaaaagcactcacctggggcatacaaaattacaggcttgcaactaaactaactcctggcacttttcttctttcttttatgttttggttggatagcatcttttagactctttggcgatccaatttcatgggcctcagactctccagcagccacagcacttgatgtgttcacctcagcattagatgattcagtcattggttgggcatcctcacggctgctggccttgaccattgttggtggatctttgcttatctgcggaacatcactatgcatctgcacagattgcttttccaattcaccatcacctttgccgtccatagttacattagtgacattaattttctgaggaaccgaggttggcaaacgttttactttctttagggctttctcgggggtgtatgagtctactgctttctttattttgcttgttatatcagcagcctttaccg

SEQ ID NO: 178899 - DNA, 109 bp, Zea mays
  Clone ID: MRT4577_94740C.1
cgctgatatggcagtttgagcttccagcatttatggtcctgatcattgcgatcctcaatggcggtaccattatgactatatcgacggatagtgtaagaccatgtacacc

SEQ ID NO: 178900 - DNA, 628 bp, Zea mays
  unsure (1)..(628): unsure at all n locations
  Clone ID: MRT4577_94741C.1
attctctgcgccgccgcctccgaatcttctcttcgtcgccacgagcaaccgataatccgccggtgctgatatgttggtttatctagacctcctatctggcgacgagctcctgtcgcattcattccctacatgagtcagacgttcctgtgggaggccaggaaggtgccccaaggtcctgtgatgaaattgggcatccatccgccgagggtgggaggatgagcgtgatgacactgccgtgaaggtggttgatattgctgactcattccggctacaggaacaacctccttttgacaagaaatcctttgtctcttacataacacaatacatcacgaatctcactgctgtgttgcagccagacaaagcgtatgagttcacatagggtgtcgaggctgccaccaagtctctccttagcaagctgaaggaccttccatttgtttgttggtgagagcatgaacgacgaagcgtccgtgatattcgcctattaccacgatgctgccactaatccgacattcctctatttctctcgtggncttaaggagatcgagtgctatactagatactcatgttggcgactatatatgatctattgtgatagccacaactatagctgccctgcctgaactgaact

SEQ ID NO: 178901 - DNA, 224 bp, Zea mays
  Clone ID: MRT4577_94742C.1
ggatttgccgtcataatccacatcatcaccgcactgttcaacctttgacggggcctgcacaacccaagcccacgcctccaccccctacaaagacacatacccgactccagccagtctcatagcaacaatacagaagagctatcaccaccaacacaaatactgaaccttcatactaaactgtaaaccgacaaccacccatcaacactctaagacacctagatcgc

SEQ ID NO: 178902 - DNA, 335 bp, Zea mays
  Clone ID: MRT4577_94743C.1
tcgagcgtccgcacaggccaccttcgagctgtctttttctttttactttccttttttttgcaacagttacttcttcttttgcggcgtccacttacctaatccaaaaagccttattattgaatttcacctcatcagcaacatatagtgggtaccaccaatgttgtgtactggacccgaggccgtttgttctgtcaaagcaagtagggcaaagggcaacaatctgtctgtatttgtaacagggtctgcggcgtttgccgcaaactgctggtagaaaggcagcaactgttgctgtgtcaagaaggaagcacggtttgctgcatttagccggctaaatg

SEQ ID NO: 178903 - DNA, 272 bp, Zea mays
  Clone ID: MRT4577_94744C.1
aataattttttctctttttttttttttttcttttgggtttttttaatgtttttttccgggttttttttcaaaaacaaccccccacaatttttttggagaaatgacccgggaagggtttgttcaaacaacaccctccaacatttttgtaacaaaaaaccaaaaccccctgggggaaccctataagggaaccaccatccccttttaaattatgccgaggcccagccacaatcaattggggggttgcggaccccaaaccaccccagggaaccctc

SEQ ID NO: 178904 - DNA, 273 bp, Zea mays
  Clone ID: MRT4577_94745C.1
aggatgaggaggatgaggcggacaaggaggaagatgaggaggaagatgtccccggccaggccaaggacgagctgtagagaggcctgcctccagggctggactgaggcctgagcgctcctgccgcagagctggccgcgccaaataatgtctctgtgagactcgagaactttcatttttttccaggctggttcggatttggggtggattttggttttgttcccctcctccactctcccccaccccctcgccgcccttttttttttttttttttaa

SEQ ID NO: 178905 - DNA, 550 bp, Zea mays
  Clone ID: MRT4577_94746C.1
cccatcttccatggcgaaccagctcacggacgcacatatcgaggcgtgagggaggccctcggcctctatctataaggatggcgacggatgcgtcactaccaaggagggttcgaactgtgatgcgctcccttgggcagaaccccactgcagcaaaggtgcaggacatgatcaccgagggtgatgctgatgggaatgggaccattgacttcccatagatcctgaacctgatgcccacgaagatggaaggacaccgactccgaggaggaccttaatgaggtctttcgcgccttcgacgaggcaccagagtcggtttcatctccgctgctgagctccggcatgtcatgaccaacctcggtcctaagctgactgacgaggacgtcgacgagatgatccgtgaagtcgatgttgacggcgacgtcagatcactacgaggaggagtaaggcatgatgggcaagcgaggagcgatccccggtatctatgaatgaattgaagtgaaatatcaggcacaccagcctgtacctttgacatgtcccctttttgagtacacat

SEQ ID NO: 178906 - DNA, 408 bp, Zea mays
  Clone ID: MRT4577_94747C.1
gggggggaacaaacccttaagggggggcgcaacattgttcttttccaaaaggccctgaatggggccccctgaacagggaccaggcccttattgggagacctcaaatggtgtggccaaaccgggggaaagggaccaccacctccctggggggcccgcttcacccttctatggggttggcccgggaggtaaaccgttttacccttggagcccaatgttcccacaggcaacacgtccgccagaatttcgggggcttttgctaagctaatgcccccctttgccaaggtcatccggatcaacatggacaaaaacagctgggccaatgatcgaggggggcccaacaagaggaatttggctgtcagaaattttgacattaacaacacctttttttcccgttgttacattcccaaa

SEQ ID NO: 178907 - DNA, 556 bp, Zea mays
  unsure (1)..(556): unsure at all n locations
  Clone ID: MRT4577_94748C.1
attctgatgatgatgattatgaggccctcatagcacttgacgattgcaaccatcacagaggtgcttctgatgaccaaataancagcctgccactatcattgatcgagggtgaaaattgttcagatgaaccctgtaatatatgcttggattgcccttctgctggcgattcactccggcatttgccttgcttgcacaagtttcacaaagagtgcattgacaggtggcttgggatgaagatatggtgtccgatttgcaaattaaatgtattctcccagtaggccctagggggcgcatacttttggggtagcatcgaaggtagattatagctcactaataggaatgatgactgtggagagtttttctggtaccagagaagggcagaaggcacggaaatcctcctgttcccgtctgttatataccttatcgtaggctgatatgcccaacagtatgtcagttttaggcggtgtcataggacatgaggctggatccagtgccatttttcgatcatactttttatctattatactgttccagtgaaaaaaaaataatgtatgtg

SEQ ID NO: 178908 - DNA, 553 bp, Zea mays
  unsure (1)..(553): unsure at all n locations
  Clone ID: MRT4577_94749C.1
gggttggtttttttttttacactggaacagtgtaatagataaaaagttgatcgagaaaggcactggatccagcctcatgtcctatggcaccgcctaaaactgacatactgttgggcatatcagactacgataaggtatataacagaggggggcggggggatttttttgttttctgcccttctctgctaccagaaaaactctccacagtcatcattcctattagtgagctataatctaccttcgatgctaccccaaaagtatgagatgcccagtgcctactgggagaatacatttaatttgcaaatcggacaccatatcttcatcccaagccacctgtcaatgcactgcagaagagttgaatccagtgaacacatcaaactggaacgtaacagaaaagagttccgaatcattcaactgttgggtgggtacctntttgtgaaacttgtgcaagcaaggcaaatgccggagtgaatcgccagcagaagggcaatccaagcatatatttacagggtcatctgaacaattttacccttgacaaatgcaaggatttgag

SEQ ID NO: 178909 - DNA, 448 bp, Zea mays
  Clone ID: MRT4577_9474C.1
gatgtttgtggcttcccagaaataagaaagtacatttctaaaaaaaaaaaaaaaaaaaaaaaaaaaaaaaaaaaaaaaaaaaaaaaaaaaaaaaaaaaaaaaaaaaaaaaaaaggaaaaaaaaatttaaaaaaaaaaaaaaaaaaaaaaaaaggggggggccgttttaggggacccaagtttccttccccgggctggcaaggtattaatttttttttggggcccccaaaattaatttcacgggccgcgttttaacaccgtggggacgggaaaaccccgggggttccccaattaaatcgcttggaagaaaatccccttttgcccagtgggggtaaaagcaaaagggcccgacccattcgcctttccaaaaattggcccaccttaatgggaaatgggacccccccctgaacgggccctttaagcccggggggggggggggttccccccag

SEQ ID NO: 178910 - DNA, 247 bp, Zea mays
  unsure (1)..(247): unsure at all n locations
  Clone ID: MRT4577_94750C.1
gggtgccctcggagccggcccggctaaacttccccacacccctcacccgcccccttccccccatccttaattcccctctacctacgccggcgcccatgattgttgttncaataatactgtccctcctactgcctctntatccctcntcacacccctactgcncanccnncaccatcccccacaccacccccaacaccttcccccttctctcccttttatatttaacatatgaaatcatcacttatcc

SEQ ID NO: 178911 - DNA, 1560 bp, Zea mays
  Clone ID: MRT4577_94751C.1
acctcctccaccgcgtctgcaggttcgacacactcgccggcgtcgccatcaagtacggcgtcgaggtggcggacgtgaagcgcgccaacggcctcaacgccgacctgcagatgttcgcgcacaagactctccgggtcccgctccacgggagccaccagcccgcggccgcaccaccgtctcttccctcctattccccaaggaaccacgccgatcgcgtcgccagagaatggacaacacgccgccctcccaaaaatgccgcttccatggacccatttcttaaaccaccacggagcacagtttcgccgtccatgagccttctgcagggatactatggccttccaccgactccacaggagaacctcacctacgaaggcactgagatggcgacgtacgctcaaggtcatcataggaaggctagaagcttatcgagcagcgaacatggagatggtgctgacgatgctgagaagcccataaggcggcgccagaaagccgactctgagctgacgacaggtagggaggacaatggcggttgcctcttgccaagggctgggcaagggctggccctgaggccaaaatctgggagtcgaccagacgggaacggcagccagctagatctctcggccacgtgggtgccctcgtacggggatgggctgcacaccgtgaagaaatcatcgagcaccccggagttccaagactcagacagcatcagcatcgcctcggaatggctgaagagcaagtggaacctgaagccggacgcgttcaccctcacgcttcctcctctcccgctcttggacagcatacccaagcctctcctcgacaacattcccaactccatcgctgcttggcgaaacaaggcggccaaagattagcaagaggtaggtccatagcttcgtttcctatacttgttccttcttcttcttcttgggtaatttagttggagtgcgggaaacaaagggccggccggggcctggagaagttggtttgcactgtacctcccccccagtccccagccaaaaaaagaaggcacgaacggccagacatgctgctgaaatgggatgatggataccgtgacacattgcttacactgttacacatacatgctgtactgaatctgctgagccaaagcagaagcagatgatttcaagctgggagctaggacatgagcaccctttgtggggtattcttttctttttctttttgtttgtatgtatacttataggaatgaaggcaaacacacctaagcagcatgtgtgatattcccatgtgctaataaagaaaatggcttgtaaaaaaaaaaaaaaaaaaaaaaaaaaaaaaaaaaaaaaaaaaaaaaaaaaaaaaaaaaaaaaaaaaaaaaaaaaaaaaaaaatttaaaaaaaaaaaaaaaaggggggggcccccgggccccaattttttttccctttaagggggggtaaatgggcccttggggaaaaaaggggaaaaggtgtttcccggggaaaatttttttccccttaaaatttcacaaaaaaataagacccggaagaaaaaaagtaaaaacctgggggccctaaggggggg

SEQ ID NO: 178912 - DNA, 179 bp, Zea mays
  Clone ID: MRT4577_94752C.1
gggttgtgctacttttttcccaaccaaaaccaagggattggttgcaagaaaaattgcccttcttgcaaaaaaagggcagacttttatgaccataaacgtttttggggactgatgttcccacctttctggtcagtttccagggtttggagatatatctctccttccaaaaaaaattgtgg

SEQ ID NO: 178913 - DNA, 277 bp, Zea mays
  Clone ID: MRT4577_94753C.1
tagaaagcacaatagggtaccaacaatggcagccaaaatatttggcttccttatgctcctgggtctttctgcaggggctgttaccgaaaccattttccaacaatgctaacaggctctaatagcttccttttttccccaatacctttaaccagcggggttttaaggatgtgaaaacccaatgcttaaaccttacaggatccaacaggcaatcgcagaaggcatttaacattaataaccctggttcttccaacaacgcgaagccttattacagcagtta

SEQ ID NO: 178914 - DNA, 467 bp, Zea mays
  unsure (1)..(467): unsure at all n locations
  Clone ID: MRT4577_94754C.1
cccagcgtccgcggccgcgtggngaaaaaaaaaaaaaaaaaaaaaaaaaaaaaaaaaaaaaaaaaaaaaaaaaaaaaaaaaaaccaaaaaaaaaaaaaaaaaaaaaaaaaaaaaaaaaaaaaaaaaaaaggggccccgttcgcaatttaaaacgtaaaaatacacaaagggcaacgaggcggggccttttttaaagaaaaacaagtgaaagggggaaaatgttgccccaccccccccgcctttttttttcccgaaccgccgggggccccacccccccccgggcgcttttaacggaaaaggtccttgcggaggcccccaagaactccacttttgtggaggcttgaaaaaaggtcgccccaaaaataaagccccaaaaaaccccctttttttttatgaagccgcccccccccaccccggttaccatccccattaagttaaccgtaaattttttcctcccttacaattcc

SEQ ID NO: 178915 - DNA, 504 bp, Zea mays
  Clone ID: MRT4577_94755C.1
ggccggatactcattttcataccctgtcttcgctgcgattgctcgctcattgtttacgacatgcctctgatccgcatacagtgcatgtccatggacatccgacggccggtccctgctagtctcgaacgattgctgcgcgtcatgcgacgtctcctgctacctcctacgaacttttagtgtccgtcgcctacgcccgcgcctgcggtgaggtcgccgtccgagtagtattgcctcatcaacgtgctccacatcttagatagctactgctgggagaagggaccataaaactaaaaggctcaaaaggctcaatcattacatatgttaatgcgagcgcacggcaacaggaataattttttatgtccctgcgcgcctcgttgaccctcctgatcctccaaggataggatcactgctgtgatggaaagatcattaactattacattcgccaactacatcctgtgaatatgttaaccgagctcggccatgatgtatatgaggactgatctt

SEQ ID NO: 178916 - DNA, 223 bp, Zea mays
  Clone ID: MRT4577_94756C.1
tcgactcgtggtctgacgcgtgggcctccaccttaacccacgaacagagcgagtcgacgccggggcaccttttctccggcgaagggaaatggcaaccgttccacgggatctgatctggcaggttttgaggaagaacaactccttccttgtgaaccacttcgccaacggcaatgccaaggtgcagttcaccaatgagccaaacaacctctacaacttccactcc

SEQ ID NO: 178917 - DNA, 348 bp, Zea mays
  Clone ID: MRT4577_94757C.1
cccatatcatgcctggcaagtcgtgacgatggactttatttctgggctgcctgtgtcccacaagtacaattgtatcatggttgtggtggataagttttcgaagtatgcacatttcctagcactagctcatccgttcacagctttaaccgtagctaatctttatctgtcatacatatataagttgcatggactgccatcgtcgattgtgtctgatcggcatcccatatttactagcaagttatggcaagaacttgtcagattggcttggacaaagctttgcatgatttgtgcctatcatccacagtcttgatggtcagacagaaagggtttaattagtgtttggaagct

SEQ ID NO: 178918 - DNA, 666 bp, Zea mays
  Clone ID: MRT4577_94758C.1
ggcactgatgcattacatcatctcttggaagtataaaagtccgagactactacattactacgggtgaggacgagcggatggacagaggccgtggcgacgagaagatatgtggctgggactacacggtgccctcccccgtgatcgctgagcgacccggctgatctgtcttcctgagcgctgtaccgaggaaggacctcctagttcttacccacgttgctagcacctgaacatcgcgttagtaacaccggagatcgctcatcagcaacatgacagacgatttcttcctataaagccgacacgttgtggggcatatgcgattcggagcctaacatctgtggtatcggaggaatgatcttcgcccgcgtctactgatagccgtcaggaatctctggaagacacgtcaaacgcgtcggctgcatacaatatctacctgacgcgctagatcgaccgggagcacgctgagctctacatctggtggcataggctctgcgacgtctgatgcagccttctcctgaaggcagttccagtagctcctacttctacaggtaccacattttatactgataggtggtctcaggttacattcgtgcttgcggcctccccttattgcactagcattatcggccagccatacattctcgatgattattgcttctactgcatatg

SEQ ID NO: 178919 - DNA, 355 bp, Zea mays
  Clone ID: MRT4577_94759C.1
gaggccggccgggtcaccggtacaaatacacccatgctcataaagaaaccaccgtcatgcttgcttaattggccccttctacatcatgtaaattgtcgacgccgagtagcacctacagagcgtcttcaagaaattacagacacaagtgtgtgacgagaagcgcgctagctcgtcacattcttgctaggcggtcaggccccgcatgaacatggtgttcgcctgctccgactcccaggcgagcccgtccaagaacactgagcctgcagtgcgcggaggccttcatgagtgagaagatcagcggcatgaataccgtgctacgacaagaccgagtacgacgtcatgagcgtgcacatcg

SEQ ID NO: 178920 - DNA, 407 bp, Zea mays
  Clone ID: MRT4577_9475C.1
gttttcgaaaaaaaggcgcttttatcatgaatggtttaatttgtgagggagatcgcccctacacaataaaaacaagaagcaaatggcttctttccatctcagaagattagtaagcagcgttcttaactcgcgggtgcaaacaaatccccttttgaccttcaagtgcttctgttctcctcctgttacacctttcacttcccatgctagttacgaccctaactccatccacttgtccaaccaataaagcaaaagacgcttgttcaacatgctattatacaaaatcaagcagcgagggttcctcgaactcgatttggttcttcgaaaatgggtagaggacaatattcactccttggatgaatatcgcgtttgaactttcattcttcttctcgacttggagaatccaaatt

SEQ ID NO: 178921 - DNA, 604 bp, Zea mays
  Clone ID: MRT4577_94760C.1
atcacgaggtccaaaaaaataaccaccacaaaagtatcaacccaccacaaataaagtttaagcggacacaccgcaccgaccgacgacgataactcgcggcagcaactgggccagccagcaactgcagcacactcaagactgacaacaaaccgcttagtccacctcctcgatcttggggccagggccgccgctgccagcggggcgtcctcgtccatgccgccagcgccgcccatgtcttcacccgcgccctggtacatcttggcgatgatggggttgcagaggctctccagctccttcatcttgtcctcgaactcgtccgcctcggcgagctggttggcgtccagccagctgatggccgcgtcgatggcgtcctcgatcttcttcttgtcatcggccggcagcttggacgcgatcytctcgtccttgatcgtgttgcgcatgttgtaggagtagttctccagcgagttcttggcytccaccttcttcttgtgawcttgttcttctgcyccgtcgtcttgtcctcggcagacacgttcaggatgccgttggcgtcgatgtcaaagcacacggtgatctgtggcacacacggggtgcaggggggatg

SEQ ID NO: 178922 - DNA, 717 bp, Zea mays
  Clone ID: MRT4577_94761C.1
cagaaacaaataccgaaaagaagaataccgtatcacttaaggtttgccagtagccgcgataacattgagccgaccgactatcacgaggtccaaaaaaataaccaccacaaaagtaccaaccaaccacaaataaagtttaagcggacacaccgcaccaactgacgataactctcggcagcaactgggccagccagcaactgcagcacactcaagactgacaacaaaccgcttagtccacctcctcgatcttggggccagggccgccgctgccggcaggggcgtcctcgtccatgccgccagcgccgcccatgtcttcacccgcgccctggtacatcttggcgatgatggggttgttgtcgcgtgtccgggtcctctcaccctcgtagacctggatcaggacaccgggctggttgtccgagtaggtggagaatacctgctccttcttggtggggatgggtggtgttcctcgggatcagcactgtcataactcctccagcagtctccagacccagggacagaggggtgacgtccagcagaagcaggtcctgcaccttctcattgccctcaccgctcaggatggcagcctggacagcagcaccataggcgacagcctcatcgggggttgatgttcttgcacagctccttgccgttgaagaagtcctggagcagttgctgcaccctggggatcctagtggagccaccaacaagtacaacgtc

SEQ ID NO: 178923 - DNA, 278 bp, Zea mays
  Clone ID: MRT4577_94762C.1
ttctgtggcggcaacagcagagaccaccaacataagtatagcaatgctgcaagtctcatggacatgtattatggatgggggcctgggcacaaatggacgaggacgccctagcgcccgtttgatgaaggactgcctactattaagcggctaattcaagagtataaactggccacctgacatgacatcatcttaacatggacctgtgagacggggattcgacagctgttgatcatcgcctggctgatcatggcctgagcacgagcattatgctttgactg

SEQ ID NO: 178924 - DNA, 1474 bp, Zea mays
  Clone ID: MRT4577_94763C.1
aaaagcactaacaaataagccttcgttgacgaacactaacaaataaacaatagcacgatacaatttgcagccaaaactgagactgttacctcctccccctcttccccatgcctcaattatagcactaacaaaataagccttcgttgacgaaggctaacaaataaacaaaagcacgatacagttgcagctaaaactgagacgattccctccctcttcatcaaaactacgtcgaacacaaacatagttctctgaattctgacatgtccataaagattgcagcagcttctaattcctcctgttaaatctactgccgccgcctcccctgccagaaaaccctctgccgccacctcccctgccagaaaaccctctgccgccgccaccgccaccaccaccagaaaatctccggcctcctccatggccaaatcttcctcccccagagttgcctctcgactggtccttctcttgcaagggtggcagttgcttgacttcatcaactgtcacctgtgcggcactctccgaagcttgaatgtaatcttcaacatctgctgcaggaacatcaaatacaactcctgttccatcagcggtgagggtggcaccctttacatctgcaagtttatcttcaaggtataatggtccttcccttgttcgtgaaatagttatcaactagcataggcatgaaaatattttcctgatgtggcccctgaatccgttttcttgttatgcaattcaaataagcctgttaatgccttgtttggttatttctataccatatggattggatgagattggaaaaaattatgaaagattttgacttgtctgggatttaaacctacccaatctcacccaatccacatggaatgagagcaaaatgaataagccttaaagtgtctattattttctaaatgaaattcgactatgaaaaccttttggatatgtggcaccactcgaatcactacatcctgcagcttcggagagtgccgcacaggtgacaattgatgaagtcaagcaactgccccccttgcaagagaaggaccagtcgagaggcaactctgggggaggaagatttggccatggaggtggccggagattttctggtggtggtggcggcggcaaagggttttctggccggggaggtggcggcaaagggttttttggcaaaggaggcggcggcagtagatttaacaggaggaattagaagctgcttcaatctttatggacatttcagaattcagagaactatgtttgtgttcgacgtagttttgatgaagagggagggaatcgtctcagttttggctgcaactgtatcgtgcttttgtttatttgttagccttcgtcaacgaaggcttattttgttagtgatataattgaggcatggggaaaagggggaggtaacagtctcagttttggctgcaaattgtatcgtgctattgtttatttgttagtgttcgtcaacgaaggcttatttgttagtgct

SEQ ID NO: 178925 - DNA, 349 bp, Zea mays
  Clone ID: MRT4577_94764C.1
ggggtggggggaaaagaagaaataccgtattatttaaggtttgccagtagccgctataacatggaaccgaccgacttttaagagggccaaaaaaaataaccaccacaaaagtaccagcccaccacaaataaagtttaaggggacacaccggaccgaccgacgacgataactctcgggagcgactgggccagccagcaactgcgttacgctcaagactggcaacaaaccggttaggccacctcctctatcttggggccagggccgcctctaccagcgggggcgtccttgttcatgccgccagcgccgcccatgttttcacccgcgccctgggacatcttggcgatgatgg

SEQ ID NO: 178926 - DNA, 2496 bp, Zea mays
  Clone ID: MRT4577_94765C.1
aaaagcactaacaaataagccttcgttgacgaacactaacaaataaacaatagcacgatacaatttgcagccaaaactgagactgttacctccccctcttccccatgcctcaattatatcactaacaaaataagccttcgttgacgaaggctaacaaataaacaaaagcacgatacagttgcagccaaaactgagacgattccctccctcttcatcaaaactacgtcgaacacaaacatagttctctgaattctgaaatgtccataaagattgaagcagcttctaattcctcctgttaaatctactgccgccgcctcctctgccagaaaaccctctgccgccacctccccggccagaaaaccctctgccgccgccaccaccaccagaaaatctccggccacctccatggccaaatcttcctcccccagagttgcctcttgactgctgctgctgcttctcttgcaagggtggcaattgctggacttcatcaattgtcacctgtgctgcattctccgaagcttgaatgtaatcttcaacatctgctgcaggaacatcaaatacaacccccgttccatcagccgtgagggttgcaccctttacatctgcaagtttctcttctggcatgaaccttttcaatatagtaaaagcaaacccaggtgaccacatctgcctgccagtttgaagatgtagtgtagcgtaatcctccattgaagacaacaatgaccttttctttatgtccgtgtaaccaactgcctttgcaagagctttggcaagcaagtcagccgcagacagagtggaagagcttagcaactgctctgcttgctgcctgaagacaggaataacactgtctgacacactcgcaatggcatctgcagcttcactgccagcagattgtgctacatcagtaggttgtggtgcagagatatgctcgaacttaaccccagattccctttctagtctgctgacactgtacttatatctgggctcataaagcatgacagcaacaccagtattacctgctctccctgtccgacctgaccggtgtatgtaagcttcaacgtctcggggaggttcacactgaatgataagctgcacatcattaatatccagaccacgagccgccacatttgtagcaaccaaaacctggaacttcccgctacgaaatccagcaagaatgacttcacgctgagcttgcacaacatctccatgcaaggcacgggatccaggaatcaaaccagaaagctctgatgcagaatccttcgtctcagtgaagataatggttcggcctccatggctgtaacatcggataatatctggaataagttgtgcccttgctgccttgttacaaggaagagcaaggtgcttaacagatgcactggccttcagtttctcgttaccgacaagatcaactgttttcctgtcaactttcagaaacctcatagagagcttattcacccaatctggcagagtggcactgaacagaagtgtctgtactttggtagcatcttctaccttgccaagaatgagctcgacatcatcaacaaagcccatgttaagcatctcatcagcttcgtcaaggacacggaacttcaagcatttcaagttgagagttccttttacaataaaatccttgatacgaccaggagttccaacaacaatgtccacgcctcttctcaatgccatttcttgaggacgataaggtgaacccccatacacacaacatgcagaaagcccaaatgttgcaccataaaactcaaagtcggcatgcacctgattgggcagctctcttgttggtagcagaacgataacactgggggtcctgccatgttcagtccgcccagatgccttatttgccccgttgtccaaagattccaatatgggcaagtcaaaagccaaagtttttccctgaccggtgcgcgctcggccaaccaagtcgttgccgtcgagtacgaggtcgaaagtggtggcctgtatgggaaacagttccttgatccccttggacctgaggctctgcctcagtggctccgatatcctgaagttcgtcagcgcgttcgggtccgcggggtcctcgtcgctgccggccgtgatctcgccgtcgtcatctgaggctgaagacgagacctcgacattcttctccgtcttctccttcttcgcttttttcgcggcgggtgctgtctcctcggagctggtgctgcttttctcttcctcatcagaggacgcggccgatgggagcggaggggacggctccttcacctttcgcttcttctctttcttctctttcttcttgaccgaagcggcctccgcctctgcctccgcggcggcggcggcggcggccttgagctgctttcgcttggccttcttggaggcggaatcgtcgacggccatgggctccacgccagcggcaagggcgggagacatcacgggtaacaggcggtggcagctggtaggaacgttgagggctggcggctgcgaggggaaggcgcagccggaaaagag

SEQ ID NO: 178927 - DNA, 535 bp, Zea mays
  unsure (1)..(535): unsure at all n locations
  Clone ID: MRT4577_94766C.1
taggggcctttttttttttttttttttggttttttttttttttttttttttttttttttttttttttttttttttttttttttttaaaaccgaaccaaaataccgtattacttaaaacgcgggccacgaaaatattgttcaccaaaaaaaggttctaacggggataccccgggacgacgacgataaatcgagcagggactgggccagccagcccctggagcaaacacccgagactgacacaatccgcttagcccacccccccgattttggggccagggccaccgtttccagccggagggtcctcgtccatggcgccggggccacccatgggggcacccgcgccctggaacatcttggcgatgatggggttgcaaaggctctccagctccttcattttggcatcaaactcgcccgcctcggggaggtgggtggggtccagccagctgatggccgcgtcaatggggccctccatcttcttcttggcgncggcagccagtttggacgcgatcttctcgcccttgatcgggttgcccat

SEQ ID NO: 178928 - DNA, 803 bp, Zea mays
  Clone ID: MRT4577_94767C.1
ctccaggcaatagactagctagatgcgcatcaccaaagagtagctttcgtctagaacgaagaaacaccccccactacatggccgcgctcagttcttgtgttgcttctggaggcctggcacttcaggccacccttgtggtttctcctcctcgccgccgcgggactccagtcgtcatctccgtatcatctcatggtcgccgcccaagtcttatcggctccaccatgaatccttcaggcatggctccgatcaaaagaactacacgaattcgtgcggttcatccatgccctgcaaattcgttaggaggaagcctcaccatcatcccaatacctgacctgctttcatcatgataacgtagagaagacggcggaggcggcgatcgaggtgatcgactcggtggcggaggcgaccgagaaggtcgccgacgaggttgcgcaagcgttccccggcagtgaaactctcaagcaggcagcctccaagattaagacgatcgcggatgagatcgaggaagatgccgacaaagctgaggccctgattgagaaggttgacgagataaagaaagaggtggattcaatcgtcgatcctatactcgacaaggtcgccaaagacaagtcctagagaaagagcccaactggaggagacaaataaaacatccagtaaattagtttaagaagcattagttgagcagtaaccggaagacactacgtacgggggcaacatgacacgtcgggtgtcatcacctatttctctcatcgattcattgctttcagtttccgtcacgtgttttgttcagttttagtgacttc

SEQ ID NO: 178929 - DNA, 625 bp, Zea mays
  Clone ID: MRT4577_94768C.1
ccggccgggaaaaaaaaagctgtggaaaggtgtcaattcgtcgcgattcgaatccgtctccataccttgcttgactttagtggacagtatagctcctacagggacatgataacactgtaggatcgcgaaacgaccacgacgttcatttttgaagctatagtgatcaatcgatacccgacctcgactcctgtctcctccataatgtacttcatctctgcggccaaggccctcgtggccgccgctgtcttctcagccgtcactgctcataacatcgtcctgcccgcccacggtcgagaatgcttccacgagtccctccacaaggatgacaccatgaccgttaccttccaggttggcgatcgtgaattcggtagcgcaggcaacctcgatatcgacttttggatcaccaaccccactggacaatacgagacaaacgagaagagtatctccaacggtgactactcattcacagccaagcatgatggaaaatacctttactgcttcggaaacgaggcttggggtgccaacaccaaggaggtctccttcaacgtccacggaattgtctacgtgagcgagcatgaaatgccttctgaccccctcgaccgtgaagtccgcaaactgtctgatc

SEQ ID NO: 178930 - DNA, 630 bp, Zea mays
  Clone ID: MRT4577_94769C.1
atcttcttctcctgcaccgcacggatgcggcctcctccgctctcccacggccagatccgccagtgccctgccgccggcaaccagaaccagcaggaccgtcgcgtccatctcctctgtttccttcccatccttctcctttcctctgtctttctcaccctcacacatcttctctctctcttcaggagctccccctgccgcctggagctcaagccgccagccgtccaaggcctccccaggaacggatacgcgaccacgtgcctcatcctcgcacatgccaggccgcgccaccggagccccgcccgcagaggcagtgctccgccgcccgctgctgttcttcgcgtcgccccgcgctcccgccgctatgaaccggctccccaccgcaagtcctcggcatcgccatcccgcgctgcctgcagtcgcgccaagcctgactcgcaaccgtggagcccgagctcgtcaagcgcttcaaatccgccaccgccccatcttcttcaggcgctcgagcacgagcatgagctcgccagcgccccacctctctcttccgctccgtccgccgcccgcggcgccgggacccatcgctgccgcgccgcctccgtcgatgcagtcaacggtcccataccattgaccccc

SEQ ID NO: 178931 - DNA, 1842 bp, Zea mays
  Clone ID: MRT4577_9476C.1
gcagttaagatgtctcgaacagcagattttgaaagtgcccactgtcctatacgctaacacgggtgcccagccgccgcacagtctttcgaactgaggaaccctaggcccagcactcggcgacggcggcgcgccaccggcgacgggatcagcggcatcactcccctccttccccggcgcggcggcgccctgcacctaggccctagcactgcagcactcgacaacaggatcagcggtcgcgcccccctcctccttccccggcgcggcggcgccctgtagctgcagatctgccactgtccgcctgccggtcatggagcacctccggtggcgccccacagtgaacgagcgcgacttcattgagtgtgcgctccagtctgacctccgtgttgacggccgccactcctttgacttccgcaagctcaagatcaccttcggcagggaggatggctcgtcagaggtgcagctcggggagacacacgtgatgggctacgtgaccgtgcagctggtgcagccataccgtgacaggccgaatgaggggacgctggccatattcaccgagttctcacccatggccgacccctcctttgagcctgggcgtcctggggaattagcaattgagcttggccgagttattgaccgtggcctcagggagagtcgagctgttgacatggagtccttgtgtgttgttgctgggaagcatgtctggtctgtgcgtgtggaccttcacatcttggataacggagggaatctcattgatgcagctaatatcgctgcattggcagctttatctactttccggaggcctgaatgcacggttggtggggacgatggtcagcaagttacagtgcatgatcctgaggttagggatccacttcctcttacgatacaccatatgcccatagctgtaacatttgcatattttggtgaaggtaacatcgtggttcttgatcccacatacaaggaagaagcagtaatgggagggaggatgactgctatagttaactcaaatggggatgtttgtgccattcagaaagctggtggagagggtgtcatgtcaagtgttatcatgcagtgtttaagaattgcttcggtaaaggctgctgatataacaagcaaaataaagaaagcagtagactcatacaccaccgagaaagccctaaagaaagtaaaacgtttgccaacctcggttcctcagaaaattaatgtcactaatgtaactatggacggcaaaggtgatggtgaattggaaaagcaatctgtgcagatgcatagtgatgttcagcagataagcaaagatccaccaactatggtcaaggccagcagccgtgaggatgcccaaccaatgactgaatcatctaatgctgaggtgaacacatcaagtgctgtggctgctggagagtctgagtcccatgaaattggatcgccaaagagtctaaaagatgctatcaaaccaaaacataaaagaaagaagaagaaaagtgacaggagttagtttagttgcaagcctgtaattttgtatgccccagataaatcaacgacagtctacaacacctcaaactcctgattgattaggtttcatccggggtgccatacatgggtttttttttgtgttttcaatcgtgactggtgttagtagtgacaggcaaattttgtacaagctgtagaattgtattttaggaatggttcagttaagctttcagtcaactttgcagctagttctgtgatgcgtgatgtcccagcactcttacatttcattgtactgctcaccgttaatcttccattgtccaaacggtcgtaaggattgccatatttgttccaacctaaaaaaaaaaaaaaaaagcggcc

SEQ ID NO: 178932 - DNA, 626 bp, Zea mays
  unsure (1)..(626): unsure at all n locations
  Clone ID: MRT4577_94770C.1
gttttaattctttttttttttttaaaccgaaccattaataccgtattacttaaaacgcgggcgcggggaggattgttcaccaacaaaaggggctaacgcgggtacaccgcgacgacgacgataaatcgagcggcgactgggccagccagccactgcggcagacacacgagacctgacacaaaccgcttagtccacctcctcgatcttggggccggggggaccgcttccagccggagcgtgctcgtccatgccgccggagcctcccatgtgggcacccgcgccctgggacatcttggggatgatggggttgcaaaggctctccagctccttcatcttgtcatcgaactcgtccgcctcggcgagctgggtggggtccagccagctgatggccgcgtcnatggcgtcctcaatcttcttcttgtgggcggcagccagcttcgacgcgatcttctcgtccttgatcgtgttgcgcatgttgtaggcgtanttctccagcgaggtcttggactccaccttcttcttgtgctcctcgtcctccgacttggacttctccgcgtgctgcgccatcttctcgatctcctccttggacagacggcccttgtcgttggggattgtgatcttgttct

SEQ ID NO: 178933 - DNA, 1445 bp, Zea mays
  Clone ID: MRT4577_94771C.1
gtagagctggccagctgggagactggtagtacagtggttgcccgtgtagcatgcatgcatgcctgtgtgggtggaccacgacagggattggactcgccgaacaccattttcctgggtacccgagtttcttgacagaacaaccgggatcaagattctctttttgtggcctagcctagaaccgtacccacaatatattttttttataaaaaacgggcagatttcgggtatagtcgtgtttctttttttccatgcttggtcttcggtctccgggtttaattttttcggccggtcccggccggggccagtcgcctctctctatatcatctccgtgctcctcgaggccggcagttactccctccttttatatactgctagctggttccgagtgattacccacagcaacagaagcagttctccaggcaatagactagctagatgcgcatcaccaaagagtagctttcgtctagaacgaagaaacaccccccactagctacatggccgcgctcagttcttgtgttgcttctggaggcctggcacttcaggccacccttgtggtttctcttcctcaccgccgcgggactccagtcgtcatctccgtatcatctcatggtcgccgcccaagtcttatcggctcaaccatgaatccttcaggcatggctccgatcaaaagaactacacgaattcgtgcggttgatccaggccctgcaaattcgttaggaggaagcctcaccatcatcccaatacatgacctgctttcatcatggctctggatgttcggagcggccatagctgcagcagtgcctctttacagaaggttcagagcattagaagataacgtagagaagacggcggaggcggcgatcgaggtgatcgactcggtggcggaggcgaccgagaaggtcgccgacgaggttgcgcaagcgttccccggcagtgaaactctcaagcaggcagcctccaagattaagacgatcgcggatgagatcgaggaagatgccgacaaagctgaggccctgattgagaaggttgacgagataaagaaagaggtggattcaatcgtcgatcctatactcgacaaggtcgccaaagacaagtcctagagaaagagcccaactggaggagacaaataaaacatccagtaaattagtttaagaagcattagttgagcagtaaccggaagacactacgtacgggggcaacatgacacgtcgggtgtcatcacctatttctctcatcgattcattgctttcagtttcagtcacgtgtttgttcagttttagtgatttactccctacgaaattctatgagagaacaaatttccttggatgttttattgtcaagtgcttgtgcagttgtgcttgtacatacagtcgctgacatcttaacaagaacctcggtagggcaaatttgctcgatcgccacttacgaaaaaaaaaaaaaaaaaa

SEQ ID NO: 178934 - DNA, 558 bp, Zea mays
  Clone ID: MRT4577_94772C.1
gaaccagaataccggattacttaaaacgcgggccacgataatattgttcaccaacaaaagggtctaacggggataccccgcgacgacgacgataaatcgagcagcgactgggccagccagccactggagcagacacacgagactgacacaatccgcttagtccacctcctcgatcttggggccagggccaccgcttccagccggagggtcctcgtccatggcgccggggccacccatggcgggacccgcgccctgggacatcttggcgatgatggggttgcaaagggtctccagctccttcatcttggcatcgaactcgtccgcctcggggagctggttggcgtccagccagctgatggccgcgtcgatggggtcctccatcttcttcttggcggcgggagccagcttggacgcgatcttctcctccttgatcgtgttgcgcatgctgtaggcgtaattctccagcgaggtcttggactccaccttcttcttggggtcctcggcctccgaattggacttctccgcggcctggaccatcttctcgatctcctccttgga

SEQ ID NO: 178935 - DNA, 138 bp, Zea mays
  Clone ID: MRT4577_94773C.1
ccgcagtccgcactccctccccaatcgctccacccgagaccgcgctccgcagattcgttttcgccgctaggtgtccggcgagatgtaagtggtaaaggcggcgcagttttcggggcggacgttggaactggtaagtgg

SEQ ID NO: 178936 - DNA, 403 bp, Zea mays
  Clone ID: MRT4577_94774C.1
tttatttttttttttttgttttttgatcttttactgaaaacgcgggccacgataatattgttaaccaacaaaaggttgtaacgcggatacaccgggacgacgacgataaatcgagcagcgactgggccagccagccactgcagcagacacacgagactgacacaaaccgtttagtccacctccttgatcttggggccagggccaccgcttccagccggagcgtactagtacatgccgccggagcctcccatgtcggtacccgcgccctggtacattttggcgatgatggggttgcaaaggctctccagctccttcattttggcatcgaactcagccgcctcggcaagctggttggagtccagccagctgatggaccggtggatggcggccttaaccttttttt

SEQ ID NO: 178937 - DNA, 708 bp, Zea mays
  Clone ID: MRT4577_94775C.1
ctctccctctctctccttcgcttccctctcctccgctcgccgcttctcccggggacagccccagccctagcggagcggagccgtagcccagcccggcgcgcgtccgttgcgccgcggtctgtccttgtcacctgccagatccagacccggtgccagaccgccgggatcctccgcgacggtggtgctgtgggggaagtgcctgaacgccgccactccctgatcggggctacctactcgcgtgattcgaggtagagcgagctcatgaatttgcatcacatggatgggttctcagcattttgagtttgggtgatcaaatcagcatcatatagatttcttttgctcggccgacatgggagctaattgctgtatagctgcaaagcagaggcctcagccatgtatcattccagttgaagtgtcagcttacaggaatgtaagacactccccatcatggagcttccgatgggataacagaacacatatagaagacataatggaaatccccacatttttgtccaaccatagtagtggaagcattcggcctgaaacgaagagtggttccattgcaccaactgaaggcttttctaatggaggtagcccttctgaattgttccacaaggtcaagtggcagaaatcagaaaagaagatggaaacatctaaagttgcaccaatctgatcctagagatagacccactgccagccactcctccc

SEQ ID NO: 178938 - DNA, 568 bp, Zea mays
  Clone ID: MRT4577_94776C.1
accgaaccagaataataccgtagtattccttaacgcttgccacgataacattgttcaccaaccaaccgaccatcacgaggtccaaaaattaattaaccaccaccacaaaaagttccaaccaaccacagataaacattactaaaataacgcggacacgccacgacgacgacgataactcgcaagctgccacccactagcgcaacctgcagacctgacaacgaaccgcttagtcgacctcctcgatcttggggccagggccgccgctgcccgcgggtgcgtcctcgtccatgccgccggcgccgcccatgtcggcgcccgcgccctggtacatcttggcgatgatggggttgcacagcgactcgagctccttcatcttgtcctcgaactcgtccgcctcggcgagctggttggcgtccagccacgagatggccgcgtcgatggcgtcctcgatcttcttcttgtcgtcgccggccagcttggacgcgatcttctcgtccttgatcgtgttgcgcatgttgtaggcgtagttctccagcgagttcttggcctccaccttcttcttgagctc

SEQ ID NO: 178939 - DNA, 460 bp, Zea mays
  Clone ID: MRT4577_94777C.1
aaccaccacaaaagtaccaaccaaccacaaataaagtttaagcggacacaccgcaccaactgacgataactctcggcagcaactgggccagccagcaactgcagcacactcaagactgacaacaaaccgcttagtccacctcctcgatcttggggccagggccgccgctgccggcaggggcgttctcgtccatgccgccagcgccgcccatgttttcacccgcgccctggtacattttggcaaagatggggttgcaaaagctttccaacttcttcattttggcctcaaacctcgcccccttggggaactgggtgggggccaacccacttaagggccggtcaaagggggccctcaatcttttttttgtaatcggccggaagttgggacccaatcttttcgtccttaatcgggtggcccatgttgtaggagtatttctccagcgagtttttggcctccacct

SEQ ID NO: 178940 - DNA, 394 bp, Zea mays
  Clone ID: MRT4577_94778C.1
atttccaaatgaaagagttactctcacgtgctcccagagagcgaggatcgcggccggcgcagcgttagattctcctagatatccggaagcatcagtatcgaaggctgtcggcgacgacatgcagccccttgtatagcgacaatggaactggcatggtcaaggatgatttggctggatgaccatgcatcaaggggtgatttcccaagcattggcagacacccccgtcacactggcgtgatggttgacatggagcacaaggatgcgtatgttgccgacgatgaccagtccaagaggggtatcctgattatgtatgaccccatcgaagatggtatagatagcaactgtcatgacagggagaagatctggcaccacggacttctatagtgaactccgt

SEQ ID NO: 178941 - DNA, 981 bp, Zea mays
  Clone ID: MRT4577_94779C.1
actccatagggcgattgggatcctcgaggccggccggggctttcggcattcgcttccagaagcgtttccgacgcgctcatccttccattccattccattccacacgttcctctcctctgccgccccgcgccgcccgtcgccgaccttccatccaggttccagcttccaagactcttcttcccggtccctccagccgcaggaaaagccaaatccacccacccgctttggcctgccctcaccccgaccgatcaaacgaggcggctagttcgtaacgacccgtcgagctagtcttccttccttccttccttccatcgccggccctttttccgtgcacaaaggcgtgtgtgtgcgtatatatatacacatacacacactgctccatgccaccgttgtagcaagttctcccatctagcaacaccataatcgcaggagaatcgctgctccaccagactcggtttcctcccttgcttcagcgtcaagagcatggccgcagctggcaagtcgtcgtcggccatggaggagacggttgcggcgacggccgccgcgcgggggcggcgcgggattgaccggcaggccgtcgacaggggcatcgcctacctgctcatggtggccgccctcgtcgccacctacgcgcttcactagatttcggtctgctccggcgcgggcagacctcacgggaaaggaaggcttttgtgcgcttctgcttcccgccggcctcagcctcttcagagttcccctgcaccaaacttcattcgttcgtcttccaaccttgtattgtatggagaattggagatggagatgcatgtgtctgtgtgctacatctccatacactgcacaagttgttttcttatactctttccgtgtgattaatctgtacagaatagtcatttgttgccaaaacgatcagtgttaccatgtgttcggcaaaaaaaaaaaaaaaaaaagcggaaaaaagaaaaaaaaaaaaaaaaaaggccccta

SEQ ID NO: 178942 - DNA, 1052 bp, Zea mays
  unsure (1)..(1052): unsure at all n locations
  Clone ID: MRT4577_9477C.1
gtaccctccgggtttgcgctagctgtaacatttgcatattttggtgaaggtaacatcgtggttcttgatcccacatacaaggaagaagcagtaatgggagggaggatgactgctatagttaactcaaatggggatgtttgtgccattcagaaagctggtggagagggtgtcatgtcaagtgttatcatgcagtgtttaagaattgcttcggtaaaggctgctgatataacaagcaaaataaagaaagcagtagactcatacaccaccgagaaagccctaaagaaagtaaaacgtttgccaacctcggttcctcagaaaattaatgtcactaatgtaactatggacggcaaaggtgatggtgaattggaaaagcaatctatgcagatgcatagtgatgttcagcagataagcaaaggtgatgagaaccagcaaagtataaaaaggaattcacccttgactagggaccgaattgcaaaacacaaacaaacatccacattcattggtggcccatcaaattgggacccatattctaaaggagtttcattaagatccctcaaaatttctgatttgccggatccaccaactatggtcaaggccagcagccgtgaggatgcccaaccaatgactgaatcatctaatgctgaggtgaacacatcaagtgctgtggctgctggagagtctgagtcccatgaaattggatcgccaaagagtctaaaagatgctatcaaaccaaaacataaaagaaagaagaagaaaagtgacaggagttagtttagttgcaagcctgtaattttgtatgccccagataaatcaaggacagtctacaacacctcaaactcctgattgatgaggtttcatccggggtgccatacatgggtttttttnnnngtgttttcaatcgtgactggtgctagtagtgacaggcaaattttgtacaagctgtagaattgtattttaggaatggttcagttaagctttcagtcaactttgcagctagttctgtgatgcgtgatgtcccagcactcctacatttcattgtactgctcacagtt

SEQ ID NO: 178943 - DNA, 376 bp, Zea mays
  Clone ID: MRT4577_94780C.1
catgtttcagccaagcccagagccctaagattacaaacaactatggccggaacctcctcagctctccctctgcagagttccctaccctaagagaatgttaccacctgaacagtcctcggtgaatctgagaggagaggatggggtaaggcagaagcaccagctgtactactagaagggagcttttggtggtagatcccctggtgtctccaacctgactaggtggacagagctcaaagaggccctcttaccgctagcgaggtgataggacatctggcttgccacaaaggtctgttcgaccagacatttcctagctaagggatgtccaaacatcagaatgtgaggccaaccttctatcagagttaaacttttgacaagg

SEQ ID NO: 178944 - DNA, 296 bp, Zea mays
  Clone ID: MRT4577_94781C.1
acatcacttaggcgtcttcacagcgccggctctcccccgctccgtctccctcccccctcctcccccgctccgctacctccgccgccagatcccgtcgagaccacccgcgcccccgcgtcgaagattgagggagtgtatctagagccacatagagcaggacggtatccaggacggaaaggagagttgagaactttactgcatcaagcacgagatgcagcctgatggccagacgaacggcaacgagaccatcaagaggtggtgatgaacgtcgttaacaccttcttcagcgagagagg

SEQ ID NO: 178945 - DNA, 552 bp, Zea mays
  unsure (1)..(552): unsure at all n locations
  Clone ID: MRT4577_94782C.1
ccggccgggctttttccccgaaaccaaaacagaaaaagtaaagtcctgctggcagccaaaccacccgtggtcccgtggaagagaagagagcatcgccgccggacccggggacggcgcgccgagaaggaacaaaagaagacggcggcggggcggagatggggagccctctgggcgggtggccgtcatacaacccgcacaacttcagccagctggtccctgccgacccctccgcgcagccctcggtcggtcagccgtcagcaacttgccttcctggcgatctgacctctagtatcatgatgtactgctaggctccgtacttcctgctaagcttacacaaccatgaatatgtctaattgaccgtgctcggctgacctgtttcttttctctgctgtctggtgtctgctaagcttacacaaccatgaatatattttgggacagatggagtagatatgatcgataactcagcagttgctgtcttagccatgtactccaatacaataaatacacaacgtcccttgccgagcaaaaaaaaaaaaaaaaaaggggncggcc

SEQ ID NO: 178946 - DNA, 215 bp, Zea mays
  Clone ID: MRT4577_94783C.1
gcccatcaaccccaatccccaatcccgtaggatgctttccccgtccttgagctgtgcccaagaaccctccccttccaaattcttaccttttcttccttaaccgttcccttcccattgaaagacaaagaccccgtcctctgctacgggagcaaagcctcccctccgaaccatgccgtgtcttctgccaaccggccccggaactttgcgggttcccc

SEQ ID NO: 178947 - DNA, 585 bp, Zea mays
  unsure (1)..(585): unsure at all n locations
  Clone ID: MRT4577_94784C.1
ggccgctttttttttttttttttctttttttttttttttttttttttttagaaacaataaaaaccaaagaagaaatggccaccagagggggcccagagaaacaaaaggatccctgctcggctcttatccttctggactaaagaaaagggtattggcctaaatattgaacgtacctgttgcgggcatatatgcatgcttgagggtgccggcgcaagctaaaccatgtcacgccaaccactctttgtcttgctcaaaagaactccctgcagaagtagcagcaacatcagtgggactggcaccccaatctagcatgttgaataatgggggggggcccatgcccaaactctcgctggacattcttcccttctttccaggatcaccccctgggaagatgaggctcatgggatcccactccagctcggcgagggcagcgaagaaatcatcggcgtggtggccgccgctggcctccggtatctttggcctgtagtagctctggctgaacatctgctgcatgagatcacccgcgggccagcaggacagaagcggcggggnctgttccttttttcactttcgacccaaccatcg

SEQ ID NO: 178948 - DNA, 174 bp, Zea mays
  Clone ID: MRT4577_94785C.1
ttttcaacacaagatagcgcgaggaattttcgtccccagcctacctcgccatcgatcgtctcgctgacatgtgtcgggaccaaggaactggccaagtactaggtacagaaatggcttttcatgtctcagcccggtatctgctccgcctggtgccggcgaaagtgaaaaattaga

SEQ ID NO: 178949 - DNA, 567 bp, Zea mays
  Clone ID: MRT4577_94786C.1
cacgcctgcatgtaccgggcccgctattacagggtcgacctcagcgttcgtacatctgttatgtttgggtggctctacgcatatcttctaaaatgctagtagaggatcaacggcaccaggcaacgtcaaggttgacaaagctatctgggaccacttgtgtaattgccaactgtagactgcattattatagctatatgttgctccagaataaatgcgcatcatagtgcggcggtcatggcattgggatctgatcacacctttgcaggttgaagacttaccgtctcctccagggaaagttactgacctttcttgcgacaagcaccactgacagcccccgaaatgccccatgacggggacactaaggtgaaaccttccagttttctctacgaaaatctaccagtgccggattgatttagtcagcaccattggacacacaggttagcctcatcccctgaacccatcaaagaatcatggtgccaacgactcgatggttctacttcaagaggctgatattctccacgactgttgttagcatccctggaaaaaacatctacattagcagtgaat

SEQ ID NO: 178950 - DNA, 414 bp, Zea mays
  Clone ID: MRT4577_94787C.1
gacacaggactacacgactgaacctcctccactgctctttcattttagctcttggccgcaaaagtttgctacctgtttgtattctaagtcctcggaggagtgtgaagtgagctccctatggaacatctacatctgatgacagtcaacgtgcacgctgatgatcgacagctgctgtctggtatcatcctgacctgctactgcatcaaggagatctgccttatggagaccatcttacactgccgcgatgcctagagtacaataagcttccagaggttggcggacaagagcaagctggatgaccactcggagactgttcatccacatgaggcctctgacaacggccaacactactgctgacaatcattgacagtggcattggtatgaccatagtcagaccttgtgaacaaccttggt

SEQ ID NO: 178951 - DNA, 599 bp, Zea mays
  Clone ID: MRT4577_94788C.1
aaaaacaaaaccgccaaacttaaaaacccagaagcaaggggggggaaaaaagccttacaacggaggggggaacccccccaccgacagatagataaaaaccgacaaaaacaaaacccgaggggggcccctcggggcaaaccacaggaaagcgggggcacacaaccccgacgaccccgccccagaaaagggttaaaaactcgcccccctgggggccgcccccaccctgggaaaactcagcaccgaccccctgggagtccttttggggcgcagccagatcctcacgagcctgggaaaactcgccctcctccataccctccccgaggaaccagggaaaaaaggggcgctgggggtacatgaggccaaactgggggccagggggggaaaaaccccccccaacccgggggggggggggaataatgcccccggcccgctgcaccttggccaggcccccggcggggaccaccctggggggggggttgttgttccccggcttgaagccaggcgggcccccccccccgacggggggggggccctgggtctgggggggggcccacgggcgttcccctcctgggggcccgctccccccgggccgggggggg

SEQ ID NO: 178952 - DNA, 283 bp, Zea mays
  Clone ID: MRT4577_94789C.1
gtctttgaccgaggggtagtttgcactactgttgacttgtaatgttttttatcttgatcaatggcttgctgcatggtttctttctttcaaaaaaaaaaaaaaaattaaaaaaaaaaaaaaggggcgccccccaattagtgaccccttcgccccgggattaattccgggacgggaacctgaaggggtaccagtttccccaaaagggagccgtataaaactttggggaaatcagggcaaaagcttttcccgggggaaaatttttacccgccaaaattcccacaaa

SEQ ID NO: 178953 - DNA, 766 bp, Zea mays
  Clone ID: MRT4577_9478C.1
taaaaattgcttcggtaaaggctgtttatatccaacgccaattaaagaaagccgtagactcatcccccccccgagaaagccctaaagaaagtaaaacgtttgccaacctcggttcctcagaaaattaatgtccctaatgtaactatggacggcaaaggtgatggtgaattggaaaagcaatctgtgcagatgcatagtgatgttccgcagataagcaaaggtgatgagaacccaaagtataaaaaggaattcacccttgacggaccgaattgcaaaacacaaacaaacatccacattcattggtggcccatcaaattgggacccatattctaaaggagtttcattaagatccctcaaaatttctgatttgccggatccaccaacaatggtcaaggccagcagccgtgaggatgcccaaccaatgactgaatcatctaatgctgaggtgaacacatcaagtgctgtggctgctggagagtctgaggcccatgaaattggatcgccaaagagtctaaaagatgctatcaaaccaaaacataaaagaaagaagaaaagtgacaggagttagtttagttgcaagcctgtaattttgtatgccccaggtgagtgctttttttgtgctgttctgtattttgtttgggcgttcttattggtacaagttttttactactgtttggtagtgttgaatgttaatttgattctcgtgaatgattgcacatgctacaactgtatgttacgactattagaatgatgattttactcccct

SEQ ID NO: 178954 - DNA, 357 bp, Zea mays
  Clone ID: MRT4577_94790C.1
atcatcccaggccgccctgttttataatttaccagacttccaataaatctactatccccacccacactcacccataaccccccacccggcaagagtccaccaccccacacacacacacgagggcaacccacccccaccaactggaggggggccacccccccgcacgacaaaaacccccgatccaaaaaaaagaaaacactcgtcccccccacaagcaacaacattccccaccccacctatacaagcccccctcccccttcactgggagggcgggcccccctaaattctcaaaaagggacaccagaaggccccctccaaatccaaagcccattcttgtttagggccccccccccccgt

SEQ ID NO: 178955 - DNA, 1889 bp, Zea mays
  Clone ID: MRT4577_94791C.1
cttaggagctggaatggtaaactcttaattttcaaccggctagttttcttgagcctacagatgcatgctacaagacaaatttttcatcagatttgcaccataatacttgtaatattttagatagcttgaagagatcataccttttgtttttattgtctttctacattcagacatctaggagctttacgaaggaagagatctctaaacataacacaaggaaggactgttggatcgtcatcaaggacaaggtctatgatgtcactccttatgtagaggagcatccaggcggagatgccattctaaataatgctggtggtgattccacagagggcttttttggtgagggatcatgggatttttgatcggtctgaaggcatagggtagcttgtattgaattcgtggaattttccggaaatcaagttttgagaatagttatccaatttaagtgcaaccttcaagattgtcaattgttcccctcggggctttgcgtttttactgctgtttgtctttatctagactcaacgcttgtaagcccttcggttattcaggaatcaaggatttcaaaaaaaaaaaaaaaaaaaaaaaaaaaaaaaaggctgtaacttatattgcttcctatacctcataacatgctctgtcattgcctgattagttcagcacttcagtgcctttcttggaattgtctcttcagaaattagaaaatcatgctttttgatcattaaaaatttacatagtatgccttttcatattgagattattcatctccgatattttaaacaatattcgatgaagacttagcatcattttagatattctgtaaaaaagcattcgaaaggaaatgaaaaaaaaagactgacagtattgctataatgataggcaaaaatggtcagtttttttagttccggtgctgcctatccaggtattgctactgctaatactttctacagaaatactatacacaaccaataatttcatagaagttgctagatgctattgtaatgcttgtcttattattgttggttttgtttgttgtagggagttcatgttaaattacactagactgataaattagcttaaacacgtttccattttgagctgaagttccagtgtgtccaaaactacaaattcaagagttccttatttagctcactttgttatcgacacacatagtaccactcgttgcaagatagctatgtcatgcaatcatggtattgatggagcatgtctttcttactctgccttctcctggactggaaatgtgtcacaatacacctttgctactgccactttcatgcttcttgcatgaacggactcaatctctggttagtttctgttttccttgctcagctccatgacattcttttatatggacccacaggccacagcacggcactagggtcttcgatatcatcgaggatttctgcatcggtcagttgaaggcatagggtagcttgtattgaattcgtggaattttccggaaatcaagttttgagaagctacatgttatccaacattttaagcattgcaaccttcaagcatttgagatgccagtgtaattgttccacaattgtcatcggggctgctaggagctgtgatgtagcacttcgtttttattctgctgttgtgtgactgtgtctttacatttctgttgttggacaagactccaaaacgcttgtaattgttctggctaagggcccgttcggttattcaggaatctactccagaaaggatttcagctggaataattgtataatttgtataacaattagtaacctggaatagttcctagtcttgttccagcctaaccgaacggggcttaaatcagaatctgtttcacacgatcattttctcgggtgatgttacattgaagatgtcccgagtttgatttt

SEQ ID NO: 178956 - DNA, 1078 bp, Zea mays
  unsure (1)..(1078): unsure at all n locations
  Clone ID: MRT4577_94792C.1
attaggaaaggccttattcaatggcttgccaaagtatgctttaatattttttaaaagagttttactctgcttttaagaaagcaaatattcagtatggtttaatttctgaatcatctgaatgttttttttgttattgttcactattcattccnattcacatcacttgttatactgttcatgactacagatttgcataatttactagttttcatggaatgccttttatatatagcaacatgacatgcaactcagtttatgtgttcttacttgagttattgatggagataagtaatacataccatttcactatagtgttataaaacctcttgtcggaattcagtgccagttacttactctagtttatggtaatcccaagtaagccttctgagccgacaccgccgtttacttccatggacagcccttttacagcggctaggtaccacagcttggtcattgagaaagaaaccttcccacatgatgctttggaggctaccgcatggactgaagatggactcatcatggctgctcgccacaagaagtacaaacacatccagggtgtccagttccacccggagagcatcatcacccctgatggcaagaaaatcatcctcaacttcgtcagattcattgaggagctggagaagcagcgttcctaatctacgggaggtagatgcgacgggtggtttcatagatcaggcggaagcagagacataagccactgtgaagttccggcactggcagtggaagtttagctaggaatcaacgtttccctctcataattcgttgttctcgtggtaacataatctgtgtggaccgaatgtcgaataaagtccaggcgtccagctgatgaaataagcaccggtgttggtgcgctctaggtggatatatatccggtaattttcggcaaggggaggccttggcacatttttgtctgagttccggcggtagcaagaccggccgtaatagcattaggcgtttctatgttggtgccgcaggaatgcatatttgctgttgctggtcaaagtactgggcttcataaaattttgggctgttcggttgcgtctacagcagtttaact

SEQ ID NO: 178957 - DNA, 1927 bp, Zea mays
  Clone ID: MRT4577_94793C.1
attcccgggtattatgtgcttgaagagatttgattcccaaagagtccaagagcggttctttgtttggaggttttccatccctggaggaacgagataagtcttatgacataaaagactcgatgactgtacattgtggatttgtaagagggaaggtacctggtcttaatactgggtttgacatagatgaagctgatcattctgagatgcagctgtgccagagtacagttgttgcctctgctatttttggtaattatgacgtaatgcaacaaccagaaaatatcagcaaattttcaaaagatacagtttgcttctttatgtttctggatgaagaaacagaagctgcaataaagaacactactattggtcatactaaaaagattgggctgtggcgggtagttgttgtccgcaacctaccatttacagatgctagacgcaatggaaaggttccaaagctattacttcatcggctttttcccaatgcgcgatattcaatttggattgatgggaaacttaagctagtgagggatccttatcaggtacggacgcgtgggctacaaacacgtgacacctccgcccaccctcgccccctccctaccggcaccgcccagatggcctgctcccacatcgcccgccgcgggggtctcctcccccgccgcagcggcggctcgttccccggcgcattctcccgctgccgccttcgcgcgcctccggtcgacgcctcgtttcgcgagcgctggcttgtcggttaagggaaacggagcggcgttcccgttggtcgccgccgcggggccggccgcggcggcaccggtggccgacctggacggccgcccggccacggagaagcagcccatcatcgtcatcgacaactacgacagcttcacatacaacctctgccagtatatgggggagcttggattgaacttcgaagtataccgcaatgatgaactgaccatagaagatgtgagaaggaagaacccaaggggaatacttatttctccaggacctggtgaaccacaagattcgggaatatcattgcagactgttcttgaattaggcccaaccatcccaatttttggagtttgcatgggtctgcaatgcattggagaggcatttggaggaaagattatccgtgctccttctggagtgatgcatgggaaaagctctccagtttattacgatgaggaattaggaaaggcattgttcaatggcttgccaaacccttttactgccgcgaggtaccacagcttggtcattgagcaagaaaccttcccacatgatgctttggaggctactgcatggactgaagatggacttatcatggctgctcgccacaagaagtacaaacacatccagggtgtccaattccacccggagagcatcatcacccctgaaggcaagaaaatcatcctcaactttgtcagattcattgaggaactggagaagcagcgttcgtaggggaggtagacgcgacaggtggtttcatttcatagatcagacggaagcagagacaaggcgcttaaagctgcgccaggttccggggctggcagttgaagcatagctaggaaacagctttccctctcttaattcgttgtgttcgtggtgacataatctgtgtgcggaccgaatttagaataaagtacaggcgtccgtctgatcaaataagcaccggtgttggtgctctatagatgaatatatccggtgattttcggcatgggaggcattggcacatttttgtctgagttctggcggtagcaagaccggagtaataaccatcaggcgtttctaaaaaaaaaaaaaaaaaagtgttggttacgtcccgcacgcaggccgggcgtgcggaggatttatgccctgagaggctgagactatctccctcgtcccttattttaaacagtatcattatacaattccgcgttacctgctggag

SEQ ID NO: 178958 - DNA, 376 bp, Zea mays
  Clone ID: MRT4577_94794C.1
aattattataaaaaaatgaaaaacaaaagataatattaaaataatgaaaaaaaaaacagtggggggactgtcaaaacggggggggccgcctttttagcggttccatgcttcctcccccgttcttcccacttgctcccttttttttcgggtcccgctcggtttaatccctggcccgtcttttttcaactgccttgcgggaaaaccctttggctcccccagcttaattcccttggaggccatccccttttccccttctggtgtattgatcaaagggcccgcccaattggcttttcccaatagttgccctttcggcttggtttttgggactccctctctcccggtcctttatccgctggggggggggctgttcccccca

SEQ ID NO: 178959 - DNA, 2155 bp, Zea mays
  Clone ID: MRT4577_94795C.1
gcaacctaccatttacagatgctagacgcaatgggtaggtggcaaagctattacttcatcggctggttcccaatgcgcgatattcaatttggattgattggaaactcaagctagtgagggatccttatcaggtattacaaagggtcttgcgcaggcagagtgttagctttgcaatttccaggcattacagacgcttcgatgttttcgaggaagccgccgcgcgtccgcccagcgtccgccccgcgtccgcccacgcgtccgcccacgcgcccacgcgtccgtgacaccccgcgcggcaccctcgcctccgccgcacgcccccactctctcaccgccaccgccgagaatggcctgctcccacctcgccgccgcgggtggctcttcccctgccgccgccgcagtggttcgttccccgacgcattccccagccgccgccttcgcgcgcctccggtcgacgccgcgtttctcgagcgccggcctgtcggttaagggaagcagggcggctttcccgtgggtcgccgccgcggggccggccgcggcggcgccggtggccgacctggacggccgcccggccacggagaagcagcccatcattgtcatcgataactacgacagcttcacctacaacctctgccagtatatgggggagcttggattgaacttcgaagtataccgcaatgatgaactgaccatagaagatgtaaagaggaagaacccaagaggaatacttatttctccaggtcctggtgaaccacaagattcagggatatcattgcagactgttcttgaattaggcccaaccatcccaattttcggagtttgcatgggcctgcagtgcattggggaggcatttggaggaaagattatccgtgctccttctggagtgatgcatgggaaaagctctccagtttattacgacgaggaattaggaaaggccttattcaatggcttgccaaacccttttacagcggcgaggtaccacagcttggtcattgagaaagaaaccttcccacatgatgctttggaggctaccgcatggactgaagatggactcatcatggctgctcgccacaagaagtacaaacacatccagggtgtccagttccacccggagagcatcatcacccctgaaggcaagaaaatcatcctcaacttcgtcagattcattgaggagctggagaagcagcgttcctaatctaggggaggtatatgccgacgggtggtttcatagatcaggcggaagcagagacataagccactgcgaagttccggcactggcagtggaagtttagctaggaatcaacgtttccctctcataattcgttgtgctcgtggtaacataatctgtgtggaccgaatgtcgaataaagtccaggcgtccagctgatcaaataagcaccggtgttggtgcgctctaggtggatatatatccggtaattttcggcaaggggaggccttggcacatttttgtctgagttctggcggtagcaagaccggagtaatagcattaggcgtttctatgttggtgccgcacgcatatttgctgtgctggtcgggcgtgcggaggatttatgccctgagaggctgagactatctccctcgtcccttattttaaacagtatcattatacaattccgcgttcgggctggacgcaggcgctgctgctccgccgggcgcgctcgcgcggggtggccgtcgtcggctcgtccaggcgcgcggtcctgctgcggaggcgcgtctccgcctcggcgcctccaccgatgctccgcgccagcgccggggcgccgccgccggtccagggcccgcctccgaggcaggccggggagccggccagggccgacgcgctccggcggatcgtccccggcggcgccggcatggagtactgcagcctactcgacgagaccgccgactacgtgctgcacctccgcgcgcaggtgcagctcatgcagagcctcgtcgacctcttctctccgcccaacccaaccagtaattaatcaataccgcatggtcaattgattcttccctcttgcaccgccgtcgccgcggtttgtgtctaaatcatcatcgcatatctcttgttcatgccacacatgcatgagatggatgcatgattaagataggagattattgttgaggagagagatcgattattatt

SEQ ID NO: 178960 - DNA, 244 bp, Zea mays
  Clone ID: MRT4577_94796C.1
ggccaacatacttgcaagcgtagaacacaccgggccgggttgcctttcagtcattagggcattaaaacaaaaagccacttctaggattgaaacttttcctacccaacttaattccacctacaaccaaccaaaagttcttaggaccccattcaattaaatacccagctttaaagtacataaaccatccttgatgatgagcagacacatcggcagaaactcacggccctattttaagaagcttaaa

SEQ ID NO: 178961 - DNA, 1207 bp, Zea mays
  Clone ID: MRT4577_94797C.1
cattgggtacctcgaggccggccgggaaaacctcgtcactctccggcaggtgacacctccgcccaccctcgccccctccctaccggcaccggtggccgacctggacggccgcccggccacggagaagcagcccttcatcgtcatcgacaactacgacagcttcacatacaacctctgccagtatatgggggagcttggattgaacttcgaagtataccgcaatgatgaactgaccatagaagatgtgagaaggaagaacccaaggggaatacttatttctccaggacctggtgaaccacaagattcgggaatatcattgcagactgttcttgaattaggcccaaccatcccaatttttggagtttgcatgggtctgcaatgcattggagaggcatttggaggaaagattatccgtgctccttctggagtgatgcatgggaaaagctctccagtttattacgatgaggaattaggaaaggcattgttcaatggcttgccaaacccttttactgccgcgaggtaccacagcttggtcattgagcaagaaaccttcccacatgatgctttggaggctactgcatggactgaagatggacttatcatggctgctcgccacaagaagtacaaacacatccagggtgtccaattccacccggagagcatcatcccccctgtgaacaagaaaatcatcctcaactttgtctgattcacattgaaactggagaagcagcgttcgtgtaggaggtagagacgccgacaggtttcgatgcttagatcagaccgaagcggagacctgacgcttaaaactgctccttgggccctcgctggcagcccccccaccacatccagaatgtccaattcccctcggagagcatcatcgcccctgaaggcaagaaaatcatcctcaacttcgtcagattcattgaggaactggagaagcagcgttcgtaggggaagtagactcgacaggtggtttcatttcatagatcagacggaagcagagacaaggcgcttaaagctgcgccaggttccggggctggcagttgaagcatagctaggaaagagcttttccctctcttaattcgttgtgttcgtggtgatataatctgtgtgcggcccgaatttagaataaagtacaggcgtccgtctgatcaaataagcaccggtgttggtgctctatagatgaatatatccggtgattttcggc

SEQ ID NO: 178962 - DNA, 859 bp, Zea mays
  Clone ID: MRT4577_94798C.1
atcattgcttatgtggtttctacgtgcaggggtacgaattttgcaagctgcttttatctgcaatcagcaagagcatttgagcaagaactgccctgagaacaaacatggcatctatccaaagagtcgttgagtcagtcgcaattgctgtaaatatggagccgtgtgtggtgaccgttcaaggtgaaaacaacgtccacgattccctggaaggccttgttcggttaaaaacggttaaaaggggatcagaggggattagttaaaaggggattcgcacgtttggcgggtctatcaccgacgctcacattgtgaagaagatgatccaagtcgcccgccacctggagaatatggcgtattccatcgagacactgcttgatgtggacacgctctcgtggaggagctcacgagcagactacacgccattgagcagcgcaagaacaaggcggtgttcacacctgacggggccatctaatggcggtggaagaattggatgtctcgactcaagatcaatgaacatggagaaggatctggtgccaacaagaagcgcaactgcccacggcgtagccaaggcgatggagtcaaggtaggaggcggtcgtgttggtggcgttaaggtggcgtctaactaatgtctcaactgtggtaagaactaagaaaggccattgtgccaaagattgccgcagcaaggagcaagtgaatgtcgtagaggatgattaggaagaatccccccttcccattgcgtggactactggggtgaacgttgagtgctccggtccaagcatgaggacatatgcatctgactcatgcaagaaggtccatctgtatgaggcaaaggttgtaaattgtaatacctcatttggctg

SEQ ID NO: 178963 - DNA, 343 bp, Zea mays
  Clone ID: MRT4577_94799C.1
gtccatgattatactctaaggaataaggaaagcgtggggtcctccaaatgtggatgggctaccaactcacaatatcctcctaaggttaaatgctgaccttcaaaaccttctaacatattcttagggctaattgaaactatatcttaacaggcatataaagtactgacatacctttgcacatgccctgctggagcataaaaccattacttcagacaagagcaacatacaccctcaccataaccaaaaagaacacccaaatatgcttccaaaacgagctattaaactctaacatactatgactcctttcgatcacccacattctacctactatcaattgttaatt

SEQ ID NO: 178964 - DNA, 348 bp, Zea mays
  Clone ID: MRT4577_9479C.1
atgcgtcttcagaccattagctctatctactccagagcgcaaaagaacccgatcgacaccaggaaggtggggttgcgtgccctggctctcctggctctcgctacgatgcgccacatacacgcatacaagcgacttgctgcggatgccatccaccgacgaagggtcatctaccgtcgccggagcatctgtcaactacggatctacggacaccttcagggcatatcacaacgtcggggcatctgtcgacgaacgaccaactgacaacgtgggaccatgtgccgtcgcccgtttatctgtagacgccatcatgacactacagtactaaaccgggccggccgcagtgtcata

SEQ ID NO: 178965 - DNA, 175 bp, Zea mays
  Clone ID: MRT4577_947C.1
gccactcgttcggagacgcgtcggtctgcatgccacaggggccactctctaagcacggggggggaacgacctaattactttcacccgtgacaccctacgaactacagggtactcacccctgcttctagctgtgatagtgcggatattcctacgcaggagtcatcaccatttgtcc

SEQ ID NO: 178966 - DNA, 465 bp, Zea mays
  Clone ID: MRT4577_94800C.1
tcgagcggccgcccgggcaggtgctttttttttttttcttttttcttttttcctttttttttttttttttttttttctctttttttcttctttgttttccttttagatttaacgcccgttacccccaagcttatggaaacagtgttttgcgaccccctctggggaccactctcaccttacaaacctgcgaaaggctaccctctttttccccgggcggcccattacttattccaaaaaactttgttatgcgcatccctccaaccatcaagctaaaagcagggcccccccaacgagctgcatgccggtaggaggctggtgggtttgacaaaccccggcccccaaagggcaaccattgttggattcaaaacaggggggccgggcaacccccaaaccgcttgctaacagggatcaaccgatgctgtgtgaaaaaggaatctccctcgctgcagctcgcccgttaaatgg

SEQ ID NO: 178967 - DNA, 235 bp, Zea mays
  Clone ID: MRT4577_94801C.1
ccacgcgtccgcgctggtgtacaccttggccaccgacggctcgccgttcccacttgagctgtttacgccgtggggggaggcaacactggctgatttttatgtaaatgttattgcaatctcggttagggttatctacaaggaagcacactggattagttctgctgagtgggtggttctgtaagatgagtgtgagcagatcctcttgaccttctatttatcaggcgggggactctat

SEQ ID NO: 178968 - DNA, 216 bp, Zea mays
  Clone ID: MRT4577_94802C.1
gaaagcttcagccttcaagcgcacacaggcacgcaaatgcccttttcatcaaccctcgattcaggcccggcgcgttcccgaattggggggagatgaggcctgcccatggcggtcacaggtccttctttcccatggggaactccttcaggatgatttttcccagagggggccggctggcaaccaaacttaatgagctggttactttggatggagatg

SEQ ID NO: 178969 - DNA, 426 bp, Zea mays
  Clone ID: MRT4577_94803C.1
cgggaaaaaacagggacggccctgccgctcgaagtttaacggttttgtccatcgccggttcgttctctggggagggggctacttatccctcacctataacagcccaccccaagggtttttacacggcccattccggcccaaacacacccacggggtcaacggggccggcccctggccccttgctccatcgcactggctgcattttcctggggtgggcccccgtcttcaccgggggaacctggcctgccatgttgtccacccccatgccccctgggggaggcaaacataaaccggggcttgggctaacccaaagagggttccaatccaaggttggcttgggtttaaaatcccaaccctttgctatacggggtcttgatttgaaccaattctacggctaaatagctgctttttccaggggcgttcatt

SEQ ID NO: 178970 - DNA, 356 bp, Zea mays
  Clone ID: MRT4577_94804C.1
ttttttttttttctttttttttttttttttttttggtttttttttttaaaacaccaaacataatttttaacaaaaaacattaaaaacacacggccacaaaataattgtcctacttcaccctcctttttaaaataaaatcaccaaaaccaatttacaaacaaaaccctaaggccatgacaactctaaaaaaccgggccatgcaaaaacccaaacacagttttattcaaccccaaggcactggaacacgcattatttcaaggcaggagaccacccaaaaagtaatttcacatttttttttaaaccaaccaacatttccaacaaggctttctcaacactataaaaaaaaattttgtttt

SEQ ID NO: 178971 - DNA, 412 bp, Zea mays
  Clone ID: MRT4577_94805C.1
ggagaacggggccaaaaagggccggtaaaaaaccaggggtttacatttggggccaaaatttttttttttttgcaaacggggaaatgaggggttgttttagggggaacaaaacgtcttaacggttttccgggaaaaacctttcaaaatttccccggggggataccccggggcgggttttaaccggttttttacaaaaacgggattattggtgacaaaaaaaaaaccccggggggggggcgcccccattgggagaacaaccccctgcccaaaaaaatttccgggggggggcccaaagccctgggaccggggggggggggggggccccccggggggctatcccccccccaaggccgggggcccctgttagggccctgggcccccttggggcccccctctggccccaggagggggg

SEQ ID NO: 178972 - DNA, 897 bp, Zea mays
  Clone ID: MRT4577_94806C.1
ctcaagccagacatcacggcgccgggggtgaacgtcatcgcggcgtggagtggcgcgacgtcgcccacggacaagtcgttcgacaagcggcgagtggcgttcaacatcctctccggcacgtccatgtcgtgcccgcacgtctccggcgtcgctggcctgatcaagaccctccacccggactggagccccgccgcgatcaagtcggcgatcatgacaagcgcgacggtgctggacgcggagatgaagccgatcctgaactcgtcctacgccccggcgacgccgttcagctacggcgccggccacgtgttcccgagccgcgcgctggacccagggctcgtgtacgacatgaggacgatgaacaggggatcgttcgtgtgcccgaccacccccatgagcctccacgacctcaattacccatcaatcactgcgcacggtcttcccgccggcacgaccacgatggtccggcgcaggctcaagaacgtcgggctgccggggacgtacacggccgccgtcgtcgagcccgaggggatgcacgtgtcggtgataccggcgatgctggtgttcagggaaaccggtgaggagaaggagttcgacgtgattttcacggtcagcgaccgcgccccggccgcgagctacgtatttggcaccatcgtctggtctgatgggagccatcaggtgaggagtccgctggtagtgaagacgacgcaggggtgaagaacttgaacaatttgtctatagctggactgaattaggaatctagctagtcgagagagagaaagagatatgcagcttcgatcattatggaggataattgtggtatggattttttaagataatggaagaagtaatacctcccacctaataaaaaaaaaataaaaaaaaaaaaaaagggcggcc

SEQ ID NO: 178973 - DNA, 1291 bp, Zea mays
  unsure (1)..(1291): unsure at all n locations
  Clone ID: MRT4577_94807C.1
cctcgaggccggccgggccgggctggatcctcctatccattccgtctctcgttcctctcgtcggctcgtcgctctccgagccgcgaaatggcgcctcctacctctgcatcggcgcggccgctatccctccccctcaccgtccctctctcctgtcaccgctcccacttgctccccgcgcccaacgctcgcctcctcccccggcgccgcgtcgcgctcgcgccgacccggcctggcgccacgctcctatccagcctcagtgacgcccgggaggaggaggaggatgaaagtggtttctacgaggaggatgagcaacaggaattcgaggatgaggatgaacaggggtacgacggggagaacgaggagctggtcgaggtgggatacgtgtcgggcgcgcacggggtgcgcgcccacgtcttcaacacgccaactacctagtttacgtagcttctgctcgccacatcctgcaccatatgtgttgcattgctaaaattgtatcctgtgcacagaagctcctatttatttcccacaaactaaagtttagctacctaataatgttgtttttattcagtagaattcacacttcgaaaccatctcctgttttcatgtggttagccttggtgttctagtgttctacaaggcaaagaaaattctagtttccgctcgcatcaaaacatgagatcaaacctgccattatttctatttacactgctctcctgtaaataagcagaagctttttcctcttgctgtgtaactctaatgcatttgagtttgttttgtggtcagtttctgtaatctttaaccgttcatcagatgacaaacactatccagaagaagttcaaggtctcatcaacccaactgctttaccagtcctgcccttaccaatcactgaccctgtttctcattggccccttccttgatggctttttgactaaccaaaatgtctttgcttttaattatacatctcaagttgtgtttttcatcgtcctgtcatgcttgatatctgtttcagtgaacttcagcactttccttgtgatcggaaagacatctcctgttacttaccaagtcctgggccatcttaaaacatgccttgttcttgcttttggttatgttttgcttcacgatccgtttagctggagaaacatacttggaatcctaattgctgtagttggaatggtcttatattcatacttctgcacagtggagaccagcaanaaaatgttgaagtctccccacaacaggtgaaagaaaagcgagcaggccctttgatcgcgactctatgagcaaagtgaaa

SEQ ID NO: 178974 - DNA, 190 bp, Zea mays
  unsure (1)..(190): unsure at all n locations
  Clone ID: MRT4577_94808C.1
ccggnctgtcgcttagagatggccctccacgcggtggccgccgccgccgcatgcggggcgaggcttggtgaaaaccgtagttgggtggaaanngagnaaggaggcacccgctgtgcgccgtccccggctccgtctcagagggggcccgtccaaggtgaatgaacgttatgggcgccccgtgcgcccacaa

SEQ ID NO: 178975 - DNA, 349 bp, Zea mays
  Clone ID: MRT4577_94809C.1
ttcacgcggacgtggacgcacggacgcgagcgcccgagcgctgtggatcaataaggcactggagttctacggcggcaaggcgccattcgatgtcaacacagactgtatcatgtacgaccactgtgtcgttcacagcggtcgcaccaccaagaaggggtgcatcatgcagaatgactgggtgtttacccagctggacaacaagaataacgaggatgagatgatgcggttggagaatgaagcagctcctcggcgctttgacgaggatgaggtcatggacatgagcaagtcccagtcgccattcactcaatattaccgcatgacccacaccccggaatgggatatctgggac

SEQ ID NO: 178976 - DNA, 152 bp, Zea mays
  Clone ID: MRT4577_9480C.1
aaacacacaatacttggttttaatatctatcatcacagtttttttccatgctgaaaaatgcacttaaggcacacgggtccaagaagggaagttgattcaaagtaattaccctgaacagagaggcttgtacaaatatgaaatgtgttaatcaa

SEQ ID NO: 178977 - DNA, 281 bp, Zea mays
  Clone ID: MRT4577_94810C.1
gatccagaatgatcgtgggtaacaataactcaaagtgtttcttaagggtgagttggcatgcaaaaaattacattgattacagtgtgttttggagctggccctgtttgtgtgcatatgataatgcagagttgagccagaccctggaaatggccatcctagtcctcactaactacgggatccagggttttaatctcttggtggaaactttcagttgcttaactctctattggaagatttttttaaggtcctacatcatttaggtggtattacaatgtatgtag

SEQ ID NO: 178978 - DNA, 529 bp, Zea mays
  Clone ID: MRT4577_94811C.1
ggtaccctcgggcttgccgggggtccactagaacagcaaatcctaaattccagcagctaggcctcgttccgcggtctccgctaggacgccaccaatctcaggttcccatctctttggccgtcgtcagcaaccggctagcgccgtccgccctctaccagtccagctccgcgcccggcgccacatcctagcctcgcgcacagacagaacttctacggtcctagcattggctaccacgcttggtcgcgacaccgcctccccgcccgagctcggccgcatgggccacactttctggctcgccggtcgccgcctcgtcacctccccgcgtgggcgtgaccaccctcgccccctggcgtctggctgacgcctcaccgattggtgattggtcattgcttcagtgcttgtctgttgtctgctactgctactttgcttcactaatccatgtttagtcactccctccctaagcgattggtcagttagtcactgcttgagcttcttgttatctgttggtcactactttgcttgaatatat

SEQ ID NO: 178979 - DNA, 1127 bp, Zea mays
  Clone ID: MRT4577_94812C.1
cattggtaccctcgaggccggccggggtacgtccaacaataatccaacaatggaggccgcggaggagcggccaagaagacgccctgccggcctcggcgtcctcgccctactctgctcgtcgttgcttcttaacgtgctcttcctcgcgtactactacttcctctcgccgccgtcccagcttgccgatggtggcagctgcgggctgagctgggcgctgcgggcggccagggatgccgaggcgttggccgccacggacagctgctccggccacgggcaggtgttcttggacggcgtcgtcggcgaggacgggcggcctgggtgcgagtgcaatcgctgcttcgacgggccgcactgctcgatccgaacacccaactgcactgccgatgctaccagcggggacccgttgttcctggagccctactggaagcggcacgcggcggccagcgccgtgctagtgcccggatggcatcgtctgagctacgccaccaccgacggcctcttccaatccgtcgagctcgagaaccacatccggcggctgcacagggccgtcggcaacgcagtcgtggacggcaagcgcttggtgttcggcgccggctccacgcagctcatcaacgcgctggtgcacgcgctctccccggacgccaacgccgccgccgcctcgccaccggccccgcgtggtcgccaccgcgccgtattacccgccgtacagaacacagacagcgatgttcgacgggcgtgagtacagatgggaaggaaccacggcggctgcatgggccaacgcgtcacgaaactcctccagcttcatcgagttcgtcacgtcgccgaacaaccccgacgccctgctccgcgcgcccgttctgcgcggctccgcggtgatcgccgaccacgcgtactactggcctcacttcacgcacatcgcggcaccggccgacgaggacgtcatgctgttcaccatgtccaagccatctgggcatgccggcagcagactcggatgggcgctgatcagggacgagaaggtgtccaagagggcgtatgagtacgtgtagagcagcttcatggatgcttcccggaacacccacctgcgcttgttgtagatcgtaaagttcatgctgatcaaacgaactccc

SEQ ID NO: 178980 - DNA, 591 bp, Zea mays
  Clone ID: MRT4577_94813C.1
acactactctgccctgtacatcctacctgtccgccgcctgcagctgaagacgcccgctgatttgaaagacatatgccgacgtttgcgacgactgtgacgggggaacaccctcaattagcgggtgagataacatcgtacactattagaccgtcgtgagggctggagccaggacacaggatgggcacttcctacggaccacacagcggctcatattttctggtacgcagcgcaaggacggtatgaccctgggctactacaacatacacaaggagtgcacactgacacgtgccgctccgactccggggcggggccaagaagcgtaagaagatgacgaacaccaagcccaagaagatcaagcacatgcacaataaggagaagctctccgggctgcagctctataaggcggacgacaccactagcaaggtgacccgcctccgcaaggagtgccccaactgagagtgcggcgcgggcgttttcatggccaaccacttagaccgtcactactgctgcaagagcgggcttacatatgtctacaaccagaaggcgtgattgcttgccccgattagctttatccgtctaccctatcgagca

SEQ ID NO: 178981 - DNA, 539 bp, Zea mays
  Clone ID: MRT4577_94814C.1
gtccgctacccctactctgtgcaccctctcgccgactccgtagcatgagacgcgctagtgagcgcccgcgaggtggccactatcaagaccaagaggaacaagaagcgcatgatgaggctgctcaggaagcgccgacagcactacgcagagaggcaagtaagctcgtgggcattgaggactccctggatcaccactaattacatgacctacattttaagcgtcaacacctggcaagatgcaacataactcacagcgacatcaccgctcaggcatcgtgcaacaacgctctctgtcttggcaaacctgcccttcaccgggtcatgtatcaggaaccctaactatatccagaggtgtgaggttagacactaaaatcgaccggagtgcgcacctattatgactgacctggacatggttgttatacatacctacctgggagccgaaaaagaagatatataatgcccccaccaaagctgcacccatggttgcctttagtgacgactaagacaacgcacccgcgatgataacactggctcaatgct

SEQ ID NO: 178982 - DNA, 162 bp, Zea mays
  Clone ID: MRT4577_94815C.1
ctatctcagacttacgtacgtgagctcaggatagggctcaaggcttgggatccaacggaccaatcattcaaatcctctccagaaccgcgttgagcagggcacatctagattctagggtgagggaccgtcaccgaagaaactcacaggcggtcacgaggaggc

SEQ ID NO: 178983 - DNA, 704 bp, Zea mays
  unsure (1)..(704): unsure at all n locations
  Clone ID: MRT4577_94816C.1
ccggccgggttattcttagagttatatggatgtgatcccacaaaccaccacactacaacgtcgaacccgaaaaaaggccaaaaatgacacacccacccatggcgctcctcctctacccgaagggatccttctgggtgtccccaccagctcaacaccctaaagctatctccgctggcgacaatggatccaaccccgccatcgaggctgctatgcaacaacatgccctcccaacagagccctctgaatgtaactgtgacttgcgcttnctttcgcatgagaagaggctgcgtcttgtccatgccacgacagagagttctgagactgacgcggagcagccagaagagccgaaaccagcgaccaagatcaagaaaatgccactcgagtccaagcagaagatgatcatgaagcaaagagcgcggatgaagcttgccaagaaactgaggcatcggcgacaagcggcttctccgcaagaggaagcttaggaagaagggcaggtggccaccgtccaagatgaagaagctcaagaatgtatgaacaacgtcaacgttgactgccactctgccttggttttatgtgttgtgattgtgattgcccagcttacgaattttgctgttcagaatctgagacacggtacctacaaaatgtaactctgttttcacgtaatttgaatcttcttacagaaaaaaaaaaaaaaaaaagcggcc

SEQ ID NO: 178984 - DNA, 526 bp, Zea mays
  Clone ID: MRT4577_94817C.1
caaaaaaaatctgcctacatcttgcctacaaggggggaaaataccttccaggtttatgagtatattacttacgaggcgaacaagcatatctcacgggcttcttttccagggatgcaagagaggaccatcatcacatcctcactgtaaaaaacttacagggggacgggggaccacaactcaaaatttgctgcccagttggtagggacccacccagctataaaaatagcaagacttgggaaaggacccttgacaaactaactgtctggacgggttaggtgggaaactcggtggggcttgggcagcagcaagcatcgcctcagctattaaaaatacccacataaaattaacagattcagctccggccccattccaagaagctggcaatggggaggactttggctaggactatgaggggaaaagagacttcatccttcagtggctgaaagacatggccttcaaaatcagcgccaagccacaaggttcaatatttgggtttgctgacctgccaaggccctgccaactttca

SEQ ID NO: 178985 - DNA, 148 bp, Zea mays
  Clone ID: MRT4577_94818C.1
tttatttactttatttatgaaaggtacaggggcatgtataggagagggggtacatacatcatacaagttaacaacatagtatacacattacagactggtacaacacaatgaagaatatttgacagattcaatggtacaatttacccat

SEQ ID NO: 178986 - DNA, 352 bp, Zea mays
  Clone ID: MRT4577_94819C.1
gcgtttcactcacccgcccacgcacgcgtccacccggggggcttctttagacatccggggcgtttacccacccacgggcggaggcatgaacccggcgaggacgctggggccggccgcggcggcggggaactacccggaggctgggatccacccgcggccccccaccctgaccccgtgggagggccaccacgacaaacagggggaaccctgggcgccaaaacggggggaacacccaaacaacgaaaattcgtgtcgtccaacaaactctcacacgggggaaaaaaaacgcgggagaaaaaaaccccccaccccccccaccccaaaaaaaaaaacaaaccaaaaaagtggaaaa

SEQ ID NO: 178987 - DNA, 126 bp, Zea mays
  Clone ID: MRT4577_9481C.1
gagccaggcgatggggcgcatctcctcgaagctcctcccgccggggccaggcggcgactgcaggcgcaccacggtgcgcggccgtgtcgaacacgtcggctccctcacctgcacacaacatacgag

SEQ ID NO: 178988 - DNA, 217 bp, Zea mays
  Clone ID: MRT4577_94820C.1
aggcggcctggtacggagcccgctcccggagggcgtgcggctcgtgttcgaggcggtggcagccgtggacaacaactacttcatgtccgtcatcgacttcgccagctccggggccctggaggaggaaggcctggtgccagcagtcgacccgttggagacggtgttcagcccggacgtcgatgagtacagtactgctgggggcctaatttccatgact

SEQ ID NO: 178989 - DNA, 374 bp, Zea mays
  unsure (1)..(374): unsure at all n locations
  Clone ID: MRT4577_94821C.1
gggccccacagngagcatagggttaattccgtttaagggttaggaccaatgcaccatggacctgaccacaacgaacacatgggactcccaaccctaccactataccaaagggtgctccccccccacctaaaacaaggagaccccccaacacacgcccacctttntcccccagaaacccccccccacaccacaccccccacccccccccccccccnnacctcccccccccccccccccccccccctccccccccccccccccccccccccccccccacacaacaaccccgccacccccccaccccccaccaccgctgaccggcacacgcccccccccccccacaacccaagcccgcccccccccccccccccgcc

SEQ ID NO: 178990 - DNA, 283 bp, Zea mays
  Clone ID: MRT4577_94822C.1
ccactccagcctgttttagcgcagccagtatcggtgttttttatcacctgtcggagccaattacaaatgaacctgcgccgggaaaccaaatacttgccaattcctttgcgacgcggaccgcacgccgaacgcgcgacaatgtccggagcggcggtctaccaagaaatggtggctgtcattgccaccctttatgaaggccattacactgacgcacgttcgcttcatgcggggcgacccagtgtgtctattccctacgtgagtctcccttgtcccggttattatc

SEQ ID NO: 178991 - DNA, 316 bp, Zea mays
  Clone ID: MRT4577_94823C.1
cgcagttccgggccggacttcccgggggaaagagcccaagcaccttttttcgcccgttcagtttccacatctccgccgagcgagttctctggttgacctcttccgtgttcggaccacctgcaaggctttcggtgtatcttgccactctcaccaatcaagtcgccatgtatgatctagacattcaaatcccaactgcctggacctccctttccttgacgccaatactctgtgactccggtgctgcagcacggccagaggaccacccacacgtgcgcattcagcaaggtattggtcgtacgagctggacaaccgctca

SEQ ID NO: 178992 - DNA, 313 bp, Zea mays
  unsure (1)..(313): unsure at all n locations
  Clone ID: MRT4577_94824C.1
gcgcgcggcccctcctcccagatgtgctgacgtcacctcctgactcggcgcaaaagacgccgttcggncggctcccgcccgtcgcccgtcgccggtcgatgccgcgcttccagcagcagccggagcgggacgccagccggcccccagcccgggggccgactccttccgtccttcgggcggtcttcgcccttcatcgccaatctgctttcgtccttgattntcacctctcagtccccatcaagtgttctaacatcaagttcctgaagggacatgtttgggggtatatggggagaaggagggtgctctttctgaa

SEQ ID NO: 178993 - DNA, 334 bp, Zea mays
  Clone ID: MRT4577_94825C.1
ctcgtttatcttgccggacatacacttcaagcaccagcggggtgcactaagaaccagcagcgggaatgccaggccaagcagaaagcaacccgagaggaagaacagcgagtagcgcacgccgatgcccgaacgtacccaaagtccgacttggccgggtccgggttctgagccaggtacaggaacccgaacgagccaatgctgaccccaagcttaccaaacaccggcatcaaacacaggcacgaagaccggaaactggccggaaagatctcagcgggcaccatgaacgtgggcgcgtagcacccaaagctggcgaagaaaaaagtgaagccgcaca

SEQ ID NO: 178994 - DNA, 382 bp, Zea mays
  Clone ID: MRT4577_94826C.1
aagaaactacggaagggatacctgccagcaacaagaacaggacggaaacacatgctcccaactactcctgtatggctgcctgatgcatgccactacacagattgacctgttgccatactactacagcacccttgatggacagcaagagctgaccaaatgacaactccacgctacaacaaaatattcaagaagagcagcaaatttgctcagacccaaattgcagtcagaaaacgaagtttagaaaacacaaagttcagaaaagaatcacagacctagatgcccattctgtctacaaactacagcagacagcttgacaccagtcctctcgggctctcggcatacttgtggaggtgtggttgaggaaaaaagaatttcctggagc

SEQ ID NO: 178995 - DNA, 210 bp, Zea mays
  Clone ID: MRT4577_94827C.1
cgtcatcagcagcttctgcttgctctggggggaaggagagagagagagagcgagagagagatctaatatagaggcttgtaaggggtcctcgaaccaaaattttggcggtgttcaaccggcaagtggtggaagtgcccgccgaacttgtggcggcgggcaacccgaccccgtcgcccaaaacgaaagcgtcgcaactggtggggcgctttc

SEQ ID NO: 178996 - DNA, 2171 bp, Zea mays
  Clone ID: MRT4577_94828C.1
agtgaatactgattccccccctgctctgttctccctcctcccctgttcgagcccaagggaaacaggagtacaggactagcttgcacgcatctcgcctcgccatcgccagtcgccacaacagcgcaagatgcagcgccgcgcgccgcgtctccgcgtcctcctccatctcctaatcctcgtcccggccctctccgaggttcctgaccactatgcctccccgcgtgtgggctcgggcaccagaacgggcctcagtaattcgccggcgcaagagtatcttgaccccacctatccggtcccgcggtccccgccgggggcgtcgacctgcgtcttgccggtgctctcctactccttcgccaacacctacggcactccccccgccaaggcggcgtacgcgccgccagccgagtgccctgcgccctggtccctcgtcgttctctccttctccgtcgccatcgccggtgaccagtacgaccgcgtcgcagccgtctggctcgacggcgccgagctcctccggaccaccacggccgagcccaccaccgacggcgttcgctggaccatccacaaggacgtcacccgctactccgcgctgctccggtccccgcgcggcggcgagctttctgtcatgctggagaacctcgtcaacgacgtgtacaccggcgtatacaacgtcagcgtgtccctcgagttccacggcgtccctgcttacctcggcgacgcggggtcctcctcagctgccggctctgcggaacccggcggccaggcgacactaaaactgccggcgtcgtacttccagccggcggatctgatcctgccaatctcggagggcatgggcagcagcaatggcttttggttccgcatccagaattcgtcggacccgcggtccaagcttgtgagaattccatcgaacacctaccgcgcagtcctcgaagtcttcgtgtccccgcactcaaacgacgagttttggtattccaacccgccgtacctctacatccgcgagaacaacctcaccacgggacggggcaacgcggcgtaccgcgaggtcgtcgtgagcgtggaccgccatttcgccggctcgttcgtcccgttccccgtgatctacacgggtggcatcaacccgctgttctggcagcccgtggcggcgctgggcgccttcgacctcccgacctacgacgtcgagctcaccccgtttctgggaatcttggtcgacggcaagccgcacgagatcgtcctaagcgtagtggatggcatcgccgagtggcttgttgacgccaacctgcacctgtggctggaccccgcttcgacgaatgtatcggccgcgcccagccggtacaggacgccgcgtctgtccatcaagcgccggtacagcacccggcggccactggacggaaagttcaagatccgtgccaagaggaagtcccagttcagcgggtgggtgaagtcgtcgttcggcaacttcacgacgaacgtggagacggagctggaggtgaccagcctggtggacttcaccagccagggcaggaacaagactgtccggctgcaggtggagcaggacacggaggtcgtcgtccggtcgtcggagacgcggaaggcggtcggcaaggtggagacggaggctaagtacccgctgtggctggagatggtgacggaggacggcgagaacgacacctacgtgatgagggcgaacctgacacactccctcagcgtcgagaccgacgccgaggccgaggggctgtttgatggcgagacgagggtggtcgacgagcaagccgccgcggggtggatgctcgtcagaggccacgacgtgctcgacggctccgcggctacgacgcagacgtacaggtatagcaacgaggcggggaggtatgagcgagccatcgacacactggatggtgcggtgctgagcgacaacgtgaccgagagctactgggcctcgggagacggcttggcttggcttgctgctggacccgcgggaggaggtgccatggaactgtgacggccagcagtttggacattactgctatgtaggagtccgtcgtcagactgggagttgagttgtccagacttcttcaaaatgtgttgattacgtgcgatcgttatgtgtgcatatgtaattctcctgtgcattcttgtttcataagtgaaatcgacctacgggtactatatttgggttt

SEQ ID NO: 178997 - DNA, 489 bp, Zea mays
  unsure (1)..(489): unsure at all n locations
  Clone ID: MRT4577_94829C.1
ggccgcttttttttttttttttttggtttttttttttttttttttttttttttttttttttcagaaatatatggggataaatcccaatcaatatatcggattactttctaggaaacacatcgccggaatgagggcaccattatcgagtacatcccattttttttttaaaagatggcccccccaacgggggggggctgccacaacaaggcagggttcatcaaagaaaactggttgtatggcaccaattgttgctgctgtgggaaggcagcgaccaatgggttagccaccgctaggggattaagaaactgttgccgctgttgtaggcccccagcagagtccgacacagccagctggttgaatggaagcagctgtcgcaagtaggcagcagggtttgccacacctagctgagccagagctggcacaatctgttgcaccaactgnngtcgcaggtttgtgggtgccttacccacagcgagagggctagatgaa

SEQ ID NO: 178998 - DNA, 849 bp, Zea mays
  Clone ID: MRT4577_9482C.1
attgggtacctcgaggccggccgggccacccaatcctaccccgcggggggaattctcagttctcgcggcgacgactgggagaccgccgccgccgccatcctactccaggtgccctgagaactcgatcgggctcttcgctggcgacgaacacccaccaggatttcagtgcaggaccagtacctgatgcgatcaagagaaaactagctgccgagaccagtgtgcctccacaacaatcaagtttcagctgtgtaactggacagaagcagccccaaaactggtaccccacaaagaaaaaggtgaaagttccacatcttccatcgcagattctgcagtgtcccagaccaaacgtggtgccatccttctggtgcaaaatctgcaaggtcgactgtgtcaccgagttcaatttcagcgctcacgttggaggcaaaaagcacaaggccaaaaagctagagattctaggtaagaggaacgctgggggacctgctagccgatgcgcaggcaacaggagcgctggacagaatggactagcagtttctgggagcagaagcagcgaacagaatgtggctggcagcgttgctgctggaccgaactgtgacatgtcgtctgagagcagaactaatggaacagaaggaagtgggtgcactgtccggctatgagcagcttgggtttcactcgagtctggtatttcaataaaagttcgccttgcacattttcttctcaagggcacagttaacatatttatgtgtcagatggctaggccgctagggagatttcatctgatgggttggactgaacacactagtcagataataagttgaaacgtatgcactatgcagggtcctattccca

SEQ ID NO: 178999 - DNA, 1281 bp, Zea mays
  Clone ID: MRT4577_94830C.1
acaggttataaaaaaaattacattattttatcggagtgattacaaaagtataagtttgaaatatatgctagctcaagtgatcatcctcaataagaagtatagaagggttacttagacttataagaaggtcgagcccaccggcacttaacaccatcatcagcagcacaaaactaaaacctgggtaacactaggttagtgttgttagtcgatgagcacttgatgaccatcttcaggtttgtccatcagcatcgccttgcgaagaagcccacgcttaacagcatcttggggtcgactcagctttggtccttcgcatcacgtgattatttaacgtaccgttctaatatatgacttgaatccgcgagatcggtaatgattttccgattccaacaatttggcgagcgcttggcaggtgtcacacgaactttttgtcacgcactcgatgaataccacgctgctggttccgtcttcacccgacgcttgggatttcttgacgacacacgaaacgacgacgagatcgtgtttggagcgagctggtgaggtgggggtcgaacaggggatgacgggttcgacgacgatacaggagggtgacgtatatagagctgcacacacgacgcgacgacgaacgatgataaccgacgaggtcgacgacgcgatggggattaaggccaagcgagccgagaggacgcgctggcgagcaggaaaaagactcgacgcgggagtttgacgcgcacgcaaagctatcaccagcgacaacacgacgatggcgatatgagcgaacgcgaatcggcgcgggccaaacaccggtcaaccatggcagcaacttgggcgagatccgaactagagcagcagcacaccggcaagcatggacggcgggcgaactccggtttaggcgaatggaacgcgacatagggagctggtgcgcgcgtagggaggaagcctcggccacgggcgcggcaagctgaagctccgaccagcagagaggcacggcagcaagggaaggtggagctcgccatgggagggagaatcaaggggcgtgccatggggaaggaccgagcaggtcacggtgcgtgcgcaggatagcgcgcacgggaagaagaccttggttggagagagcgctggctggagatggacgccgagtgcgcagaccgcgagcagtcgccatggggacgagcgaagctccggtcggcgagctggagcaaggtccagtgcgcggccgagcaggagagagatggacggccgagcggtcgagcaagggcctagccgggatgcgtccccggccgg

SEQ ID NO: 179000 - DNA, 511 bp, Zea mays
  unsure (1)..(511): unsure at all n locations
  Clone ID: MRT4577_94831C.1
gattcttctgcctcgcccgactcagatgtatctagtgccgttccagacgccagcgtgtagtatcctcctagtaactactttggtcgcaggaccctcggccttgatcatggcggatcagaattcccatcacttcttcgaccaccacaggatcgacgtctcactcctccggcgaacagaacctatactccaagaccgaggtgctcatcgctcaacgacgaagggcgtgctcacatgggtatttctatgaggaggatgatatacaaaatgtggctgcactccttctccgtaggtgccatctgcgtcagtgactctgtcgcactctatgatgaaacccacctgatgaatgatctcaagtacgcgcactagtacaatacttagcggntgacttgtgatcaggaaggcgacaatcacgagaacctcacttttgctctgtctacacaaaaagaagaaagaggcccctagacgccctcgaggttcagcgttttgatcactttacagcagctcttctgct

SEQ ID NO: 179001 - DNA, 598 bp, Zea mays
  Clone ID: MRT4577_94832C.1
acgacccgaccaccgtacagagccgctccttcgtccttgcctatctgcgcatctcactccttcacacccttaccgcaatctcagccgtcagctttatactgtaacgcgacaccatgagggagggcataccgatccatatcgcccgcgcctgcatgcagaggacaaacgcgaggtgcagagctcggctgccttgagcatgatgttcatgttgacagtgcacactgcccggtcgacaagaccattgtgggcgggcgacgacagcagaaagaccttattagtgagactggggctgcgaagcacgtactcccgagctggttctggggaacttgagccgattgtgatggaggaagggcaaactgagacctaacagcactgttcttacacgtgagcagctcatgagaggaaaggaagatgcggtcaacactactgcccgaggacattacaccattgtgagagcaagcgtggaacgatggcctcgctaccttgatgaggcttgcatgacaatatgagctggtctagcatggtaggtccggtttacgctgcacccagtggtaacggtctatggctttgaaatgatcttcctacagcgtctgtatgc

SEQ ID NO: 179002 - DNA, 619 bp, Zea mays
  Clone ID: MRT4577_94833C.1
ctgactctcctcccttcttcagtgcagcagcaggccagcggcacgccacccgcctcactcccgcctccgatccgctgcttactcgccacccggagatggccaccgccgccgccttctccgtctcctcgccggcggcctccgccgtcgccgcgcgatccaaggtgtttggaggagttaaccaggcgagaactagaactggctgccgcgtcggcatcacgcggaagaactttggccgtgtcatgatggcccttgcagtggatgtttctcgttttgaaggagtgccaatggctcctccagacccaattcttggggtttctgaggcctttaaagcagataaaagcgagctgaagctcaatcttggtgttggtgcctataggacagaagagctgcagccctacgtgctcaatgtagtcaagaaggctgaaaatcttatgttggagaaaggagaaaacaaagagcacttcagtctctctcggcactggacactgcgtctcgctgcagcattcatacaaagatactttcctgaagctaaagtgctgatatcgtcgcctacctggggtaaccacaagaatatcttcaatgatgctagggtaccttggtcagagtaccggtattatga

SEQ ID NO: 179003 - DNA, 867 bp, Zea mays
  Clone ID: MRT4577_94834C.1
cattgggtacctcgaggccggccgggatatcccattctgatctctcctcccttcttcagtgcagcagcaggccagcagcacgccacccgccgccgccgtcgccgcgcgatccaaggtgtttggaggaggagttaaccaggcgagaactagaactggctgccgcgtcggcatcacgcggaagaactttggccgtgtcatgatggcccttgcagtggatgtttctcgttttgaaggagtgccaatggctcctccagacccaattcttggggtttctgaggcctttaaagcagataaaagcgagctgaagctcaatcttggtgttggtgcctataggacagaagagctgcagccatacgtgctcaatgtagtcaagaaggctgaaaatcttatgttggagaaaggagaaaacaaagagtatcttcccattgaaggtttagccgcgtttaacaaagcaacagcagagctattgcttggagctgataaccctgttattaatcaaggactggttgctacacttcagtctctctcgggcactggatcactgcgtctcgctgcagcattcatacaaagatactttcctgaagctaaagtgctgatatcgtcgcctacctggggtaaccacaagaatatcttcaatgatgctagggtaccttggtcagagtacaggtactatgaccccaagactggttgggttggattttgagggaatgatagctgatattgaggctgctcctgaaggatcttttgttctgctacatggttgtgctcacaacccaactggaatagacccaactcctgaacagtgggagaaattgcagatgtcattccagagaaaaagcatatgccatttctttgatgttgcatatc

SEQ ID NO: 179004 - DNA, 2084 bp, Zea mays
  Clone ID: MRT4577_94835C.1
ttttttttttttttttttttttttttttttttttttttttttttttttttttttttttttatccggtaatgtcattgtttttttttcattcaagtgtttacaagtctgtagccacgcgctgaccttacagttacaggtaaaaaagcacacgagttttagttcagcgacaaaatttttatttatccaagttacaccagatggagcacaacggaagagctgtatagctggaaggacccaaaaatcccagcctagcgtccacggaactaaacatcaatagcttgaccctcaactatcgtacctcagcctagttcacattatggaaggaatcgatgatggcgtcggcaagataatcacacttagccagggacagcccagctaacgagatccgcccatccttggtcatgtaaatatgccatttatccgtcatgttgtcactctgcgctttgttcaagccggtgtaggagaacatgccaatctgcctcagaatgaaagaccagtccttgccgctcttgtccttggcagacaaactgtcgtagagcttctgtcttacattcttgatccgtccagccattagctccatctcttgtttccattcaccaaacatggttggatcaccaacaacgttggcaactatcttggcaccgtgaataggggggttcgagtacatgggacgtgccaatcgtttcagctggctctttaccctatctgcaacttctggtgctgagcacacgacatttattgcaccaaccctttcagaatataaaccaaggttcttgctgtaagattgtgcaacaaacacttccatgccacgcttaacaaaaagcctgacagaaaatgcatcttcatcaaggcttccactggcaaaaccctgatatgcaacatcaaagaatggcatatgctttttctcttgaatgacatctgcaattttctcccactgttcaggagttgggtctattccagttgggttgtgagcacaaccatgtagcagaacaaaagaaccttgcaggagcagcctcaatgtcagctatcattccctcaaaatccaacccaacagtcttggggtcatagtacctgtactctgaccaaggtaccctagcatcattgaagatattcttgtggttaccccaggtaggcgacgatatcagcactttagcttcaggaaagtatctttgtatgaatgctgcagcgagacgcagtgatccagtgcccgagagagactgaagtgtagcaaccagtccttgattaataacagggttatcagctccaagcaatagctctgctgttgctttgttaaacgcggctaaaccttcaatgggaagatactctttgttttctcctttctccaacataagattttcagccttcttgactacattgagcacgtatggctgcagctcttctgtcctataggcaccaacaccaagattgagcttcagctcgcttttatctgctttaaaggcctcagaaaccccaagaattgggtctggaggagccattggcactccttcaaaacgagaaacatccactgcaagggccatcatgacacggccaaagttcttccgcgtgatgccgacgcggcagccagttctagttctcgcctggttaactcctccaaacaccttggatcgcgcggcgacggcggaggccgccggcgaggagacggagaaggcggcggcggtggccatctccgggtggcgagtaagcagcggatcggaggcgggagtgaggcgggtggcgtgccgctggcctgctgctgcactgaagaagggaggagagatcaggatgggatatgacgcccgtcgcttgcggctgtggggagatgaaggccgagcggaggggagcggtgcggccgggcgcggaggggagcgggtggatggcgctggcctcggtgtctccgtcacgaactgcgggccgccccggcagacgtgccctccgccagaaggcttcgggcgcaacttgcgttcaaaaactcgatggttcgcgggattctgcaattcacaccaggtatcgcattttgctacgttcttcatcgatgcgagagccgagatatccgttgccgagagtgagtcccggcccggccggcc

SEQ ID NO: 179005 - DNA, 564 bp, Zea mays
  Clone ID: MRT4577_94836C.1
gggacaccacacacacaggacacccacaactcgcaggcagcgagcgtctctcctcttgctctccgacgcaccgtgccaaggaagacagagagagatcgacgctcctcttctttgcctccgaggtgcgattgaccgccctcctggagcgagatctcgcctgtagtccctcgagatctggtcacagatctatccgacaagatggtgaagatttgctgcgtgggcgctggctatgtcagtggcccaaccatggctgtcattgccctaaagggcccacacattgaccgcgccgttgttgacatctccaaccccaccattgccgcttggtaacagagacacccttccgatctacgaacccggcctcaatgatgttgtgaatcaatgcacatgcaggaacctgttattcagcactgatgttgagaagcacgtggatgaagctgacatcatcttcctttcggcgatcacccgcaccaagacccgaggccttggatctggcatggattccgaactcatctactgttagagcgctgctccaatgatcgtctatgtctccaagtctgacaagat

SEQ ID NO: 179006 - DNA, 3913 bp, Zea mays
  Clone ID: MRT4577_94837C.1
aacaaaaaaactatgcatccaccagcaccaatttttgtgaacgagaacatgattttgaagatgctatcaccttatgcatccaccagcaccaaagacctaactccgcaaattttaagatgtatacatttgctaaagcctgatatgtgaatgcatgagctatcttaacgcttctatcctgctagccatctctgccatatacaaaagtacaactttttttttcttctttctcgtctgatccagttgtgacaacagctaggccggctccatcactagagcaggacgcggaagaggcctggttgtgcctgcgtgtactgaaggccgtgttccatgaggtactgctcgacggcagcagtcagccgtgctggggtgcgggcgcttgatatgatcatagcctggagtcggcgaccagtggatctcacgatctttcttcggttgttgagctcgtagttcaggacgtgcatggcctcgctgatgtgaagaccacagagatcgattgggggattctgctcctggatgaggccttgaagctctggtatttggaatctttgtcggtatgttgtttctctagctttctcctgagccaacctgctttgtatactgtatagctccttcaatgttagatcctttgctaaagggttgtttcccatcagaaaagcctgtctatccctgttcaagaactgcatgtcgcaggcttgcaaaatcatgaacttcatcctttgattccaaatatgtgtttgccgcagcatcagtttcaagccaagctgctcctgtctgaattccagccatgttttgtagggtattggttgagatcatatcatggtttccattatatgggccacccaacacctgagaacctctgcttgaaccaagaccaggaacaggcaaactagttgtcttataccttcctctaggaacatcgagggatatatgttcacgtccagctgaaggtgaaacaatatcatctgcgagtatagctgaatgagatctatatggactgtttggcagaccaaaagcttcattactatagtttccaagaccattttgggcatatgatgctggtgatggaggacttgaatttccaaacgacagtgacctgaggttctgattgagtcgcccatcgactttactctccagctgactcatgatatccatagtcgtgcttaagctgcgcctgcttccatgatacgcatcagtgaggttgtgcaatgaagccccaatgctagaatctccattgtagtgactggcagtggcatcccttctgcttgtgttataatgtcccccattccttagattcttcacccatggagcagcatttggactcatggaacctgcagttggactcaaaattgcggcttgggaccgttcgtccatataagtagggccagacaagttaatttttgggcgtgtattcagtttgtccctgataaaaggtgaagcatggtgctgcacgcccagtgtctggtttggagaaaatattgatgtgtcaatgccatcattaatcgacaggcctgtgagtgatagactgtcaggtccaggactttcgtcttgtcccaggactttgaaatcaggggtgatgtcgtcagggagctgttgctgccagtactgatgtgcttcttcatcagagttacttcgtaaaatggattctggcttgtctgtgccagattctttagatgaccctgagacaatcatagttgcatctgatttcttggaggaatcactgaaagatctaagggacgaaggaacaaattcctctgcatttggatttagtgcagtgctcttgcttatcatacttatcttcctctcttctatggacatcgctgacggacagatgtacctcttctcaagaatggtaattggtaagattgttacagagagtacggcacaccaaagagtacaactcttctagagtaattgttcgttgtgcccaaaacgaaggcgagactaccgtgcccggacggatctctagaccgagagaagaggagctgtggatgaagtggactgagaagcagcgggctgagtacaggcgcagggagggaggggccggcggccgggggcgggcgggatatcccatcctgatctctcctcccttcttcagtgcagcagcaggccagcagcacgccacccgccccactcctgcctccgatccgctgcttactcgccacccggagatggccaccgccgccgccttctccgtctcctcgccggcggcctccgccgtcgccgcgcgatccaaggtgtttggaggaggagttaaccaggcgagaactagaactggctgccgcgtcggcatcacgcggaagaactttggccgtgtcatgatggcccttgcagtggatgtttctcgttttgaaggagtgccaatggctcctccagacccaattcttggggtttctgaggcctttaaagcagataaaagcgagctgaagctcaatcttggtgttggtgcctataggacagaagagctgcagccatacgtgctcaatgtagtcaagaaggctgaaaatcttatgttggagaaaggagaaaacaaagagtatcttcccattgaaggtttagccgcgtttaacaaagcaacagcagagctattgcttggagctgataaccctgttattaatcaaggactggttgctacacttcagtctctctcgggcactggatcactgcgtctcgctgcagcattcatacaaagatactttcctgaagctaaagtgctgatatcgtcgcctacctggggtaaccacaagaatatcttcaatgatgctagggtaccttggtcagagtacaggtactatgaccccaagactgttgggttggattttgagggaatgatagctgatattgaggctgctcctgaaggatcttttgttctgctacatggttgtgctcacaacccaactggaatagacccaactcctgaacagtgggagaaaattgcagatgtcattcaagagaaaaagcatatgccattctttgatgttgcatatcagggttttgccagtggaagccttgatgaagatgcattttctgtcaggctttttgttaagcgtggcatggaagtgtttgttgcacaatcttacagcaagaaccttggtctatattctgaaagggttggtgcaataaatgtcgtgtgctcagcaccagaagttgcagatagggtaaagagccagctgaaacgattggcacgtcccatgtactcgaacccccctattcacggtgccaagatagttgccaacgttgttggtgatccaaccatgtttggtgaatggaaacaagagatggagctaatggctggacggatcaagaatgtaagacagaagctctacgacagtttgtctgccaaggacaagagcggcaaggactggtctttcattctgaggcagattggcatgttctcctacaccggcttgaacaaagcgcagagtgacaacatgacggataaatggcatatttacatgaccaaggatgggcggatctcgttagctgggctgtccctggctaagtgtgattatcttgccgacgccatcatcgattccttccataatgtgaactaggctgaggtacgatagttgagggtcaagctattgatgtttagttccgtggacgctaggctgggatttttgggtccttccagctatacagctcttccgttgtgctccatctggtgtaacttggataaataaaaattttgtcgctgaactaaaactcgtgtgcttttttacctgtaactgtaaggtcagcgcgtggctacagacttgtaaacacttgaatgaaaaaaaaacaatgacattaccggatattaatggccaactggccggtatgcgcttaaaaagtcaaaaaaaaaagcggccaaaggtgcgctccccaaaggctgcccaagtatagtttccaagaccattttgggcatatgatgctg

SEQ ID NO: 179007 - DNA, 955 bp, Zea mays
  Clone ID: MRT4577_94838C.1
gggtacctcgaggccggccggggacccgtgaagataaattttggtccaaagatggttaaagatgggttttagcttcaagccatctggcctgtaatattgattggtgggtggcttgtggctaaaaccaatttttgagaaccatctatgatggtaaataatagctatgagatctgagggacgtgcgccgtggccgggatcatgtccgacgccaacatcctcatcaacaccgcccgcctccacgcccaacgctacgcgctctcctaccaggaacccatccccgtcgagcagctcgtccagtccctctgcgacaccaagcaggggtacacccagttcggaggcctccgcccctttcggggtctccttcctattcgctgggtgggacaagcaccacggcttccagctctacatgagcgacccatccgggaactatggcgggtggaaggccgccgctgttggggccaacagccaggccgcgcagtccatgctcaagcaggactacaaggacgccttgacccgcgaggaggccgtcggtctcgcgctcaaggtcctcagcaagaccatggactccaccagcttgactgccgagaagctggagctggccgaggtatttctgcagcccgacaccggcgaggtacagtaccaggtgtgctctcctgaggcgctggggaagctgcttgcaaagtccggcctgacacagccaacacccgaggcataatgtactggtttgctgtggcatgtgatgccttctactgctcttagacatggtttaagcagttatgcttctgttgtgtgaacttaaatattcgacaattatgtgttctatttttgtgttgagcatccttgatccgttaatgtttcatctgtaatagtgcattgcattgaattggttgcaaattgttgatctctatctgctctgctttattgttggcaaaaaaaaaaaaaaaaaaggccccta

SEQ ID NO: 179008 - DNA, 490 bp, Zea mays
  Clone ID: MRT4577_94839C.1
aagatgaaaaattcggataaacgccacaatgaccggatcgctacatcatatatcacaatgacggagttgaatgcgcgctaagcactcacttccccactggatctccgaacctcaccagcaacaaggaccatgttgccgaacccacacggccacgccctcgaaaccgaccactagcacccccgcggaccctgcgattagtgaacgaatcccgggcttgtgctgaacacgaccacgaccctacacgccctcattctacatccaatatcagcaaaattgactaacttcaagaaaccgagctgactgcgactatggagtaattagccagtacaacggaaggggcgaagcccagctcgcacccagttatcacctggcctatctggaccaccgacgcttggaggaggcagccttacatgtacctggggctgtatcataactgttgcatctgtgtaccagaccgcattgtcacccgaagtgttagcgcactcctggc

SEQ ID NO: 179009 - DNA, 859 bp, Zea mays
  Clone ID: MRT4577_9483C.1
ctggctctcctcccgcccggccgcccccaccccacccaatcctaccccgcggggggaattctctctcagttctctcggcgacgactgggagaccgccgccgccgccatcctactccaggtgccctgagaactcgatcgggctcttcgctggcgacgaccacccaccaggatttcagtgcaggaccagtacctgatgcgatcaagagaaaactagctgccgagaccagtgtgcctccacaacaatcaagtttcagctgtgtaactggacagaagcagccccaaaactggtaccccacaaagaaaaaggtgaaagttccacatcttgcgtcgcagattctgcagtgtcccagaccaaacgtggtgccatccttctggtgcaaaatctgcaaggtcgactgtgtcaccgagttcaatttcagcgctcacgttggaggcaaaaagcacaaggccaaaaagctagagattctaggtaagaggaacgctggggggcctgctagccgatgcgcaggcaacaggagcgctggacagagtggacttgcagtttctgggagcagaagcagtgaacagaatgtggctggcagcgttgctgctggaccgaactgtgacatgttgtctgagagcagaactaatggaacagaaggaaatgggtgcactgtccagctatgagcagcttgggtttcactccagtctggtattccaataaaagttcgccttgcacattttcttctcaagggtacagtcaaatggctaggccgctagggagatttcatctgatggattggactgaacaacactagtcagataataaagtgaaacgtatgcagtgtcctatgtgagagcagtacattgtttggacatg

SEQ ID NO: 179010 - DNA, 792 bp, Zea mays
  unsure (1)..(792): unsure at all n locations
  Clone ID: MRT4577_94840C.1
tcgagccangccgggtggccaccgccccaaatctagcaaacggaaatcccatctcgccgccgccgccgccgatgtctcgccgctatgacagccgcacgacgatcttctcgccggaggggcgtctctaccaggtggagtacgcgatggaggcgatcggcgacgccgggtcagccctcgggatcctggcggccgacggcgtagtcctggtcggcgagaagaaggtgacctccaagctcctccagacctcccgctccgccgagaagatgtacaagatcgactcccacctggcgtgcgctgtggcagggatcatgtccgacgccaacatcctcatcaacaccgcccgcctccacgcccagctctacatgagcgacccatctggcaactacggcgggtggaaggccgccgctgttggggccaacagccaggccgcgcagtccatgctcaagcaggactacaaggacgccttgacccgcgaggaggtcggtctcgcgctcaaggtcctcagcaagaccatggactccaccagcttgactgccgagaagctggagctgccgatatttctgcagcccaggtacagtaccaggtgtgctctcctgctggggaagctgcttgcaaactccggcctgacacagaacacccataatgtaccaatgtgatgcctctactgctctcaatgcacttatgccccagaacttggaataaatatatatacaatgaaataacgcgtccatgctgaataatgcatgtgtgaattctcactaattaagtaatgtataaataatcgtattcaaa

SEQ ID NO: 179011 - DNA, 514 bp, Zea mays
  Clone ID: MRT4577_94841C.1
gactctgcttcctccctccccacttcccccaaatcccccacccgaaccctcggaatccctctctcgccgccgctgacccctccgccgatctccccgccgccgacgagatgtctcgccgctacgacagccgcaccacgatcttctcgccggagggccggctgtaccaggtggagtacgcgatggaggcgatcgggaacgccgggtcggcgctcgggatcctggcggcggacggcgtcgtcctcgtcggcgagaagaaggtcacctccaagctgctccagtcctcccgatccgcggagaagatgtacaagatcgactcccacctcgcctgcgccgtcgccgggatcatgtccgacgccaacatcctcatcaacaccgcccgcctccacgcccagcgctacgcgctctcctaccaggagcccatccccgtcgagcagctcgtccagtccctctgcgacaccaagcagggctacacccagttcggtggcctccgccccttcggcgtctccttcctctt

SEQ ID NO: 179012 - DNA, 1399 bp, Zea mays
  Clone ID: MRT4577_94842C.1
ttgggtccctcgaggccggccggggaccagtgcacataaaattttggtcctagatggctaaagatgggttttagcttcaagccatctggactgtaatattgattggtgggtggcttgtggctaaaaccagatttttgataaccatctatgatggtaaataatagctatgagatctgagggaccacgcgtccgcgcagcgagtccctcgcctcgggtcgggccggggaccgcgagacgagatctcgcgctgttaatcctcccgagtcgcctccccctcaagttccacaaacgcaagccccaatctcgccgtcaccaccccaaatccagcaaacgcaaaccccatctcgccgccgccgcgatgtctcgccgctatgacagccgcacgacgatcttctcgccggaggggcgtctctaccaggtggagtacgcgatggaggcgatcggcaacgccgggtcagccctcgggatcctagcggccgacggcgtggtcctggtcggcgagaagaaggtgacctccaagctcctccagacctcccgctccgccgagaagatgtacaagatcgactcccacctggcgtgcgctgtggcagggatcatgtccgacgccaacatcctcatcaacaccgcccgcctccacgcccagcgctacgcgctctcctaccaggagcccatccccgtcgagcagctcgtccagtccctctgcgacaccaagcagggttacacccagttcggtggcctccgcccctttggggtctccttcctattcgccggttgggacaagcaccacggtttccagctctacatgagcgacccatctggcaactacggcgggtggaaggccgccgctgttggggccaacagccaggccgcgcagtccatgctcaagcaggactacaaggacgccttgacccgcgaggaggccgtcggtctcgcgctcaaggtcctcagcaagaccatggactccaccagcttgactgccgagaagctggagctggccgaggtatttctgcagcccgacaccggggaggtacagtaccaggtgtgctctcctgaggcgctggggaagctgcttgcaaagtccggcctgacacagccaacacccgaggcataatgtactggtttgctgtggcatgtgatgccttctactgctcttagacatggtttaagcagttatgcttctgttgtgtgaacttaaatattcgacaattatgtgttctatttttgtgttgagcatccttgatccgttaatgtttcatctgtaatagtgcattgcattgaattggttgcaaattgttgatctctaactgcaaaaaaaaaaaaaaaaaagcgagactagttctctctctcctcgtgcattaaagcttataataatataaactaaaattaaaaaatttcaatt

SEQ ID NO: 179013 - DNA, 396 bp, Zea mays
  Clone ID: MRT4577_94843C.1
acgggagtgagcaacgggacccccacatggcgccaccgccgctgcgccctgttctccccgtacgggagggcccgccgacgccgccatggctacgcgggtcctctacccaaagccgggactccggacccccggggccttcactccgcgtcgaggcaactccttccaaggtccgcatcgacagccccaaaccggcaccggcaagggaaaacaccaaagcagcacccaagcccctcactgccggagtgcgcgggggccgcacccaccgagcggtcctgggcatcatacggcgcatccgctccctcgagctctacgatgctacgagtgcgaattgcgaccacaccagcaacagcggggccgccggcgacgcattccaccttaccatcgacctgtcccggc

SEQ ID NO: 179014 - DNA, 1365 bp, Zea mays
  Clone ID: MRT4577_94844C.1
gcatgtcgcccgacgcccccgaggcggagatcttcaaggagtacgcgaagaagcacgagagcaacaacggcaccaccattcctgccgctgcaaccggcgccgccgcggcgaccgggaagagcacgagcgcggcgccgacggcggacggcgccgggcctctcccgcctctctctctctctctctctcacacacacacacacacgcgcacacacacaaacacacacacacacacacacacacgacgtcgtacgcggcagctagcagcacgcacgatcgatcgccacagcgtacgtactagcacagaggacgacgaccgacgccatggcggcctccttcgcgcgcggcggcgtggcagcggcggcggcgacggcgctggtgatggtggcggcggtgctggcggtgtcgtgggccggcgtggcccgcgcggacttcgcccaggaccgcgccatgtgcgcggaccggctgatggggctggcgacgtgcctgacgttcgtgcaggacaaggcgacggcgcgcgcgccgacgcccgactgctgcgcggggctcaagcaggtggtggccgccagcaagctgtgcatgtgcgtgctggtcaaggaccgcgacgagccggcgctggggttcaagatcaacgtcacccgcgccatggacctgccctcgctctgcagcaaccccgccaccttctccgactgccccaagatcctgggcatgtcgcccgacgcccccgaggcggagatcttcaaggagtacgcgaagaagcacgagagcaacaacggcaccaccattcctgccgctgcaaccggcgccgccgcggcgaccgggaagagcacgagcgcggcgccgacggcggacggcgccgggaggcagcccggcacggtcttcttctacgtcgtgtcggcgctgctcgtctccgtcgcggtcctgctgtgctgatggcttaacggccggccgcggcagcgcatgcattcatggccggccggccggcagggagatggaggtgctactgcacgctgcacgactggaaggaagcccggagacacaattcaagtctttgagatgagcaaacaaaaggacacgagtactcttttttttttctctttcctgtagcctttttgtgtgtgtgtgtgtgctgtgtggcgttgttggggggagttttctctttcctgtagcctttttgtgtgtgtgtgtgtgctgtgtggcgttgttggggggagtttgtgagacgtcggcttgtgctagtgctgacggtgcaccagcgacgcagctctgtacttcccagctgttgggctgtggccttccagcctggggattttaatgtggtggcccgagactgccgacatgtctgtctgaacctgatgattctgatcc

SEQ ID NO: 179015 - DNA, 265 bp, Zea mays
  unsure (1)..(265): unsure at all n locations
  Clone ID: MRT4577_94845C.1
tttttgttgggttnaccatttttttttcggtttcaaaacactattactttcttcattttaccataaaacaccaaacacccgacaacacaacataacaaaattaaataactgcgaaaacacaaaccctttctaaacacaccaccaaaaatagagcccacacaacaaaaccaacatgccccccaaaaaaaaaccgaccatatacaaaggcaacaaacctcaatgctggctaaacaattctgcacctaacaccaaaatgcccaacaac

SEQ ID NO: 179016 - DNA, 489 bp, Zea mays
  Clone ID: MRT4577_94846C.1
atggcccgaaaagcgatgcaagcatcgcctattcatcctgtgatgtctggatgctttccacccgcctactcatcgttgatatattgtcctgttcaaatatggaatggtatgattatgaactcatggaggcgagatctaggtctgctacgaagaagaccctatgtgccatcgcggaccgtccgagcccacgcgcagaccgttcggacgtatgcagaggaggagtcgctcctgcgccaggtcacggaccgtcccagccctgtgccgcggaccatccgtgcctccacagagagcaccgtcaggcggtcctttctattgtttggcgcccggatcggtgccaacaagtggatcacagatagaaatacactcattgctttactgaaagacaacttggccagggctcagaaccatatgaaacaacaagctgacagttggagggtggatcataccttccaggtgggggagcaagttctattgaagctgcagccatga

SEQ ID NO: 179017 - DNA, 149 bp, Zea mays
  Clone ID: MRT4577_94847C.1
ctcatgcgccatggcgggctttgatgcatcaggaattcctgaaagcggctggaggggggtcttactcttccaacaatcagacctatttatggtgacaatgctatcaacaataaccacctcctattctcttaccattgaaaacctcttgc

SEQ ID NO: 179018 - DNA, 109 bp, Zea mays
  Clone ID: MRT4577_94848C.1
gctgtttcgatgattccattaacagatctatcataatatcaacatcgccaaagacgtttctcatatacagcaacttttcacacataaacttttctctatcaaatctact

SEQ ID NO: 179019 - DNA, 694 bp, Zea mays
  unsure (1)..(694): unsure at all n locations
  Clone ID: MRT4577_94849C.1
agcaacgccgagcaatggcgctcgcagccccttcttccctccgcctcctcccgaccacgccatcgcaggcgccatctccgccctgtgttacacatcggcatcagacgtgcttgtgctgttcgaggcggccgagaggcttccactcctgcatgtgggccaaatataccagaaatttgagtgcaaagatcgatcagatggtggaactgtgaggaatgttgtaaggtggagcatcgagaacttgctggaggagcaagaaggtgcaacactgatggtctctgcgaagtttgttgttctgtctaaacggaatatctttcttcaatttgaggaggtcgctgttgaaaatatcaagatcagcgagcaactgcagacactaatagctcctgctatacttcctcggtcatttttgagccttcagatattgcagttccttaaaacctttcgaactcaagttcctgttagtggtcctgaaagacgatcacctggaggattatattatctgtcttaccttgatcgtgatatgctcctgggtcgttcagttggtggtgggggaatattttgttttcacaaaggcacaacctcttacatanaggttttctggtaaccgagggcatatcatctgatggcatgacagctgtccttgagcttgccaacttacaacgggtatatatacccttgcaatgcanatatgtgatta

SEQ ID NO: 179020 - DNA, 254 bp, Zea mays
  Clone ID: MRT4577_9484C.1
agaatagtgagagtggggaaaagaacgagggatcggagagtgctcccgaaggccaggcccaacaacgccggccctaccgcaggcgaaggttcccaccttactacatgcggagacgggtgggcgtcgaccacagtattccaaccctcctgtgcagggagaagtgatggagggtgctgacaaccagggtgcaggagaacaaggtagaccagtgaggcagaatatgtatgggggatatagacaatttcgcgggggcc

SEQ ID NO: 179021 - DNA, 316 bp, Zea mays
  Clone ID: MRT4577_94850C.1
tttttctcctttaacacgacaacgaacttgtgtggcgggtggctatgcatgaatcggacaccacatttcggagcttgccctgcatattatcatgacaagcgagcacaaactaagagcctgtacaacatctgtagcatcaacattggtgtctagatcaggtagagcaacatctggttgcttgaaacctgaaaaccccactacaacagattacacttccatattagctctacctgatggcatggggctgtctgtctacccaagccttaaaaaaaacacctgctgatcaggagagctcatggaccatctagtgccatcc

SEQ ID NO: 179022 - DNA, 1343 bp, Zea mays
  Clone ID: MRT4577_94851C.1
ggcgattgcaaaactcgaggccggccggtgaaccgatccgcggtcgtgcccgtgcccgtgccgcgcgccagcgccacgcttcctacaatcctactcctactgtagtttaatccgcttgcacggaggagcaacaccgagcaatggcgctcgccgccccttcttccctcctcctcctcccgaccacgccatcgcaggcgccatctccgcgctgtgcctcccgcctccgctcgcgccctctgcgggagctccgtctatgccagagactcgccaccgccgccgccgccgccgcggccacggctccattcgcttcctcgcccaccacctccgcggacacggagcggaggaagcacgaactgctacgcgcggttcaggaaacgcggcgcggattcgcagcggggcccgaccaacgcgctgccatcgaggaggccgtcgtggccgtggaggagcgtggtgcggggaagggaacgccgatagatctcgcggcgctcgatggcacctggaggctgtgttacacatcggcatcagacgtgcttgtgctgttcgaggcggccgagaggcttccactcctgcaggtgggccaaatataccagaaatttgagtgcaaagatcgatcagatggtggaactgtgaggaatgttgtaaggtggagcatcgagaacttgctggaggagcaagaaggtgcaacactgatggtctctgcgaagtttgttgtcctgtctaaacggaatatctttcttcaatttgaggaggtcgctgttgaaaatatcaagatcagcgagcaactgcagacactaatagctcctgctatacttcctcggtcatttttgagccttcagatattgcagttccttaaaacctttcgaactcaagttcctgttagtggtcctgaaagacgatcacctggaggattatattatctgtcttaccttgatcgtgatatgctcctgggtcgttcagttggtggtgggggaatatttgttttcacaaaggcacaacctcttacataaaggttttctggtaaccgagggcatatcatctgatggcatgacagctgtccttgagcttgccaacttacaacgggtatatataccttgcaatgcaaatatgtgattatcacctcattctactttttaaagagattgccatgatctactttgaattcgaagagtttacatgcaacatgttttcttttacacaccagttgtggtgcatatgtctggctattggctgtggatatataaagcttcctggatagttctatttcatctgtgttgtacgagtactggaactgtacctacttatttctcattttcaatgattagtaattcaacattacgaccaac

SEQ ID NO: 179023 - DNA, 811 bp, Zea mays
  unsure (1)..(811): unsure at all n locations
  Clone ID: MRT4577_94852C.1
gacctccgagccccgccagcaccaactatcccgcgaagagaaccccactgccgcggccggaaatctcaccagtcagttcatctacctagctcgccgtctcgtcgccagccaccctcctctcgccggggcggtgatcccgccatggcctcctggctcaaggtcgccgaagacttgctcgaagtggtcgaccggagggcgaaaagcgtggccaccgagctgtccgacgagcagactgctcctcagccctcaggatcgaatggccaagaagggcaagcaaagaggggaaagcccagggagaagggtccattgaagctcactaccggggatgcaggtaacaggacagcggctcagaaggagaggaagaacaggcaaccgcctcgggagaggattaagattgagaagatcaaaccttcggcacgtcctgattcatcaaatgatgatgctcttgctattgttagtgccagcgaacctgaagtcacttcagttgatgttaagggagcgaatgctgagagcacatccgacaaagtagagaacaccactgttgaccttaaaaatgatgtagctgctaatgctgtcgataatgcagttgaagtccagtcaatagagagaacccctgaggatacaggtcccatcacggatcatgttgcagattctggcaatttggagagtgcttctgaaagctctgctccttcagtntcagacgaaaaaatgagccaagcagcagtaaccagtctactgacattggtttagcagtcagtntggaaggataagaacagctgtggctgttaccaggagagactatctctggagt

SEQ ID NO: 179024 - DNA, 175 bp, Zea mays
  Clone ID: MRT4577_94853C.1
ccaagccttccggccttggcttgccgaacccccaactttttgggcgcccctttcggaaggaagggttcattccggttaacaacttacttcggaacttaaaaatccgggaattccttcatttccaaggggaacgggccctccacaaaggggttgccgaccaagttttacaacggcc

SEQ ID NO: 179025 - DNA, 156 bp, Zea mays
  Clone ID: MRT4577_94854C.1
ccttccggaactttttgttaacattttaaggaaactgggattcgatcctctgggtcggaaatgattctacaattctacttaccaaagtaaggtttatgacgaatatgattgtttaccttacaatgatccattttaactacttgatgatgatttttt

SEQ ID NO: 179026 - DNA, 486 bp, Zea mays
  Clone ID: MRT4577_94855C.1
agcagtggtaacaacgcagagtactttttttttttttttttttttttttttttttgtagtctcgatttattaattgtaggactaaatggatatgtcatcaacaaccatttaatgctcatggcttctccgaaaacttgattttggccgtacacctatacttcggaccaggataaatgagctggaatgtggcatggtgattttggcctggtctaggcacgacacgacccgaagcatgatgggatgtgctaggaacgacataatgtacatggtgagatgtcccttccagccctggaggagccactgctgatccacatcgatgacaaagtccttgtggtagccctccttgaccaaatcactcaaacacctgaccgtgctaggatccagcggcagctgcctgagccccgccctgctgcaaagcacctgccaccccgcgtactctgcgttgttaccactgcttaagggcgaatccagcacactggcggcgta

SEQ ID NO: 179027 - DNA, 1380 bp, Zea mays
  Clone ID: MRT4577_94856C.1
atgggccggatcacacgcgggcctccattctggacggggtcgcaagatgagacgacctcgtcacaggtcttcgtccggtggcgtatgagacgaaggcgagtacggcgaaggcctcgagcgaagggtggcgtcttcgccttcgccccaacagagaggatgcaaaagtatgggttgaagatgaatcccctcaagtgcgcgtttggggtgtcgattgggagatttttaggctttatcgtgcatgagcatggaatcgagattgatccgaaaaaagccggaaaggttgaatcgttcacaccacttgttcggcttaaacatgaatcagattttaggtggggagccaaacaaagagaggcgttcactgctactaagaaatatttgttgacaccaccagtgttgaaggcatccaaggcaggagtgcctttcagattgtatattgcagcacaagaaagggtgattggtgttgttcttatacaagaacatagcgggaaggagagcgtggtggcttatttaagtcgtcgcttgctggatagcgaaaatagtatgggaataaaagatgtagacgtgttcggggattcgttgcttgtggtacagcaggtgataggggaattccagtgtttagatgatactttcactattgtgcatatatctagagacaagaatagtagagctaattttttggcacatcaagcattgggatataacatagagagagggcagttctttacccagaaggagccgatgtttgcaggcatcaatagtatagaaaggagtaagtcaggccataaaaaattcgaggccgagcagcaagatgggatgaataatgctgattggaggaaacccttaatcgaatgtctgcaaaaccccagcaataccaaagatagcaatgttcggaggcaagttttgaagtatactttaatggaggagcatattgtgtacagatttggcattccgcagacattaacaatagatcaaggagttgcttttatgtctcaccaatttaaagaatttgccaagtctttgcagattaagttgttgaattcgtcgccatattatgcacaagctaatgggcaggccgaatctagcaacaaagtgttgatcaggttgataaagaagaagattgcaaaaaaaccaaagaggtggcatgaagtactgtccgaggcattgtgggctcatagagtttctcgatatggagcaaccaaagtgacgccatttgaattggtgtacgggcaagaagcagtgctccctattgaaggtgggttatcagctgtagtatatggtgagctaatgctagacagaattgatgggaataatgaaagtcgattaacagccttaagggaaatagagaaggaaaagctgagagtagcgaaagcttataattaa

SEQ ID NO: 179028 - DNA, 766 bp, Zea mays
  Clone ID: MRT4577_94857C.1
gccggccgggtcgaaagatcctcattcctctatgcgtatcgcgagcttcaacttcaccaccacgctgccgacatacgacatgcgcaggctcatccgctatgccgtgcgaacaaacacccatcataactatgacgccggaaacaatcctatgtaatgcccttcctgcaccccgcgccctgctcgaagtacagaaagcagccgtccatcccccgactcacaacgaccactcgacctgatgaagcgcgtcgccaccgctactacgccaagtactctcattgtgctcaccgtgcttccgcaacaccggcgggaagaactaggcctgtaactaaaccatttgcctatcaccacccataatatctatacatcaccccaatcattttccttatgaacaagatgtctgttattgatgagagggatttactagagatggtcgtactcaatgatctcaacttctactggctgaatgacgatagcacctacaactactcttgagatcattcttacatattgatttccacactaccatccgcaatgtatctatgttcaactgaattgtatgctcctttcctcatgaccgagagctccgtggtctcacctccgtaggcaagaagttcctcgacctgtagtgcaacgcccacactcaccacaataataatccggcttataggtacacctgaaatcgaaaccagaccctttccctccgtcgctaccgatgaacacatacatcttgatgctctggtactgtggaacctgactcatgcatggt

SEQ ID NO: 179029 - DNA, 1776 bp, Zea mays
  Clone ID: MRT4577_94858C.1
atggcccgcgcccgcgcctataaagcccccagggaccttgaccatacccctccgcacgcgctcgacctcaccggagcccaaacccaccggcgtttgcccgtgtacgtcgtgtccgcggctgcccgatccccctgccaccgtagaccggccagcagaacccttcccagccccatccgaccctcggagaagactgtgcacacctcggtgaagctccccgagcgaggaatcgaagtttgcttcgctggagaggccagtccacggtcgccggactccacccgaccgccgcgcgagcgtagaccggactgtaacctcgctgacggagagtacgtcctcgtgccggagcaaggagctgctcaggaggtagccccggatccagccccagagcctgcaccagaggatctgcctgccactgctttggaaggcaagccccgcagattgccctcctcacgcgacctgagacgaggtctcccattccggttatggtgggtacaagtgcggtcactgcacgacggcagtcggggcatcaacctagagatttacattgatgatgttgtggtgaaatcggctggtttcgatgatcatgtagctgatttacggttggcattggagaggatgcgaaagtatgatttaaagatgaatcccctcaagtgcgcatttggggtgtcggctgggagatttttaggctttattgtgcatgagcatggaatcgggagtgatccgaaaaaggttgaagcgattggaaaattagaagagccgacatgcaaaagggatgtgcagaaattattagaaaaaattaattacttgaggaggttcatatcaaatttagccggaaaggttgaatcgttcacaccccttgttcggcttaaacatgaatctgattttaggtggggagccgaacaaagagaagcattcgctgccattaagaaatatttgttaacaccaccagtgttgaaggcatccaaggcaggagtgcctttcagattgtatattgcagcgcaggaaagggtgattggtgctgttcttatacaagaacatagcgagaaggagagtgtgttattgaattcgtcgccgtactatgcgcaagctaatgggcaggtcgaatctagaaacaaggtgttgatcaggttgataaagaagaaaattgcagatcagccgaagaggtggcatgaagtgttgtcagaggcgttatgggctcatcgagtatctcagcatggagcaactaaagtgacaccatttgaattggtttatggacaagaggcggtgcttcctattgaggtgaatttacaggcttgcagagtagcttgtcagaattctttatcggctgaggtatatggtgagctaatgctagacagaattgatggaaatattgaaagtcgattaacagccttaagggaaatagaaaaagaaaagctgagagtggcgagagcttataataaaaaggtgaagaagaaatcgtttcagattggagagttgaattgggaaggcccattcaaggtggtaggcattgtacatggaaacgcatattttgttgaagatttacaagggaaaaagttatctaaagccctcaacggcaagtatctgaaaaaatattatcctagcgtctggcaggggaatggtgatgcagggatgtacgaagacaaagtgaagcacgcatctgaaaaaaggaagacaagtaaaaagattattgatgcaatgaagggtatgcggctggaaatacgtaacaaagcaagccatgcaaaccggagtaaaaacggcgtgggaatagaagtcagttag

SEQ ID NO: 179030 - DNA, 292 bp, Zea mays
  Clone ID: MRT4577_94859C.1
gaaccgaagaaatagcgttcatttatgtacggaagcagaaatacgtttatacaatatatttttttatgtacggaaaaatacgtattaataaattggtaaaatgcccagcggcaaagatacatacatatatatagagttggcaggtatatatagtagtacccaggtccgtccagcgcacagcaggatgatactactagctaactggttcttaaatgacaagcggtacaattacgcctgctaaaccgacacctattgctatgagtttcacagccacctgagagaatttttagcg

SEQ ID NO: 179031 - DNA, 868 bp, Zea mays
  Clone ID: MRT4577_9485C.1
cattgggtacctcgaggccggccggggcccggttggcccctggctctccttctgccgcccggccgccccccgccccacccaatcctaccccgcggggggaattctctctcagttctctcggcgacgactgggagaccgccgccgccgccatcctactccaggtgccctgaggactcgatcggagtcttcgctggcgacgaacacccaccagttacaacctactgcaacttcttctgcaaaaaagctatcaggtgtacaaccatgtacttcaccatgtccgcccctgcaatgtctctatgatcctccagctacggtagacgccccgttcgctagctgaggacctcctggttcctgtgagcaggcggcgtggttagctgctgccttcaagcatgcagagacccaatgcgccgtcggcttgcgctaccatcaccttcgcggaggctctaaggagggagatggagtaccgcaagtgggtggagaggacccacccacatctgctcgtcggaatctgcggagcccctgaaatgcagagagatttcagtgcaggatcagtacctgatgcgatcaagagaaaactagctgccgagaccagtgtgcctccacaacaatcaagtttcagctgtgtaactggacagaagcagccccaaaactggtaccccacaaagaaaaaggtgaaagttccacatcttgcgtcgcagattctgcagtgtcccagaccaaacgtggtgccatccttctggtgcaaaatctgcaaggtcgactgtgtcaccgagttcaatttcagcgctcacgttggaggcaaaagcacagggcaaaaagctagagatctaggtaagagaacgctggggggctgctagcgatgcgcagc

SEQ ID NO: 179032 - DNA, 252 bp, Zea mays
  unsure (1)..(252): unsure at all n locations
  Clone ID: MRT4577_94860C.1
cacgctcgccgggctttccggtcccgcgcggccgacaccgtcctcagtcttcctcttctcgtctctcgtaagcgccgtcggcatcctgtgttcgcctgccgcggctctggccgcattccgcacatcttgccactacttcgaccgccgtccgcgnctcgtgcagatgtcgtgaacgtcgactagcgatgtccgctacgctcatgtcgtgcgactgcgccgacaacggcctcgaatcacacgtagtacaactat

SEQ ID NO: 179033 - DNA, 467 bp, Zea mays
  Clone ID: MRT4577_94861C.1
gtttaccaccaccaccatccacatcccatcccacgcattcacatctcatcaacactcatcctcgcccaaaaagagctcagctttgtccacattgctactcctatccacctcgccagcttaagactattcaaaacaatagactggaagaactggaaatgatggtggtaatgctaataataatattgggtacaacaatgcgaaaaacaatatatctaagaacatcaacaataatgctaagaacaataacaataatgctaataagaacgacattataaataacaatgcgaataacaataataagaacattaataatatttcagtttaagatggccattgtcgtggtattaatgatctagaaggtaatggacgtaaagatcgttatagtatacgatatgaagaatgttctccttgtcatcctaatcctaatatttcaagagtatgagaaatcgaacttcgtcgaggatcag

SEQ ID NO: 179034 - DNA, 887 bp, Zea mays
  Clone ID: MRT4577_94862C.1
gtttagtctactcaagccatggtgttgaaacttgaccatacttgtctcaatgagactttggagtgaaccaaatgagcttatgttcctatatgactactagctagaagttagagcctagatgatggctgcttctgttggcgtgaaagctcgagtgctcctaaatggtcgtcgtattagctgatacgacatctacccgatgcaatagataatattgtttacacgcgtgagtccaaaattgttggctttgggtcggagcagttaatgcgagaagtgtattttatcacttctgagtgcaaccttttttttattatttttccgagcttctgcctcttgcatatgttgtagattctcgccgagaagggagtagtagtattacctgatatctatgctaattcaggtggtgtggtcgttagctactttaattgagtgggttcaggtaaaatgcatgttcgtcgctgcttcattgctcgattggttccttgctctaatctgctttcttgtgccatgttgattgatcgtgcagaacattcaaggtttcatgtgggccgaggagaaagtggacgatgaactagaaaaggacatgagcagtgcttttcaacacatgaaggccatgtgcaaatctttggtgctgccgaagtgtgtcgtgacattggaattgcgggtctagaaaaacaagctcattagatttctgaaaaaacattagaagttattagattggtagcatttttttaagatttaaaattttatagaagtcatcattttcgtttattggaagaaatatttttggaaaaaaaaaaaaaaaaaaaaaaaaaaaaaaaaaaaaaaaaaaaaaaaaaaaaaaaaaaaaaaaaaaaaaaaaaaaaaaaaaaaaaaaaaaaaaagggggg

SEQ ID NO: 179035 - DNA, 714 bp, Zea mays
  Clone ID: MRT4577_94863C.1
atggagcaggccaagtgtgcgggttctctgagcaactgccaggcggttgcacgttgtggcaaagtgataccgcttggcgttggcagccgtgcgcccgtgctgctgcccggccggctgtcccccgcggatcaggcaggcaggcaggcacgtgcccgcatcggtggaccgttcagtaacgcggattccagattccactctcgtttttaccacgaattcacgaaaccctgggggtgggggttccagttttactgtctatctggatggcgtttcgtcccgcggctcgtctacgttcagtgctcagataagcttgggtttgctcagataatccagtggagatcccatgttccccatgcagctttgctgactgggcgatggctccatgaccacctttttttttggagtggcagttttggtcggttcatgcacacacatgcgtcggaggtccagatctcattgttcacaacccggttattttttttggttgccctaaaccgaagttcaaccgtaattagagatgtcaatggggacccgatacccgccaacccatggggaattcccctattagggtacgggtatgggacaaaaattgtccccatgagtatggatatgggacaaaatctccacccattgggtaaacggctttatgctgatgggggttaccagctgagaattaggcgtcttgagggtacccctaattatggtccccgacagtag

SEQ ID NO: 179036 - DNA, 572 bp, Zea mays
  Clone ID: MRT4577_94864C.1
ctcgaggccggccaggccgggatttctactattcagcgcataaaccacaggaccggaagcaacagaaatgccaagcgatcccgccgccgcgtcgccccacatactctcctacatcactgaccttctgtttctctttccaacaatcaagatgaaccaagcaggtcgcgccttggcaagagtcaaagtgtctgtggatgtacctctattcgaagtgccgcagacccccaatacctgtaatattcaccaaatgcaaatgctccacctgctgctgcaatgctccaactgataataaaccacctgctaccaaacctagatggcacgcagtcaggcttattgttgaaaataccacacaaacaaatgactaccacagtgtgccatccacacataaccgaaaacttccttacggaccgcatgtccagcaaagactgccccgctcctggtctatacatcctatctgtaatacacggtagatgtacacttgtgtctctgacctacatataagcccccactgtaaaactcatgctttgtctgtatgcatgaacgagacgattcatttcatgcagtacgcaaac

SEQ ID NO: 179037 - DNA, 351 bp, Zea mays
  Clone ID: MRT4577_94865C.1
cattaagcagcaaaaccaaaaataacccgggagtaggggaataagcagacacaatacgaccccgtacacgtaccacttattaggactgtgacagttcaggtcaaaatgattggcaaggtttatattatgaatcacaagtaggagccataaaaaagcatgattgagcgcaggcacaccagaccagaccagaccagactgaaagcttctttcaaaacagaggaggcgcctaatgcagaagacggcttttccgtcttgaggggttgtaccactttcaaggtgaagtcggggtcgttccttccaaagtgcccgtaggccgtcgtattgaggtagcgcccgttgccgacttttttg

SEQ ID NO: 179038 - DNA, 287 bp, Zea mays
  Clone ID: MRT4577_94866C.1
tgttttttttttttttttgtttaaaaaaaaaagggttttgccgatacatagcccgaattacaggattgttgttagaacaaaaaaagggggctggttgatttttcattgggggggcccactttcccgaaatttaacaccaaaggggcttattaacctcccaattttaaggttacccttttcccccataggaaggatgttttttgggtgtccgaaaaaaaattttaaagagcaaaccacactttggaaccttttttgtaggggggagtttcaaaacgggcccccaaaga

SEQ ID NO: 179039 - DNA, 574 bp, Zea mays
  Clone ID: MRT4577_94867C.1
ataaaaaaaaaaaaaaaaaaaaaaaaaaaaaaaaaaaaaaaaaaaaaaaaaaaaaaaaaaaaaaaaaaaaaaaaaaaaaaaaaaaaaaaaaaaacccaaaaaaaaaaaaaaaaaaatttttttcctttggcccgcaaccccccttaggggcgaatttttgaaattttccttcccctttgggggccgttggaccttccttttaggggccccatttccccttttagggggtgtttttacatttaattggccgtgtttttacaccgtggggttgggaaaacccctggttttccccattttattccctttgaaaaaattccccttttccccatttggcttatttccaaaaggcccccccccgttcccctttcccaacgtttgcccaccttaattgggaattggcccccccttttaccggccctttaagcccggggggtggggggtttccccccagggggcccgttacttttgccaggcccttagcccccgttcttttggtttttttcctttcttttttccccagtttccccgtttttccccgtaaagttttaattgggggcctccttttggggtccca

SEQ ID NO: 179040 - DNA, 446 bp, Zea mays
  Clone ID: MRT4577_94868C.1
aggacagacaattaactctgttcgtctaggtctaacgaggctcgatatgctgcaagaagagtcactgcgcagcgatggtagggaaggaggaggacgtccgtctgccgcgccacaagttctcagagcgccagcccatcggcacggtggcgcagggcacggacgacaaggactacaaggaacccccgtcggggccgctcttctagcccggagagctcaagaactgggccttctaccgcggcgcaattgccgagatcgtcgacaccttcctcttcgtcgacatctacgtcctcactcggatgagggtatccgaggccagctccaagtggtccatcgctgggaatacaggggatcgcctgcgtgttccgagaaatgatcttcgaccacgtctactgcaccggcggcatctacggcggccacatcatcgcggtggtgcccttctagttgca

SEQ ID NO: 179041 - DNA, 436 bp, Zea mays
  Clone ID: MRT4577_94869C.1
ccgacgcgtgggtcagtatcaccgtcagggatggagagacgtattggcgaccgcatatcgaaggcacagaagcacagcacgattgactaagcggcagtaaaatctcatatcacaacttgctcgcttcgagtgcacgctatttcaatcgcttaatttaagcacgcttcatactacatgaccagacgcacgtataaaatcgtcgtcgaactaagcttgccaactcagcaccgccacacaggatatacagagagatcgaggcctgtcacattcatttttcgactcgatgcacctgcatgcgccggttggctaccgacttcgtgccgccgaggaactcgttcgggacgaccttgatctgcttgcccgtcttggacttggcgatcatctggatcgtccgtgggttggtgagcctccgcaatttggtgcacgtgccggacac

SEQ ID NO: 179042 - DNA, 443 bp, Zea mays
  Clone ID: MRT4577_9486C.1
tggcctggaacctttgggctgatttatgtgcttgtggatgtgcgggaaagaaagcctcatacgcgtaaagtactcttcgtcgggtcttcagtcgtaccggattccacagttaggtaatctcccacgaagagacctctcacacggtcggctagtcggggtccgatttcttcataacgaagtctcgctccggaggcttaagagtggaatcagaaccagtatcataaaatagcgaagtcgcggttaacgttcccagtcgtctaactcacactctggtaacatatccctcggcgcatcgtctcgtctagccgatgcttagcgagaaggaagaaaccgaatagataccgaagagcctccacaccatctgcccggactgtctaaaaggcggactacgcttaatcgcctcgcatgcacctgtactagattccttgaaaggagtatgcgcg

SEQ ID NO: 179043 - DNA, 376 bp, Zea mays
  Clone ID: MRT4577_94870C.1
tttgtttgttctgaataaacttattggagcagctaacacgtgaaggtgttttattaccgacgagtcggacaccaagcagaggctatgtgcaccgcaaacaggtgggggcgaaacacagagcgggggggtactaaaagggcgtagctttacgaaaaacgggaccggcgataaaaaaagggccgtttaggtaaagattcaccggggagacctaaagggcgtatggtttaacaatagacaccggctgtcatggcgggggacacagctttcttacagagggacacaatagggatggcaccagagaccgccagtatgtttctaaacagggaccacgacagcctccaagcggagggtctggaaccagacagaggggggccgt

SEQ ID NO: 179044 - DNA, 512 bp, Zea mays
  Clone ID: MRT4577_94871C.1
gcgtacgccagctagcctctagcaaagcagttgccatctaccgaccgccgaatgccaaacagaccgacgagctaacagagcgggaggcacctccctggttagggaacatgggccgcctgcaaaagcgggcagtggcgactcgcggccgtggaggacttggtgctgatggccggaggacaggaacctcatgagcaggcatcaccttcgggcaggtggcggcagacatcgtgccctgcatgtgctacgctcgcggccagtgctctgggccctccaactggctgctgcagcggcgttaagagcctcaacaacgacatccgataccaccgccgaccgccctgcctactgcaactgccttaataacgccgccaccgaccacaacaagcttaacgccgactacaccggcagcgtccacaacgagggcattgttggtattacctacgacatcagcatcttcaccgactgcttcaacgagaacggaaccctatacgacaacaactgtgcctgtaatgcta

SEQ ID NO: 179045 - DNA, 693 bp, Zea mays
  Clone ID: MRT4577_94872C.1
agtttactctgaccgccgccgccgggtctccgtcgccgccgtcgccgccggcgccgccggttcttaagcccgtttgttgaccctgccgccgccgtagccgtcaccgtcgccgggtctcccttctcctgctcatcgcccctcaggtatctcaccgtggatctcactcatattctgttgatccagttccccttccgtttagatcctcgatatagtataggtagctgatttggtgcgtgcgttcggtggaacagagagtgaattccaagcctacatagcagagcagtcccaccgaaccctctttcttctgcatcgtgattaggcaggccttcaatcctaccatgtgttcatcagccacttcttcttcttatgcacatcttatcgaatactccctccctccgtataaagttgagacacttattttgggacagagggagtactgtactactcctccgtcccataatataagaacgtttttgacactagtgtgctcattaagcaattgactgcagctcacgcattgccctgtttagtcttttctttcttttcaaaggagggagctttgtacatcacaaagttatattgttacagtctctctcttggcagtatgtcaacacaggcaacctgattaaccccctctcttcacatgttagattttcagtttttcacattggcagtaggaggatatcgacacct

SEQ ID NO: 179046 - DNA, 294 bp, Zea mays
  Clone ID: MRT4577_94873C.1
ccctaaccccattttattttattacgggggtaaaattttttatttgggcccaatccatgggggaagaccctggttaataaattaaataaaactttcccagggggaggacagtaaaattttttcattggtgggccccaccccccaaagaaaagcctaaggcgaccgggggttttcccacgagctcaaagctttgcaattgtttgaagtttttccacgccttttcccacaccttggccccgaacagtttttttttgccgccgccggcttttttaaccttaaagggaaaagggggca

SEQ ID NO: 179047 - DNA, 387 bp, Zea mays
  unsure (1)..(387): unsure at all n locations
  Clone ID: MRT4577_94874C.1
gattanattttaaatgaacaacatgaatatccgataggatggcttacaagactcttccgacaaaaagataaacaccaaggggaagggttattgcagggaaagaacaaggctaaaaacagaacctacccacaaccaagaacatgtgcagttaattgggaaacgagtgttgaatattttaaaagaaggccattactaaacggggtcccggggcgtcgaaaaaaccgttaaacaagaaacaaccacctgcgagggtgattattggacaagaaaaaattccagaaggcgtttctttcctgatcagaaaccattggttatagcaagaagctgcatgcgcacacctgaggaaggaccagaagctggggcaaacggtttttacatggacttgcc

SEQ ID NO: 179048 - DNA, 409 bp, Zea mays
  Clone ID: MRT4577_94875C.1
acaagcttttttttttttttttttttttttttttttactttattcatttctttgttgctttctctttttattttttttctttcaaccaactagcagcatttaactttgctgcttatttacagcagcagcaactactaccagccagccagctgactgatgagagccgtgctggctgcttgacacaccaacagctggtggcggtctacctgcacgcaatgcctaccgcgggcaccctcttacaactgccacaatcgctgccattcaaccaactagctttgacaaacccagcccggggcgaccaacaacgcatcatagcaaggagccctgccctagatcgcataggagatatggcacagtgcggaactgctgcggatgaggtgagaggctacccagaaccacgaaaggccgg

SEQ ID NO: 179049 - DNA, 414 bp, Zea mays
  Clone ID: MRT4577_94876C.1
ataaggggccgaccaaggcgtccgggacgcttggccccccgggacggtttaagttccttcagtaacaaggttatggcttgggaggccagggttttgtttaatggggaccttgtaaaaagggtcctccggtgtttgggcccttaaaagatttccgttgccgtgaccattttcgggggtcttggcattgccgggacatgggaaagggaatttggtgcaaaggttaataattgtaaaataatggtggagaagtatctgcttgtaggtcggatttttggttatcaaaatcttttgtgtttttaataaacattgatttatctttcccaaatttgtgttttctatttgtttaatggtgaaaccttgttaattgtttttcttcttataattatgatactttttttgtcaatattatttttt

SEQ ID NO: 179050 - DNA, 1457 bp, Zea mays
  Clone ID: MRT4577_94877C.1
cccggcttgggttgcccaccgagatcacccccctcaaaccctagcccctcttctcctcctctgaccatctcctcctcctcgcgcttcgccttcccaatctcgctgccgtttcttgggcctgggactcgcgctctgctatctgtgtccgcgtatggcctgcgacggcgccgccagaggccgccctcccaagcgccccgcttcgggaggcctggcccagcccaacgtcgtcacctacaagagacgccgccgcggcaccggcgccaacgccggccacagcgccgtcacgtctggccccgaccccgctgaaatggtactgtcccagctgcgttgagccagacgtagctttgaagcataaaaaccatggcaggtcacatgaaggctgtgatgtatgcgagtggctcgtggtgaagccagaagagcctgctgaagatgttagcgagcctgaactggcggtcaaaacgcaggagagctcagtgtcaagcatgggcgaagacagcgaaccagacctctcaacgactgctctagcgaacttgtgcaagaactgtggcacatgcgaagacgaggacaggaagttcatggtatgcgggcatggtttatgttctttcaagttctaccatgtcctgtgcctgaaagagagacagattgcaagcgagaagcagaagaatctaaagtgctggtactgcccgtcttgcctgtgcagacggtgcttcaaggacaaggatgatgagaaaatagtactgtgcgatggctgcgacgaggcttatcacatctactgcatggacccgccgtgcgagtctgtcccgagaggtaaatggttctgcacgcggtgtagcgcgcggaggtcagtgcaagggatgcagaggtatgagaagtcgatcctggagaaagtcaagcgtgctcctggtgccaatgggccgaaggtgcaggcatctgctggtccagaaaaataggcagcagtgtggatgatgtttcacaggccatactagggtagaagaaagggaaggatacttttgttcctctgagggagggggtatacattgctctggtagctttgaagaatcgatggatgggttgtgtatacgtggggggaaggaagatgccccgttggctgctgatgttgattcactgtgctgccatttcgtttttggaattcttgagtgtcgctcggcttgttgttgtgctgttatgttgtgtctgatggtaagtggcatcgcttatcgatgatatgtacatgcctgtaactcgttttcttttatttgttggacattgtgtgtgtgtgtgtgtgtgtttgaattgtgatgacctagagaacgctggtgtcaatcaatgcagcgtaccttgtttgcgcctaaatttggtagacaaaagaggagattaccttcgtagcatgtgtaccctgcatgtggaaggcaaacctatcaataattccttgtatgaatttgacatagattattacc

SEQ ID NO: 179051 - DNA, 2447 bp, Zea mays
  Clone ID: MRT4577_94878C.1
ctcgctggtttcccccgctcctccaatttggacagccgcttcggcttcgcttcatcctcccccctcccaccccaactcctcgtcccgctccggcgtgcgtttcctttcccggcttgggttgcccaccgagatcacccccctcaaaccctagcccctcttctcctcctctgaccatctcctcctcctcgcgcttcgccttcccaatctcgctgccgtttcttgggcctgggactcgcgctctgctatctgtgtccgcgtatggcctgcgacggcgccgccagaggccgccctcccaagcgccccgcttcgggaggcctggcccagcccaacgtcgtcacctacaagagacgccgccgcggcaccggcgccaacgccggccacagcgccgtcacgtctggccccgaccccgctgaaatgagcgcggtggtgcacgccatcgattcccagcaaggtgggcgccaaacgctgggcaggcactggagaaactggagggacacgctggagggcgtcctacaatccactgctgggaagcagggctccggagggattcagagctgcatccgagctgcgctcagatttagtggttgccctcccacagaacatgggaacttagctcacgacggaggagcaggcagagatgaccctgttggagctgtacattctgaagagaatagtggtgccttggttcagttagaagacggaacagctgcacctttggaagccaacaaaacgatgtgccataatgctctctttgacattctgatctccgagaagtttgcgatgctgtgtgatctgctagctgcaacattccatgtcagtaagcctgacgatgtgattggtttgcaaataattgatgccaagatgagaaatggggattatgcacagaaccatgcgctgcttgaccatgatatcaagcagatatggaagaagtttgaacacgttggccaagaaatggctggtctggcaagcagtctcttactgatttcacaagcttctaaccaaaagcaggcttctggtgtttcagaaattgatgtggctgaacacaagatagaagaaacaagcctggttggtgttgcccgcaaagccctaagggagttgactccccagtgcgattctggctattctacgataccaaaacgaactgggaggtctggatcggatggaatttgcaaggattgtggcagaaaggcagacagcaaaggaagaattatctgtgacagatgtgaagctgcgtaccatgtttcgtgtctgaagcttgccatcgatgaagaggccccagcaaaatggtactgtcccagctgcgttgagccagacgtagctttgaagcataaaaaccatggcaggtcacatgaaggctgtgatgtatgcgagtggctcgtggtgaagccagaagagcctgctgaagatgttagcgagcctgaactggcggtcaaaacgcaggagagctcagtgtcaagcatgggcgaagacagcgaaccagacctctcaacgactgctctagcgaacttgtgcaagaactgtggcacatgcgaagacgaggacaggaagttcatggtatgcgggcatggtttatgttctttcaagttctaccatgtcctgtgcctgaaagagagacagattgcaagcgagaagcagaagaatctaaagtgctggtactgcccgtcttgcctgtgcagacggtgcttcaaggacaaggatgatgagaaaatagtactgtgcgatggctgcgacgaggcttatcacatctactgcatggacccgccgtgcgagtctgtcccgagaggtaaatggttctgcacgcggtgtagcgcgcggaggtcagtgcaagggatgcagaggtatgagaagtcgatcctggagaaagtcaagcgtgctcctggtgccaatgggccgaaggtgcaggcatctgctggtccagaaaaataggcagcagtgtggatgatgtttcacaggccatactagggtagaagaaagggaaggatacttttgttcctctgagggagggggtatacattgctctggtagctttgaagaatcgatggatgggttgtgtatacgtggggggaaggaagatgccccgttggctgctgatgttgattcactgtgctgccatttcgtttttggaattcttgagtgtcgctcggcttgttgttgtgctgttatgttgtgtctgatggtaagtggtaacactgacacccacccatgttggcatcgcttatcgatgatatgtacatgcctgtaactcgttttcttttatttgttggacattgtgtgtgtgtgtgtgtgtgtttgaattgtgatgacctagagaacgctggtgtcaatcaatgcagcgtaccttgtttgcgcctaaatttggtagacaaaagaggagaatacctttgtagcatgtgtaccctgcatgtggaaggccaccctatcaataattccttgtatgaatttgacat

SEQ ID NO: 179052 - DNA, 317 bp, Zea mays
  Clone ID: MRT4577_94879C.1
aggctttgtggccctgggggtgcttctgcagcctcgaaaaagttgcccttacctcctagggtcacctctgctgccattctgaggaacatctccaaggaacaggagggactttggctagagcctcctgcctccccatcttctctctgcccagaggctcctgggcctggcttggctgtcccctacctttgtccccgggctgcaccccttcctcttctctttctctgtacagtctcagttgcttgctcttgtgcctcctgggcaagggctgaaggaggccactccatctcacctcggggggctgccctcaatgtgggagt

SEQ ID NO: 179053 - DNA, 1423 bp, Zea mays
  Clone ID: MRT4577_9487C.1
ttgggtacctcgagccggcccgggcaccaacaattctccccgcctccccggtctgtgtttggctgtttttcccctgcccggttggccgcccggccgcccccccgcccaccccaaaatcctaccccgcgggggggattctcagttctctcggcgacgactgggagactgccgccgccgccatcccaggtgccctgagaactcgatcgggctcttcgctggcgacgaacacccaccagctatcaggtgtacaaccatgtacttcaccgtgtccgcccctgcaatgtctctatgatcctccagctacggtagacgccccgttcgctagctgaggacctcctggttcctgtgagcaggcggcgtggttagctgctgccttcaagcatgcagagacccaatgcgccgtcggcttgcgctaccatcaccttcgcggaggctctaaggagggagatggagtaccgcaagtgggtggagaggacccacccacatctgctcgtcggaatctgcggagcccctgaaatgcagagagatttcagtgcaggatcagtacctgatgcgatcaagagaaaactagctgccgagaccagtgtgcctccacaacaatcaagtttcagctgtgtaactggacagaagcagccccaaaactggtaccccacaaagaaaaaggtgaaagttccacatcttccatcgcagattctgcagtgtcccagaccaaacgtggtgccatccttctggtgcaaaatctgcaaggtcgactgtgtcaccgagttcaatttcagcgctcacgttggaggcaaaaagcacaaggccaaaaagctagagattctaggtaagaggaacgctggggggcctgctagccgatgcgcaggcaacaggagcgctggacagagtggacttgcagtttctgggagcagaagcagtgaacagaatgtggctggcagcgttgctgctggaccgaactgtgacatgttgtctgagagcagaactaatggaacagaaggaaatgggtgcactgtccagctatgagcagcttgggtttcactcccgtctggtattccaataaaagttcgccttgcacattttcttctcaagggcacagtcaaatggctaggccgctagggagatttcatctgatggattggactgaacaacactagtcagataataagttgaaacgtatgcaatgtcctatgtgagagcagtacattgtttggacatgtatctgacagcagatgcatcctgtttcctttcgcttccttctcgaaaatgtacagtagcaagccttgttccggtaggaggtggaagttcaggacgctgttctgattatgtactactagatagttataatgtatgacatcatggcttgtttgttgtttccatttcttccttgtgattgaaaatgatgagggggactgtagcgtgtgcc

SEQ ID NO: 179054 - DNA, 313 bp, Zea mays
  Clone ID: MRT4577_94880C.1
catcgtggtttattatcttcttttttttacttattaccaatgttattcatagaaataactttgaatcgctacaaaaaatttgccgttttgaaaaatatgctaacttaagtgaccattttcactccgaagtctacaagagttaccccagcgggtgaggtccaaacagggttctccacaaattcccagtcaaaataaaaattactcgccccctgtgtcacaccaggttagtgccgttagacgtcgatcactttacgatcagcctttattccgatactcgctccattatccaattttggaaaaactggcccccccc

SEQ ID NO: 179055 - DNA, 576 bp, Zea mays
  Clone ID: MRT4577_94881C.1
tccggccgggctgctctgctctcctcgcatatagggattatcttctaccctggcctgagcgcacacctgctcacggacacggagggagggaggcgggccatcaccgcccaggatcctgcacacagatatcctgtcactgactcacttgaacctcagcaacctgaatcgagacctcaggcaaagggtataccggtaacgaccgtgaagctacatcgactgcacgctgctccgatagctggggagaggggactggggaccgaattgaaggcactaaagccgaaaccaaccaccacaggcggcgcgtgaatggatgaccgcgggcaggaggatgaggaccacggaatattggaggaggagacagcggggggcgggctaaaagaggagaagggggagatggatatggccatcgactgtgaagaatcctcgacaggggccggtcctcctcgggcacccgagctcgatggtgcatctcctgctccaagcctgctccggatgtctggggcgcctgacgaacggcctactgaaagactgctgcaactgcggccgaaaagctggtgtcaaagactactactctga

SEQ ID NO: 179056 - DNA, 384 bp, Zea mays
  Clone ID: MRT4577_94882C.1
aaacgaacaaggggtattttgtttaaaaaaaaaaccggcaaacccccgtttggggagaggtccttggaaccccaactgacattttacctacccaggcggggggacctacaaggagggggccggacaaccccttcccttaaagaatttctattcacaaacagagtttccgttctgtataacccatccccaagctcagggtaaacatgcctttttggtgcccaacagaccctgtaacatttcggaggggccccctgccacaaaaggggggggggcccaccgtgcaccccccgccatgtttttgcccatttccatttggaagaaacccattatcccccaaatagggccccatggagtttttggtgagcccgtgggggaccccatttt

SEQ ID NO: 179057 - DNA, 659 bp, Zea mays
  unsure (1)..(659): unsure at all n locations
  Clone ID: MRT4577_94883C.1
cctcgaggcncggccgggagatatctatacaaaaccagaacgagcgacacaggaaaacagatacgaatgggcttctcttctctaccagccgcacccgtacaagcacatgccaaccacacaccccatcatcacaacagtcaccatctgcatctccgcctcggcgccgcaagactgtcgtgcacaaccttcttctacatatctctctcttcttgcgatgccaccctcccacgaccgatggaaggtaaaccgtcccagagaatgtccgtcccgctgacggccggaggcccttcgcataaaccaatgggatcagtaatgatgtttcaaaaacgatcataaaagacattagggaatgcaaaaacatgcgcctggacgtctaagaggtactttgtgacgcagttgtcaagaaagcacggcctactcttcattctctgccacctcatgatgactacgaaattcaagagtacacagatctccacctacgagttctctcacaatgcactacacaagtggcgactcaaccgtcgtcttagatcaccatctcgatcggagacggtttgaaataatcacaccgtctcgacctctttgctgcctcaattatttgtttgacggacgaagataatcaagtgacgtctgtgtgcatacgaccaccactgtatgta

SEQ ID NO: 179058 - DNA, 219 bp, Zea mays
  Clone ID: MRT4577_94885C.1
tctcagccctagtgtcagagcagacgtcgtccacatacctgcactcatctcgtaccccgtggcggcgtctcgctgtgcagagatgagcgagaatgctagcgcgcataggacaggtgaaaagatcgacaactcgcgcacagagtctcggacaaggctctcatcgtctcgccccacgctgcatacgcgacttcgcgagctacagaatcgtcagaatcgccg

SEQ ID NO: 179059 - DNA, 303 bp, Zea mays
  Clone ID: MRT4577_94886C.1
ctatattctgcctctccgttctgttcttgccgtgttctatttttccgctctgctgtacatggcgtcggttgcaggcgaggggaggagccgggtgctggtgataggcggcacgggctacataggccgcttcatcgtcgccgccagcgcacgcgagggccaccccaccgccgtcctcgtccgcgacgccgcgcccgccgacccagccaaggccgccgtcctccagggattccgggatgccggcgtctccatcgtcaagggtgatatgtatgatcatgagagcctggtgacagccattaaatcagc

SEQ ID NO: 179060 - DNA, 614 bp, Zea mays
  unsure (1)..(614): unsure at all n locations
  Clone ID: MRT4577_94887C.1
cctcgaggcggcgggaactgaccatctgatgcttcctctccccttcccgggcgcgggcgtgccgaaatagacgacgtcgttatcccttcggccgatcccgacgcgaattgtgattatcatcacgtccatcggtgggccctctccccggaacgcgaagtccaccgcggcgccttccaccgaatggaagtactgtacccaccttactgctgccgaccgcttgagtgcgatggagaaacggatagctgactgatgctggcacatatgttgttttgattacattggccagaatgttgcagctatcaggagtaatccacagatagtatgttatcgaaggtatttgaagaggtgtatactgagtcaaaacaagtatatatgtctatcaggtatgcgggagtgctgcatcgatgggaaggaaatcgatatctaggatcagacagaacagagccgtataatcacgagtgccaaatctcgtaatcggtcatgagcnttggaaaaggtaacgcttgactgatatgtgcaaaggacaccggtatattgcattgtactaactactccgagtgtggactatagatacaaggacgatcttataagagggtatgagagaacctatccct

SEQ ID NO: 179061 - DNA, 778 bp, Zea mays
  Clone ID: MRT4577_94888C.1
ataaggttgattctattcaattgcggaaaccatgagcagtgaatttcggggccccttatttcattgatgctcacgagcaatgttgatgctcagcattctccctcaaagcagcaatcacacggaagcagaggtgcagagcaagcagaaaagcaacccaacaagaggtgatcagggctgggctgaggcgcgcgcggttgcctgcaagttcctggcgaggatgccctcgaacgtgatccccggcccgaacgcgaggatgagaccccactcgcagtcctctccaccgtcgtcggcagccagcagcctcctccgccgggtgtcctccaccatgttctccagcacgtacacgatggtgttgctgctggcgttgccgaagtcccggagcgcgcaccggctggcgcggagcttgtcggcgccgaggcccaggcgcccctccatcttggttaggatggccggcccgccggggtggaccgcccagaacatgtccccgtagctcatcggctcggggccgccaccgtccgccggacgcgtgggcggacgcgtgggcatcagcttctggcagaagtcctccacgtgcgcctcgatgatgtggggcagctcccgccccagctggaacttgatgccttcctccgtcagccggccctcgatggtcctctccgtgtccgggaggaagcgctggagcgccgagtggagctcgaagagcgggcgctcggcgggggcggggtcggtgccgatgacggcggcgcccgcgccgtcgccgaagagcgccacgcctcgtgcc

SEQ ID NO: 179062 - DNA, 285 bp, Zea mays
  Clone ID: MRT4577_94889C.1
ttttgtggggtttttataggagtggtgccgatttcttctgacgaaggcaaacgtggtggaagttcgatcgggcttcgaataacaaggattggcacgaggttaacaaggattctcgcaaggaggggcctgtatgtgctatatgcacagcagacgcgaggaccactacgcctgctcctaatacacagaccgactgatgtgctatgcctgagagatgaactactaattgcgggaccagattggctgtaaggatggttgtggatcctactgcaggtgggaaaccatgaa

SEQ ID NO: 179063 - DNA, 459 bp, Zea mays
  Clone ID: MRT4577_9488C.1
aaatatggacagtaaacctattcatataaaggttacgcatatctggaacacaaacgctgaatggtcatgacagatgacacaaccaacccagtcaccattcatgatttatcaaacactaccactatgtacatgacttatgcataatgaccgggccatagtacactagcgaaacagcaaaagaacatactttgttttgtttcaagcgatatatttatctgggcagctgaatgattcaccattctggactgagcttaatggcttttgaaaccttttacagactaataggataatgatcacatagagtgctatgattattcacaggaccatgaacttgcattattatgacctgcaaccaatgtttcttctgacatttgttgacatgtgattgaaataatgagcctgtgagaccaaatgtctcgacttgactacaagctgcatacatttgttttgacgagccag

SEQ ID NO: 179064 - DNA, 1432 bp, Zea mays
  Clone ID: MRT4577_94890C.1
ctggccgggaactagcacagcccgaacacactcgtgtgactcgtgtcctcatagctgagagccatttccaccgcccagcacgctggacccacctgccggcgtcccgaagagcggaacacctgaagccaacgccggccgtgctgcttccgctgcctcatcgcaccaagccaccagtccgcagcacgaaagcttccccccctctcttctcctgctggttggctcatcaggcctgcccgaataatcctcctgcggattcccctcacggcaggccaaaacccgcacctttcccccgtcgacagattctcaaacccggcgaactccgggcagggctcacgtcgccgatcccgctcccggattctctttgccgccgcgaggagacggcgtccagtccaggccttcagcagctccgtctccgtgtgtatctgatcgggggattctttgcttgagaaactgctagcatgggcgcggtgcttggacggcatgacacgcacaagcggagttcccatggttcgaagctggaggtaaagatggtcgacgctatgcagcagagagcatcgcatggaacctcactgaaatcgttcgatagcattatcatgaagttccccaaaatagacgagagtttcagaaaatgcaagactatcttcgaacagtttgatgaagattcaaatggcgaaatagataaagaggaactgaaacattgttttcaaaagctggaaatctcattcacagaggaggagatatgtgatctctttgaagcttgcgatataaatgaagatatgggcatgaagttcaacgagttcattgtctttctgtgccttgtctatcttctcaatgaagcagctgtcttggaagcaaagataaagatgggactaggaaatcttgaggcaaccttcgagaccttggttgatgcgtttgtcttcttggataagaataaagatgggtatgtgagcaaggatgagatgatccaagcaataaacgagaccacgacaggagagcgctcttctgggcctatagccatgaaaagatttgaggaaatggactgggacaagaacggaatggtgacattcaaggagttcctgtttgccttcactcgctgggtaggaattgatgaaaatgaggatgaagatgacgatgaataaggactgtgaaggctggttattcttcaagggttagggccagatcagccttggagaagctggaaatggatggcggataaaagcagttgacgtttattggttgcttgttgatcgtaatattcatgccattgctaatagaatgtctcgacattatactcctagtagggtgacttgcatgtctgaacactggtatcaatgttacagttgctgtctactttcttccatgccattcagccattgttctactctgcgctagcccgcgccgatccatttcaaaaaaaaaaaacttgcggcta

SEQ ID NO: 179065 - DNA, 381 bp, Zea mays
  Clone ID: MRT4577_94891C.1
ctcgggccggccgggaggcaccaatcaccagctagctctctcggggtggtgctcctgccaaaagcaaccccagcccactcagtatgactagagcgctgagcacatcttcgcttgtttccccattccgatacgaagggccgggagaccaagtgacaggccagggaagggaaggaaatacaaagcctgctgccagcgaaggacatcgcaggggtcgtatccgacttctgctccttgccctggacacaccggcatctcaagaagaggaagcagatccagacgggggacataaaggagcagcatccagtgcgaatggtgccagcgcaaggcacagatggccaggcatgccactgaagccgcgagctccgttgaggcgtcctccaa

SEQ ID NO: 179066 - DNA, 534 bp, Zea mays
  unsure (1)..(534): unsure at all n locations
  Clone ID: MRT4577_94892C.1
cgggncacgctggtgccgtcccagcgtcttcaccagttcatttacatcttgttttgtcgccgagtgtgcaaaatactgaacaaaagagtgcatgccaaaacggccttatacaattttcttttagaaaacaagcaggcatcacctaattacctgtcctcactcctctgaactactatatccagtccttaatccgatgccaattcctactggtcactgatcgccatgatccgcgtgtttttgggagcataaatgtgcagcgcggtccctgtggcaagctcctgtaacctcaatacaagctatgcagcagctcgtggcgttgctggtactgatctccctccccgtgcgcgcggcgcctgtctccggcgccggcgccctcttggcgctgcccacgcactccgacgccgtgtaattctgaggggggcccgagctcgtgcgggaaatggtacacacaggcagaacgcgccaacggggcttaccttagatccaacacctaggtagaacacgaatactcaccggaacataataatgggcgga

SEQ ID NO: 179067 - DNA, 378 bp, Zea mays
  Clone ID: MRT4577_94893C.1
agaggtcaccattgtgatcggacgcaacgaccaatacaaacagagcacacattattgttactaagttttcactaatacataaccaacaaagtctatattatcacaagttataacatgtctcaatctagtatcaaaattgccaaataagcccatctgttttcatgaattttgttgatgaaatgagtccttggattttgaatcaactagcgccgaactgctgtaatttagaacatgattaataagaaaataattattttaaattatatcatttttatttttaactattttataagaaccacaacaacgtttatttcaacccagatcatcatactacacacagactgaagagtgagtggttattataaaattgttaaaatt

SEQ ID NO: 179068 - DNA, 506 bp, Zea mays
  Clone ID: MRT4577_94894C.1
cacccgtccggaccaacaagcaacatagaaagtggaatccagtagcaacaatagtgcaacaatggagaccaagatattttccctgatgatgctcgttgttcttacaacatgtgttgataacacaacaattcttcattgatgataacaagctattatagctctcctttttccacaatacctatcattaattatagctgcatgataagaaaacccacctcttccaccatatatgctacaacaagcaatcgcaggcagcatcacaccattatcgtccttgtggcgacaacaatcagcagtactatctttgcagccatcattgctacacaccatgacggcacaacagctgcaacaactgctgcttcctatcaacaaccaagttgctgtggaaaacctttcttactactctcagcaacaacaatttctatcataccaacaactgactacactgaacgctgctgattatttgcagcaactactattaccatttaagctggttactgctgact

SEQ ID NO: 179069 - DNA, 367 bp, Zea mays
  Clone ID: MRT4577_94895C.1
cccgtgatcccatccccctcttccttgggcgggtttgcggtgatctagccggcggggggcggcgcagcgatggcagtggcaaaaccagtggttgatcgtcgtgccaccggtgacaatgctcggcgtgatgaaggcgcgggtcgacggaagccacccggggtcacgcgctattgaagaagaagggagacgcgctcacggaccagctacgcgccatgcttaagatgatggccgccgacgaggagtacatgggcgacacgttgcgcgcctgctgcttgtccctcgtcgggggcaagtacgtttgcgatgacggcgtacgacacccagagctgcaatccgtacgagccgtctgcgcccggaggcgaaccca

SEQ ID NO: 179070 - DNA, 315 bp, Zea mays
  Clone ID: MRT4577_94896C.1
atgcgtgctttattgtgaaagcaaaaccataattacggcgggggcatttagatatcgtggctggtcgtgacaacgaaagagaaaacgacattggcgtcgccggacggacggccagacaaacgacatgagaatactctgtgagccagtgctgcgagttgtgacaaggcaagctagctgcgaaaggcccaatcacaaacacagacaccatggggagggagaggccacgtctcaagacagtcagccatttcaatcaccaggtggtgtaagttcttgagcctcctaacaactacgggttgcaaaggcacctaacctaac

SEQ ID NO: 179071 - DNA, 522 bp, Zea mays
  Clone ID: MRT4577_94897C.1
ccggccgggccttgtaaaccctaaccgactccgccgccgctccgccgccgctccgcctgagggcatagccctccgccacagcgaagcgcgacctcatcgatcaccttaaagtttcaatcatggcggacgtcgatgcggaccggaggttgccaggcggggctaccaagaggaggacgatccgcaagatacagttaccgcggcgtcgagctatatacgctattcgaagtgccacggacgagctcgtgcagctgttacccgtgcgcgccaggagaaggattgggatgggactgaagaggaagcccatggacctcatcaagaagctgagcatggcgaataaggatgctcctgctggggagaagaaggaggcagagaaaacacatctccgatacatgatcattgcctctgggaggattgcgagcatgcgtaggggtctacagcgggaagcaatccaacctgggtgggatgaaggcctgagatgatcgggcactacctggcggagttgctcgatctgctataagccgg

SEQ ID NO: 179072 - DNA, 176 bp, Zea mays
  Clone ID: MRT4577_94898C.1
ccgctcgctgccgttctgacaagagcaggtgccatcatgctgacctcgaattctcgaagcactcggtgatcgacaaccgactcctcaaggcatcctttgacaaggagtggctcctcatcaagcgcaatcgcttcgtgtacatactcaagaccatacagagcaattccagagagaga

SEQ ID NO: 179073 - DNA, 385 bp, Zea mays
  Clone ID: MRT4577_94899C.1
attcggctcgaggacttgttatggttcttcaccggctcaatctgacttaatccacaggggttgtgagcgaaccgtacaaaccgtaatatgcgtgtgcttggggtggaattctggatggtaatgtacaaggacaagtggattaatttacagtgatatcataggaccgacaggggttgcagttgattcacgcgaaacgggactgttgagtgcgtacatctaacagttacacaccgtgattcatgctacacgtagcttgcgttaagaatttcagatcaaatgagaacagaatggaactcaagttcagagtggacagagttggcataaacctaaggaaagaagtcttcatcatcggttagacgactctctactcaacacaaggacggga

SEQ ID NO: 179074 - DNA, 238 bp, Zea mays
  Clone ID: MRT4577_9489C.1
gtcaattaatggtatattatcaaaactaactagagggagatggtacagagaaaaataatagacaggggaataatggacggagcaccaaacatgatgaaaacgagcgtgagtcctagaacaaaaccaaaaatagagcggctgggcggataccacgtcccgggttcgcggagtagtggtgtcccgcctcggggcctacatgtcctgatccatagatggacgctatggcccctagttttcc

SEQ ID NO: 179075 - DNA, 353 bp, Zea mays
  Clone ID: MRT4577_948C.1
acctagagaaccaccacagcacctcgccgccgccgccgccgacgaggacgacgacgacgatgtggcgctcacgagctcgcgctctcctcctgctccgctcgtccgtccccaggtccccaccgccgcagcaaaatccacttcggagcttgatccgagccccacccccgccaccgcgccgtctctcccgcttcctctcctcctcctccccggaggccctgccggacgccccttcctccgctgcggaggccctcccggatgatcccttcgccttcgcgcccggcggtgtatccggatcggctgatcccaccgaggccgacgaggacaacctggccgcgctctgggaggaggatgcg

SEQ ID NO: 179076 - DNA, 216 bp, Zea mays
  Clone ID: MRT4577_94900C.1
tgtgtaacgtcaccaaggacgatctaggtatcccacttttgaaaggggtggtttcacattcctatgttgaatcaacgttcagcctttgggagtggtaatatagctgggccgccaacatgggtaaggttctcacagcttaagccctgagggaatctagctataagtgatacatttttagccaaaagaccattgtgatttacccaatgaaccctattc

SEQ ID NO: 179077 - DNA, 187 bp, Zea mays
  Clone ID: MRT4577_94901C.1
tcgagcggccggccgggcgggtacacagctagatttcgacacagctcagttgcttgaatggaagcaactggcgcaagtaggcacgttcgttcgccaacagttagttgagggaatacctggttccttcttcgggctcacactaagggcaaaattctaaaagcttgccggggggggggggccgctcgat

SEQ ID NO: 179078 - DNA, 427 bp, Zea mays
  unsure (1)..(427): unsure at all n locations
  Clone ID: MRT4577_94902C.1
gccaagccgggcccgcaggacggccnncacacgagcgncgngcgcgcgcggancnacgcngngacggggacaccgagggagaacgccancgggccagncgccgccgncncgcggcggcgggccncgaggacccagaagggcgncgacccggccaccgacccggcgagggggggggcgcncgncnncacggngacngnccccgccggggncggccaggncnccgncggcccccgcaggcgggggngncccggggangcccgggcgcacgccgccaccggggggngcacgggcggggcggccancgngancgggaggcagcagcncaaggggcngcncggccgcgcccannncaccaacagcaccgacgcnggnncgggccccaaggcggncngcgcngcgcnacgacaggacccggggcacccgggca

SEQ ID NO: 179079 - DNA, 128 bp, Zea mays
  Clone ID: MRT4577_94903C.1
accacgcgtacggccacatcgttttccatgctaagctcacatcatcttcctggtcccgcatggggtctttttttaagatctacaactgatctccgggtcggcctctttttaatacccattcttattta

SEQ ID NO: 179080 - DNA, 264 bp, Zea mays
  Clone ID: MRT4577_94904C.1
aaaaccggaccgacccacgcgtacaaccttacaaaaaacaaatttattttacatcttttatcacataaacaaaaatgtcgtctcttgctatactatttagcatctaccatatcaaaaacaccatctacttcacccaacacggagatttctcctaccactttcatcctaaatatctttatcctcaaacacttcctccatttcttccatgttcattcacttatttacaccatcaatctctacattttaactttaccacactactat

SEQ ID NO: 179081 - DNA, 226 bp, Zea mays
  Clone ID: MRT4577_94905C.1
aaaacgccaccaacgcggggaacctcgagcttttctaccttcgctccaccaacaactcatatccccagaccatacttatattgtggcaatgcaagaactacaatgattacactgatatcgcctcttcccccctactttactccttctagcctacttcctggaacttccaccgttcttgcctcctccagcaacttcataccctcacattcctttacatctccacaca

SEQ ID NO: 179082 - DNA, 359 bp, Zea mays
  unsure (1)..(359): unsure at all n locations
  Clone ID: MRT4577_94906C.1
cttaaaatccaaccaacccgtccgttcctctcaaccacgccggcaacggcagccggtgaccagtacctacatgtccagcctgatgtcgctagccagcgcactgatcggggacgccgcgaggcttcactcggccactggctctgccggggaggagcctgacagggtctacggcgccgtgctctgccgggcggactccgctggtgctaactacaggcgccgtcggggtgcccttggcgccatcgacggcgacggccactcaccttgcgcgctccacagcgacgtgaccgtctactccgagctgtaccatctncgtttctctgacaggaactttcctcgcaacttcaagaacgcgccgaaat

SEQ ID NO: 179083 - DNA, 213 bp, Zea mays
  Clone ID: MRT4577_94907C.1
gcagcagtatggcttgaatccttatgaagccacaaccacgattcatgaggcacagagcgcagatgttgatgagagcacgacatgcatatagaggtacagcatatggcacgaggccacgcatgtacccatgtgcagcagcagcttaaatgaaccatggcttactgaccaccgcggaggcggagcaccatgtggagagtgctcttcttctggatg

SEQ ID NO: 179084 - DNA, 234 bp, Zea mays
  Clone ID: MRT4577_94908C.1
caaatcgatccccttccccttccccgaatccccaaatccgcccgccgccgccgtaaaaccttctccccgccgccgcggagagatggcgctgtgggagatcaccgccatcaccgcctacttcctcggcctccgccgcacctaccgcctcgcgctccgcggtcagcgccgcctcatcgggcccaaccaccccaggctccgcgacttcgtctacaggtggacacgttctatattcga

SEQ ID NO: 179085 - DNA, 366 bp, Zea mays
  Clone ID: MRT4577_94909C.1
aattcccgggacgcttgctttctggcggcggccgcccttaatgggaatgtttttttttttggaccgaaccagcccaaaccccggaagaccattctgtaaccaccatgggatgaagggagcaaacatgccctgtaagatcagcaagacaggatcctcactggccaccattctttccaatgggggagacgtgcctaggtgctaatgccctgaaagaaatcaaggctgtgcctttacttgggcaggacatcaaaatctgaggccttgctgtcaccaaacattgcccacctcccttgtctggggagcagagctaggtacaggccgcagagggtagaggtgcccaactgggccacgggccccagcagcctg

SEQ ID NO: 179086 - DNA, 476 bp, Zea mays
  Clone ID: MRT4577_9490C.1
gtgttggtggttttttttttttttttttttggggttttttttttttttttttgtgtgtggggtgtttttttttttttttttttttttttaattagtgcagagttttaatttttttcaaatcattttttttacaaaaacccccccataaggtgggggggggggggcccaaatgaaaaaaaaaatcctcccggaggggaggggggaaaagccccatatggaaccacctcctaaaaaaaccaaaaaaaggagcaaaatccctcacccgacgaacactaggttagggataaaaggtgacgtccggttgacaagtaaacttcgatcgagcactttcttgttttaacccccttgagggggataaatgaggttcagcttgttgaaaaacccaaacttggggaaaactcgaattttttttttggttaaaggaatatttatagggccagatgagatgcatgacccacatgaaaaacccgagaccc

SEQ ID NO: 179087 - DNA, 208 bp, Zea mays
  Clone ID: MRT4577_94910C.1
tcgtctgtcattacaatacactatagtgagtcgtattaggcaaggtctcgtgcgcagacatcctggccttcgcggcgcgcgacgccgccgtggccgcgggcctcccgatatacgaggtcgctgctgggcggcgcgaacgtatgcgctcgagcatggatgacgtcccgggcaacttctccgtgccgggcgagtaggtgccgcgcctcac

SEQ ID NO: 179088 - DNA, 255 bp, Zea mays
  Clone ID: MRT4577_94911C.1
ctacgaatcttccacaacgttacgccttattcggtggcttgcgctgctggcggacccccgtggctgccctggctagctcgctcaaggctgtaactagaactccctgtgaacatgaccacgtgactcccctgtttccgaggagccttactgctatagatcggatgcgccagatcgtagcataaatcgatccctagttgctatcggattttcatggcttgtcgctgttatgcacttaacgagctatatataggactc

SEQ ID NO: 179089 - DNA, 395 bp, Zea mays
  Clone ID: MRT4577_94912C.1
ttttcttttttttttttttttttgaaaatcgagcgggggagggttaaaaacgctcggggaccgattgattgctatattttatacgaatcctaccaaaagcatcttctagtgtaattaaaagaaaagaatgcctatttttttgttgggccaccccaattctgttctactgtactagcaaagcataaaaaagaagaaggcgccggatgaaaacaaaacaatgggtcgccggccaagccacgggggatcacgtcgcgcgccatgttgtccctggcgctactggtcgtctaggagcgcacggggttctccggcgtggtctcatcgtccaccacttgcgcaaaagatggttgggtccaccttctcgccccgaatctcgcacatgttgtgtgagcacgcaa

SEQ ID NO: 179090 - DNA, 1432 bp, Zea mays
  Clone ID: MRT4577_94913C.1
cttccccgtcctgcaggctccaggcgctgctgctctcgtcctccgctagcgagcgaatcgggggcccgacgccgcggcgggaggtatctcgctttcgatcagcgacggcgcgcccggatcgcttgatctgacggagtttctatctaggattttggttggagcgtcgttctccggtgcttatctcatttctatttatcggtgcctcgggttcacggccaaattcgctgctgcgtggggctttggagattggagccaattccttaaagtggcggtggcagcgtctggtgggaaccatgagcttcgtgttccgaggaagcagggccgacatagaggccggtggctttacagggttcgcccccgagcgccgcaccatgctaattcatgcaggagcaggccggtgaatagcaattccttggtttttcttctaactgtctttgatttgttcatggtactgaactcacaccagatgtctcccaatcttttgattatgacactctgagagcactggatgctgacaatagcctgcatgctccttctatgagtgaagaagaaataaattctcttcctgtcttcaaatataaagtccaggcacagcagggaaatgcccctgcccgataaagtgatgaggcattgcagctatcggtttcttcaactggctccggcacggagaaacgtgggtgaggactccagctgtaaggaactcacctaaaactgttccggagttgggaaatgaaatgattctgggaagtggaactccaaaagctcatgtggataatgcaatctcctcacgtatgccacctgggatgggagccatttcagatctagagttgcctgtgttagaaaatgatggaaacatagaaaaagctgaggcttgtagaaaggagcttgaggatatatgcattctattgaaaaggaaacatgcagaagctaaagagctagcagttcgggctatcgttaacaacaatacgatgctgatgttaaaccacccgatgattgaggagaaaatttactctattcagaaatttgcgaacgacctgaaatccaagaagtacttatttgaggaagttggcaccattaactctcactgacgtgggacaaatgcagggagcaaatgacttatccagcggagcatgggtaatgtaaatgcaacaaaagagctcaggcgtccagcgtaaatgcaatcttgaagtaacttgaataactaccttcctcgtgcattctgctacatggttggcttctgtagatgcgtccgtttacactttacacagcgtagcaactgttgagtgacctaatacttctagtagtgagatatgaccttgtggactaaatgactagatgggcactgctgtactaggtaatacctggttccatctattccaattgcagttggtgacaaaacgttcacattggatttatgataggtagaagttgc

SEQ ID NO: 179091 - DNA, 275 bp, Zea mays
  Clone ID: MRT4577_94914C.1
tttttccttggggggggttgagaaagaaggccccggccctgaacacatttcactcaattacgggcggggtcttcgcaagatctttcttagcgcgaaatgcatctacacccgttcaggcaataggaaacacggggctgcatttgtggtccacaagtcttatcgccatccttcgtgtgccattgaatgccactccttgtgcacattgcacatccgtttatagcgaggcttcctctgggttcctcaccacggcaattcgggttcccaactggtcggcc

SEQ ID NO: 179092 - DNA, 830 bp, Zea mays
  Clone ID: MRT4577_94915C.1
ctgttcccctctctcttccccgtcctgcaggctccaggcgctgctgctctcgtcctccgctagcgagcgaatcgctgacgctggcccgacgccgcggcgggaggtatctcgctttcgatcaggattttggttggggcgtcgttctccggtgcttatctcatttctatttatcggtgcctcgggttcacggccaaattcgctgctgcgtggggctttggagattggagccgattccttaaagtggcggtggcagcgtctggtgggaaccatgagcttcgtgttccgaggaagcagggccgacatcgaggccggtggcttcacagggttcgcccccgagcgccgcaccatgcgaattcatgcagggtgcaggccggtgaatagcaattccttggtttttcttctaactgtttttgttttgttcatggtactgaactcacaccagatgtctcccaatcttttgctttggatagtcttgggagtcttcctaatggccacgagccttagaatgtatgccacgtgccagcagcttgctcatgctgcagctgccaacagttttcttggccacactgagctgcgtgtgcatgtaccgccgaccattgcccttgctacgagaggccagttacagagccttagacttcaactggctcttcttgaccgtgaatttgatgatttagattatgacactctgagagcactggatgatgacaatagcctgcatgctccttctatgagtgaagaagaataaactctcttcctgtcttcaatataaagtccaggcacagcagggaaatgcccctgcccgaaaagtgatgaggcatcacagcaatcgg

SEQ ID NO: 179093 - DNA, 457 bp, Zea mays
  Clone ID: MRT4577_94916C.1
acgcgtccgacccaaccaagcccgcacgacacgacaccaagtcgaggagctcgagagggcaccaataatggccggcgtgaactccagcgtcgtcgggctcaagcccgccgcggcagtgccgcaggccgccgccgcctcatcgccggcgaagcgggtgcagctggccgcgcccgagggccgccgcgccgctctgctcggcctggcggccgtcttcgccgtcacggccaccaccgggtcggccaaggccacgatcttcgatgagtacctcaagtgcggctccaacgttttctggaagtggtgaagcagctagcagcagcgtctgatgggaatggaggagatcatcacctgtcttgtcgaccctagatatgtccaaactgcagggaaattaaatcttcatgtgtaattgtgctcattctgtttcaatcatctcaacatccgatcatgaacctcttgcatt

SEQ ID NO: 179094 - DNA, 305 bp, Zea mays
  Clone ID: MRT4577_94917C.1
cttggatcctatagagcggccgacctttgatgatgcgtgtgctaatgccatgtttgaaggcagcaccaagaagtaccatggttttacttaggattgaactcagaataacgcctgccggggggaacaacccccatcgttccgccgatcatgcttgttgatgcatgggtttgctggagtcttcaatgagtagaccactaactattgacccagagggagcttcaatcaaaaacacagatgggctactcgcaacactagacgaaccaagatatacgctctggactatggtaaacaacacgggagctaac

SEQ ID NO: 179095 - DNA, 1141 bp, Zea mays
  Clone ID: MRT4577_94918C.1
cctcgaggcggtgcgggcggcggcgcggggcgggcaaaacgtaaaaaccatcgctaccccctcaccctcactctccctgctgcaacccaaccaagcccgcacgacacgacaccaagtcgaggagctcgagagggcaccaataatggccggcgtgaactccagcgtcgtcgggctcaagcccgccgcggcagtgccgcaggccgccgccgcctcatcgccggcgaagcgggtgcagctggccgcgcccgagggccgccgcgccgctctgctcggcctggcggccgtcttcgccgtcacggccaccaccgggtcggccaaggccacgatcttcgatgagtacctcgagaagagcaaggccaacaaggagctgaacgacaagaagaggctggccaccagtggagccaactttgcgcgcgcctacaccgtggagttcggcagctgccagttcccctacaacttcactgggtgccaggacctcgccaagcagaagaaagtccccttcatcagcgacgacctcgagattgagtgcgaggggaaggagaagttcaagtgcggctccaacgttttctggaagtggtgaagcagctagcagcagcgtctgatgggaatggaggagatcatcacctgtcttgtcgaccctagatatgtccaaactgcagggaaattaaatcttcatgtgtaattgtgctcattctgtttcaatcatctcaacatccgatcaaaaaaaaaaaaaaaaaaaaaaaaaaaaaaaaaaaaaaaaaaaaaaaaaaaaaacaagacatcagggcgtccattccacctgctgggtccatcagcagcgagcgaacagggaaaaaggaaaggccgaaaagcgcttaagcgaaaaaactggggcacccgaagcggaacggaatggcggccacggcgaactccggggggctcctcgggggggaacgcctgccggccgccctcctccctcggggaagaagcgggggccaccagaagcttcgcctccaaaacgcgccgaggttctccctgcaccgggccagggccgcttccgaggacacgtcggcgtcggcctccgggggcgacgagctcatcgaagacctcaaggcaaagtgggacgccgttgaggacaagcccaccgtcctcctgaacgggg

SEQ ID NO: 179096 - DNA, 190 bp, Zea mays
  Clone ID: MRT4577_94919C.1
ggccgacgggctcgagctataatgttatggagccgctgacttttttcctatagcatagggaacctcggttatactggggaagagtagacggagtgtcacaccatcacgcatgggtggtattgtgagccttgacctgaatgcaaccatatgggctgagattgggataatatatatggaatgggaggcttgg

SEQ ID NO: 179097 - DNA, 236 bp, Zea mays
  Clone ID: MRT4577_9491C.1
gacgggaggaatgtggacgccgcccaggcgttcaagatcgcctgcatcgagggcgggttcttcaagctcaacctcaagagagggcctcgtcatcatcaacggcacgtacgtgggctcgcgcgctcgcaggcacacgtggtgtaccacagcaacttgctgggcttcactgccgagggcctgtaccggggtttgtgcgaggttattgaacggttaagaccgagttcacggaccacctg

SEQ ID NO: 179098 - DNA, 357 bp, Zea mays
  Clone ID: MRT4577_94920C.1
ggagcacactagcaggaacaactctgatcaatccagtacaaccacgacaacatgggggacgttcctaaaacgagactgacgcactgcatgaacatagagtgcagcaagcacacactccacacggtgactcacagtaacaagggcactgatagacaatctgacaaatcaaagcgcactaattaccaagggcagtcaggatatggacgtcagaccaatcctgtcttccacatgatggccaagagcacctacaagattgttctgaaactgccatgactgagcagcaagcactactcacaaggagcatatctataaattcacgcattttcagattggtagcaacactaactgcaacggcac

SEQ ID NO: 179099 - DNA, 363 bp, Zea mays
  Clone ID: MRT4577_94921C.1
gtcggaggctgtttttgtggataaaggtctcggaagtctcgctggtgaagaatcggagctgactcgcgtggggcgtctcggggctgggcaacgacaacgcgttggagccttccttctcctgcgccgcagtttgtaatcgcaaccgtgaccactttggcctcgtgctgcccgtcttgtgagtctcagctcgccactagggctgagctcgccaccgaagactcacgatggttcctgagtgcagtgggttgcttgatgcatgcggtgcatgtgagccctgcattgcttttgtgcccggtcccccttaaaactgggtgaattgtttcattcttatattgagaggcagagttcctgccattacgtttg

SEQ ID NO: 179100 - DNA, 126 bp, Zea mays
  unsure (1)..(126): unsure at all n locations
  Clone ID: MRT4577_94922C.1
agtgagtcgtattaacacacacccgccttgccactaacgagcaccccgcctcaatccacggcncacggatcagccgcagcatgccctacatccgccgtcgctgaggccggctgcgccatttgccat

SEQ ID NO: 179101 - DNA, 770 bp, Zea mays
  unsure (1)..(770): unsure at all n locations
  Clone ID: MRT4577_94923C.1
ggtacgcctgcaggtaccggtccggaattcccgggtcgacccacgcgtccggcctctgagagtctcccatcatagtttccaactctgtagctgcagaaacaggccaacactgaccagcccactagttgcctggagtccaccagacttggggaccccttgatgagacacagcagtatactggcagttctgttttgtgttctggggtgatccagccttgcctgggacttgtaatctttgcctcaaaaatgccagattgtctgggtgtgttgcgcccagctaaatacacagtattcagtcttcgttacatttgaaggctggtgaatctgtttgctagttggagaaaaagatagggcttgtatatcacatttcattttcaagagtgtaatcttaagttatttcacatgcatgttttagcactggctagtcaacaatagatagcattcggctgaatgaggacttttaaagtaaaagcttttgaaagttttaaatttgtaagtgtacttgaatacaatttatcagtacatcagatgtttttccaagttggtaagttacccagcctctggaggaaggctcctgagacaaggaataaagtcgtcttttcctttataatggaacgtgagacctacctgnnagggnngtgntaagtaagctaagccaaagtattggggaattgcagntttccgtttgtttggtttattggccaaacatttggtctgtgaaagaaatgtaaaaaaatctttccttgaaactgagtatgatagctcataccc

SEQ ID NO: 179102 - DNA, 406 bp, Zea mays
  unsure (1)..(406): unsure at all n locations
  Clone ID: MRT4577_94924C.1
caggtcgactctagagggttgagtattttggacactactgtaaccagtagaaacttcttttggcaagatgaatgatgaatggttttaagtttccttcatttcatgaatcgaatgttatcctgttggtgccagttgtgaaaggcgaggcaaacatggaacctagccaacctcgctgttaagttattttatcatatgtcatcacagattttagggataacaacagaacctccaaaatttcatatggcaggaagagcgcgccatggacagaatgagcacatttgttcaccaccaccacaacctnctaccatgcaggagctgatggctcagcagaatgagattctgcggcagcttgcgcaatatcaggagcctcaacactatgggggtggtgatcaccaccagcgtttcc

SEQ ID NO: 179103 - DNA, 502 bp, Zea mays
  Clone ID: MRT4577_94925C.1
cattacttgttttagctgtatgcatcatcttttgggtgcatacaagagaaaccctcaaaagctagctagcaaaactgagtcaagctccatctcaatcgctattagccagcttaataataagggcaaaaaaagaataaaaaaaaaaggcatgcatatgctacaacactctagcggctagctagctagcaaaaaactacaaaactactagacatccgacaatagaacatgcatgaattgccgacgagaaaatatgtcatccggaggcaccaacggtggtggcacccgccggggggatttttgggacgccttgcttgggcagctccgacatgacgctgtcgaccgacggcggcttgagccccaggggaagcggcagccatggcttcactaaaacatctacgaaggctgcgtcaaagctctccttggacgggtgcgcttggagctccaaaagcagttgagctagcttggtggagctaggcgggggaggtaccatcggcggtctgct

SEQ ID NO: 179104 - DNA, 1386 bp, Zea mays
  Clone ID: MRT4577_94926C.1
ggagcagatggcggagctggtgatggcgcagtgcggggtgccgagcggcggcgaggggggcgcgtggccgccgggattcgcgtgggacggcggcgccgcggacgcgtcgcgtgggatgtacggcgatgcggtgccgccgtcgctcagcctgttcgacgccgccggcagcgtcgcggcggacccgttccaggcggtgcagcaggcgccgggcgccggtggtggtggggtggacgacgtcgccgggtggcagtatgctgctgcggctgggagcgagctggaggcggtgcagctgcagcaggagcagcagccgcgcgatgcggactcggggtccgaggtcagcgacatgcagggggacccagaggacgacggcgacggcgacgcgcaggggcgtggcggcggcaagggcggcgggaagcggcagcagtgcaagaacctcgaggcggagcggaagcggcggaagaagctcaacgagcggctctacaagctcaggtcgctcgtcccgaacatctccaagatggaccgcgcggcgatcctcggggacgccatcgactacatcgtgggcctgcagaaccaggtgaaggcgctgcaggacgagctggaggacccggcggacggcgccggcgcccccgacgtcctcctggaccacccgccgccggcgagcctggtggggctggagaacgacgagtcgccgcccacgagccaccagcacccgctcgccgggaccaagagggcccgtgcggcggcggaggaggaggaggaggagaaggggaatgacatggagccgcaggtggaggtgcggcaggtggaggccaacgagttcttcctgcagatgctgtgcgagcgccggcccgggcgctttgtccagatcatggactccatcgccgacctgggactggaggtcaccaacgtcaacgtcacctcccacgagagcctcgtcctcaacgtcttccgcgccgccaggcgggacaatgaggtggcagtgcaggcggacagactgagggactcgctgctggaggtgatgcgggagccgtacggcgtatggtcgtcgtcggcgccgcccgtggggatgagcggcagcggcatcgccgacgtgaagcatgacagcgtggacatgaagctcgatggcatcatcgacgggcaggcggcaccgagcgtcgcagtgggggtttcagaggatcactacggcggctacaaccatctcctccaatacctcgcttgatcattatttaattgcgttcgttcatgttgaaagttcgatcaaactatcaaaggatggatcaactaataaaaacgggatccatatataagtaactgtgaattgcgatcattaattgtatgcatacaagcatatggtcgtggattaaagtttgttaattgggttttctc

SEQ ID NO: 179105 - DNA, 663 bp, Zea mays
  Clone ID: MRT4577_94927C.1
aggcgtcgctcttccatctctcttcgtctcaccggccgatccatggctgcccatctgcgatccatcagtttgcccacaaggccccactccctcatcctcaaagccgagcaggagctgcagcgcctcaggtcctgctgcgctccggtgtcgcccccgccaccagtgcacgccctgcgcgccttgctccaggacctgagcaacctgcacgagtacaccgaggagatcgcccgcctgcccagcaactgggacgcgctccgtagatacttgcggtctttaattctctctttacacatatcttggtctttcattctctcatcaccagcgtatgacaacgggcagtctgtgtttcccgaggaagttgaagaggaagtccctgatcagcagtttggtgaaggttgtccacattgcaaccactgcttaggaggagacgaagtcacggaaggagacttccaggagttccaagactacgacgaattctaggtgtgggttggcggcaacccccagtcagctgcctgtgaaggccttatctttactgtgtttcgctagcactttgatttatctgttaagtcgatgactatgtggatgtctatgactctgtgatgtaataagttaatactcttttatgttattattcgagcaatgtgcgttgatgttcatttatgt

SEQ ID NO: 179106 - DNA, 340 bp, Zea mays
  Clone ID: MRT4577_94928C.1
cccactcctgcgtcgcttacttcctctattactacaaaagctccacctacatcataccgtgccatatcatatcatacacgctcttcaactacataccatatgctacagcaacatcactccatgtacaaatcataaaaacaacgccattctaactctccagcttcgatttgaccatcgacaagcgctaccgcaccttttactctactcgatcacaatactccttatcccctacttcaaggcatcaccatttgaagctgaccaagcgctatgacatcggtgcggacaaactgtctattgccattactcaaaccatcctaacaccctacctgtccgaacaaat

SEQ ID NO: 179107 - DNA, 1654 bp, Zea mays
  Clone ID: MRT4577_94929C.1
gacattctccctccgccccagcgcgccccccgcgccgcctcgtgccgggctgccccgcgctcgggcctgtttcgcgcccgccatccgcacctccccttccgtcgccttttcctaccagcctcggcgcttcagtggcatccgccgcgccgtggccgtcgactccgagcagggctcccccgagtctccagagcaggagaagaagcccaagacgtactacttcctggtggcaaacgccaagttcatgctggacgaggaggagcatttccaggagcaactcgccgagaagctgcgcaactacgccgagcgcgacaaggagcaggacttctggctcgtcgtggagcccaagttcctcgacaggttccccaacatcaccaagcgcctcaagcgccccgccgtcgcgcttgtctccaccgacggcaactggatcacattcatgaagttaaggctagacagggtcttacaagaccagttcgacgcagaatcagttgaagaggcattggcttctaaccctgttgagttgaaatttgagaagcctgagaaatggacagctccgtaccctaaatatgggtttggatggtgggaacccttcttgcctccaaagttcagcaatggtacggcatagagataagcagcaatccctatgaggcatgtaagattactcccctgttataacacgaggcactactacttgctcagtctaccagaccaaaataaagacctctgtgccacgaagcacgaacagatggacaatgccaatcacaataattctcaagactacaagcagagtcagatagcaaagccaagaacaggaagaatccactgcgccatcaagaggaggaagaagcgccgggtagaaaagcgcatcctacggtgcctggatacatacatgacaccacgcagtagagggggtgtgacaacgcaggtgcgcggcagctaagcgccccacacggtgatcccctgcatcatgttcttgaactcgccgaagtcgacgcggccgtcgcagttgcggtcgacgttgcagatcatctcctgcacagtggccaggttccgagcctcgggcaggccgagcttcttgagcacggcctgcagctcggcggccgagatgaagccgtcgccgtcctcatcgaacacccggaacgcctccttcatgtccccctcgtcgtcgtcgtcctcggtcacagccaccggcatggggccgaacagcgcgtccccgagcgcgcggtggagggactcgaagtcgtcgaagcggagccccgcggcgccggccgggatgtacccgccaaccgcggcctccaggccggagcggtcggcgccgaggccgagcgcgtcgagcgccgaggccatctcgtcgagggtgatctcgccgtcgccgttgcggtcgaagaggtcgaacacgcggcgcaggcgcagtgcgttgaggctgccgttccggaggcggaacgacggcgagggcttcttggacagcgacggcttagcgatggcggaggcggcgttctccatcgtcacgtgaactcgcggcgttcagtctcttcttttcttcgggtgttttgtgggcgtgaggatacgagggcggattatttctggagttcgttcagtgtggctgggtgtcggtgagattttatagagctagagaaaacgcggcggggtctctgtc

SEQ ID NO: 179108 - DNA, 120 bp, Zea mays
  unsure (1)..(120): unsure at all n locations
  Clone ID: MRT4577_9492C.1
nccgtcggtaccgtacgaactcggagtcgtctcgatgcgtcactattgttctcaatgatcaggcatgatggtagcagtcaggagtactgtcgtcatagcgtattagcgtgcgagaacgtg

SEQ ID NO: 179109 - DNA, 481 bp, Zea mays
  Clone ID: MRT4577_94930C.1
aatcattccggccatttttccccaccaaattttctttaaaaaccttagaattctggggattggttttaaacctttgcctttggccatttttttttaaggaaatttttacctttaaaagacaattttatttttttaaaaagaaatttaaaattttcccgttttaggctaattttttttggattttttttttatgagccaccgggtttgggattccggggtttaaggcaggttaaaattaaaaggttattatgctaaacctttcgaaatatggttggccggattccctattaaaatttcaaccttctttttgggaaatccttggtctccttccaatggcatgggccttttaaattttagggcatttatttttttaaaaggcagcaccttttcttttttttaaaaaaaaaggctggtaccaccttgtaaaatggacctttccgagaacctcaaaaaaccaattttcccctgaaaggatgatttt

SEQ ID NO: 179110 - DNA, 474 bp, Zea mays
  Clone ID: MRT4577_94931C.1
ctacttatctactgctatgtcactactatacaaaatctcccccagggtcgaggccagcttgcacctgcatagcaacatggacgaactcctccccgcatgcaaccccttcatcaccgcggatcacatgacctacatagacaagtacgacaccatgcacagacaatgatggcacttcgactgcttcctttatgaatccaacaagtttctcttgcatacaaaattatttatgcggcttcgccatcaggaaccccgaggagatcccgtggggtgacgctggtgctttttttgtcgcggagtccaccgccgtcttcactgacaaggacaacgctgctgtacatctgaagggaggtgccaagaaccgcgttatctctgccccaagcaaagatgcacccatgtcggatgttcgggtcaatgaagacaagtacacctcccatgttaacattgtttccaatgctagcctgcacccccaaactg

SEQ ID NO: 179111 - DNA, 343 bp, Zea mays
  Clone ID: MRT4577_94932C.1
tttttgtacggttttcatcatcattccagaacagcagccccgaaagcacatcatgccatgccagggtacgagccaagtttcaaccaacatacgccacccccacgcatatcattacgagcacacctaccgccgggcttagccccagatgcagagccattccacggaggaaaatcaaagcttggccgtggcagaccttgtcacgatgagtgtgaggaaccgccccaatcatggcgccaacaagcccattggcggcacattgatcatgtcgatggtgggaggcgacgccgaccttgaccgtgacccacgaggcgacatggacgctggcccgggtgacctatgagga

SEQ ID NO: 179112 - DNA, 358 bp, Zea mays
  Clone ID: MRT4577_94933C.1
atgcctaccgttgtctttcaatttgccaacagcaagcgcgtggcgacccactctactctggcttgggccgctggtcaacaccggcctattcaggaggcggactctgctagcggagccagacggcgctatgaccccaagccgggggaaaaaatggtcggcgacaaaattactgacacagaggcgcgcctaaacaataaggaaaacaccgagggggtcgccaggctgctctccaactatcttttgggggtcgaccgcgacagctcttaccgaagaaaaaacaagctccgcctcggtttaaaagcatcccccccccgcccggggaatgctttttttactacggacccaaggggggtttttt

SEQ ID NO: 179113 - DNA, 1610 bp, Zea mays
  Clone ID: MRT4577_94934C.1
ctcaaccttcagaggagccccctaagaggttaattgagcaacacagatggccagccatgatagctgggcaggcgccgaagaatctcatgtcaagaagcattgacctttcggacaaagctaatataccagtcccaccatcaaatacatcaagaggtctttcaccaaggaagacgccttctgtcagacctgttgcatcatcaaatacatcaagaggcctttcaccaaggaagaccccttctgtcggaccagtcccatcatcaaatacatcaagatgcccttcaccaatgaagaccccttctgttgaagcttcagtgaaactgtcaaatcagtcattggatgaagtggcaaggagtttggctattcaatcaagcagaagagatgataaggtagattcacagacaatagagagatccaaatctttgagccgaccaaacagaacagttacttttcctgttccaattctacaacgctcatcatcaccaagcagaacattgccagctacgtcctcaacttccagggcctttcagagcccatctcggacaaggccatcaacaccctgtcagtcccaaagtgctggagctatccaatcaagtgttccatcttctcttattaactacatggttgatgcgcggaaaggaaagaagaatgccagccaaatcgaaaatatccaccaagtgcgtttattgcacaatagacatttacagtggctctttataaatgcttatgcagaagatgctttatcttttcaaaaggctactgttgagaataccatgtataatgtttggaggaatactgtaaacctgcgggattctgttaatatgaaaagaataatggtgcaacacttccaacaagaactcaggctttacaacattctgaaagagcagattgcttaccttgaacaatggccaacgctagaaagggagaatagtatctctttactaggggcaactgaggctctgaaagcaagcaccctgcgcctgccagttacattgggagcaaaggctaacacaattgctctcaagaacgctgtaagctcagctgttgatgtcatgcaagttttgggctcatctgtttgctgcattcattcaaagatcacggacagcacatccttggtttcagaactctctgtcatagcaggacaagagaagatcatgcttgatgaatgccgagaactcttagctacagctgcaaaactgcaggtgcaggagtcgagcctacggacacatcttgtgcaacagagacaaaggcttcaggattgaaatggcaacctgaacaagatgcagaagccccaggccatgccattgaacaggtaaactgtgcaagttgaactgcaaacagaaaagtaatctgtagagtctaaacaataggaacaaaacaaatgttaaacatcccctggagattcatggtgtgatgccacaactaactacccgcagtgcatagatatgacaggtttactgaaaaaacctcatcatatgtaaatggttttcaccatataatgcactcccagccttttctagtattttttgtttctttgtatagagtggatccctccctctttgccattgtattttttgacattttgaaagaaatacatagataatggatgagct

SEQ ID NO: 179114 - DNA, 352 bp, Zea mays
  Clone ID: MRT4577_94935C.1
acgccaagagttgatgcaggaaaagagggcgaattagcaactgcttcaaggccagggggtcgatgtttctttttagaatgacaggggtgctactaatggcaaaccatggtcacagaaacaggcaacgtgcatgtaatgcactccttgcttatgtgtctttgtatgcctttaaattctttttcttttatttcttacattttatttccactttctatattttttttcctgttcttcatttttaactaattatattttttatatttttattcttttttccttttattatttattattttactttattatcttttcttttattttttttttattattctttttttttttatatact

SEQ ID NO: 179115 - DNA, 1509 bp, Zea mays
  Clone ID: MRT4577_94936C.1
cgggtttctttttcagaactgcattgccttattatgaaatccaaatagcagcaacaaactactatatgaaggccatcagtgtatttgaatgatctcacattcagatattcagattataatctgcacccatcttcccctaatttaaccagttctacaatgaggtctacgcaaaatgttgcattgatcttccattcatatattctctgtctgttgattctgaacctttatattctccaccgatcttccagtgattccactagttttacaattagatctatgcataatgttgcattgctatatatgcaaactataattcattgaacctatagaagaactcgtcttctatggaagcttatttcattttgaatgtgtatttcatggagcgccccatatggtgctaaaggtatgtttgtcacatagctaactttcatcattcattctctctatatttgataatttcattgaccttgctattttctcacaggtcaagtacgctacttaacctggtcaaaatgtagttctgagaggaaaaggtaacttattgtgtgcacttttgttctattttgccggtgcaatatctctttaattacagattgtaacactgctattatgcgtctatggaacgattagtccaaacgttttctggaacatagcgatggtagagattattttcgtctgaggaactaacaaaattatgaatcgatcgagcaatcaaattctcctacgtgtgtgttatgacttggaaatttatctggcatctaggtgaactgccaaatgtgaattgaacacattgtggggacttgcatgtttacctaaattgtgatgtatctatcttgcaggaatcaagaaaaaaagtcaccataccacgaagatcaatatgtccatttcagtgtcaacatccccgagtaagcaagcatagccgcctctcaagatggagtacacttatgctattatgcatcatactgctgcaggcgagctcacatgtgaccattctccgctgtcaggtgatggtgatatccatctccatgctattgtttaattatttgtatatatatactacgcatgcaggagaaggacgtggtgaccatggagtacctttcactgaaagagtcgaacgagcaactaaactagaaggttgaaagtatagttatgagaatcatttcaatgctctctagtttgaatgaccagtgcccagcgaatatcgaagctgccgttggaaccaacaaaaacctgcctaaaaggatgcgagggaattggaatgattgcttcacttttcattttagttagattagaaagagtgataagtcgacttaatagaagttcaatgtaaatatgaatgcattatatgttggtacatgtttgaacttgtgaactaaaaatgtgtactatggatgtgaacttatgtatttggacttatgtgaatttgcgaacttatgtatttggacttatgtgaatttgtgatatgaacatatatcaatgtgtttgaaaaaaaaaaaaaaaaaagcggcc

SEQ ID NO: 179116 - DNA, 179 bp, Zea mays
  unsure (1)..(179): unsure at all n locations
  Clone ID: MRT4577_94937C.1
cgtcaagataccctccttccctttcattttgttttcaaacccacctagancaaaatgcggggtaacacaggtataatgtttagcccccacncgccnacaccgcacgccgggagccggaagaagggtggaccatgagcgcgaccgggcgagccccgtgcggtctgcctcgcatcgacctg

SEQ ID NO: 179117 - DNA, 307 bp, Zea mays
  Clone ID: MRT4577_94938C.1
tctgactctttgtcggacgcgtggtatttaaaaaaaaaaaaaaaaaaaaaaaaagggagagataaaaaaaaaaaaaaaaaaaaaaaaaaaaaaaaaaaaaaaaaaaaaaaaaaggggcggcccctcccgatttttaaatcccgagcggccccttttgaggttccatgcttactttctctttcttgcgacttcatatttttttttttgcggcacctaaatttatttcactgccccccgttttacaacttttttacttggaaaaccctgttgttccccaacttattttccttccacttcattccctttt

SEQ ID NO: 179118 - DNA, 472 bp, Zea mays
  unsure (1)..(472): unsure at all n locations
  Clone ID: MRT4577_94939C.1
tgcggacgcgtgggcggacgcgtgggttaccatgtccagacatagcaaggattgacagacggcccgacacgtccgtccgtgctggcttgtacttgcaaccacaccacaccaccacccagcctccccaacgatgacggcggcggcagtggcaccggcggtcgctagcagggtgtgggagtgggaggggaaggnnnncaaannnnactntacnnnttngnnnnnttagctgaaggctaccctgagacatataattcaagtacattgcagtctctggaatcattttaggacttacagctccagtttcattctttattgacagtaaccagcttgctaccttgcaagtgatcatccttcactggttaatcttttatgggcatcaagacaaattcatacagtgacaattggaaaggtcttttcaaagggcgcactgatgcttattttggcaaaggttacattgttttgactcctcaac

SEQ ID NO: 179119 - DNA, 800 bp, Zea mays
  Clone ID: MRT4577_9493C.1
taaggtgttagatgataagtctacgggagatgggaaacctgtagagaatgcccagtcgcgacgaatgaggattcaacaacagttgagaatactctgaaggatgcaatggttgcgccaccaggtacaaataccaccaacgccgaagaaactgctctgggtgccacagttaaagcactagatgaggatgctctagcagtggagaagactatagaggatacctcggttgaggcatcagatgtacaagcaggcaggtgcaagtgagtaaaccagcttatcgaaccttgcgttcctgtcagtttctgttgatatcgacgtagtttgctcaactgattctctcatctagaactttagatgatgtgttctgtatagaaaacctgaaactactttagcatcataaggccattaggtattgacaactagggcatctatatccttctcccccttttttgctctataaacttcacctagttgtattgggcgcgtacgtgttggtgttgtcataaacacaatttcctcctatatgtcagttcaatgctcaggtgatcagtgactgagtgaaagccttgaatcaatagggggaaggcatgttcattactacatttaacggttaggcttgcgagtctttagattatctacttggatcaaatgattcttgtatcatttgccatttgtaaccaactgtgttctggaatccttttatcatattacgtagaatatttagataattctatcttctcattggtgcggccaaaaaaaaaaattaaatataattaattaaaatataaaatttttaaattaaa

SEQ ID NO: 179120 - DNA, 287 bp, Zea mays
  Clone ID: MRT4577_94940C.1
gcataaaaaggtgagcacaaccattcatttcacgtatcgaatacaatccaggctgtgatggccgccaattttacaggacataataaaaccacctatggagagatgttgatctgagacttgcaactccttcatttccaaaatcaacaggataaagaattggctgaccggatacaaagacctaaatatgctaactggggatgaagaaaagaggacctcctctcataactaaaacgatcacttaaaatgctgcgccaggaaacataacaccgctgctaatgagaggccag

SEQ ID NO: 179121 - DNA, 262 bp, Zea mays
  Clone ID: MRT4577_94941C.1
ggcactatcgctgggtgtgcattagatgtcgctgaagggccccagtctaccgtatcatgagtatgaaacttgtatattgtaccccataggtatcatttggagtttagcttttatcaaactgcgtaagctgccatatgtactggttcttcctcggaatgcagaatacagtgaagatgtgtggatggatatcagagacgtcgcaatcgcaatattgcagtcctttctctatgatggcgttgttccttacaatgttatttctgat

SEQ ID NO: 179122 - DNA, 124 bp, Zea mays
  Clone ID: MRT4577_94942C.1
tggccccaggcttccgcccacccttccggttttggaccgggggcggccgttttggaggacccaggcttacgtccgcgggctggcgacgtattagtttttttatggggcaacctaaatcaaatta

SEQ ID NO: 179123 - DNA, 378 bp, Zea mays
  Clone ID: MRT4577_94943C.1
gcggggcacacacacacacacacacacgacgccggagggcagcgagcgtctctcctccacgacgctcgcgccgaggaagaaagagagaccgccgctccccctgtaggcgtcggtggtgcgggtgcccttcctcgtcgagcgagatctgggtgctcacagatctatctgacaaactggagaagcagctgctgcatcggtgctggatatggcggtggagcagccgtggccgttattgccctgaagtgcccagacattgaggtcgtcggcgctgacatctccaagccccgcattgaggcctggaacagtgacaccctgccaatctacgagcctggtctcgatgatgcggcgaagcagcggaggggcacgaacctcttcttc

SEQ ID NO: 179124 - DNA, 2222 bp, Zea mays
  Clone ID: MRT4577_94944C.1
aggcccgcatggtatgggatccgtctctccactctcttctctaccgaacacaatctcatccgtcttcctcttccccatcagccgccctaccgagtcttcgcacgcacgacgcttcgtcaggatcgattcgcgagacctctcctgtccggatcgaggttcatggtttacatatgcgcgtttgtttactgatgcataccacgaccacctgatccggatgtcaggacagatctcctgctttaatcgagtccagttcatgtatgaactctcccttttcctggcacgttgctagatgtaaaagggtgttccgggatttaagagaaccacccacgcatccatgtctgaccagcaaaggcactacggcagctacgagctcctcccggctcacccagatttgcggtgcctggtctgcacgcggccgttcactcttgacgccgaggtcaccgacagcttggaagctttagccatatgcagggagtgcaagacgacggtgcttagtgacagcaacagggacgacactccccgagccaaccgacagagaagatggcgaaggcagcaaagctccatcaggggggtctcggtgttctcgcagctgatcaacctagctagacaacagggtcatgaggcggacactgattctccgacggttccccgccgccacacatcctatagttctacgccgagccggtcccagagggggcacacttccgacgacgagagcgatggtctgagctacgccgattccgtgtttggtgagatcgagtcgaacatcagttttggtgatgagggtggggaatctgacacttctcttgatcgccacaccatggttgggagggaaattggcatacagcttgacaatgagagctacatgaacacagatacagatattgatcctatgaatgctggagtataccagtgggactcagacgatcctgaagacgatgaagatgaggagtcagaggagtctggtttggatgaaggagatgacaccatgcaggagcgccggcagcagtggcatgatatcgccccgagtggattgaatgagcaggaatctgaaggtgctgcatggacttggagaacagttggaagccaagacataaacaggactgatctgagagtcgacatggaaggacgggaaatcaggagactttttattgggaaccccggagattatgttgatgcaagacagtttgaaatgcttctcgagcaattcgctgatgaggataacaattccagaagaggagctccacctgcagcggcatcttccatcgaaaatctttcgtctgtggtcatctccaaaggctatgagataaacggtggtgtaacctgtccagtctgcaaagatgacatgcctatcaccactgtagcaaaacagctaccatgcatgcatctctatcattcatcttgcatcttgccatggcttaattctaggaacacatgcccagtttgtcgttacgagcttcctacagatgactcggaatatgagaggtccaagcatgccgcggtcaatgaaggaggtatccatggggtggagcgtacccatccgcaggaagttgttgaagaaacttatgaacctgaggttgatggaggttccaatacaggcggtgatacaatgaatgagactaatacacatgaacagcatactgcacagcagccaaatggagcacatgggcgtcatagatggctgtttattgcagcagctccagttgtaagtcttgtcagtttagctctagttttgtgcttcaccaatcctgctggcaatgttaggaggcaattgtgccgtaggtcccagactaccactacggcacatgtagacacaagaagaagttggtggtctatgttctaagtaaccagtgtttacttgctgatgctgaatttctgtgtgatggcgtgtgcttgttgccacttgccagtgttgtgtcaattatgtatgaaaaggttctagataaatttgaagtgcaaactgtgtgtgccaaccaaggtgttcttgtaaccaagttcagacagttcagcaaaacaaatactgatgattgctgctgttcattgatattttatatgtttggttgctcaggttgtaacttcaagcatgtaactaacactctgccttaaagtttacccatgcattcatcagtaagtgcctaaaaaaaaaaaaaaaaaaaaaaaaaaaaaaaaaaaaaaaaaaaaaaaaaggaaaacaatataaaagaatacaatttgggcggccg

SEQ ID NO: 179125 - DNA, 798 bp, Zea mays
  Clone ID: MRT4577_94945C.1
atcgacacgttcgggcaaaggacctctatatatcgaggtgtaacaaggcatagatggacagggcggtatgaggctcatctatgggataatagttgtagaagggaagggcagagtcgcaagggtaggcaagtttaccttggtggctatgacaaggaggacaaggcagcaagggcttacgatttggcagctctcaagtattggggcactacgacaacaacaaatttccctataagcaactacgaaaaagagctagaagaaatgaaacatatgactagacaggagtacattgcatacctaagaagaaatagcagtggattttctcgtggggcatcaaagtatcgtggagtaactagacatcatcagcatgggagatggcaagcaaggatagggagagttgcaggaaacaaggatctttacttgggcacattcagcaccgaggaggaggcggcggaggcctacgacatcgccgcgatcaagttccgcggtctcaacgccgtcaccaacttcgacatgagccgctacgacgtgaagagcatcctcgagagcagcacactgcctgtcggcggtgcggccaggcgcctcaaggacgccgtggaccacgtggaggccggcgccaccatctggcgcgccgacatggacggcgccgtgatctcccagctggccgaagccgggatgggcggctacgcctcgtacggccaccacggctggccgaccatcgcgttccagcagccgtcgccgctctccgtccactacccgtacggccagccgtcccgcgggtggtgcaaacccgagcaggac

SEQ ID NO: 179126 - DNA, 431 bp, Zea mays
  Clone ID: MRT4577_94946C.1
taatacaagcacaccaagccgcagaaccacagggggcttgttcagagcgcattgtcggctttcacgaccagcgaatgagcagcttgccatcaccatctccccgtgacctaacaatcacagccccgcggcccagcagcggtacgtgaccctgactccgcagagacagctatctcgccggaaatgaacctggccgagcgcaacctgagagcacaacacaaccagaccgactcatgcatgcgacaggcataaaagatggccagagcacaaactggggagacggcagtggtggtggcagccatcaaccgaaaagactgctgccacgccgccaaggagcccagatacaccacgcccctagaggccatggagaagggccccagggagaagcttatctacgtcacctgcgtcaacaacggcactggaaataaacaagc

SEQ ID NO: 179127 - DNA, 341 bp, Zea mays
  unsure (1)..(341): unsure at all n locations
  Clone ID: MRT4577_94947C.1
aatactntanctactaactcgagtgccactgtgcctcaactgcctgctcaccattactggaagctgggttcaatcaaagcttaattaggctccctctacatctgatccagctaagtagctagccagcactacataatggcgtggcaagaatcatgagagagatatcagtggggctatctatcttagctcgtgcgactaacaatggcctgaattggcaagaacattgttgcgcctctcctggttctcaacctcatcatgtacattatccacattggctttgcgagctggaaccttaaccactttatcaacggtcagaccaactacccttttgtgtccgtcaa

SEQ ID NO: 179128 - DNA, 825 bp, Zea mays
  unsure (1)..(825): unsure at all n locations
  Clone ID: MRT4577_94948C.1
gtcattgctttactttcactcaagaagaaagaaacatcgccagattggtagaagcaaagacgcaggaggaggaggaattcatagtagatgcgtgcgcgtggatgaggattcgggggttggcgatgagcggcggcagggaggtggcgatctccgccgtcttcacggcgctcctcgtcgtctccatcctctttctcccctcggtcctgctcaccagcggcaggctcggcccatcgtccgccaaggagtggccgttcctcacggcggccaaggacggcggcggctacccggtgtcgttcgcgtacctcatctctgcgtcgacgggggacgcggagcgagcgacgaggctgctggcggcgctgtaccacccggccaacagctacctgctgcacctggaccgcgatgcccccgccgaggagcaccgccggctggctgagctggtgtccgggcagcccgtgtacgggcgcgtggggaacgtgtggatcgtcgggaagcccaacctcgtcacctaccgcgggccgaccatgctgtccaccactctccacgccatggcggtgctcctccgcgtcggccgccgctgggactggttcgtcaacctcagcgcctccgactatccgctcgtcacccaggacgatttgatggaggcgttctcgcggctgccgagggatctcaacttcatacagcacaccagccacctgggctggaagataaagaagcgggcgcggccggtgatcctggacacggcactttaccaggnncgaccggtcggagctcctccgcccgtcgcctacatcaccaccanccgccggggacttcccaccgccttca

SEQ ID NO: 179129 - DNA, 475 bp, Zea mays
  Clone ID: MRT4577_94949C.1
ctcgcttgtggggccataactgcaggtaagtaagtacaacaaacatgtgcctccttgatatatgcctgaacaatttgttgttgacgatggttctttaagaatttcctaatacaggactaattgatagatcaatttgtcataggtttgcacacaaaggactacttcagatacttcacctcactgacagtaggagaaacctagcgatatgattagcctataaaaggttatggacatactagctgctaaatgttgttaaggtggtgctcgatctattatttagagaataatatgagctgtaagaactgatatattattggtactcatattttgcgaacctttgacaaacaaccaagtgaactttttcatgtgctatcacttaaagctcaggattcttttgatgaagcgatattaatagtggagacacacatcatgctctgtatatagcattgtaagaattctatctgattacattact

SEQ ID NO: 179130 - DNA, 389 bp, Zea mays
  Clone ID: MRT4577_9494C.1
cgagtgcttgaacgacagcgacggcgtgcataagtacatcctaatcggggacgtgcctgtctccaacactgaccacattaagatggcacacaatgtcattagcgcccattgcgcacgttcattgaggtggatttggagaacacctagaagagcagttacaccattcacatatacggatacaccttgttcgtctgatgtatggagcctacctaatggtcgctagcgtcgcggagtacgtacaacctactggacactgtgagccgtgatacaacacaggtgtacacaaggtcgtggacggtggcgatgacaacgttagacaacgactgcatgtgtggctgccgctccaacatatatcagaggcagatccttccatagcagatgttcgtgag

SEQ ID NO: 179131 - DNA, 310 bp, Zea mays
  Clone ID: MRT4577_94950C.1
acccattggacgctcggcatagttttactaattcaggtcacctgtatgaaaatctgtctagccttgggagagatccgagtagtcttgtctgctgaaccagcttaaggaaatgattccttggatttgtggatcaccagtaactccaaggaatgtaaaagcattgatgttgggagaactaatgcctcatctgatggatggcaggatttttgccagctctgatcaagctcacagaattactaacgttcatgtggagggacatgttgcaaatgatccttgcggcgcttgtactttggacttatgggcctaaagt

SEQ ID NO: 179132 - DNA, 418 bp, Zea mays
  Clone ID: MRT4577_94951C.1
ccccaaaaggggggaaagggggcaaaacaccttaaaacaaccaaacaaaaaggggccgaagagaggaccaaaaagccaaaaacccgccgggggggcgggggagcccaaaccagggattcatctttcaaaccagggggggggggctacaaaacggccaggacccaaaaaaacaaatcccaccatcggaaaaacccccccccgcggaaatttgccaccccaccaaaaaatcttcacccaacaatctcgggggcacccccaagttaggcaaaaccagcaggctttggctcggaaggctttttgaccggggtctcaggccccatccaaattttaaaaacggggaggcccggcccaaccccaaaaatctggggccccatttaaacaaatcctaaccggccccgggggccccccccggaaaccc

SEQ ID NO: 179133 - DNA, 296 bp, Zea mays
  Clone ID: MRT4577_94952C.1
ccaggctccaggactaccaccactccgtctcgtgtcgtcctcacacgccactcgaccaccacctcgggcttgcaaagctttccaccgatccgcccgcttggtccggcccttgcaagccgcaatgtggactaccccccccatacttcattccctaattgaagggtacacccaccttcagttattaaattgggccaggagaagtggttcatttcaacaaggattctttttgggagcccaagccatcttacccttccttgtatttgggggggggtggtctggactctttctttaaattg

SEQ ID NO: 179134 - DNA, 882 bp, Zea mays
  Clone ID: MRT4577_94953C.1
tttttttttttttttttcggtaactgacgctagtcatattattgtcagataaatgaagccagacaatcagaactgacggtagaatattggcttgtaacaaaactaggaggaactgctgttagctgctggtttcaaacaatcagacttccttgctcaactgagatgacaattagtccagtaagatgcattccgatcacactttaaaccacagaacccacagcagctcagaacattcgatgaatttcgggacaagttacacatgtaataaaacctcacaaaactcttgctagcttattcgacaagttcgactcgtacaatcgcgaggggggcaagggcaagggggcaacaaagctaagcagactccgacttggtgtacatcctaacggcaacagccaagcccaggattgccaggggaaccaaaaactggaggatcttgatgacaaactcgggagtcttgtcctggttgtagtgcggttgtttcggggggacatacttcgtcctggaagggatcgtcgacgcgtcgatttcacccaccaagtactcatccatcatcgcgcgggcagtgttgctgtgaccgacatcctcgaaatcatcagtcgcatccttgccagttgaggacaacagaacatcatcacctcctgggtggtctaccaaaaacttcgtcacatcatacaccttgccgccgatgatgagccagcaatcctccttggagttgtgcttggcgaccgcgtcgagggtgaagaccttggacatggctgctgcctgctgtctggatcgaggaggtcgatggcgaggtggttggttgcggtccctccttttaaaaccgcggcggctggtccagctccgcgagccacaaatccgatcgactgccaaatttcgtct

SEQ ID NO: 179135 - DNA, 354 bp, Zea mays
  Clone ID: MRT4577_94954C.1
attcggctcgaggtttagaacatatatcactttttttttctgtccagtcgcagcatcgagctgtggcagccacggacgccagagttgccgttagcatggtgaagaagggggcggacgttcacgaggctctcaggaccagcatgcagtaaatggcggtggtcacaccagggcgttctgtaattcatcggtttcctgatcgtggagtacctcaagatgggtctgtacatacagaacattggcaattgtggccacgtgtacctagccgacgttttagatttcctactcagcaaggttctgcagcaggcagtgaacgtgcagtgagactacacgcagactcgcatcatacctagccac

SEQ ID NO: 179136 - DNA, 377 bp, Zea mays
  Clone ID: MRT4577_94955C.1
cctttttttttttttttttatgcatcatattgctgggtaggtgatataaaaaagaaaaaagagagttcttattcaccgatcttctaacaagatcaaataacacctaacagagcggtcggcgacatttatttatttatttattatttatttctggggggagaagaactggaaagaaccaaacttttcttgggtgtttatgccgaacgtcaaaagattacacctttcacacgggtttggcgccttcgcctccaaccaaattctaaaaataaaaataagagaacggggcacagggggatttcccctcgggagaatggcccatgttttttctttttgggggagcaaacaaaacacattttatgccccccccccgacagccc

SEQ ID NO: 179137 - DNA, 275 bp, Zea mays
  Clone ID: MRT4577_94956C.1
cccacccgtccgccaactcgtccaaaacgagaggggtggggtggtactctgctggaaccgccgcactcacggttgcggacaataacctgtacctgacgagctatgcagtaccgaagacacaaacacttgtcgtatgcgtactgttaagcccatgctcttgtcttgtacgcatgcaatagcgctccttgaccttgttacggcaatgactccaccttgtgctgttcttttcaactaggagtttaacggacaaagaattgaaaacgtatttagcactc

SEQ ID NO: 179138 - DNA, 1294 bp, Zea mays
  unsure (1)..(1294): unsure at all n locations
  Clone ID: MRT4577_94957C.1
cgaggctcgccgtcgcgtgagactgcgctaaaacctaggctttgagacaccaatggcctccgcgacggcgacggcgcccacattcgctctcgcatcgtccttctcgcgcggcggcttccttccgctccctcgtcacgccggccggcccatgcgtcagtctctgcgactcgtcgcgtcagccgtgnnnnnnnnnnnnnnnnnnnnnnnnnnnnnnnnnnnnnnnnnnnnnnnnnnnnnnnnnnnnnnngttcggcgacgaggagaacccgtatgagcttctgggcatcaggccgcttgatagcttcgatcacatgaaaatggcctacaagaagaagcgcaaggacgccgaggagactggagacgacgaattccttgccaagttggacagggcctatgacactgtcatgatgcagcagctgcagtatcggaagaagggagtcacatacgggtctgttcaggtgtccaaggatatcaagtatgctgacaatcaaccaatagtgctttggggaccaagattctccagatcaacagtgaaggacatgcgcataaatatggcaatatcagcagcatttgttgtttggatagctattatgggcaatgcagactggaagcctttgcagttcctatgttttgctttcttctgcagaatactacagaagctaagagctactgaaccactaataactccaatatacaatgaatatggggaggttgaaggacgaggaataagaatggcnnnaagagtagtccgtgctctgggtttgatttttgaatgtgtgttcactgcatccctggcttatacagcagctagtaacatggttgagctttcattgcagtatactccccgtatgttttactactatcaggagctgattgttactgtggctgcctccgttcttctgtacatcacggcttcatggtaccgataaacacgacaaaaaattatggcctggcttagatgattgcgagatgttaggacatgccttgagtttcagatagagaccaacctgtggtgccttccgcatctaagggatagccaagaacccgcaaattctgtagcattcttccagctttgaggcaggtagttcttagtggaggatcatgtgaccagctatggattcagtagtacaatgaagatggccaatggatgaaaattgtttcgcgagaatatttgaacagcggtgttgtccatgcaatttttaattagatcttggacatatgcttagacgacatacttaactgtgatgtgcatgtgctttttttgcctgaatgagtgctgagcttcttntgtgtt

SEQ ID NO: 179139 - DNA, 692 bp, Zea mays
  Clone ID: MRT4577_94958C.1
cgcgtgggcggccgcgtgggcggccgcgtgggtgaatatggtgaggtcgaaggacgagggataagaatggcaaaaagagtagtccgtgctttgggtttgatatttggatgtgtgttcgctgcatccctgggttatacagcagctattaacttgatcgagctttcaatgcagtacactccccgccttgtttattactaccaggagctgattgttacgatggctacctccgttcttctgtgcatcacagcctcatactaccgatgaacacgacgagcagtgacggcctggctgaggcgattgtgagatagccgagaatccagaaattttgtagcatacttccaccagcacctgtcagctttgaggcagagagttcttagtgcaggatcatacatgaccacttgtggcacaatgcagatgaccaatggatgaaaaacatttggcgtgaatacttcaacagcagtgttgtgtgtgtgcaatttttaattaggtcttcgacatgtttagacaacatggttagctgcaatgtgcatgtgctttgttttgcctcgatcaatgaatgaatgaaagtactagctgctgcttctttgttaagctgcctctccggagcggagctcccatttgtcggacacacaatgctgctcccatttgtatacgaacctgctgttatgcaatgtgaactttaaactcatatc

SEQ ID NO: 179140 - DNA, 1584 bp, Zea mays
  Clone ID: MRT4577_94959C.1
cgcacgcgtccgcccacgcgtccggcgactcgccctggctcccggcctccggcttcttctcctcgccgtcgcgtgagactgcgctaaaacctaggctttgagacaccaatggcctccgcgacggcgacggcgcccacattcgctctcgcatcgtccttctcgcgcggcggcttccttccgctccctcgtcgcgccggccggcccatgcttcagtctctgcggctcgtcgcgtcagccgtgaagcggcggcgcggcgcggtcgtggtggcagcggacgcggcggcggcggccgggagcgcggagttcggcgacgaggagaacccgtatgagcttctgggcatcaggccgcttgatagcttcgatcacatgaaaatggcctacaagaagaagcgcaaggacgccgaggagactggagacgacgagttccttgccaagttggacagggcctatgacactgtcatgatgcagcagctgcagtatcggaagaagggagtcacatacgggtctgttcaggtgtccaaggatatcaagtatgctgacaatcaaccagtggtgccttggggaccaagattctcccgatcaacagtgaaggacatgcgcataaatatggcagtatcagcagcatttgttgtttggatagctattatgggcaatgcagactggaagcctttgcagttcctatgttttgctttcttctacagaatactacagaagctaagagctactgaaccaccaataactccaatatacaatgaatatggtgaggtcgaaggacgaaagaatggaaaaacaaaaagagtagtccgtgctttgggtttgttttggatgtgtgtttcacgctgcatccctgcttatacagcagctagttaacatggttgagcttttcattgcagtatactcccccgtatgtttttactactaccagcagctgattgttactgtggctgcctttcttctgtgcatcacagcctcatactaccggaccaataaacacgacacagcaatgacggcctggctgagattgttagatagccgagaatccacaaattttgtagcatacttccaccagcacctgtcagctttgaggcagagagttcttagtgcaggatcatacatgaccacttgtggcacaatgcagatgaccaatggatgaaaaacatttggcgtgaatacttcaacagcagtgttgtgtgtgtgcaatttttaattaggtcttggacatgtttagacaacagggttagctgcaatgtgcatgtgctttgttttgcctcgatcaatgaatgaatgaaagtactagctgctgcttctttgttaagctgcctctccggagcggagctcccatttgtcggacacacaatgctgctcccatttgtatacgaacctgctgctatgcaatgtgaactttaaacttgtgtcatgaggggggggggggggggatgaaaattgtttcccgagaatatttgaacaacggtgttgtccacccaatttttaattagatcttggacatatgcttagccgacatacttaactgtgatgggcatgtgcttttttttgcctgaatgagtgctgagcttgttctgtgtt

SEQ ID NO: 179141 - DNA, 459 bp, Zea mays
  Clone ID: MRT4577_9495C.1
cctcaagaccaaataaaaaaaaaaagaaggggaaaaaaaagggcaaaaagcggccaaaaggaaagggaagagggaaaacaaagccaaacggggaaaccagcggcaaaaaaaaaacacccagggccaaacccgcccaaaagggctcacccgaaacaaaccacacaaaaaccccggggaaggacaacaacaaaagagaaagccaaaaagaaaaaaggcaccaaaacggaaaaaaagcaaggccaaaaccaaggcccttcaaaaggagccaaggagacaaggggcaagcaaaaagccgggggagggcaagggacccaacaaaaacaacagggcaaaaaaaggggccaaaaggaacccagcggaaccaaggcgcacggggggggcggccccgggaaccaccaaggagggggccaaaacggccggaacaaaaggggagccagcaaaaagccctggaaaaaaaga

SEQ ID NO: 179142 - DNA, 547 bp, Zea mays
  Clone ID: MRT4577_94960C.1
aactcacccctccgagttcggccaaaatcctcctcctctctacccgaacaaaccccagctgcatccatggcgaagccgcggcttcttctctgcctgctggtcgccgccgccgcgctcctgctcgtcgcctccgcgaagaagtccggcgacgtctcggcgctccagatcggcgtcaagtacaagccagaatcctgcagcatctcggctcacaaaggtgacagagttaaagttcactaccgtggaacacttaccgatggaacagttttcgattctagctttgaaaggggtgacccgattgaatttgaattgggcactggtcaagtgatcaaaggatgggatcagggaattttgggcatgtgcattggtgagaagaggaagctgaagatcccttcaaagctcggctatggggatcagggatcaccacctaccattccaggcggagcaactctcatattcgacacagagcttgtcgctgtcaatggcgagccatctagcaaatcagaggaggatgacgctgatctgtaggcagctcggcgcagcacgatcg

SEQ ID NO: 179143 - DNA, 282 bp, Zea mays
  Clone ID: MRT4577_94961C.1
cataaattcgggagtttatattcatgaggtcttctttttaattattgttgccgttaattaaatatacgtggtgagtataataatagtggcaaaataagaaggcgtggagccaaaaaaaagaagcggcggcgtttcaacaacaggggggggggttaaaattgggacccacacatgcaaaaaagaaaagggggtgctaaaaaaaaacgacgtaggacgaagagaataagcctctttacgggaagtattaactcatacaaaaccaaattttgatagggacaaata

SEQ ID NO: 179144 - DNA, 433 bp, Zea mays
  Clone ID: MRT4577_94962C.1
gccgcccttttttttttttttttttttttttttttttttgtttgttttttttttttttttttttgttttttttgacaatgctccttgaacccttatttaaaaccgaagcaaaaacactaaaccatgggggggggggccacccaagcaggagcaaaacaaaggcaacaaaactagaacggccaccttacttggacggcaaaaagaaaacgggctaaccacctccacactaagggggacaaaatacactattcagcccacgaagccccaaacaatttggccaaaaagctaaaacggccggcagcttcgaaaaccatttttggggtgggccagccagctccatgcccggacttccgaacaatgggaccaaaaatgggaacacggcggggggccgaccccagggcgggcacaaaggacaaggcgaaaagtggcaaaa

SEQ ID NO: 179145 - DNA, 288 bp, Zea mays
  Clone ID: MRT4577_94963C.1
actattctcgtcaagctgggccacttaacgaagcattatagacagtacatccctttgctggtgctctaacataagttatattcattgatcccctcgactcatgctaagaaatgaaagcatcttaccctatcgagccctgatttccaaaaatctgcaacatgttcaaaggtggccatcaaactcctatactgagtcctggcgcactggaccatatacgccataaaataatatcctatccatgatatgtaattggtgtatacatgcgtgcaatgtaggatgctcttatag

SEQ ID NO: 179146 - DNA, 249 bp, Zea mays
  Clone ID: MRT4577_94964C.1
ggtttgcacgttgtgcctaacatggatatctccttgactaacaccttccacagttgaaatgggagctgatcggatgttcaaactggagcaaaactctttcgagacaattgtcggagtctgcttggtagttggaacatggagaacctgcacttcgccaagtgcaacacgttcgaagataaagtgcaggactgcatgctaatctccatgtgcttcgttcgttgatgctaaacgagagtcatggaaagatag

SEQ ID NO: 179147 - DNA, 386 bp, Zea mays
  Clone ID: MRT4577_94965C.1
tatccttcgatgcgcctgcacgatttgtatcaagccctgcgaaacaaaccaaaatgccaaaaaaagagaagaaaagaaaagtaaatcaaaatcaacaaaatgaagtggccttacacgcaccacccgatgtctcctctggcagtacattaggacccaaattcaaattttggtccacaacacagtcccccgcggagacatccctgacttgtgtagcgtcttgagttcccatgacctcgacacgatgcatgtgcggagcatcgggggctgccagtgcgacagcctccaactcggagggtaccacctcaccacgtgaagtctcagacgactttgcaaggtaagcagcatggctgaccctccgtttcctcgagcgaatggggcctagaggc

SEQ ID NO: 179148 - DNA, 250 bp, Zea mays
  unsure (1)..(250): unsure at all n locations
  Clone ID: MRT4577_94966C.1
cctacaccactattcactattccactacctaactctactctccttttcacctcgggatactcgagctccacgttnagctctcttacatcccaaatcctctcttctcctccatctctctcgcaagataaatatcaccggtccggtgtctgagattgtataccctgctgctaaaacccctcacctcctgctcttgaactcttggccctaccttgttggttcctcatgttccacactcccagcgtctacttct

SEQ ID NO: 179149 - DNA, 875 bp, Zea mays
  Clone ID: MRT4577_94967C.1
ctgcccgtccccccctccgccatctcttgtttgtatgtggcctagctagctactgttgccgtccccccctccgtgatctgttgttgtcagtccatgtaccctcctcgatcgtagtgtctatatctcctgccttgcagctttctgcagggagctgcgccaacgatgggcgtcttccaggacaccggcgtcggtggcggcgccggcagccgcacgtccaggagggttttccagtaccagaggctggagtgctgctgggacgacggagccacttccaggtggcggtgtccgccagccgcgaatggtaagaaggctgaagccccctgtttgttcagtgtcaggcggctcaagtggagcaaggtcacctcggttctgataccgaggaaggtcgccgagttgtctgcaaagatctgccacgccggcgccaggacggaggccgtcgtctgcccggccgtcgtcttcatgtcgccgtggggcctccctgtgctctcccgcccgctcttggtcggccacaacacttgcaggtatcaccgtggaagagacaccttctggtgagcaggtagctgcacctcgatctgtattcctggccgtggtagtatcggtatatgcgggtgtgatatatgtggccagcttagttgatcttgtaggatttgtattattactcctccattttgatttctgcaatacttgtgttgtgttttgccggctgcatctgagcttagatgctgtttggtttatgatgattaatagataactgttggggacttgttcttaaatcatatttatttaagtgtaattagataacacactagaaactgatactgatctattcaaatttgtgtaaattattaccattaacatctacgttacgattcgtg

SEQ ID NO: 179150 - DNA, 628 bp, Zea mays
  unsure (1)..(628): unsure at all n locations
  Clone ID: MRT4577_94968C.1
ctttnttttttttttttttttttttttttttttttttttttttttttttttttttttttgggggccaaaaaaaacccggaaaggccatggtttttttttcaatcaaagggttaacaagttggaaccccccccctgcccttccgggaaaaaaagccccccaatttttttttcttcaacaaaaattttatttacccaagtccccccaaaggggccccaccgaaaaaccctctaaccggaaagaccccaaaaaccccacccaagcgcccccggaccaaaacataaaaagctggcccctaaacaatggaccccccccggggggcccttaaaaagggcaaattctgaaaaaacccataacccggggggccgttcaaccatcctttaaaaggccccaatccccccaaaagggaggcgaataaaaatcaacgggccggggtttaacaacgggggaacgggaaaaacccgggggtaccccaactaaatcgcctggaagaaaacccccctttccccagtgggggaaaaaacaaaaagcccccccccaaccccccttccaaaaatttccccaccctaaagggaaaaggaccccccccttaaccggcccataaaccccgggggggggggggggttaccc

SEQ ID NO: 179151 - DNA, 270 bp, Zea mays
  Clone ID: MRT4577_94969C.1
cagagcatgcatacaagcattggtacaggtgagcttgcatatgctgttggatcaaagctgatggatgtcaggaccttgcccaaagaaactgaaggtggagaagtcagcacaagtcagcaagctgaacatgaagtgccttgcagtttagcagaaaattcgaatttgatttatggttctggttgcacaacgcggccccataaaaggaaaatttgtagtaaatcagctgaaacagttggtttcaatcaacataatgataactctagaggttct

SEQ ID NO: 179152 - DNA, 162 bp, Zea mays
  Clone ID: MRT4577_9496C.1
ctccccaaaaattgtagtctgggtttaaataacagctttgccaatttaagctggtgggaacagttcccccaaacatatgttttttttctttaaaacaattaactgccccctttacaaaactttaaaattcacattttcccctgttgggtggcccttcatgga

SEQ ID NO: 179153 - DNA, 201 bp, Zea mays
  Clone ID: MRT4577_94970C.1
cacgaccggaacgcccggagcgacccacgcgtacgctgacaaaacggcacaaacccaagccgaaacaaagaccaagagccaaggaccgggaaaatacgacaggaaaacaggggcagcacccgagaacgaaaccctcaccggaacaggccaaaccgaagaagcacgaacaccgaaaacaagaaccacagcagaagaaaacaa

SEQ ID NO: 179154 - DNA, 619 bp, Zea mays
  unsure (1)..(619): unsure at all n locations
  Clone ID: MRT4577_94971C.1
gccgcccccttttttttttnnttttttttttnnnttttttnnttttttttgtttattttgtgtttttgtatttgtgttttgttatttttctattttatttttgttatattgtattgagggcgaaaaaggcgccaccaaggcaacacaaagggaagaggaaacaacgggcccagcacgcccaacaagggccacagggggcccccccgcccgcccgccaccaccccaccccacccaacaaaccccgccaaccgaagcaacgaaagaaccaaacagggaacaagacagcaaaaagggggaccccgggaaaaacaagggcacaagaccggaccaagggcgaaaaatcaaaccaaagagcaaaagcgcaccccccacccccaggggaaaaaaaaaagcaaactctcttccccccccccgaaaagggaaaaaaagaaagagggccagggaaaaacccccgacccccccggggcccccaaaaactaaccgagggagcgggcctggaccccccgccccacgggactggccagggggccccccccaaagggccagggcaacggggggaaccagggggggaaacttaaacccacacaggaccccaaggggccgccggccctcggacccc

SEQ ID NO: 179155 - DNA, 547 bp, Zea mays
  Clone ID: MRT4577_94972C.1
gccggccgggctgggagcaggtgatcaactcctcggcaacaactccggccctctccacttgccgcggacgattcacctgtgatgtgaggcaggtcaggtttcagcgggtttgctttaaccagccgcgcttccgcaagatatatagcaatggcgaaggcccagtcgacctctgtgtcagctcccgccggagaagctgtagacctgtagcctagtccccccttgctaaccagcgatgtctcacagccgctccaggagcgattctatcagagtgctcgggatggatagcgcggattcctcttcgccgaggtgccacgctcagaaggatggcggagaactccaggaccataatagcaccagcaagatggcggccggtggtactgagcttccattctccttgaagcgtgaggtgaactccgataccagatcctccctcctaaccataaggtattaatggtcattccacgggccggacctggctcagctaatttggttccgaagtgggtaccggttatttattttggcatgggttcctccccaaatggcatat

SEQ ID NO: 179156 - DNA, 481 bp, Zea mays
  unsure (1)..(481): unsure at all n locations
  Clone ID: MRT4577_94973C.1
gtggggggcctcaaggacgacctcgggggacgctgcgggggcgggcagctccaggccgccgaccagctgcagcgccgcaccatccggagggagcgcgagatcgaggacgccgccgcgagcgcacagcgctgacgacggcgacgatggtggagctcgcgggcgggtgcnngagcgactgggggttgatggggggcanatccacggcaaggcggaggggatgaggcgggtgctggagatggcggacgcgctgcgcctcgagacgatgcgcgaggtggtggcgctgctccgccccgcgcaggccgtgcacttnctcctcgccgccgccgagctccacctcgccttgcacgagttggggcgccgcaaggacggccgctccggcaacgtcgccgccgcctggccgcctgagtgacggacgctggctcgcgtgaaacgataactggcttgcctgcctggctggctgctctggttttgcttgtgtcct

SEQ ID NO: 179157 - DNA, 551 bp, Zea mays
  unsure (1)..(551): unsure at all n locations
  Clone ID: MRT4577_94974C.1
ggccgccnnccttttttttttttttttttatttttttttttttttttttttttttttttttttccttgcaaattccatttcacagcacaccacagcacgggcatcacttgggtctatgaagcgtcggttccaaaaaaaaaaaaaaaaaaaacccccgccttaccgggggagagcaacgcagggaaaaaaaaaaccaggcccaaatcaaaacacacgacctaaaagtggcgatatttaacatacgagctggcaaaggaacctacaaatcaaagcagctgttctgacctccatcagaggaccagagtatctggtatctgcactcacttggaacaatcctccggtgaaaactctgcccctgacaggagccaaagccggcaaaaaaaagggggggcgtaagctcaggaaatgccgacggtcttcccgagcagccacatgacgagcgaaaactcgatcatgaaaagcgcgggcagccacccccggtccaccacaaagccgaacaccgggacccccgcccggttgttctccaggaacgtaaccagcgcctgcctttt

SEQ ID NO: 179158 - DNA, 572 bp, Zea mays
  Clone ID: MRT4577_94975C.1
ggccgcttttttttttttttttttatttttttttttttttttttttttttttttttttttttttttttttacaaatttattttttttttttttttttttgaaaggaaccaaactgaccaaccggtaaccgatactggaacctcccaggcaacgggggttatttacttggacccaaaaaatggaaggttttaaaaaaggggccccaaagggttcaaaattccagggagaaaagagcatctgttttgcagatcactgggcctaacttttatttttagaccaggcaatttactttgccttttttacagggggggaaaggttggaaaactccttttgcaggggggaagggggaggaaatgttatatgtataaaaaacgggccacttttttgggttggtaatgcaaaaaagggaacttttggggtcttgggcctcttttttaagaactgtgaggcctttttaaccttgtccacggaggcactatgcctgtttagctgggatagagcaaccgcctgcatgtagaaagctgggggccaacaagggtagacaatatgagctggctttgcataacgggggg

SEQ ID NO: 179159 - DNA, 1305 bp, Zea mays
  Clone ID: MRT4577_94976C.1
cattgggtacgtcgagtcgggcctgaacgccgccccgcagttgctccttcgaccgttccacgcgtccacggtccacccacacgcaaggtcgcaggtcgcaacccgcgggcggaggggcaggcacaggaccgttgcgttgctgccgccgccggcacgagatcgaggagggatcccccgctctcacgccgctccaggtcgagggccgagcgagatggtgaacaccttcttcctcttctgcgggtgcgtggaccaggccagcgtggcggtggtggagaagtggggccgcttcctccgcctcgccgacccgggcctccacttcttcaaccccctcgccggggagtgcgtcgcgggctccctcaccacacgcgtccagtccctcgacgtccgcgtcgagaccaagaccaaggataatgtcttcgtccaactgatctgcacaatccagtaccgtgttgtcaaggaaaatgcagatgatgctttctatgagttgcagaatccccagcagcaaatccaggcctacgtctttgatgttgttcgggccatagtgccgagaatgaatctggacgatctctttgagcagaagaacgatgtggccaaagctgtattggaggagcttgaaaaggtgatggcagattatggttacagcattgagcacattctcatggttgatatcatccctgacgctgctgttcgtaaggcaatgaacgacataaatgcagcccaaaggcttcaactggcaagtgtttacaagggagaagcagagaagatccttatggtgaagaaagcggaggcagaagcagaggcgaaatatctttctggtgtcggtatcgctaaacagcggccaggcgataaccgacggccttagagagaacatcctgaacttctcacactcggtgtcgggcaccagcgcgaaggaggtcatggacctgatcatggtcacgcagtacttcgacaccatcaaggagctcggggacggctccaagaacaccacgatcttcataccccacggaccaggccacgtgaaggacatcagcgagcagatccgcgacggcatgatgcaggcctcaagcagcaacgtgtaaatcaccgactctctgcacgattggagacggctcggctcaggatgaggcctggagtaccatgttcatagtgttaggttgttgttagtggtaaataatgagtgctggggcttttggcgagtcttgagttacatgcggttgtacaactagtgtggtttgttttatatataaaaatgtatatttacatggttctaaaaaaaaaaaaaaaaagcttcctggtttggccatt

SEQ ID NO: 179160 - DNA, 247 bp, Zea mays
  Clone ID: MRT4577_94977C.1
gtccataatcatccaagcaaaagcgtctcacagagaggaaagagagagggaggaaaatgctgctgccatggctccttgccccaccggcgttcggtgtacacggtatgggcatacgcaatcactggtgcgggagaaattcatcaccggtggagtgcttcgatgggctagcatgcgccgcgccatggccgagattgtttgccgcacggactcgtcgtcggtcgtgaagtcacgagtcatctgaaaagca

SEQ ID NO: 179161 - DNA, 349 bp, Zea mays
  Clone ID: MRT4577_94978C.1
acaagaaagatgtgtatcaggagttatttttcatcaataatattctaaatatgttttttcatcgaacacgtatgagacgatataatgcacacaaaacacaactacacaagcacacccagttactgcttagatgcaatcactccagttaccctacatatccaaatgggatagccccctggtcgccttcaaattcaccagaggttagaggttctcctgagacaacccctggacggcgtcaaatacaccagagattacaggttctcctttcacttccacgcatgaaagtcgagccccctgcaatgaccgtgacggcgtgaccgcagcaattggtacatccacgaatttacat

SEQ ID NO: 179162 - DNA, 641 bp, Zea mays
  Clone ID: MRT4577_94979C.1
aaacaaaatcgccattttttcaattcaatcttaagcaatgtacatgtactccttgcatacatacatctaacaaaagaatcacaaatagtatctacagccgaaaattgttgccatcaataaagcaatgaacagaagaaaaaaaacgaagtaatctactgtcaacctagcagggaaaaaaggtcactggcctgtcagtaaacagactgaccagttgagttattcttctgatcgccaagcgaaacaatgaaacaagaacagagttgttcagtgcagtctgctcctcttgaagtcgggcagcgtgagggacaccgtcgtctgagggtggaatccgacggaagcgagcctcggagacaggatcatcgccgggctggggcgaggggaaggaaccgggtccctcttcctcgacggcgagccggtgagccttggcgagaggttgacgtgctcgagcgccctggactggaggtcctgcgggtagtcgcggacgcaccggatgcgggggcccgtgcccgtcgaccaccggcacgtcgagtggttcttgccaacctgagaagcagcagcagcactcgacggtggtcccgtgaccaccggcactcgaccgccggttggcccgtgaccgtcgccgtcggccgcgtcggagtcgc

SEQ ID NO: 179163 - DNA, 429 bp, Zea mays
  Clone ID: MRT4577_9497C.1
aagcagtggtaacaacgcagagtacgcgggttactctataaataatacagtttgtataaaatagtgttttagataaccacagataaacttatttacacggccttttatatatagacaactgcatgcatgcgtgggtcctcccgcagacccgcacagttacccgcacccgtgatgcacacgcttgttcgctagcctcgggagtcgtacagtgtagtacgtagtactgtactggctgcctgtcgctcgtgaacaatgcgttcgtgcagctgcttccaaatctgacttgagctccaaaaaaaaaaaaaaaaaaaaaaaaaaaaaggctctttggggtgaccccagtgtttaggggagaattgtggatatatatatcacagtggggggcgctcgagtgtgtctttagggggcccaattccccctattgggggg

SEQ ID NO: 179164 - DNA, 787 bp, Zea mays
  unsure (1)..(787): unsure at all n locations
  Clone ID: MRT4577_94980C.1
ttgggaccctcgaggccggccgggacacaccaacgtcctatccgtagcttccgcccttacttcgagatctctcgtctaaccttatttccatcactccctacagcccttaattgagctgtaaccttgcgcccgccccctcccgcaaagcgtttacatcacatatcaacacaatggcggacacagttatccagcccaagcaagaggaggtcaatgccggaaacatggagctcaaggacaacaccatcattgttgttttgggtgcctccggtgacctagccaagaagaagactttcccagcgctcttcggtctccaccgaaacggcttcctcccaaacaacatccacattgtcggatatgcacgcacgaagatggaccgtgaggagtacctcaagcgcgtcaagtcttacatcaagacccccacaaaggaattggagaagcagctagatgagttctgcgagttctgctcgtacgtttcgggccagtatgaccaggatgagtcttttgttggactcgagaagcacatgcaggagattgagaagggtcgcaaggagaacaacaggatattctacatggctctccctcccagcgtcttcatcacagtgtcccagcacttgaagcgcaactgctaccccaagaacggcatttctcgtgttattgtcgagaagcccttcggcaaggacctcccaagttcgagagagctccagcgcgcattggcgccagactggactgaggacgagctttaccgtattgccactacctgnggtaggagatggtcaagacatcctga

SEQ ID NO: 179165 - DNA, 375 bp, Zea mays
  Clone ID: MRT4577_94981C.1
cccacgcgtccgactagttttagacttgtcgtgtgcggcctgcgactgcaagccgagtaatccaagtatttttttccggccggggtgtctttcgttgtttccgccggttgcgagatcggagccagcatggacaggtcgtcgtgggactagctcttgctgacgctgagagaagaaggggatggtgaatagaggttggttgtttttctccatagtactcatgtatcacttctgtttctttctttttttttttttatattattttttttattattattcttttttctttttctcatttagcttttttttatttttcttcaactatacattcttttttactcttaacttattttctttatacatctatcctttctttac

SEQ ID NO: 179166 - DNA, 344 bp, Zea mays
  Clone ID: MRT4577_94982C.1
gggacttctgtaccggctttgtttcggtactggagtaaagatgccaaagagacgaactctgaagtgaatcgaggggtttataaaaacacatgactggatagtggaccccaatgcttgattattgaacgcagtactaaaagatctaaactatacctaagatactttcggtttgactttaaaattcatgccttggggcccactagggagtcatgtaaactaagaaagcactcacttgatttcaaaacacatcgatttgcactctttactcaagtaccgaaacaaagccggtacaaaatcccctagggcggtcattttatgggatacaagattaccttcgcgtgctt

SEQ ID NO: 179167 - DNA, 613 bp, Zea mays
  Clone ID: MRT4577_94983C.1
tttgatgtagtaaggtccacaaagatttacactgtgtgcgccttcgtggatgagtcaaatttcttctagagggggtcccagacctccttggaagacatggcactgatgacatcttgaaggacttcctcgatcatcgacgagagaaaggccactcaacagttgttgatcttgaacatactagctagcatactccggattagggacatctgcagcactgtgacagggcgatccagcagcttcatgcagaaggcgcagctgaaacttctgccgaagatattgaggacgtcgtcctctgcgctgtcgtcgacatcatcgtcgggggcagaagcagcagatcggcctgccagaatattttggcggcggcgtgccttctctgcatcggagagggtggtgtcggcctcgatcgcgcggacggcggcgacgagctcgcctcctgccgcaggggccgcgggggctacaggatcgccggagcagtcggggcagctccagatcgcagcttcagacagcgcgggtggattcgagaggcatggggagtgccacggggtggcgcaggtggagcaccgtagcaggtctacctcggacggtgcggccacaccgcagaccatgcagacgc

SEQ ID NO: 179168 - DNA, 299 bp, Zea mays
  unsure (1)..(299): unsure at all n locations
  Clone ID: MRT4577_94984C.1
agctcagggtgtgattgactcatgatggacttctacatgaacagcacatgcgactaaataatgggcctagctttctgtgctatactcggattcaagttcggtttaggaatcaagggacatgaggggaggcatgattgggggtacacctaatacaagggcgtgctttgtagatgaatcaagttaaggaccgcctgcaacaaggaggtaacttttaaatcgcggcacataaattcaattaaccggccgtggtttttaccgatgggcctggganncacctggcgttcccaaacttaattgtt

SEQ ID NO: 179169 - DNA, 645 bp, Zea mays
  Clone ID: MRT4577_94985C.1
aattcggcacgaggctcgctgcgatccatggcgtcgtcgccgcagccgccgccgccgttcgccgcgcaaaaccctaccgcgcagggctcgggccaggggccgccaggctccggggtgggggctctccccggggcgttcgccaacctccagatctcccgcggcgcggccccgccgcccggcgccccgcgggggctcacgccgcagcaggcaccgcccaccttatccgcgcgtccgggccccccaccgtccgctgcccgtcccgccttccctggcagcccgcccgcaccgccattcgtgcgggcgccgacaccgtcaacttccgcctcgccgccctttggcggacagcctggggtaatgtcccagccgccgccaccgttcggagggcctccaggtgcgtcgtctcagccgccgccgccgttcggtgtcccccccggggtggtgtcccaggccccttccctgtttggaggccctcctgcgacggcatcgcaggcgtcttcgccttttgttggtcactctgttgctgcgtctcaggcggcaccattcggtgccccccctgttgcgggttcgcatcctccacccttcggtgggcctcctggagcggggcctcagccagcaccgccaatgcggcagacattcgctggccag

SEQ ID NO: 179170 - DNA, 448 bp, Zea mays
  unsure (1)..(448): unsure at all n locations
  Clone ID: MRT4577_94986C.1
agcatcgatcatgtccgagcctacgtgcgcgaaagcacaaggcatgagctcaccaagaatgctgcctacattggcacccctggcaagggtatccttgctgctgatgagcccactggcaccattggcaagcgcctttccagcatcaatgtcccgcgcgggggggagaaccgccgtgccctccgtgagctcctattctgctgccctgccgctctccagtacatcaccggtgcgatcctcttcgaggagaccctgccccagaagaccaaggatggcacgcctttcgttgatgccctcaaggagggagccanccctccttgccatcacggctaacaaggcgcaccattgcggcccgttgcccccgctcagggagaccccccacccaaggccatgacccaccttgccaagccactgcccccagtaccaccgaggcccggcgcccccctccccc

SEQ ID NO: 179171 - DNA, 658 bp, Zea mays
  Clone ID: MRT4577_94987C.1
ctccaaacctcccccatttctcctcgccccctccgatctcgcgttctcttctccttccattgcatttcgtctcttcatctgatctccgcacttcgccatgcgcccatgagcggatgactgagccactgatcctccgacgctcctataggatcgctcaaagggtaactgagtgtcacaatgatatgattatcgtaaatgtgatagaaggattgaagactgtgagactgcactcaaccactgtaccgttcaatactttgattactggagatgagaatgctacaatgatgctcataaactcgttgagatgacaaaatgacccaccttccctccatctatccacctaaagaagtgaataactggatcactcgagaggcctatagactactaaggaacttactaattgccatagactctttgcctcttggaaaacaccactgttccactgccagtctgcatctgctctctgctactaccattgaaccatcctccattcctccattgctgtatatgaaacattgccataatcccgagattgcgtctgaggataaaatgctacattgtaccttaaatgcttgtatgttgcattgtcacaactacatatctaagccttcaagtccataacttggatgaaacgtgataacatgtgttcgttacttcg

SEQ ID NO: 179172 - DNA, 438 bp, Zea mays
  unsure (1)..(438): unsure at all n locations
  Clone ID: MRT4577_94988C.1
cgaatagcacggatttttttggaactcaacttttacaattgggtttacataaaaaaaagaaactttggcagaaatctatggggggtggccactttttttctgggggtcagctctggcccctatgatcggacccggggggtttccaccagaaagacaaacttgggggctcctattggggggggggggtttcctttttttttcccttgggcaaggggcatgcagcaaactggagctgcctgaaggggataggggaataggggatcaagccgggagggctcctttttccttgggctcgagctttttgagctcgtccgtttcgctccttttggagctcctgtagaaaacgcaggcgacgatgatctccagcacgacccaaaccgnttggatgtaggcaatggaaaaggccttggggggaacggccggggcgagcctcccgtc

SEQ ID NO: 179173 - DNA, 349 bp, Zea mays
  Clone ID: MRT4577_94989C.1
gttaatctaccactctcactagaatgcccttggcaataaatacaaccttttcacacattggaaggttcggtacctttttcggtagcacttgttactattattgcctgggactatcacgagagagtggctgaacaaccgctcacgaattgctgattagtgaggctccggacgctttgctgatgtcgacaggtgtattttttaccagggggctaaccgtgagaggggcacatactcttgtcgcgactgatgactcgggcttactggatcatgacatatacagactcctggtgcgctttaacaaagtgacttatgatgttgaatgcggtgacgtccttaaagtgcttgacat

SEQ ID NO: 179174 - DNA, 471 bp, Zea mays
  Clone ID: MRT4577_9498C.1
cattgggtacctcgaggccggccgggacgggctccgccagatcaagatccttgatccccgaccaaaccactacctgtacccgccgccgaccgacgcagcagccatgccgcccaaattggacccctctcaagcggtggaggtcttcatccgcgcgacgacaggggagggccgcacagcgtagaagatgggacctcgacaacacatctgctcttcatctcccagaataagaacgaggaacacattgacaaggtcagcgaccaggacttgcaatgccgttcttgacacttgacttgctgaggacactgacagcaaggctgcttgtgagacctgcactaagaccaacatggtcatgatctttggcgaaatgaacaccaaaggcactggaaaatactaaaaaacagcaaggacagacctgaacaccaatctgcgagagggcatcaagatgctcaagatgatgccgaacactgccat

SEQ ID NO: 179175 - DNA, 1263 bp, Zea mays
  Clone ID: MRT4577_94990C.1
atggatctgcatgttaaggatgaattccttgtccattttatttttgcttcattgccaaaagagttcaacacctttgttgtcaactacaacattcaacccgagaagtgggatcttgatcgttgggcaactatccatgttgctaattctttacagggattccgtttgacgaggactatgcaaagaaaagaaagacacattaaagctgcaaatggagtgcaagcagatgttgaagctgttggtgaccttcctctagagcttgctaatggcttcatacttgtacttagagatgttctttatgttccctctttacagaagaatttgattagtgtctcgtgtttggacaatgatggttttgattgtcattttggagatggcaaatgccatattttgagggggagaatagagagactagttaaaaatgatattcttcctccattagagttctcagacttagaacaatgcagagaatgcattaaaggaaagtatgcaaagaaaattaaaaaaaacgtcaaacgaagcacagtaattctacaaataatccacacagacatatgtggtccatttcctatgaaaagtgtggatggttttgactcattcataacattcacagatgattattctcgttttggctacatttatccaatcaaagaaataacaaaagcattggataaatttaagatatttaaggctgaagttggaaatcaacatagttcaaagattaaggtagtccggtctgaccatggtggagagtactatggtcggcataccccatatggccaagttcctagaccttttgcaaggttcttacatgaaaatggtatagtagcccagtactcaacaccgggcgaacctcaacagaatggagtagctgaaaggcgttaccgtacacggatggatatggtgcgtagtatgatgagttactctaccttgccattgagtctatggatggaggcaatgaaaatcgccattcatattctcaatagagtaccaaacagatatacaaagtttgtagaaatgagacacgctgtgttcctagaggatgaaatgatgagggggagcatggatcctatagaaaatgatgccacaagtgagggggagcaacaacaaccccagacagtagatgtgccaaatgtagaggccccaagaaggccacaaagaattaaaagatcagctattcctaatgattatgaggtgtacaacaccgaaggacttcaaatggagggtgatcccacctcatttgaagaagccatgataagtgagtga

SEQ ID NO: 179176 - DNA, 1377 bp, Zea mays
  Clone ID: MRT4577_94992C.1
atggggtttattaaagatattccacccctaaaaggagataattgtacagaatggaagaaaaagattgacctagcctttgttttgcttgagatggactgggtagtcaccacaccatgtcccaatgagcttgtggcaccactgagagagacagatgaggctgagtctgcttggcagaccagacagagggaccgtgctcccaaacagatggcttataaacttgaacatagaaagtgggttattgccaacaaaaagtgcatgtgtgacactgtaacagaatacctcgatagaataaagggtcagttctatggctcttcaaagacatatgcaactcagctgataaagcagctggtgataaagaggtattctggaggaggcaatggcactggcataagagagcacatactaatgatgagttatatgaactcaaagcttaaaccaatggatctgcatgttaaggatgaattccttgtccatttgatttttgcttcattgccaaaagagttcgacaccattgttgtcaactacaacattcaacccgagaagtgggatcttgatcattgtatggatatgtgtgtgcaagaagaggaaagaatgaaagctgccaatggtggcactctccactatgttaaagatattaagaaaataaattttaatgccaatgccaactctcccgcaaaggcaaagggaaaggctcctcaacaccatcagcctcaacagaaaaagtttatggtaaacaaagatcaatgtctccattgtaagaagacagaacattacaagaaagactgtcctgaattcttaaagtctatcatggcaaagaatggtgagaacattattatgttcattaatgaatcactgtatgtacaatattcaaaatctacttggcggattgactcaggggcaactatccatgttgctaattctttacagggattctgttcgacgaggactatgcaaagaaaagaaagacacattaaagttgcaaatggagtgcaagcagatgttgaagctattggcgaccttcctctagagcttgctaatggcttcatacttgtacttagagatgttctttatgttccctctttacataggaatttgattagtgtctcatgtttggacaatgatggttttgattttcattttggagatggcaaatgtgagatatttcataataaagaaagtgttggtcttgcttttcaaaaggaagacctttatttgttatcgcttcatgaaaatgtgaattccataagtgatatgaatgaaaatgtaccctcatcgatgaatgaaaacagaaaacgaaagagaactcctgatgcatcatcgaaattatggcactgccgtttaggccatatttcgagggggaatagagagactagttaa

SEQ ID NO: 179177 - DNA, 703 bp, Zea mays
  unsure (1)..(703): unsure at all n locations
  Clone ID: MRT4577_94993C.1
ctaaaacatgaggagatgcaggcagccgcgatgctccctggcgtcttcctccctgcgcacgcccagccgagcggctccgtgcgtcgcacgctcctccccagcgtcccttgtcgcggcttcctgcttcctcgtcagcgcgcctctctccctggtctcctgtgtcgcgctcctctagctcggccaactgcacgcctctcccatggcgcttgcccagtccggccgccattgtgttccttggcgcgctccctcagctcgctccctctagctcgctggcgttcctccctctatgctcgtcacgcgcacgaaatttctttcctcgctggcgcttggtccctgctccattgcgccgtgatgtttccctgcgcacagtcgctctccttgccgagcccctccatcgcgccctgctcgtccggcaagtcgcgccctggccatgtcgagctctctgctccagctcgctgagctttccctctgcccgacgtctctcccagccaccgcgcgccatggagctccctggctgcgcacgcatgcttcactgtttggttgtcgtcgcgtccagcccggattccagcgcccttcgtgcgctggttttctctcttcgcgtcgatgtgtaagcgcctttgtgctcgcatcccttgggcccgtttcgccttcatgcgacaccggctacaagttgaatttaatttctctgagntactcggattaa

SEQ ID NO: 179178 - DNA, 820 bp, Zea mays
  unsure (1)..(820): unsure at all n locations
  Clone ID: MRT4577_94994C.1
acgcccctgccctcccagcggccagcagcagcacgcaccgcgccatcaatccatcgacaagccatctcagctgcccacggctgcactgccactgccacgccatggccctggacgacgcctgcgcctacgactgttgcgcgttacctccaccgctccattgcttggactgggactgggactcggagctgcttcacactcatcgtcacactaccagtgccggaggtgccgccgtccaagcagagccgcccaccttcttcgtcccggcgacgccaggtgtgcagccgtcggcggcgtccagtggcggctacctgcacgacgccatcaatcactggagcgacacctttcgcagcaagcggcagcggatggcggcgacgacgacgacgcctcccgctcggcgtccggcgaccaccgtcagcgaggaccttcagtgccttcttgcgggcttctgggattcaacaagcgaggccgagggaggagcagacttccgccatgatctgaacaccacgaccccggagccggagccggagacgacgacggagatacgctgcagttttgcctcaggcgaggacgaggcagttgcgtcgggcagggaggaccagcagaggggggccagcgcgcaggtgctgctgccagcgccagcggcagtggcgcagcgcggagaggaggaggaggagaaggaggcaaaggcgaccgcggtagtcccccctcctcggttcccgncaccgcgccagccgctgctcccgtgcagcggcagctgcagctgcaaaaggcggccgagggtgcagccgccacgacgacggcgcccgcctctgcctgctct

SEQ ID NO: 179179 - DNA, 170 bp, Zea mays
  Clone ID: MRT4577_94995C.1
agagagggagagacatcgctaggtagatccatggcagagatgatcagccgacataggtagaagagagagtgtatgagccagacgaggatagttagagagagcgaagcagtggcaggtagtgcccagcagagagaagagccgcataagagccagtcagcaggatggagcag

SEQ ID NO: 179180 - DNA, 403 bp, Zea mays
  unsure (1)..(403): unsure at all n locations
  Clone ID: MRT4577_94996C.1
ctatgacgcaggctgcacgcagccttgagctcggaattgagccttgaggccgcgtaggggtcactcagctcagcttgctctggcgcgcggtgctggggcatccaggcagggcctgcgtcgtgcatgggcccgtgcgctacacctgagctaacacctatcaccggccatgcagctcgggctcctccccatcttctaccacgcgtctttctctcctctggctcttgctcgcctatggtttttttcctctgctccttgcagccggncgaatccctcctgtgttagttaagttcagagtttaggtaagtctgcatctttcatttcagtgtctgtgaaataatagttggctgagtcagggagctgtcctgatcgccacggagtggaggtccgcgcaaagcgcgcccac

SEQ ID NO: 179181 - DNA, 416 bp, Zea mays
  Clone ID: MRT4577_94997C.1
gcgctggtaagttgttgatgatccgatgcggggtgggggaaataaaataatgtgggtagtgttatggtaagtgtgctttcgttatggtgtggatatagagagcggaaattggaaggggggaagagagacggaccttcttattctggtggtggtggtaggggaggtggttgcgttgttggaggatgatgctcgtcttgctcgttatgattgtccttggactttgcgttaggtgaatcgtctttaccggcctcgcggagagcgtactacttgtgcccggaaccacggattcttcgcataggtccgtaagcgctttacccgctgttgttccacaaactcatcggcgttcgtcgtaccactagggtaggaggacggcttataagtctaatgcacctcaggagagacctagtatcacaatc

SEQ ID NO: 179182 - DNA, 533 bp, Zea mays
  Clone ID: MRT4577_94998C.1
ggtcgtgatgaaaagggggtatcacacttcttttggaacaactatacagaccggagagaagtacttttaagtaaatcgatgttgctgtactttatcccctaagtggtgcactctacgcgcagtcattacgtaacgatctaaacaaacaaaatctttccgcttccaatagacccactggacatcagtcccacggtatgctgtgcctgagggcccatgagcaaatcacccaagacttggaaaatatagatctatgtcctcgtaaacagacccgttcatatgccgatcttgatccatgccacatgcccttgggcacacactctccaactacatcaagccttgccacgtttaagagccagtgaggcaacttacacagctagacggtctacaagatggacaggcacctatcaatggcctgggcaaggacactggctactaaaactgccaagatttgatctaatgtcacattattgcgaccaatacctgaacgattgatccagattgtcatgtaaatgcacggattggctggcctcctc

SEQ ID NO: 179183 - DNA, 297 bp, Zea mays
  Clone ID: MRT4577_94999C.1
ggggccttaaattcttggggccccttaaaagggtaagggggggaattaattccctgggaagggctccagtttaaccttttccccaaatagggtcccgttcacccgttggaagaagggacaccggttgcattggccggggggggaaagtttttttttggcaagggaaaaagggggaccgcccgcaattaggaattttaaaccacaacccgcccggaagggggagaaaaggttggggggaaaaggcaaaaaagaggggtttccaacaaggggggaaaataggttaactccttttctttt

SEQ ID NO: 179184 - DNA, 139 bp, Zea mays
  unsure (1)..(139): unsure at all n locations
  Clone ID: MRT4577_9499C.1
cggctcgaggttcgtggtccacctctgcaagaccttcatgagcctgcgagacatcaaggagcnccagttacccagtatgaggggaaccttgatgtttggcaggtctgaagttcttggagagtggagagagcttgtccat

SEQ ID NO: 179185 - DNA, 478 bp, Zea mays
  Clone ID: MRT4577_949C.1
ggtgtggtgtttttttttttttttttttttttttttttttttttttttttttttttttttttttttttttttttttttttaaaaaaaaaaattgggcaattttaacgaagggcccacccattgttttatttaatacccccccccccaatggggggcacgtagggggtacaaaaaaaaaaaaaattttttataaaaaaaaaacgcgctgccggcctccggcccagggggtccatatcccctgaggattatttggccaggaggggggggcggaaaaacccccccctaacccaggcgttggtaattttcttttcccccccctcggggagggggatccccccccacctaaggggcaaccccgggctaaaaacccggggggcccccccatcccaaaccggccccttttttggtatttgtacttgcccccccctgatcccagaacttttaaaaaccaagctaaacccgtatttttgggggttgc

SEQ ID NO: 179186 - DNA, 436 bp, Zea mays
  Clone ID: MRT4577_94C.1
tatgtgcgccgcgccgaggaggagatcgaacggcgcaacgctgacactggccgccgcaaccggtgcggcgctggcgtgctgccgtacgagctcatggcgcccacatcggggccgggcatcacctgccgcggcgtccccaacagcgttaccatttagcctctcagtaccgacagacagccatgggcgcatgacagagatgatctgaaaggagattttttttccactcattatagtcgggtggggagaaatctaagcagaagcaaatgaattctgcattatttctccccccatttccaaattgccattgatttggtggtccgaacaggtaaaatttgatttttgactagggccaagactgtgaggaactgaatgggtgtaaataatttgtcatatacaaaaatcaatggaatataatcattatagagttctctggatc

SEQ ID NO: 179187 - DNA, 399 bp, Zea mays
  Clone ID: MRT4577_95000C.1
tgccctcatggaaccctgtgcccgacggggagttatagcagtgccgcaccgtcgttcctagggctccagagaccagcatgacaaacctggcggggtacctgcttgccgccctgcagtaacgcgccagcagaagcttgctccatcggctcgcagtcggtgacttctccctggttctcgcgtgcgtcaagcgaggtcacgagtcacctcgatgagcaagcaggtacctggagtcgtccgtcccatggcaagaacaggtgcctcttgatgaggcgcatggctgatgctgtcgagaagaaagagagagatctaggccgtacctgcgagctaactttgggatgctagaccggtgacgccttatacggtacagattcatttattgtggatcgagctactattttg

SEQ ID NO: 179188 - DNA, 567 bp, Zea mays
  unsure (1)..(567): unsure at all n locations
  Clone ID: MRT4577_95001C.1
ccggccggggtggctgcgggtggcgcgtgggagctgcatgttggcgggaactcctcgccagcgtcgcggttctacgcatcatcgtgaataggagcccctgtgctgcgcaatcgaagtgagaacacgtgtcatctgaagagcaagttggtacctggaatctcaagtcccaggaacagagcgacaaatactgaacctgaccttgttcctgagcatgtcaatctccctggagatgatctgcatctgttcaacatatgagggtctggagctcgacaagattcatgtggtttatatcattctctccatgcatgtacctgcatggatgtgctgagatctgtcatgagccctgcaatcgattctataatttgtgatttgtggattcttggtagttcaacatgaccatcagctgtactggtaagttgttgaacataaatatagctacgaagctgcatcctctccaaagtttatgaagctggatggcggttttgtacacgttttagaaaatanaagaaataggaaagtaatggaaggaacatctttatttccaaaaaaaaaaaaaaaaaagcggcc

SEQ ID NO: 179189 - DNA, 283 bp, Zea mays
  Clone ID: MRT4577_95002C.1
cacgcgtcgtcattgcccaaaccggcgtggacaaataactttcaaggacatgtagttattcacgtaaactgcggctaatgctgccacctgccgagaggaggctagcttctatgcgaggatttcacgagcgcggaaagtttatcggttttatgaccacttggcttatgctggactaccttgtggcatgctgatgccatacaaggacgaaagataaaaaatgacggctcttacaacagtacgatcaaatcgagattgactggtgctcagcttcgggaatattttt

SEQ ID NO: 179190 - DNA, 1100 bp, Zea mays
  Clone ID: MRT4577_95003C.1
gtaaatctgcagacaacctaagtccagttcgaattgaacacatggagttcagtccagaatcaaaaggataccgcgcctcgttacggtgctgcgtgcttaggagagctaaaatacaagtgtatggcatgcatgtgtttgttttacaatgcaaagttggtaggtcatattcggggaagagagagagagagagagagagagatagagagagagagagatttctgatgatgagtttattttgctttcaggaattagcgacgtctgtccatatgtgtgttaccaggaaaagacctatgagaatcataaacgaagtaagcggggtcatccggccgtcaaggtacatgtctcctcatgcgcacagacttggatcccaacatcctgatcctgcgtgcttatgttagccagtatgatctccaccatgctgagatgacagtgagggagacgatcaacttctcttctaagatgttcggaaccaataacgaattcggtaagacatactcttgcgtatagtgagctttccattttgaaggtcattggaatgtgctgcaatttataacaaggcaaacacgttaaaactcaagaagaaagtatctacatgatactcaagataaatcaaattttccatggcaactatactgacacaaatttcctgtttgtatggtttgacaaatccagagatgcctacagtaacaagaagttgtttaatgcagggtatcaataaggtggaccaagatcttgattcattgattaaggtagctcttctttactaagattttgaaagaccccatttcttttcgttccgccaatctcgtgccgattcctgcaaaaccggcgatccactagggatgatgacggaggccctcccccccaacagggagatcgccatggggctgtcgttcttcatcttcggcttctggtacgtcttcgccgtcggtgaagttcgtcaatttgctgcagctgatgcccgtgtggtggcggtgggtgtactgggccgatccagcggcatggacagtttacgggctgatgttctcacagctcgcagaccggacggagcagatcctggtgccagggctcggggtgcagacggtgcgtgagcctcgtgc

SEQ ID NO: 179191 - DNA, 608 bp, Zea mays
  unsure (1)..(608): unsure at all n locations
  Clone ID: MRT4577_95004C.1
ccgccagtgtgctggnaattancgccctttcgnagcgngtccgcccgtgtgcaggtatcttgtnngagcaaaaaaaaaaaaaaaaaaaaaaaaaaaaaaaaaaaaaaaaaaaaaaaaaaaaaaaaaaaaaaaaaaaaaaaaaaaaaaaaaaaaaaaaaaaaaaaaaaaaaaaaaaaaaaaaaaaaaaaaaaaaaaaaaaagtttttttttttggggggggaaccccctttggggcaaattttttgaaattttttataaaaattgggggggggtttgaatttttattttaaaagggccaaattttccctttttgggggtcgttttaaaaattaattgggccgcgtttttaaaaccttttgaattgaaaaaactttgggtttccccaattaaatccctttgaaaaaaaacccttttttttccgttgggtttttaaaaaaaaggcccgaaatgttccctttttcaaaaatttcttaaccttaattggaaatggggccccccttttgggggccctttaaacgggggggttgtgtggtttccccccagtgggccttttttttttgcaaggcctttaaggccccgttttttcgtttttttcctttttttttttg

SEQ ID NO: 179192 - DNA, 613 bp, Zea mays
  unsure (1)..(613): unsure at all n locations
  Clone ID: MRT4577_95005C.1
acgcctatcaacctactatgcttccgagatctgtccccaccttctgttctgttagtcagatagggggggccagagagatcgagatccggaggcgctagcgccatcccattagcgtctgagggagtggcgggcccggagacggtcccggggtcgtggaaaccctgcacgccgctgttcaaggacgagctagacatcgggatctcgacgatccgcgaggctggacttgctcgagatgtggaggacctttttttattcctaccaactaatcatcgttcaagactgaaacccgaccaagagcattaaggtgcccgagggtgtttactacgagctctacaaccgaaacgacattaaccgcatgcttggttcaaaggactgctgcatatgcttcaaggactccttctgacgttgattcggctacatggtctccaataagaagtacatctacaccatcgacgaggactgattctttgtcaaggaccaataaggcaaggatatatatgtatntggagcagtacattatgaaccatcttaggctgtccacactgttattattcaacagactgtacgacccctaacgtgagggtgtcgactttgnacgtgggaaccccttaag

SEQ ID NO: 179193 - DNA, 130 bp, Zea mays
  unsure (1)..(130): unsure at all n locations
  Clone ID: MRT4577_95006C.1
tccgactattcntagacgagtagcggccacccttagcgtcgtccttttttctgcctggtatcctggcgaccaatttgttgccgtgctgcttataatacgctgtacaaaacatgatcacaatccaactcaa

SEQ ID NO: 179194 - DNA, 433 bp, Zea mays
  unsure (1)..(433): unsure at all n locations
  Clone ID: MRT4577_95007C.1
ggccgacccacgcnacttttacgctttgtcttttttttaaatctgccttttcattccgggattcttggtgtanttatcggactacttaaggactaattaaggtaaaacattcatacccttttggtgttgaccctgttttgcattgtatccgcatcgagcttccgtttctcaattcacttaaaattaagatttccattcttcttggagttgcacaaattaaccttgtgattttgatcaactacttcaatgcaaaattttttaagaacagtcttaatttgttgtaccacttcattccccaacttatcttttttaacaacttattttgttacccttcctttcttattattattaaattgtttcaccttgttaaaaacacatctataccattttattatctacattttccttatcccaacataataaaatttttaaa

SEQ ID NO: 179195 - DNA, 211 bp, Zea mays
  Clone ID: MRT4577_95008C.1
ttcaacctccaccttcttttctacgccaccctcaactatatacttaccctctaacttgcctattacacctactcttccacttacatactctttacacccatccgcacagatatcattatcctcgccactcccactcacaacttactttcctaaaacatccactatatacatgacctcacctccattcctccataaaaacttcaacttccct

SEQ ID NO: 179196 - DNA, 1089 bp, Zea mays
  Clone ID: MRT4577_95009C.1
ttcagataaaataattacagaattgatttctggattagtctatagaaactgacgcgcttcgtgcgattccgctcttgttcgcggaaatcggcatcctcccggctaccccgggccgggaatcgaaaaggctgccgtgttctccacttctccgccttaccctgctctcctggacctccgacgcaccccaaacaccgcagagatgcagaaccctagcggccaccaccccgcgacggccgccccgacgtcggcgccgtccaagggcaagtcgtcggcgccgaaccctagcggcaaccacgctgcgacgccggcgccatcggggacgccttccaagggcaagtcggcggcagcgcaggccgcggctttgggccacggttcctcctcccaccaccactctgccggcggtggcggtggtggcgctgacgcgtccgccaccaccctcaagcgcaagcgcggcgtcttccagaaagacctgcaacacatgatgtatggctttggggatgatccaaatccacttccagaaaccgttgcacttgtggaagacattgttgtggaatatgtcactgacctggtgcacaaggcgcagaacgttgcctcaaagagggggaagctcctgacagaggattttctttatcttatacgcaaggatttacggaaactgcaccgtgctactgaactactgtccatgaatgaagagctcaagcaagcaaggaaagcttttgacgtggatgaagagacgctggctacgactaacatatgatgtcttcctagtcggagaatctgcgtgttactgtaaccagttgtacaatgcactgcatgtgtctgacaattgttggcgtcgacttgtaactgttccgctacagactttagctattttcttgacagttactgcgttaatgtctgtatgccctgctcagtgaagaagtccgctggttccacacattcgcaatgtaaaaatgcacaggttttttttttgcttgttttgaataggacaattcatgaaaattactggtggaggagatatttggaagtaaaattgccagacaatttacagatttaaaaaaaaaaaaaaaaagcggcaacccagtataa

SEQ ID NO: 179197 - DNA, 484 bp, Zea mays
  Clone ID: MRT4577_9500C.1
ttttattactcgcctgtcgttcttttttttttgttcttttcttcccccccaaatttaaaaaaaaaccctcctggatggaaccaaaataaacccagcgcaccgaaaaaggaaaacaaacgggggtaacgctttttggcctttgcacacccccaattccaaaaaaggggggaaaaccctgggggggcccccgggcggttcctttgcaagtgttgggggaaccagcccgggggggggagccctccccggtccggtgttgattttaatcaagatcccctccccgtttggggggttgaaaaaggcataaaggggggagaagccttccaaacctaaagcgttggccatggcgtgaatccttttttggcccttttggaaaccatccccccccataatttttgcaggggggggggtaaagctgttcccagggcccccttgaaatttctcctcaaaaaataaaataaaaccactttttttcactgggaaactg

SEQ ID NO: 179198 - DNA, 253 bp, Zea mays
  Clone ID: MRT4577_95010C.1
gaagacggcaggggtgaatccttgcgtagttgcgtgtgttttgcttgccgtcgacaaacaccagcggcgtgttgaccggactctggactctcggagcctggttagtacttagtagcagttggggagatccggcgttgctgccgagtgccgacgccccgtcgacgagcggcgtctctttgtatttcgcatgccgccttggcggccgtggcactatggggagcatgattgctgcttgcttggctggcagctggag

SEQ ID NO: 179199 - DNA, 415 bp, Zea mays
  Clone ID: MRT4577_95011C.1
ggccggttttttttttttttttttggaaatgagcccgatccccaatgacagtatacctcataagtgcccatcactgggacaactctcatggtacatgttccgtcatgtgagcgtaactaaagtacactatggacaaatctgagcgaagacccttgacaaaaagcccgtattcactctaccggcgcacaaaaacgctctgaactttcaaagcctactaaaaactggacagacacaacatgtgcatatgtctgttcaactggatatgggatcgttcaccagtcaccatacacagattccatgcttgatagttcggcacagtgacaacatctcctaggattagcaatggtagacgaatgctctgagctcaccatcttatcactgagaagactgaagaatgcaataaacacccggtggt

SEQ ID NO: 179200 - DNA, 425 bp, Zea mays
  Clone ID: MRT4577_95012C.1
agcagacaacaatggccatgtagatatgtattcataccgcgaacgctgcacgcccccactgccagcaaggaccgcgtcctcgtcggcaacctggagctgccgaacaaaagcttgctcaccccgctgtccgtcgagcgcgtcaccacgtgccggccgagggacgtctgccactaccacaacgcagtgaactaagttcaggtggccgacaagaacaactgcaaccagtagcggatggcgcgccacaccacgaagctgcgggagttctgggcgccgggccagcgcgcgagccggatgatcgccacgatcgacccacaagctcggcaagaactacaacaccaacatcacgtgctggaaggtgaacactcactacagccccaacgtggctggccacctacgacaaccagcagcatccccacctatgctca

SEQ ID NO: 179201 - DNA, 380 bp, Zea mays
  Clone ID: MRT4577_95013C.1
gagctgttctgtcggcggccgcccttcttttttttttttgttttacacgaccggagcctaatcaatttgctgtaatgagaggattacgcatcactaccaaaacgactaagggaaggcctcgagatcacccggggaattcatcggtagtattatttggccagaccatcaagaggagcacatacaacgggtacactgattactagaaactcaggaagtcgcaattaacgcaaaaaccttgattaggaaagaactattgatatccataaaacgccgaactacctgcaaagtatgtaggctacataaacatatttgacatcttacttaatcacaattgtatgaaaatacatgaagtaagaggggaattatcaagactgcataga

SEQ ID NO: 179202 - DNA, 389 bp, Zea mays
  Clone ID: MRT4577_95014C.1
gttgaactttagcttctgtgtagaacgccacagcggttaagagagttgtgcgggagactgtaaaccaccatggcagcatcggcgcctgaatatcggatgcatagtacttgtacggcagcctcgatctatcaagcgctactgcctacaactcctctgctacttatttatgatggacgcacgctgttcaagcacacgacatatataatctaccgaagatgccaaagctccagtacctcatgctagatgagttaacctggcatgaaacgaatactgacggcctagacgacttgaacaatatggagttgtactgacagggcacaacggtcgacgatacccaggcccccatgccacggctagacaacctacacttttacatttatgcacggtac

SEQ ID NO: 179203 - DNA, 363 bp, Zea mays
  Clone ID: MRT4577_95015C.1
tcctttctcacagaaggacacttaaggcatgcggacgctaatagagagccccacccactctcggagcatacaatcagccattaccagggctgtcggacccacgccggcttatccgaacccctgccggccaatgtacgaagctaaggagggaacggccaagtccgctgaaggcgtcccaatggccgacaatgaagtgagtacgtacgagtacggattcttgcaatatctgcagaatgaagaaaagaatgaggaaataagcacctgaaggaagcttaaggccaatgtcacacgaatggcggcgattgggtggctcgggttctgaagaaaaagaggaaagaaaatgagactgggtcaccccgtctt

SEQ ID NO: 179204 - DNA, 386 bp, Zea mays
  Clone ID: MRT4577_95016C.1
aagctggtggttttgaaagtgggggagttggagggtcttcacgggtccggaggtcggggagaactagttgggtgccccctcctaaagaaccagttgatagggttgagataataccaactggagatgggtaagagtatccttgcttcgttcttatgtcttacactaatacacgattatggaggtgatggtcactttcgtttggcaaaacaaacggtaagtacaatttaatccattttcgttgattgtagttgacttgctgtaatttctggttataatgtttgtcaaatgtacattcaggaagctagcactggtgcaatgcccagtgatgttcaaatataccttaggggcacagaggaccagatcctgcaaatccatatgtgttgtgc

SEQ ID NO: 179205 - DNA, 1276 bp, Zea mays
  unsure (1)..(1276): unsure at all n locations
  Clone ID: MRT4577_95017C.1
gaagaagtgatatgaagtgtcggccacattgttgtgtcgttcagatactctgggcatgaacaattgtcagaacattttcctgagctggggatccaatttataagtttaaatagggcatactagctacccagaaatttcgatatttcactgcccaagcacagaatgaattggtactgacgcaatggacccactttacacatggtctttatgaagcatgcttctttgacaaggttggtcattggtcagtatggcagcaaattgtggtacccaagcactcgcgttgtgtcggtatggtccgacattgacactgctactagtggctccaacaagtggccagcatatgtccatagaattcaaatccaatcaaaatcaggctgctttttcttgcaacattgcatgttctgatctcatgtccttgtcccttgccagcctgagttgaaagctgcacttgagtaacagcatgcttctcttcatcctcacttataaatccatgaggcagccacggtagccgaacactcaatcaactagctcaacaacacctgaactgatacaaaaggagccctagagttccagagacgaagaaaggagaagaagccaatcagccaccagccatgatgagtgccaagagacttgttcagatgtcaagtagtaggtggcgaagaatggcggccctcgcgaggaagaggctcgcatcgacacctgtgaaagaaactgacgggtcgtcatgcagcacttcgtcggtggctggcaaaggccactgtgccatgtactcggctgatggtcggcggtttgaggtcccgttggtgttcctcggaacggctctcttcggtgagctcctgagcatgtcgcaggaggagttcggcttcgctggtgatgacggcaggatcaccttgccatgtgagtctttggtgatggagtacatgatgtgtttgcttacaagagatgcctctgaagaggtcaaaaggttgtttttgagctccatggcaaggccttgccactatggatctggactggtgcaaaccatgcatcatacccagcgaactgttgttcctagcttctgaagatcagcatatatgcgcagtagcaagcagtttgttttcaccttttcgtgtttgatgtaaatgtttacataatgtagattgggatggaatggaactaaccatatggttcaaaaacaaatggagcagaaatatgtgtttacgtcagggttcaaaatttcacgaaattcagcaatttcggtagtggcttgaaaaaaaaaaaaaaaaaaggcccctan

SEQ ID NO: 179206 - DNA, 316 bp, Zea mays
  Clone ID: MRT4577_95018C.1
gctggtactggtgcactcactcttcctcgcccgcacgccggttgtacacgagccaatctaggcgcgcgcacgcgctctccatgtagagatccacaccccgagccgcgtgcacttacgcgggcggaggcgtctggcctgcgccgccacgatgccgatctagttactgccctctgcaacccccgcggaagaggaggtgaaagcagcagatgatgtccagtcaatggaaccccaaggagagcaagcatctatggcctataggcgccaccactgctgctctggtaggccatgcgcttctggggcgtcactgagatcatgg

SEQ ID NO: 179207 - DNA, 293 bp, Zea mays
  Clone ID: MRT4577_95019C.1
tttttgaaaaccacacagcgacagagtggattagaaccggcagaaacataacacgataggagccactcagggcagatcacaggatagcagtggcacacaagcccgacgacgccgtgccagtagagcgtctagtactcgttaccctaggtgccgtcctcacccttgttaaacttagtaccgaccttctcgtagtccttttcgagcgcatccagatcctcacgagcttcggagaactcgtcctcctccataccctcaccgacgtaccagtgcacgaaggctctcttggtgtacat

SEQ ID NO: 179208 - DNA, 271 bp, Zea mays
  Clone ID: MRT4577_9501C.1
gctcgaggactctgccacagagcttcttaaactggtcattactcataagcacgacggaagctacaagatcgagacagaacatggaacttccggtatacatgaccaagtcgatcacacgcgggaccaccattatggtgacgaccgttctcggctgcaacctgatatgactctagcgtcgtattcaaagcgaaacagcaaacacatgcatgtctgaaatgggaaccattaccaccattacggagagactgcaagaactgagcctgcagctgaa

SEQ ID NO: 179209 - DNA, 298 bp, Zea mays
  Clone ID: MRT4577_95020C.1
gtccttccttttttttttttttttttaatctgagaaatgaactattcttatttcctgggaagccacaaacatcacaacaaaaagcttgatgcttgaactataactcataagaaatctagaagagggccccaccaatgaggggtcgtcggtggaatgctgttgggctcgcaaaagctagttgattgaatggcatcgcttggtgcaggggtaagatggtgccagcgttaggtagcagcagcgctggtagtacactaacaatcggggttgggaaaagaaggtagcaagccctacaccaatt

SEQ ID NO: 179210 - DNA, 161 bp, Zea mays
  Clone ID: MRT4577_95021C.1
agatccctgcgcccaccatgggcttaacctaattactccagtgcttgcagaacaccgagccatacacttgacgacctcgtctggctttcaggggctcacacgaaacggcatcttccaatgcaacttcttcagcgagcgcctgtacaacttcacggggcgcg

SEQ ID NO: 179211 - DNA, 805 bp, Zea mays
  Clone ID: MRT4577_95022C.1
actcccccgggcgggccttcgcctcgcggccggccgggaccttccaacatcgacccttccgacgagcagcaaataccgccacgatgttgattcccaaggccgaccgcaagaagatccacgagtacctcttccgtgagggtgtcctcgtcgcccagaaggacttcaaccttcccaagcaccccgatatcgacaccaagaacctgttcgttatcaaggctatgcagtcgctcaactctcgcggctatgtcaagactcagttctcttggcaatactactactacaccctgacccccgagggtctcgactacctccgcgagtggcttcacctccccgctgagatcgttcccgctacccacatcaagcaacaacgatcgcacgctcctccccgtggcatgctcggtgagggcgagcgcgagcgacgacctttcggccgtggccgcggtggtgaccgaggtgaccgtgagggtggataccgacgaagggatgctggcgagggcaaggagggtggtgctcccggcgagttcgctcctcagttccgtggtggatttggccgtggccgtggcgctgcccccccttcttaaacgaacccattttatcatctaggtggtcataaatgagaagcatggcgaagggtatcggcatgtactcataaaaaatggagggcaatttctaccatgggtttcgctcgtgtgacaggggttgcgtgggggatccgtgggagtttgagggttttagaacctcggaatcatttgcatcacggtcaatgtttgccgccgacaaaaaaaaaaaaaaaaaacccgcggcc

SEQ ID NO: 179212 - DNA, 1936 bp, Zea mays
  Clone ID: MRT4577_95023C.1
atgacgatgtcgtcacaagaggtaactgctgaacttcttttaggcgatggctctaattacaaatcttggtctgtctctatttataatgctttcatgagtgttgatcctgatttgagacagatctttaggagaagtattttcccatctgatcttagtaaaaatccctctaatgatgaactaagatgtttttctctcaatcaccgtgcttgcagcatcttagttgattctctttctagaggtgcttattttgccatcttgagtaatggtaatgatttaattgttgatgctcatgatttatggaatagaattaaagaaaaatattttgtggcaaattgtactacttccactccctatattgcttgtgatgctaaccattcaaagggagaagatcaagaacgatggacacccaacgatgaatctacctcgtcaacaggtttggtctccactaataataagtgttttattgctaacaatgacggtggagacaaaagccatgatgaggaagagtatgaggatgatagcgaggatgaatcttcatcatcacaaggtacattttcctatattgcttccactgacattaatgacagggaaaatgagaccgatgatgtggaagaagaggagattcgccgtttctacacccatctcaacaaagaagacaaagcgctcttgattaagctgttgagaaggaacaaggaacaaagcgagatgcttctcaggctagaggagactctcatcaaaacaaacaacagcctggagaagatgaccaaagaacatgaggagctaaagtgctctcatgatgtcttggtccaacggtatgattcaattttaattgagcaaaatagtaatgatgatgctatatcttgtgttgctcaacttaaaatggaaaatgtcatgcttgagagagaagtaaaaattgttgagtcatgataaccttgctctaggtgaagagtacgatgtgttatcatattctcataataaaatgattgatgaccatatcatgcttaatgttgctcatgaggttataattgcgaacttaaattcatgtgaacctcactctcgcacgagtgcgcatttgaattgtatatcaccatgtgctaacccctgctgttcaaaagaaagccaatttttgaataagcatcaagatgcagggtcacaaaagaaattgtgtgggaacaagaagcaaagacaactaaggagaagacgcattgctcaactctctcaagatatccacgggcgcgtggtgaagaagcttgagaaaggaaaaactgcagcaagtgctgagcttcataaaaagattgttcctaaagatgaagaaatcaacatgagcttggaaaaaggtaaagatttatttaatcatgttgtttgcactgaccttttctctatgtcatcaaagagcaaaaagagaagaggaaaaaggaggtgtttcaagtgcaagaagctaggccaccttatcgcatcttgtccatacaaagacaaggatgaagggacaaggagttgttttggatgcaacaataaggaccacatgatcacgtcttgtccgctattgatgaaccaagcacgtgcaccctccaagatgactcccactaaggaaaataacaaacagcaagtgtcatgtcaagttgaacgacgcttctgctacaagtgtggcgagcagggtcatctatccaagtcaatctttcacttgacattcaaattggtatctttgtgtgatgaaagtgatcgagtatgccttgaccaagtctcaaggtggaaaagagaagatgagcatgaaatagagcaatcaggacttgggtacctctgtaagtcaaagacaactgatcaagccaaggacggaggcaagaagagcttcgaggtaccaagtgcacgggagaaggccaaggaggctgaggaacccaaagccaagggtgaagaagaaggcttgcaaagtcaagggtga

SEQ ID NO: 179213 - DNA, 184 bp, Zea mays
  unsure (1)..(184): unsure at all n locations
  Clone ID: MRT4577_95024C.1
gtttgtcgatgcgaacaaagttgtttctgttagtttggagctggagttctgaatatttacttttataattttaaaataaactttgttcgactcggtccaattttaatattataaaagtaaatattaagaactcaagctcctaacgactagatagatctgnnggttgcttcgtcacacggggggg

SEQ ID NO: 179214 - DNA, 616 bp, Zea mays
  unsure (1)..(616): unsure at all n locations
  Clone ID: MRT4577_95025C.1
aattcggcacgaggagcgatcgcacatcctgtggaggagggtagtggactggtggcggtgtggtctccctcgcatccgttccgcttcctcctctgtccagtggctgtgcaaggaaacaagggaggggtggggggcgcgcgtcggggaccgggatggagtggctggagaaggacctgcgggagaagttcgacctgccgcccaagaaccgctccgaggaggccctgcgcagatggcgcgacgccgtctccgtcgtcaagaacccgcgccgccggttccgcatggtcgccgacctcgccacgcgccgccagaacgacctcaagcgccgatccacccaggaaaagatccgtgtcgccctctacgtgcagcaggccgcgctccacttcatcgatggtggcaagcacaaagactaccggctaaccgacgacattatgaaggnccgggttctgcatcagcccggacgagctggcgtcgatcacgagcaagcacgacgcgaaggctctgagcatgcacggcgngggtggacgggatatgcgcgaaagtacgctcgtcgccaaccgcgggcgtgtccgccgccacgacgacgacgatcctgacgcgaggcgaaccgtgtacggcg

SEQ ID NO: 179215 - DNA, 294 bp, Zea mays
  Clone ID: MRT4577_95026C.1
ggttccggtctctgtctgggctctgggagagagagggagatgcttcgggttgcagttctgcgtcagagtcacacaggtgctgctgctggaaccatgactggagtgcctacagtctccttctctgaactccgtcaactcctagcctcaggcagggccaggctcttcgatgtccgctcacgggaggaggcagcggctggtaccattcccggggcactcaacatccctgtgtctgagttggaaatggccttgaacatggactcagctgcttttcagacttcatactgtgctgagaag

SEQ ID NO: 179216 - DNA, 195 bp, Zea mays
  Clone ID: MRT4577_95027C.1
atggtacttgttggtgtttatgacccaactgcacaccatgagggtattccatgtgatgcttttgagcaggatggcgttgttgatcgtgacttgatggtgacagatgagttgtgggcagtgatggatgaattctcctatcaatctaatgacgacgtggttgctatgagtgggatgacgagatatgggatgggatga

SEQ ID NO: 179217 - DNA, 411 bp, Zea mays
  Clone ID: MRT4577_95028C.1
cgcacgaaggatcgttctctatgttcacatcgaacacagtgattggtggcactgctcggacatagaagcaattggtttacccttccttttttcttgtttgttttgtagctattactgcatgcattttctttgaccatagctggaaagatgtgagtattatgttcggtgtttgtcttgggaattaaactactatagtgtaacttgtctcgtcattttcttgagtacatgtacttatccattgacttcttttgcaggtaattccagtggcatagcttcgatgctatgtatgactttctgaagaaaaactgggagatcacaagatgggttgctctaggcattgttgtttttttagataagagacatgacttatctgacatcttttgatcttaactaaactcgaaggatcctcat

SEQ ID NO: 179218 - DNA, 277 bp, Zea mays
  Clone ID: MRT4577_95029C.1
ccgacgcgtccatgaatgaacacgcgcgatcgcatgacatgacctaccacagctgctaagtgcttgcaatctggtaagccacactataacagttaataacgtaggtgtgattggcctcaactgtgtctctatagttctgaacctacctgatgtagccatcactgtccttgcgccgattaacatgctctctctgttcgatcatgacgaagacgttgacactgtatgcatactcaatggtactggtcgagccaatcaccgaaatgctgacgaggccact

SEQ ID NO: 179219 - DNA, 286 bp, Zea mays
  Clone ID: MRT4577_9502C.1
ctagtttgaaaattaaaagcgagccatatattctttagataactacttacatggtgataaaggcatcatcatgctcattagtagtcgcaggggaatgaatagaacatcacatggaaatcaagcgcatcatgcatgaccatggacactgaaattgagcttaattttgatcattacaacatgctgtagcgggcaacgcactagtatatatgcgagtatgcacagccagcgtgcacgccggcaatgcctagagttcatcggcggtcgcgtcgtgcgtcctctgtcccga

SEQ ID NO: 179220 - DNA, 756 bp, Zea mays
  unsure (1)..(756): unsure at all n locations
  Clone ID: MRT4577_95030C.1
ctcccacatctctccccctctccctctcctctcctctcctctcccacacaagcaagcaaggaaggttctcaggccgccgccgccgccacgatgagctcctcctcgaagctcttccagtccgcctgcaaggccgccaggtccttcctcgcctcctcctccgcccccgccgccgcctcctccgtcctcgcagacgggaggaacgccgcgctcgccaccctcgccaacctcggcaggaactccaccctcccagccgcatacgcccaccacctccacaccaacgccgcatcctcccagggctacgcatggatcgccgccattcccgccgcagtctacatgctccaggatcaggaggtgcacgccgccgagatggaacgcaccttcatcgccatcaagcctgacggcgtccagagaggcctcatttctgagatagtgtcccgatttgagagaaaaggatacaagcttgttgccatcaagctggtggttccatccaagcagttcgccgagaagcactaccatgatctcaaggaaaggcctttcttcaatggactgtgcgacttcctcagctccggtcccgtgcttgccatggtatgggaaggagagggcgttatcaagtacgggaggaagctgatcggtgccacggacccatcgaaatctgagccaggaaccatcaggggtgaccttggctgttgttgttggaaggaacatcatccacgggagcgatggcccggagacagncaaggacgagatcgcgctctg

SEQ ID NO: 179221 - DNA, 210 bp, Zea mays
  Clone ID: MRT4577_95031C.1
ccttttctaggaagaacaggcaggaacaagctatatttttttttttttactttttaaaaaaaaaaaaaaattaaatatgtttttccttcccgggcggctcgttctaaagggggatttttggagttttccctccccttgggggtgggtggggcattcttttggggggcccatttggccctatcgtgggtcctttttcatttctttggccgt

SEQ ID NO: 179222 - DNA, 316 bp, Zea mays
  unsure (1)..(316): unsure at all n locations
  Clone ID: MRT4577_95032C.1
aaggnngacccacgcgacgcgtccgcatcaacatgattcttcattaccccatgtttcctctcatcgacaacccatccagcgggggggagcctgctctcccccccaccacccccataatcaagagcttcgctctaccagacaggacgctcatggcgtcgatcaaaatatcagacgctctattgcttagcacctttaaccccatatcaccaatggagcacggcagtttcaacaactcactatctgaaagcattttgtgaaactctaacataaagtcttgctttccctgctcatacgtgcattttaacgcctgcatatt

SEQ ID NO: 179223 - DNA, 390 bp, Zea mays
  Clone ID: MRT4577_95033C.1
atgcaaatctgacccttaatagcaatatgccatcggcgaaactgtccacagactattggtgcaaagttacacaaagatctgaatctatgctgaaaacatgaactgctgttgttaagctacccttagcaaccatatagcattgctgatcaagcaaaggtttggcacatagggcaaacgcttgatttgacacatagcgcgacagatttacctactaacagggggtgcaccacctcgtccaacaggaccactgccactaccagcatgagccctagatcgaatggagaccgcacgttctcggacagcacaaacagctgagcctttacccttaatgctggcgtgaaggcgcttgaacattggggcgttctatgagcatgtcggatataataatga

SEQ ID NO: 179224 - DNA, 182 bp, Zea mays
  Clone ID: MRT4577_95034C.1
atgttcagcattcaaaaacacaccaagcgaaacggactaaccaccaccttgccaccaagggttccaagaaattaacccttctttggcctcttggccttttaaggaaccccaccaaaggcgtcaataattcaaaagggttaattggttctaagggccataattcaaaagttcttccaacaagt

SEQ ID NO: 179225 - DNA, 206 bp, Zea mays
  Clone ID: MRT4577_95035C.1
tgcaggaacggtccgaattccgggtcaatcacgcgtccgcccacgcgtccgctcacgcgtccgcccacgcgtccgcccacgcgtccggcgagaaatcccccattttcatcagaaagcgcgattactgctacacaagagcctctatccaggcctatatcaatcggatttatctcgacgaccttatcatagggatgacgctttctaag

SEQ ID NO: 179226 - DNA, 324 bp, Zea mays
  Clone ID: MRT4577_95036C.1
ctccccccctttttttttttttttttttttttttttttttacagtgaaatgaacgtttacttggaactgctagaaatcaactgatctatccgatcgatcgactgagatggaaactgagcgcgagtgggcactcgcgagagagtacaaacatgaacgaacgagcacggacaagctccgccaacaatcgcggaggacacctcatcgctgatgcgtttggcccgcatcaaccgcgagctgtcgagtaaatatgacttgaccaagtgcaaatcacagctcggaccgcaccaagaaccagataccgtctagcgcgtaccacgagggcgg

SEQ ID NO: 179227 - DNA, 412 bp, Zea mays
  unsure (1)..(412): unsure at all n locations
  Clone ID: MRT4577_95037C.1
acggctgcgacgtggggccggacgggcgcctcctccgcgggtatgaccagtacgcctgcgacggcaaggattacatcgccctgaacgaggacctgagctcctggaccgcggcggacaccgcggctcagatcacccagcgcaagtgggaggcggcccgtgtggcggagcaggacagagcctacctggagggcctgtgcgtggagtcgctccgcagatacctggagaacgggaaggagacgctgcagcgcgcggaccccccaaagacacatgtgacccaccaccccatctctgaccatgaggtcaccctgaggtgctgggccctgngcttctaccctgcggagatcacactgacctggcagcgggatggcgaggaccaaactcaggacaccgagcttgtggagaccagaccagc

SEQ ID NO: 179228 - DNA, 230 bp, Zea mays
  Clone ID: MRT4577_95038C.1
gaaataactgtgattgattaccaaaaatatattcagattccacagcacgccgcggattaacattacttttacttacttaacaccagtcccaaaatataggaaaaaaagtttcaaagtaaaggaatacaacataagatattggaataattacatgatccaatttaatcaaccaatgactctcttcacccggacgcgtggggactagttctagatcgcgagcggccgctcgc

SEQ ID NO: 179229 - DNA, 545 bp, Zea mays
  Clone ID: MRT4577_95039C.1
actccatagggcgattgggatcctcgaggccggccgggaaacaccaaccagtcctcgctgttctctcatcactcaactcattctttataccaatactcatcacccctacataaatacctcatccgacacaatggctaccatcattatccagtaccccagcggtcacgactttgatgtcgactactatgtcaagactcacatgcctcttgccgagaagacatggaagagcaagggtctccagagcgcccaggttatcaagctcggcggtgacagcccttaccaactctacaccatcatgaagtgggagagcatggctcacttccaagctgctgccactgccgaggacgccaagaacgttcacgacgatgtcaagaacttcactaccgccactgctgagctccgcgttggcgagaccattgctgattccaagctgtaaattattatcaatctaaatacccaatactattgataccaacaaaaaaaaaaaaaaaaaaaaaacatgctactcttactctgtcaaaaaaaaaaaaaaaagacccgcggcc

SEQ ID NO: 179230 - DNA, 324 bp, Zea mays
  Clone ID: MRT4577_9503C.1
gcctaatttttttttttttttttttttttttttggtttttttggtctccaaaatggggtaaacaaaagttaatgggagtttcggggctttgctcttcttccgaaaagaattaaatctaaccttcctggctaaaggggggtgttccaactcaagtgggtttttcctattgctagcttgcacctatgggttttcatggtgcggtgttttccacacccccggtgggggggaccatatattctttttccccccatgtgtcggcctgccccccttctatttctggggccggttcctcactcctgcactaccccttttttctaacccctt

SEQ ID NO: 179231 - DNA, 579 bp, Zea mays
  Clone ID: MRT4577_95040C.1
atgtgttttcaactcaaatcaaacttccttattttctctacctatagcgctcatagacttttgagctccaatcttaatgtcatcatgcaacacagagccacagttgcagctgaagcaattaatcaaacacttggtgggcgatgcaggaaccacgtccacctcctcgggcacctacaggagagaggaagccagggaagagatgtgaaccgggcacagctcacaggacgtggtggtgaggttgtcgaggcagccacaggctccggcgagctgttcattgatgtcacagtcttcgaaggccatgtcatgtcgagaggcggcaccacctggaatccgcgcagggacggtgccgaagtcaatgtggatgagcaggttgaggtgcgcgagcgcaaccgcagagtcgacgacgaattgatccgggcaagcgaggtcggacacgcaaacagaaccgaggctcgacgactaggaggttgtgagatagtctgcgtcacgcgtacccgtagaggcctcccagtaaatccgatccaagagatccgcgtcgtccgccaagagatgtgcctcgacgtctgcgcggagggctga

SEQ ID NO: 179232 - DNA, 847 bp, Zea mays
  unsure (1)..(847): unsure at all n locations
  Clone ID: MRT4577_95041C.1
cctcgaggccggccgggaccatggtgtctccttcactagtcgatactcaactcatccaagcgctggagcaccaaacatgggttatcctcgccgagctcgatgccggtgctctagagtctcaggcggtggactccgatcagcaccgcgatgaattctcatcagccctccgcgcagacgtcgaggcacatctcttggcggacgacgcggatctcttggatcggatttactgggaggcctctacgggtacgcgtgacgcagactatctcacaacctcctagtcgtcgagcctcggttctgtttgcgtgtccgacctcgcttgcccggatcaattcgtcgtcgactctgcggttgcgctcgcgcacctcaacctgctcatccacattgacttcggcaccgtccctgttgcaaactccgccgaccctcgtcatcaggtagatccagggactccgttcgccccacacctgcgcggattccaggtggtgccgcctctcgacatgacatggccttcgaagactgtgacatcaatgaacagctcgccggagcctgtggctgcctcgacaacctcaccaccacgtcctgtgagctgtgcccggttcacatctcttccctggcttcctctctcctgtaggtgcccgaggaggtggacgtggttcctgcatcgcccaccaagtgtttgattaattgcttcagctgcaactgtggctctgtgttgcatgatgacattaagattggagctcaaaagtctatgagcgctataggtagagaaaataaggaagtttgatttgagttgaaaacacatggttccaagaggaatggtgaaaggnaaatgtgcccttgggtcatttct

SEQ ID NO: 179233 - DNA, 2652 bp, Zea mays
  Clone ID: MRT4577_95042C.1
aatgggcgaatttacccagcgtatatcctctagcttgtaagcttacccccatttgacattgtcttccaacattttcctagacttggcaacattccagttaaggttgagaccccaacaaaacatccagattcaacaaaatgaaatggagatatcaggggcatcatatttatgcattatcggtcatagggtactcagagaccacatctttcctacacaacctgcggtagaccgtagtgtaggtctctagcttgtattcggtgttgttcctctcctttgggtccaagaagatcttcttgatgaccagcaaatgctaaagcaactgagatccttctgtccttggactccacaactctgcataatcccaaagagggtggtgaccattgcacatcggtgtcttgtagcgttatcagactattgctcgtgtcagtaagtcgagcccaagttatctgcaagaaaaggtgaatgctctatgacaaggagactgacaggatggttcttcgagtgtatttcttccactttggtggcaccagtctgtggtttcaccagtcgctagttgcctgctacctcgagtaagctagaaagatccctttgtgttcactacaaccaagcaccgttcagcttagcacaaaataagaacagaagcataaaaaggaaataattataaaatcatttgacacacgaagctagaaggtgcgatgagccctatccctccatgcctgtaagtcgagcctaagttattgtagtagagggagcaggcaaggctatgctgtaagcatgtctatttgaggaatcattgttaaatgacaagagagatatcttgatggcaattgttaaatgacaaaatcattgtatagcctctgaaatagccaaacaggtgttgctattcaacatcctacaaatggaagaattttacaatttattttataagctttgccaatattagtggtgaaaggtgaaatttaagaacctgaaaagtcaaaagtatcacataattttgatagaggcgatgacaccaaagtaatagccagacataaaaatcttccatgaacagtccagtcgctgctgataaatcaattttgtagattagactcacataatcttattcaatgaaggagactggtttagtaaattctaactcagttctacatcattcgcacattaacatatcccttcacattgttgttcataaaacaattacaaaacaaggtaacagctaaagaagtcatcggttggaaaaaatgatctatggaaaagaatataatctacatgtgacatagtagagtgcacactcattaagctgctagcacattgtgagacatgaactgacaaaaagtagcatatgaccggtactacatacttacaaccctattggctattactcttgcaagtggatcttggttgcaggtgacaccagtccacaagttccccttaggcaagcaagaatccatgaggcaaaaacatcaccgtaacactaagctagtagctatggtgctcggcaactgttgtctaacaataggttcagattaacagcttcatcatttgcaaaggtctgccaatctcagtttttagactgaatcacaggttcacattcactgatttcagactcacatgttcatcatttgccatctttagcattttgcgaggttcagatttcatatttcaaactcataggtttaggctcaattcagatttcagattcacatgcttatatccacaaatttcaggctcaggttcattatttgccatcttcagcatttgcaaggttcacaaatagaggttcacaaaaccatattcaggtttgcaaagtatattagattgctcgtaggtgcaatgagaggaagtagagaaatagaatgtttgtcttataaaaatgtttgcattaacaaatttcaaagcacaaataatatatccaccagtagtaaattgctactaaattactaaaaccgtgaaacgaacaatcatgcaggcataaataactggatggacaaagaataggttgatgatatatataaatgtgtgtgtgtgtgtgtcttatcccttccatcaccattttctccttttaccctcaaataaagaaagaagtgaagtaacctcatgttcaacattccagcatttagaaatgcaggcatataaactgaccttgtgtatagcaggccccaatactcaatataatgatatccttgcaatcgtgtgcaggttgcgctacggaaattcaagtggaaggactgccatagtcctcctgacaccaatattgcttttatagtggacagaagaaacatcatcttcgtggtaggccgcaacggtcgcctctaccagtacaataggatcacagagctctggcacaggccctaacatttacctccttgtccccagggaaggccgtgcgtccatcgcctcacatatcgtgctccccagggacgcccgtgcggccatcaccgctgtccctggccggctccctgttcatggtgtccgagaacgggggacctggtggagtaccacttcagcccaaaggacagatgggagtgtctggagcactggacgccccactgggacatgagtatcgtcggcgccccgggctcgtgcttcgatggctcccagcaattcgtggccggctctaacggggcacatgtaccagcggcacatggaggggag

SEQ ID NO: 179234 - DNA, 554 bp, Zea mays
  Clone ID: MRT4577_95043C.1
gaaagcggtccgggctggaagtatactgtccttacaaacgcagacaggtggcatggcacactgcctttgtcacaaatcacagccccaatttactacttcaggacaactgatgtcactggatgagaaaacccggtcggggcgatgattatggttctggccggtgacactgcttctaccaattgtgggttgatctcacttgcccctatcgaacctgctcaaaaatttgtgctcagggaaggaggaaaaccggacgctgtctgagtcggctccaaagttcttagctgatcagttggcactttcttctccgacccattccattgaacaaaccattgttgatatttcctaccttttttttgataactttgtagtccgattccaacactacactgcaaatgctgtcaaagatgttctaagtcaagaagttcgactattttgctggcattgacctgattctccaagggaagaatcaatttgacatggttacctaccgccggcccctttctgttctaaagtgatgtgccctgtgacttagctctgactctacggatcatacc

SEQ ID NO: 179235 - DNA, 311 bp, Zea mays
  unsure (1)..(311): unsure at all n locations
  Clone ID: MRT4577_95044C.1
cagcgaaatcaatctagagcacccctcttctttctctctcttcgccgnccgaagctccgnaccccaatctaatcgacaacctaccgagatgggccgnaaggtcttcgtcggnggcaactggaaatgcantggaaactacagatcaggncgagaagataganaaaaccctgaatgaaggacaggttcccccttcagatgttgncaaggtcgntgncagccctccttatgttttccttnctggggtcaagagccagntgngccaagagttccatgatgntgctcaaaactgcnggnngaagaagggaggagct

SEQ ID NO: 179236 - DNA, 140 bp, Zea mays
  Clone ID: MRT4577_95045C.1
cccacgcgtccgcttcgtcgtgcggcaactgcgcgaccgccgacgcccgacggcaggtgcaccaagtcttggtcgacccctttgcaagggcttgggtccattctttggcggaggggaacggcccttaacaagacttggtc

SEQ ID NO: 179237 - DNA, 390 bp, Zea mays
  Clone ID: MRT4577_95046C.1
ctcgtacgcacgcttgcgtttgctctggaggcggctcatggagggcattggagctaatcgtcgatggcaagaatgaacaagcgcctctgcaacttcttcaagtaaatgctatgagaaagttgccgtcagtggaagaggtgactttactgctcttgccgtacaagggtcttccgttgaagcaaaacattaaggactggctggaaaggttccagaggctgccttatgtatctgcatatgacaatatgagtcacatcaatccggtttgagatgtttgacagaagcgggccgtccgcgtgctgcatcaactgcttcatctagtcgcgacatgctgtgctctgatgctaccgttacattgactccgctacgacataggcctgctacacaagtttc

SEQ ID NO: 179238 - DNA, 228 bp, Zea mays
  Clone ID: MRT4577_95047C.1
cagaaatagggagcaagacctcgtacagggcgtacaaggcctaacacacgcaagaagagatcctccttagcagctagccactcaggggggagtgctcaccccgaaggaaccaagaaagagaactgatcgagggtgaactccacacgcagatgaaaaacaagaaacgacagtggaggagaaaccagattcagaagcagatgttctaacaacaggcagatcacgatcgag

SEQ ID NO: 179239 - DNA, 302 bp, Zea mays
  Clone ID: MRT4577_95048C.1
ggcgccggcgctcccctggagcatcgctaggaaagcggtgcggttggcacggcaggcaaggaacgtcgcccgcatcgcggtggggagcggcccgagcggtggcggcctggcctcgaacgacttgagcagccaccgtaagctctggttgagggccgtgtagtggcaacggtcgccgtccaaggtgcgctcagcgcatacggggccggtctcctgcaacatccgctcggccttggcgtgtcccgccaggctggcgttattgagcgcgaccgtttcccaacggatactctcgttgaccttggcgc

SEQ ID NO: 179240 - DNA, 289 bp, Zea mays
  Clone ID: MRT4577_95049C.1
ggttctttgatgactggtaccacctaggacccggcgggcgacttgatggaggatacaaggaccgctgatgcggcaagagacagtgaatgggggcttggtgcaaacccacaggacgaatccaaactgcaaggatcaacaggagactgtgaagagaagggacgctggagagacagactacccgaccgggccaaggctgtttaagccaaaacaacaagctgtactatacacccaagaacagactggaggcgcgtgttacacacggggacgtggctgttgatgtcatcactga

SEQ ID NO: 179241 - DNA, 305 bp, Zea mays
  Clone ID: MRT4577_9504C.1
acaagctttttttttctatgttccttttctagttgtccagttaccgtaccaacccctgtggcgttttcgttgcaattccgccctactaactgaatataatatttaaagaaaaatcctttattcatccctttttttatatgtatggcataacgcaataagacgacacacattatcatgttgtggtctgaccaataatatagggggcataataaaggattggttctaaaaattaagtaacataaaaaagggggaatggcaacgaaaaccccccatgggttggtgcggtagcttggaagatggtactg

SEQ ID NO: 179242 - DNA, 897 bp, Zea mays
  unsure (1)..(897): unsure at all n locations
  Clone ID: MRT4577_95050C.1
ttgggtacctcgaggccggccggactcacttttcgacctcgacctccaatggctgacattaaagactggcgttcactgagcgatcccaccccagaatgggaagaggtagctaagtccatgggaggtcaggtcttcgacattggtgttttcccagatatcaagagtcttcgtgaagtcctcgccgccaccaagaaggactttactgcggcctggggtccgatcaccggagtgaaagaagagaaggaccagaagatcacagtgcgcgatggcgagaagatcacagtgcgaacatacacgcctgaaaagactggaggaccattgtacgtcatgattcacggcggcggctggtgcgttggggacctggcgagcgaggatctgctatctcgcttgctgtgtgggaaacttggcttcgttgtcgtcagtgtggactatcgccttggtcccgagcataagttcccgacagcacataatgactgctgggatgcgtttgaatgggctgccgagaacgcttcacagcttggtgcagatccaagcaaaggattcatcgttggcggtaattcagcaggcggcaacctcgccacaacaatctcccacttggctcgcgatgagaaactcagtccgcctctcaccggcactcacttaatgattccatccatctgcgtcgacaaagaactgccagaaaagtacaggaaagacgcgcactcctgggagcagaacaaagatgctgccatcctctcccgaaaagcctgcgatctattcttcgacaactacgtaccaagccactccgaccgcggcaacgagctattcagtccgctcaacttcaagaccggncacgccgggctgccgccaactttccttcagatctgtggcgctgatcactgcgtgacgaggctctga

SEQ ID NO: 179243 - DNA, 227 bp, Zea mays
  Clone ID: MRT4577_95051C.1
ataaaccacgtggcgacatttagttcaatagtcatggcaaacaagcattatccacaattactttataaaataccccgtatcaattacaagccattaacaaaaaatacacaatgacttttttgcaagcctgggatacaaaacccattcaaaaaattgaaaacaaaagtacaacgtaaaaactaatatgagagccagcaaactaacattttatttaataaaatttttta

SEQ ID NO: 179244 - DNA, 663 bp, Zea mays
  Clone ID: MRT4577_95052C.1
attgggtacctcgaggccggccgggagccaaccttactccgtcgcttcgtccgttggatggatcacgtgtgcaccgccgggagcggaatcttgcatcgagcgagccggacgcggggagggactctcctcccatctccgccgcggcatacgccccggcgtccacacagctgcgactctttctccgcgccatggactggacggctccatgtctcatgcgactgctgcaattccatgtgcatctgctgctacctgctggacgcgtccgggaccaatgccgatctccaactattcttgttataccttcgtcattctcgactgcatctacgtcttcttacgaaacgacacctgggacaaatccgaaaaagcctcaccagtgacaatgatcctccccctgacggacgatctatacctgtcgaatgtgacggagaactgattgtcataccgaaaggccgccggactatacacctacattccatgatgtcgactggtggaaaaactggaaagagcacaactcagagaccgtcgctccacttgctctctcgatcctcatgattgatagaacagaaagaaatctctcactatggcataaccgaagagtttacggagtctgaactcttctaagtgtgtatgccgattgacaacctctgactcgacaatttagag

SEQ ID NO: 179245 - DNA, 990 bp, Zea mays
  Clone ID: MRT4577_95053C.1
aaaaccctgaagaaattggagggatcgacagcttaacaatcttgcaaactcctgtcactaaagacaggcagctgagtttttctcagagtgttcgtgatgttgtgttgggcagcggtgaaatatggttgatgatgttaaatatacagtttcacatgtcgtggagcctatggagcggagttttacaaagataaataagacaattcatcaaatctcagaaaacgtcaagcagcttgagaagcaaaagaggaaggcaaaggacgacagtcatcttattcccctagaaccatggtcagaggaattttcagaagctcatgaccatgttgcgggcggtagtgccagtgacagcggattagctaagacaaggtacaacaggatcttaaataggccccggaggtcattcgagtccagattgcgcagatggttctagcagccagccggtgctagtgggttaattgattttgatcaaaagaggcggttaaccttttcgctccggttgtttgacaaaatgatagcaattctgacaaactagttctccctccgttcttttcttctttatttgctggtgacaaatattcgagaacggagtttggagtttggcacggggtggaggcagtagccagcagctcttcattattttgtgggtgacaaatattcatgaacggagtttggagtttggcacggggtggaggcagtagccagcagctgcttcctgttgtttatagcttgaccctgggctctttcccattttggaggctgtagctacacgagtttttgatgttagcgtccttgtttagaacttaaatcttaggatcggcaaataccgatgtaacctgttgcttcctagagttagtataaagtaccatgctttgagctggggttctagtttaaaattcatctttgaggacggcgaagtaaaaggtttctctggaactgtttcagctggaatgatatgtttatttgtatcaaaaaaaaaaaaaaaaaaggccccta

SEQ ID NO: 179246 - DNA, 357 bp, Zea mays
  Clone ID: MRT4577_95054C.1
tcctctagagcgggcgcccgcttcgccactttgttgagctccacccgcggctgcatctcctccagatccaactaccgctgacggtgaccccggcacagcctcagaagacggtgcacctagacccgggtcctgggcgcgtcccgaccagacaagcacaccaccgccaggatcacaccctcctggagtacacgacgcgtgccgtgatgaactcagttgaagatcacggacagacacgacacggccacaccagtgatggcaggttcactttcgaggaggacgagaacgaaggcatcaacaatcgccggtccggacgcgagcccatcattgccaggggacgccacctccagggtgaatgcc

SEQ ID NO: 179247 - DNA, 575 bp, Zea mays
  unsure (1)..(575): unsure at all n locations
  Clone ID: MRT4577_95055C.1
aatggtgtatatatacccggctgagnacccccttcggcagcagnacgccctccancnnggctgcaccagnnatcctgacnnggcgcgacagnatnnggcgcgctncnngctgctggcccctgtgtcggaacttactnntccaccgnncctccggnacccgctcaaagctcgcttttctgggtcacgaaaagccccagnnggcgccacaggnnagcanngcagggccccacagctanngcggcgggcggnncggcggcccctgnacgaaagtggnntgacgaaccgcncnnagccgcattgcaacgncnncggcgcacgcnnnatgtgtccnnattcatgcnnatatatganngtcatgcnnatgatgtgnntgtgtgtnnncgtcgnngcgtnnngttcgtnaatnnnggttcaaggnaaccagaccggnnacaagaatanngggctttgcagggtaaatagctannctaagccanngttagggccgggctttgggggagaagagagctagnncgaggccgaggtgatcaacaaaaaggatatatgttaatctttagcggacgaattggtcgtcg

SEQ ID NO: 179248 - DNA, 308 bp, Zea mays
  Clone ID: MRT4577_95057C.1
ggctggcacaaagttagtatcacttggtctccttgttcttatgggcataggattagccaatgcagcgagggtggcgagatactctagtgctgatgggactggcaacggagagggacagggtagcggatatgtgaatggcgggggatcagggtctgggtccggtaccggatccggtgatagtagtccttatggtacccatgcaagtgctggagggggtggtgcaggtggtggagctagccaatacggtgggtctggatatggttcaggatcagggtctggttcagggtctagtacatatagtcaaggag

SEQ ID NO: 179249 - DNA, 223 bp, Zea mays
  Clone ID: MRT4577_95058C.1
ggctcgcgttgcgagtctaacctgacgatggaaactacaatggttgtcggaaggatatggcccgtgtgaacatgaactgtagcctggagtagaggcaaacaccgtggttcgaccaacttaatagccctaatggctggattggtaatgagataataatatcgcgcctatactacaactatctctacatttatgactagattgctgactataggactacagggga

SEQ ID NO: 179250 - DNA, 244 bp, Zea mays
  Clone ID: MRT4577_95059C.1
gtggtaagaaaggtgtttgggctcctgtagaacaggagtttcttccatccttcctgaagactagtttggagggcaatagataagctaattgaaactcttcaggcctagtttgggtactctagtaatgaaatgaattggaatgaattgagatgtattgtgtgagtttttgatctgttagggatttaaacactctttaatccctccaaaccattcaatagggatttaaattctcttcaatctctcc

SEQ ID NO: 179251 - DNA, 202 bp, Zea mays
  Clone ID: MRT4577_9505C.1
tttttatataaaaccacgtgtacacatccgggggggggtcatacaacagagggctggccacccactatcttctggcacacactgatgttcctctcctgctctacaattaggccatacatcacatgtgtcgactttctcttgtcatatatagacctacttacaccaacctcaacaagcttttgtaccatgtgatcttatacct

SEQ ID NO: 179252 - DNA, 145 bp, Zea mays
  unsure (1)..(145): unsure at all n locations
  Clone ID: MRT4577_95060C.1
aggaaaaaataacataatgggtactatacttttggaggnccgggaggcactaaacatgtaagtaaatcaaagttgcatacattttttcgggccttgtaccacgatcatacccaagcccattcattcccccaccttttcattccat

SEQ ID NO: 179253 - DNA, 363 bp, Zea mays
  Clone ID: MRT4577_95061C.1
gaccaacaagcaacatagaaagtggaatccagtaccaacaatagagcaacactggcgaccaagatattttcccttcttatgctcgttgctctttatgcatgtgatgctaacccaacaattttccctcaatgctcacaagctcgtatagattacattctttccccgtacattccattaatgatagctgcagtaagtgaaaacacacctctccaccctataagctccaacgggcggctcgcagaatggacaatacctttctcactcttgcttcaacaatacgtcagtcctatatttggtgcactcataggtacaaaccatcaggggacagacgactgagcaactggtgctacctgtgatcaacca

SEQ ID NO: 179254 - DNA, 671 bp, Zea mays
  unsure (1)..(671): unsure at all n locations
  Clone ID: MRT4577_95062C.1
gacgatggatgctgccgctggaaaatccattccgtatatatggctaatatatgaaagtagtaacttagtatatgtaactgacaagcaccaattaagctaagtgcgttgcaaaatacacgaccacaaagaaacacgggacatattacaagaggtgaagaaaaaaaaggattcaaataagatcaaaagatgtggatacccctaggtcatcactccataactattaattcctcgctgctgcctctgaaaattcatattgtatataccaaccaaagcatccatcgtcactccggccggctgagaaattaaaggtgatcaggcgtccccgttgctggcgttccattgcttgttccccggactccacttggggcacttggggctgaagtacttggcctgcaccctcgcgtcgagcagctccacgacggggccggggcgcacgcagcgcggcgccttgtactggttgatggacgcgccgcggctgatagcgtagtccatgagcttgtcgaacgtgccctcggacacgacgcgtatctcgaggggcccgatggacttgtcgcaggcccggcactgccggtacacgctgttgagctcctcctccaccgacaggcagcagtcctcgaacacggacgccggcacggncgtgctgcccgcgcgcagctcccagaacagcacgt

SEQ ID NO: 179255 - DNA, 746 bp, Zea mays
  unsure (1)..(746): unsure at all n locations
  Clone ID: MRT4577_95063C.1
gcacgccaccttagatcggtcgacacatagctagctacccgctagctgctgccgcgcggccgggccgcgcgcgagagcactcaaaattcgcgcgtcgcgcgcccgccacgcggcgcggtcatgctgcggctgcggggagaagcgcggtagccgagcacgggcgatccggcgctgcccgcctatggatctggccgcatggcgggcttccctctaggcggaggaggccacggccgcggcgaccaccaccaccaccaccaccctcacgtgaacccttcctccgcctccggctccgaatccgccaccgccaccgccgccgcctacctctacacggccgccgccgccgccngcgccgcgcggcgggttccagctatggccgcaccacccggcggaggagcaccaccaccacttctacgcgcccaacatcatccgcttcgccgatgnncccttcgcgggctcctcgcgcagcggcaggggttcagacgccttcgtcgccgccggcgcgggaaccatcagctgccaggactgcggaaaccaggccaagaaggactgcgtccacatgcgctgccgcacctgctgcaagacccgnggcttcgactgcccaacccatgtcagtnccacctgggtgcccgcagccnaagcgccgggagcgccagcagcaggccaccgagccctccaaacgccaccgcgacgccaccgccagtgcccagccctcatctaccaccgcactccaattttcctcggggagc

SEQ ID NO: 179256 - DNA, 299 bp, Zea mays
  Clone ID: MRT4577_95064C.1
accttagcttctctcctatagacccaccccacccttactaggagactctctttcttctatttcgggttgcgtgccttcattaacaattttgtcactacacaatatctaaagaaatagctgtaaaagtgtctgctctccgatcggaaggcgcttcattggcttaacacactctatttaatgccctaacacttgcgacaaaccatctggcgaaggctatactcatgtgacgttgtgctttatatttttggcgtgacgaccgacgatctattattgtgtctcgatgacacaattcttttttt

SEQ ID NO: 179257 - DNA, 510 bp, Zea mays
  Clone ID: MRT4577_95067C.1
agggcgattgggatcctcgaggccggccgggattcgcctccaccatggtgccactgcgagcagctccgccccctgcccccccggtcggcggatcccccaccccgccaggtgctctgctaaggctcaccacagtgccagcaactccaccacccccttcctccgctgttggcggttcccccaccccgctaggagcaccgcccaggcggacggcttcaccttcaaagcccatgccacgcagccagcgtcgggatcacccccacctacacccctcgccagaggaccgcccccttgatgccagacagccaacggattcacccccacgccctccacgagcctgataaaggatgttaaaggtcgcggcaagtggctctactgccactccactccgcggcggcgccagcgctgatgaccacctctcggcctactgctacttcttctcccacatgggtctaatccatgtcgcgatactcggttcggacatttggggctaggttccttcccaactctgca

SEQ ID NO: 179258 - DNA, 702 bp, Zea mays
  Clone ID: MRT4577_95068C.1
gccggccgggtcgggatctcgaaacccatgtcctctgatacttctccctccgccgccgctcccgtcccgttgcccggctgctccaattccataccggcctccgccacctctgctgagagcgaaaaaacatggcacgcaacggtgatggaccgtgaatcggcatcgatctcagaacgacggactcttgcgcttctacctgtaagaacgaccgagccaagatcatcgccaacgaccagggtaaccgcaccacaccctcgaacatacccttcaccgactcctagcgcctcatcttcagatgcacgcaacaaccaaccccccatgaaccccatcatcgctcgcgctttgatgcgcaatgcgctcgcattgactaggaggttgtaggatgccatactgtacagagcgatattactatgtgggccttcccggacatttcactgaccggtgagaatacaatgacagctgttcagcacataggactaggacagacagtttgcacccgaacagatctcctctatgcctctcatcaacatgcatgagatcatttaagcttaccttgaccacacgatcaaccaatgctgttgtgccagtccctgatctatttcaaagagtcggacatgcaggacacaaaggatggtggggagattgctggcctccatgcggtgcgtatcattcatgaaccaaccgctgctgctattgcctatg

SEQ ID NO: 179259 - DNA, 299 bp, Zea mays
  Clone ID: MRT4577_95069C.1
aaaaaaatcaaagtggcttatacccaacggcggcacggaatgcctttggcccaatagcggagacagacatccaccttcaataatgcctactgacaaaacaacattaaagtacacaatgcaacaatactcatcgacaactcagcattcccatgcgcccaaaacgcggtcaacatgcctagataaactaggcctgcttgctgccatctgggatcgtaaacaggaccaccggtttgtacgatttgataaaaggggcatcacacttaacatcgcctatcctatccagctgtatgacctcacca

SEQ ID NO: 179260 - DNA, 838 bp, Zea mays
  unsure (1)..(838): unsure at all n locations
  Clone ID: MRT4577_9506C.1
gccggcctgtttcgggattatcaatcaatacaaacaaaacaaatcaattaaatattgtctggagaaacttatagtgcttgggtctgtccntggaagaagtcaacctcttcaaaaggcagaagttgaattctgtacttgggatgaaaacatggttcaaatggatattatttgctgtggtgtctgcggtactgatcttcacactgttgatgaaggttggggacctactgagttcccttgtgttgttggtcatgaaatcattggtaaggtaacaaaggtcggaaataacgtaaagaaggtcaaggttggcgaccgttgtggtgttggctgccaatctgcctcttgtcaccaatgtgaatattgtaagaaaggtatggagaatccttgtgctgttcatgccgtatggtccttcaatgatagatatgagaatcctaccaaagacaagacctatggtggctttgctgaaaaatggagaggtcctcaagactttgttgtcaagattcccgataacttctcttctgaagtggctgcctctttcctttgtggtggtgtcaccactttcacccctttgaagcgttacaatgtcggtaagggatccaaggtcgctatccttggtcttggtggtcttggccattttgctgtccagtgngctaaagcaatgggcgctgaggtggttgcatttgatgtgattcctgacaaggtcaaagatgccaagaaactgngctgtgatggttacgtgttgatgcaaaacgaagaagagatcaaacctcactancacacattcactcatatcttggctaccagattgtcaacagtgctggcctacttatttgatatgctc

SEQ ID NO: 179261 - DNA, 365 bp, Zea mays
  Clone ID: MRT4577_95070C.1
ccgcgcgcgcccgccccccgcagcccatactactctctccaccacctgggcagcagaagcacgagcataattagctaggaggtatacaaacctgtagaggtgtccaactacatcaacaagtatgacggacggctctgtatctttcacctggctgacaacgtcatcgagctgagagcatgaccactcgctatgcgataataaactgttctatctaactgcacaacgcacctaccgaggatgtctaagataagcctacactacactccgtccgtagcaatgcatagagaactaccggcttaagcaaactgagcttatcctactcacatataagaaaacaaagctcgcaagcactctattagaaccag

SEQ ID NO: 179262 - DNA, 253 bp, Zea mays
  Clone ID: MRT4577_95071C.1
ggtcatcgttgggatctccatacgccggatctgctaaaatacgcttgatccatatgggcctcctcgaccacttgtgggacgacaccgtcgccggcccaaggcggaaaacggtctcggcaagctccgaaaacaccacaccttcactttccgacctagctccggcaaggaaacggagggcgggagcgtgagatcgtacggagacgaatcgtcggaggaagcgacgagagtgacgcgtagtatcatgatcgtgaaa

SEQ ID NO: 179263 - DNA, 821 bp, Zea mays
  Clone ID: MRT4577_95072C.1
cctcgaggccggcccggccgggctccctcgctagccacatttgcctagggttttggactcggcatcgcgccctccgaggaatcccatcggggtggacgttacccattcccgcgctgcttcttccgctcgcgtcttcagcaccaccgcgacgtgcccgtgctgtgccgcttcccgccgccggaaccatccgctgccgtctctggttctcacgccaccaggaagcatctcgtgccgccgccagcaactagatctgctacgccacacccattcggtagcgtcgctgtgttcccggggcaccaataacaatcttgcaccgtcgtggctgtcatcatctgtattccgtcgcccacgtctagccatgaatatacctccgcgtcccagttcatcggtgagtgaagatattggcctgttcaacacgacatctgcagagattggtcttgtttctccttttgtgccaggaagacaggatatgccacatgctaattcaatcggcggggaggaagacctcgtaggtaccatggattctgggtattacactaatctcctagtcaatggtgttcaagaatctcaagcacctcctagtgatgcaagagcagcagccaagagttgtcagggtagaagcaaaaattttagagatgatgaagacattcttcttgtgtcagcttggctaaatgtgggcatggatcctattcaaggagttgatcaaagacatggcacactgtggacaaggatacatgattatttcaatgcaaacaagatgttcgactcaaatcgttgtgaaggatctttaatgaatcgttgggtcagtatacaacatgatg

SEQ ID NO: 179264 - DNA, 763 bp, Zea mays
  Clone ID: MRT4577_95073C.1
atgtatgcattgttaatttcctataacattgtacaatacaatttaaatatattgcagtagtatttgcagcgagcaagcaatggtagccttgaaatctcttgagcaatttgttcaatcgaccatccatgtttctcatactcgtcaattgaaatcccccacgcgtctagccgcataattcgcaaccacgtatctgcatgttcacaacggtgcatccaagcgaagcggacgacagtgatgctgacgatcggcaaaaacagcgacgacaccgtcgaaggggatacagaggaagagaaagaatggggaaatcgcacatgaagtgaagaacgaacctcaggcattcgcaaaatgtcaccggcggccgaggaaacgaacggcggcggcgccgtcggagaggctacagaggaagggaaacattggggaaatcacacggggactgaaaatggaacctcagacggtcgcaaatgttgccggcgaccgaggaaggtgacgtcatcagcggtctcgaaaccctagtcgccgctcccaaaaccctcgccggacgtcgggggatgggtgccgagcaggcttccagggatcggcgagactaggagtttctgcgcgtgggggagggcatcgcggatcgcgggacgggacaatgggcgagggttgcgtcgggtgggggcacggattgcggcggcggaggcgtggattgcgggcgcggaggggccagacgcggacgcgcggtgagaggaggcagaaccgtggtgtaccctcgtgccgaatt

SEQ ID NO: 179265 - DNA, 180 bp, Zea mays
  Clone ID: MRT4577_95074C.1
gcacgaggaacgatccttcttctttttctttctcattagtttgactctcttttttttttttttttgcccccttgctccgtttccttgtgtcgacggtcgattgaccatgtgcatgagatgcgaggaggcatagttgtattttgagagatcagagatgaacaaggctattctagggtcagc

SEQ ID NO: 179266 - DNA, 297 bp, Zea mays
  Clone ID: MRT4577_95075C.1
accaaatagcgtggggggaaacatttttttataaaaaattcatgtctttttttgggggatggagcctaggaaaacaaggtttgactcgacggaaacatgttttctctcatggaggggcctatttgtgtaatacgaggaacgcgcaggcaagaatacttaggcctgtttgcaatacacagccagatagatattctccaccttagattttatatataataagatgccctgcatccaaggttggttttatatggacccggcgggttgctcaaaaaccatgaatcttggtgtgcttctttt

SEQ ID NO: 179267 - DNA, 876 bp, Zea mays
  Clone ID: MRT4577_95076C.1
cattgggtacctcgaggccggccgggcagaaaattaggtaaagtatggtgctccttcgctttcttcctcggcctccgcagctagcgcaacgcaaaggcagttccggcgggggcggactgggaacacatgggaatgagatgagatcattgctcggtcgtgctggcctgggccgtcggcgcgcgttgatcttgcatgtgttctcaggtcgcccccggagggccttccttgctgctgtgttccgctagacctggagtatctcgacgacggtggcaggcacacgcagtgacggcaccactacgtctgttccgccacgagagcctatgtaacgtgactaaaatatgaagaagcaaggagatattgcctctctttttcgcaatcatgctgccaaaaaaacagaagtttatttttacttcattatctccggatgttactcaagcgtcgacacctcaagaacaagaggaagagaggataaatgaagaaattgtgaatccaataccatctgcactgtcatcgccaacactttatgatgtcagtcgtcttccacatgatccaggtgaaagacaacctattgcaagttactatgctaatgatcacgatgcaattcgaagagcatatattcttagaggtccatttcaaccatatgcacatgaattcccaaataggaaaattggagttagagatcgccattttaattttgtgtggtttcaaaattttccttggattgaatataatgtcaagaaagatgctgcattttgctttatgtgctacttattcaaaagtaaagcaaataagggcaaagggacttctgcaaaaaaaaaaaaaaaaaagaaaaaaaaaaaaaaaaaagcggccgcacttctaaacatgtgagttcta

SEQ ID NO: 179268 - DNA, 1343 bp, Zea mays
  Clone ID: MRT4577_95077C.1
acgcgcgtaacgactcctatagggcgattgggttcatagaggccggccggggcgactccgtgtctggcgatctagcggacagcggcgagccggcgataggaacacgccaggcgctgtccgctactccgctgacgctcccagcctcccacgccggaccagcctgcgacgtcccgcaaggcaaggctgcaagcaaatcaaggttgcaccgctgctgctggctggcatctttgcgacttggtaattagcatcttgctctgctcggtctacaatgtccaagggccaacgacatctatctggcaagttgcaagttgcaacgacatcctgcaggctgcttcgctttacttcctcggcctccgcagctagcgcaacgcaaaggcagttccggcgggggcggactgggaacacatgggaatgagatgagatcattgctcggtcgtgctggcctgggccgtcggcgcgcgttgatcttgcatgtgttctcaggtcgcccccggagggccttccttgctgctgtgttccgctagacctggagtatctcgacgacggtggcaggcacacgcagtgacggcaccactacgtctgttccgccacgagagcctatgtaacgcactagcaagggtcgcgacgtcggcatcgatggctggccagggggactgatggtgggaggcgcaacaagctggtgggggagtctgacggaggccagcatgctggagggcaggtgtcacacccgggtttcggggccaaaacccgagcgcgaaataatcaccatggtgtgggacaaagtctcacacatatgataaacagtggtgtggtcgtcttctgccttccttttctgctatccgtgagacaatgaagcaagcagtgatgggctgctagagggtcagagaccgggatatcgagggcttgggcatcaacgtcgtggatcctatggggcaccgtcggccggcggtgactccgctgcttgataacatgagcggccccacatgggggttcagatgggccctggcacaccctaagctaggcccaccgaggactccacccggccatccggcgtcggcagttccaacttcccaacttctacgcagatctgatcgcttctggtggcaacaactcaacaatacagcttcctgttcttgcctctgcctggctgcctggcagctattcctggtgggcggcgagccggcgactggtcgttcctgcaggctgcagcctgcgccgctgttcctagcgcccggcgcgggcggctggctgcttcctgtttggctgcccatctccgaactccggtggccggctggcggtgtaccgtgtacgacaggtaatttgcaatccaattttttgtatag

SEQ ID NO: 179269 - DNA, 1898 bp, Zea mays
  Clone ID: MRT4577_95078C.1
cattgggtacctcgagccggccgggactgtgcgtttgcgtccgagcgccgccaaccagaacgacccgttccttcccctgattccctcccacctccagcctcgcgaatcgcgcgatccgagcaccggtcgtccggtcctcgaggcgtctcgcgccggggccctaaatctccggtgggtttggtatgcccggagaatccggcaccgcttcctgctaccagcgggggcggcgcctctgggtctggggtgcttgccctcccgtttctcccgtgcaaattgcgcttgtttaggtgggaattgggtgattcttggtgtgcgctactaggcaagacaacaaccacatcagcgcggaggagggggaagaggacgtatctcacgggagcgaggcccggagggagatgaaggatgtggccgtggctggagaggattgcgtccgcgtgctgggaccgggtccggaagtacgcgcttacgaggaagggtgaggacgacgccgacaccgacgccgacgtcgacgccgtcgcggacgagctgctgtggtcgcgggacctcacccgtcacgcggcgggcgacttctccttcgccgtcgtgcaggccaacgacgtgttggaggaccagagtcaggtggagacggccgccgctgccaccttcgtcggcgtctacgacggccacgggggcgccgaggcgtcccgcttcatctctaaccacctttctgcgcacatcgtccgtcttgcacaggaacatggaacaatgtctgaggatgttgttcgaaaggccttttctgctacagaggaaggcttcctgtcgcttgtgcgcaggacacatttgataaaacctgctatggctactattggatcttgctgtctggttggtatcatatggagagggacactctacctggccaatcttggtgattctcgggcggttgttggttgtttggatggatcaaacaggatttttgctgaacagttaacaagggaccacaatgctagcatggaagagattaggcaggagcttaggtctcttcatcctgatgattcacaaatcgttgttctgaagaatggtgtgtggcgcatcaaaggcatcatacaggtttcaaggtctataggtgatgcatacttgaagaagcgagaattcgctgttgatccatccacagctcgtttccacctctcggaacctctccgccggcctgttctgacgtcagaaccatctatatcttcaagaattcttggttcgcaagaccgttttttgatctttgcatcggatggactatgggagcacctctcaaaccagcaagctgttgaaattgtccacaatagtccacgagaaggtgttgcaaggagattggtacaaacagctctaaaagaagctgcgaggaagagggaaatgaggtatggcgatattaagaagctcgaaaaaggagtccggcgctacttccacgacgacataacagttgtcgtcgtcttcatagaccatgaactgcgggcggagcattcttcctcgacctctgttcctgaactctcggtccgtgggttcgttgatgcgggggcacgctccagcttttcagggatgaacgacattacttgatacagtaaccttgtgttgcctaaatttctgtcattttgatgtaacattagatcaaactggccttctgtagttttcttattctattggtgttactagcgcgtagtacggcatctttgcttctattaacatctggccacattggaatcacaattcgttctggcaatgtctggctactctatttctcgtttccccagctctcctgaagaataagtttcacatcggtaaatatctataggatattgctagctaatgttttttcattgctgatcttctaaagctgggactttacttgatgaatctatatgggaggtgaaact

SEQ ID NO: 179270 - DNA, 248 bp, Zea mays
  Clone ID: MRT4577_95079C.1
atacatcacctcacacacgttcacaacacagtccgccactaatttagtagcttgtgatttgtacaacgacgagatcactggtcgggtggcggacgacgacacatagggaagggtagtgtaggtgcatcatggtgggcgttccacctgctcgccggcgtgctgctggtcgtagcagccacggccggagagatggacagagtagtcgaacaggaccgcaaggaggaccagcggtggtgcaagcacgcgtg

SEQ ID NO: 179271 - DNA, 289 bp, Zea mays
  Clone ID: MRT4577_9507C.1
ggcggctgcctatccatgttccatgtctccacgccactgccagtgatgaccggtggtttcctgagctgcatcttgggcttggtgctgcccctggcctatggcttccagcctgacctggtgctggtggcgctggggcctggccatggcctgcagggcccccacgctgcactcctggctgcaatgcttcgggggctggcagggggccgagtcctggccctcctggaggagaactccacaccccagctagcagggatcctggcccgggtgctgaatggagaggcactcctag

SEQ ID NO: 179272 - DNA, 416 bp, Zea mays
  Clone ID: MRT4577_95080C.1
ggctcccctaaccctctcccctgcctcataccaaccacagatctgctgccgaaaccgtcattgcatctcgcaacgcacggatgtgagagctgctacacaccctgctgcctgctgccattcccatcaaagagggcccatatcaaaaccacccgctaagctcgtagtgcctccctccagagcaatatacataggcgcggacaacaccactatatgcatgaaaagcaatgctatctacgaccctatcactattaagagcgtgctaccagctcttgattcgagtgcaatgatgattcaagatatgtaaatacagatagaaaccatattaccccatctgtgtatggagatattaatggatatgggtatactccttactgcgcatactattcggacactgctccatatgcaaccgatgatga

SEQ ID NO: 179273 - DNA, 320 bp, Zea mays
  Clone ID: MRT4577_95081C.1
cgtataaccaggttaacagcatgcatctctattctctgctagtagcttcttctatttgtttttttccttgtgccaactagagacaacaaacggggtgaaaacgttaattgggctccgttccgttgcacacctggatctgttctgatgtgcagtgacagcatgcgtggcgagtggcaacacacgcgctacggcatacttctactccagtctccatgtccatctccctcgtctcgctctcgcgcacacactggctagctatagctacctctctatagtatccatgcagagcacgcacgcagcaccgctttcactttgtttgt

SEQ ID NO: 179274 - DNA, 802 bp, Zea mays
  Clone ID: MRT4577_95082C.1
tcaaacgtttatgataccatctgtgaaattttagctcaatacgttattgcatctgaccctaactttgttggtattgaaagttcttatctcactcaatatttaaaaaaaattaatgtttttaacattataaaaaattgtctaataagtaatcctaatcaagaaatagtttcgcttctgattgacttctcaaatgtcgataatacaaatctatatttaaaagcagaattacctctcacaatagtagaaaatatagtttcaagtgtaatacttgttcctagactgaaggaaatcgtccaaaataattgcgaatataatttcgttctaattagtcaatacaattgcctatctaattttcgtctttctttagagtctcatttttccttacccgatattagtcactcagaatttagcaagatttggcaagaaaagcaatctcaggaatttcctctctatggacagtttcttgatttaatcacttttcaattagcaaatcagatttcaatcaatgttcctagtgaaagcgagcgtacaaatatttgttatgaaggtgaacgaaaatttcatacttttataggtcaatataccatcccatccggtgaaacaaaatcctcttttcgaatagacaaacctcaagttattttaccgataaaaattaatggtaaactaataataaaaaatgaaatagaacaagtttatattattaataatcaattctttgaacaaactccttccctttctgttgaaattcacttttcgctaatgcttggcaaaccattactattggagatttttgaagtttata

SEQ ID NO: 179275 - DNA, 241 bp, Zea mays
  Clone ID: MRT4577_95083C.1
gatggcggcagcaccggacgggacgcggtttactcggagtcgaccccgatccagaggaggagatattcatgccgagtggtgtgccgtacctatctacaatttggacgacgtgccagcagtagctagcgatgctgatgtgcgtacatgaacaaggtcgaggagccagacacgatgtgcctatgcatggagctcagctcctagcttatgaactatggtcagatagagcatgcgcagaacgcct

SEQ ID NO: 179276 - DNA, 504 bp, Zea mays
  unsure (1)..(504): unsure at all n locations
  Clone ID: MRT4577_95084C.1
cccacgcgtccgggcagcgcaggaaatcaggctatgcaagcgcagagagcggtggggagagcagcgaccatggcctaggcgggtttgagatccgagggaacagatggattactagggagtgacagctaggagcaatctgtggagatactatgtaaatgtcacaggagttggcctgtggtgatgtgcgataaccgggccagtgggttctgagcgtaagacgaggtctctagcaatgatatgttgtagcgtgactaaatcgagatgagcaatcaggttgttgtctgttgattctttcggctgaccatttcggctgctgaggccttgatcctgtatttgagatgtcaggcctacttagagcaaatgctggaaggaagcaatgtgcctgttctgaggtccctccagcatcacttgtaatttgtaaagtactcaagtacagactagaactagtcatgcataccagaagaatagatagatgtttcagannananannnnnnnnnnnanaa

SEQ ID NO: 179277 - DNA, 179 bp, Zea mays
  Clone ID: MRT4577_95085C.1
gtagcatatggtgaaacgctatccatgtcattgcatgttatttaatctaagtaaccgttcagttacactaaccgatgttgaatgaggcatgcattcataccttgttgccggtcagtcttgattggcgtcgttctgctcctgaagctttcaattaactgccagctagttctagatcgcga

SEQ ID NO: 179278 - DNA, 1070 bp, Zea mays
  Clone ID: MRT4577_95086C.1
agaaacggtgaaaatgtgtagcactaattacacatggcaagcctttattatttgtttatagaagactatgatgacacagtttaaatgggtccatacttcgatccatccccacaattgcacttacaacaaagaagaaccccgagagcagcagatgacagagacagaaagactacacatatttacaatgggcaaaacaagccaagtacatattgcgtgtgtactttttttgtactccagatcacttatctacgttcaccaaaccgatgcggagacgaaacacctcgtggacagctccacggttaagaatggcaagaatctctgctccctcagccgtggtgagctcacctagcgagattttgcgggactcgtactcatcaggcaaccggaagccatagaaccacctaccaagcttgagcaagttcacacaaaccatcctttctgatacacggtgagcttggagtgctttactgacttcagctggcagcacatgcaaagatgcgatcgagtagtgcagtccaattaggtttattatcgcactatggttccttgaaaacaagaaaaactggacatcgagaaatcctatatcaagtatcatggccaaatcagcaatagctttcagatagtattcggattcaagtgacccattatttaagctgcctcccacaaattcaaccacattagatattgcagcagccattcttctgtgttggctgatgtagagagctttccagccctgcatacgggacgacgacgccgacgcctccgccacggcagctggccaccggcagcgaaagaggcgctcccagatgcagtcggcgtcgcaggctctgcgccaggtgcgcgagcagccgccgagcgcgcacacatcagcctcctggaggcgggaggcgacgtctagggcgatgtcctcggggaggtcagtccacctccccgccggtgagagctccatttcgcgcgattcccctttcgccgctgcgactgtacagtaccagactaccagagcatcttcaaggtgtgagaaatttcactattgtgtcgcggccggccggccggcctcgaggtacccaatg

SEQ ID NO: 179279 - DNA, 444 bp, Zea mays
  Clone ID: MRT4577_95087C.1
aatttcattctgccaatcattttttccttccacgattagctggtttcctgatgaatatttttccctccaccgattagctgtgtgaaatggaatgcctgtcgatgttggattggaatggaatggagaagttcctgctgtgaaattgaatgtcgatgctgaaacacctcattgccaaaaacaaaacaaagaaaataggatcaatagaataaaattgcataaaaagaaaatatgattggcagaatgaaattggatgtgatttattagaatgaagtactctaataaaactgaatattgaaggggatatgaaataccctaatataactcaatactgaagggaatatttgtttcagcttctaaagttttctaacggagttttcacccttttttgcaattttattctattgatcctattttctttgttttgtttttggcaatgaggtgttt

SEQ ID NO: 179280 - DNA, 203 bp, Zea mays
  Clone ID: MRT4577_95088C.1
ctaattcgattggatcgaattagacgcattctctcctcgtttattatttgcagggtaacagggtgttaaaaagaaggctagagtgatatatggacctgaagtaggatcttcgactgccgtgagctacagggcctgagtgtgacgatatgttccactggatggtgtcgattaacgattctatcagatagacatattgtggaagt

SEQ ID NO: 179281 - DNA, 551 bp, Zea mays
  Clone ID: MRT4577_95089C.1
acaagctttttttttttttttttttttttttttatttttttttttttttttttttttttttttttttttttttttttttttgggaggaaaaaagggttggtttttgcccaaaaaataaccccaagaatgggattccccaccccacccgacgaaaagaacaataaacccccatttaataaccccccctttttaaaaaaaagccctggttgggggctgggccaacaagccacccaaaacgaagaaaccaaaaaaaaatccacgggttgcaaaaacaaaaactggggggcgcccctttggtacccccccctcccccaacgcatggaccctgggcgggaaccccccaagggggaaatccaacacaccggggggcggtactaagggaacccaacccgggaccaaacctgggggaaacaagggcaaaagcggttcccgggggaaaatggtaacccgtcaaaaatccaaaaaaaaaaacaacccgaaacaaaaaagggaaaacccggggggcccaaagggggggccaacccacaataattgggggggccccaccggcc

SEQ ID NO: 179282 - DNA, 265 bp, Zea mays
  Clone ID: MRT4577_9508C.1
ggggggggtttattagagaataagggggggttgaaccaaaacaaaatcaaccccaacagccatgaccgccaaaaacggccaccaaaacaagcgggcacgccctaccccaaaattaacaccaattaaccccaaattcccattaaaggcatcagccaccctcggcctcccctttccaacccaaaacgggccaaaaccgggaaggaacagaaaggaaaaaaaaaggaagaagacgggcccagcgctcccccccctggggagacaagcg

SEQ ID NO: 179283 - DNA, 126 bp, Zea mays
  Clone ID: MRT4577_95090C.1
cggatccgtggcggcgtgatctcgctgggcgtgtccatgaaccgcgtcgacttctcgcccggcggcaccaatccgccccacgtccatccgcgcgctattgatgtcgggctcgtcatccgcggcgag

SEQ ID NO: 179284 - DNA, 143 bp, Zea mays
  Clone ID: MRT4577_95091C.1
tctcggacacctgggtgaggccggcctctagggcgtgctttaaatggctttcggcgaggaagcgaagggatatagaatcaatcggccgggcggactacgtattctagtaaacacgctcgcggacagctcgccagggagggagc

SEQ ID NO: 179285 - DNA, 127 bp, Zea mays
  Clone ID: MRT4577_95092C.1
ttgtaaaaaacttgagacacttccgattgtaggggagatggcttgctgatatcattatggctccataacagggaaatgactcctctgatcttctgcgaggggacttgctgaacattgcaggggttga

SEQ ID NO: 179286 - DNA, 933 bp, Zea mays
  Clone ID: MRT4577_95093C.1
tcagcggcgggccccctcgcatatattcccccgccccgcagcgcctggccacccctctctctctctcaccgcaagaccggaaggagcggagccgccgagccgggaagagccaccaccccatcttcctcgcctccgcttccgaagggtcagagatggcggaccgtgctaaccacccgtctgtcatgcagaagtttggtggacagttccaccttgcctccagcttctctgagggtgttcgtgctcgcaacatctgcccttctgtgccatcctatgagaggcgcttcaccacaagcagctacatgactcagaaccttggcatcagtgtcccaatgatgtcatcttctccattgtttgccaatgcaccccctgagaagaaaggtgtcaagaactttgcgattgacttcctcatgggaggagtgtcagctgcagtttccaagactgctgcagctcctattgagcgtgttaagctgcttatccagaaccaggatgagatgatcaaggctggcaggctctctgagccatacaagggtattggtgactgctttgggcgcaccatcaaggatgaaggctttggctcattgtggagaggaaacactgctaacgtcatccgttacttcccaactcaggctttgaactttgcattcaaggattacttcaagaggatgttcaacttcaagaaggacaaggatggttactggaagtggttcggtggcaaccttgcttctggtggtgctgctggtgcttcctcgctcttcttcgtgtactcccttgactatgctaggacaaggctggccaatgacgcaaaggcatccaaagggtggaggtgacaggcaattcaatggcctggttgatgtctaccgcaagactctcagtcagatggtattgctgggctttaccgtggattcacatctcttgtgttgaatcattgtctac

SEQ ID NO: 179287 - DNA, 139 bp, Zea mays
  Clone ID: MRT4577_95094C.1
cccacgcgtccgattctactgtccgagcttcaactctcaacatcaatcaacacaagaacgtaatcgtgacagcgaggcgcaggtgacatacatactccgcgagcgccggaatcctgatggactgctagaccagcgttcc

SEQ ID NO: 179288 - DNA, 672 bp, Zea mays
  Clone ID: MRT4577_95095C.1
acgccgtcgctgccgagttcccatcttccccctcagtacgagttcccatcttccacgccgccgagtactctttggaaatggaggcgccagcaggtggactcggcagcaggtggcctccacgctgccgagttcccatcttccctcacgcggatggaggcgcctccagcaggcaccaatgcagttgaagctccttctgaagtgtagagattaaatagagtttggaatggtcttttagacgtcattagacacatgcaagtctcagctgatgagttgaggaggttgaccagacgcaatcatgtacctgagtatgtagagtacctgcacaaaaatagcctagttaatgccatgagtgttgtcactgaaattgcacaaggtctagaccatgtgagcacagatctggaggaagttcttattggtccgtaacctcttcttgaagattatgaagcccttggtttgtacaatgatcgtcgtctaccgcatatgaacgagcgtatatgagatatttgtttgcgagagagtctgtaccactaatgcatgtatcttatgaattgtactgcctttctgtcaagtctgtatcttatgaagccttagttagttgccattttgttcctgctacttgtatgaattgagttatgaaaatgaagagttgtgttatgagttgttttttgtgac

SEQ ID NO: 179289 - DNA, 328 bp, Zea mays
  Clone ID: MRT4577_95096C.1
ttgggtggccatggtgttttgcttgcttttctcaatcccggttgcgaggaaggttcacatcttggagcctctcgcccttacacttggagttcacaaagaagcacagaccaagggagggattagccacccactcatgacacgaaatcactattatcaccacgcacacaagttgcaacgagagctcacaacacaactcaatgagtccaccactcaactagggctctgattgctatcgcaaagaatcaaaggcgctaaattgatgtcttaccgcttaagagtgtttaggggatgcttgagatacttctccatgcgcctaggggtccctttt

SEQ ID NO: 179290 - DNA, 313 bp, Zea mays
  Clone ID: MRT4577_95097C.1
atggcttgttctacgctcctgcttggttcggttgcctgaggcacagagggatccagcgccatgggtggacaggatcgagatcgcgccgtccagtgctaacgtcccacatgattggccagaagactggcctgtgccacggacaaccacttaatgcagaacaacttcagcacctacagcaacgtcgtcaacatcaacagcatgctccatcgctagacgcagaggctaccaggcttcagctaagctaccttgtctacggaagacgtgatgaatgacaccatcgaagccatgaactgcacgctggtacactgtcaga

SEQ ID NO: 179291 - DNA, 988 bp, Zea mays
  Clone ID: MRT4577_95098C.1
gtcgttgctttaaacccttctagagctcagtccatcctgctgttacgagccggccccctcatcccgttcctggaaacggatctcaggccgccgtcgctgccgacgtttcttccaggccgtcgctgccgagttcccatcttccctctcaggtacgagttcccatcttccacgccgccgagtactctttggaaatggaggcgccagcaggtggactctagcagacggcagcaggtggcctccacgctgccgagttcccatcttccctcacgcggatggaggcgcctccagcaggcaccaatgcagttgaagctccttctgaagtgagtcaaaagtgttccttcctccttccgaagtttagagatcacacaagcgagaatctatgacaaaacgcaagcagaagacattgttgggagtatcgacatgagcaacattgtttatggcactagcagaatacgaccgcgtcatcgattatccagcttacatgatccgatatgttttagcgtcaggagcattatagatttggattggcaatactgatgtgtgatagaatctcattcttctatttgtattgtaggtgtagagattaaatagagtttggaatggtcttttagacgtcattagacacatgcaagtctcagctgatgagttgaggaggttgaccagacgcaaccatgtacctgagtatgtagagtacctgcacaaaaatagcctagttaatgccatgagtgttgtcactgaaattgcacaaggtctagaccatgtgagcacagatctggaggaagttcttattggtccgcaacctcttcttgaagattatgaagcccttggtttgtacaatgatcgtcgtctaccgcatatgaacgagcgtatatgagatatttgtttgtgagagagtctgtaccactaatgcatgtatcttatgaattgtactgcctttctgtcaagtctgtatcttatgaagccgaaaaaaaaaaaaaaaaaagcggcc

SEQ ID NO: 179292 - DNA, 1157 bp, Zea mays
  Clone ID: MRT4577_95099C.1
agcagtggtaacaacgcagagtacgcggggatcttccacgccgccgagtactctttggaaatggaggcgccagcaggcggactctagcagacggcagcaggtggcctccacgctgccgagttcccatcttccctcacgcggatggaggcgcctccagcaggcaccaatgcagttgaagctccttctgaagtgagtcaaaagtgttccttcctccttccgaagtttagagatcacacaagcgaggtataatcgtagatttcttgcattaatactctgagatagtatgcaaggtggaattggtgttggttgatgatctagtatgcaagaaaaccctaaaccctaaatgagtttaggtggaattggtgatggttgataaactgtgagataggatattttcggtggaattggtgatggacttcttgccttcaggagtattaaattagtttaatgtgtggtaattcagcacctgttatgtgatacatgtagaactcaaataaaagttgggagtaggggttcacttattgcatttttctgtcactatttcggtgactatttgagtttatagaactatactatttgagtttacattaatatactttatagaatctatgacaaaacgcaagcagaagacattgttgggagtatcgacatgagcaacattgtttatggcactagcagaatacgaccgcgtcattgattatccagcttacatgatccgatatgttttagcgtcaggagcattatagatttggattggcaatactgatgtgtgatagaatctcattcttctatttgtattgtaggtgtagagattaaatagagtttggaatggtcttttagacgtcattagacacatgcaagtctcagctgatgagttgaggaggttgaccagacgcaatcatgtacctgagtatgtagagtacctgcacaaaaatagcctagttaatgccatgagtgttgtcactgaaattgcacaaggtctagaccatgtgagcacagatctggaggaagttcttattggtccgcaccctcttcttgaagattatgaagcccttggtttgtacaatgatcgtcgtctaccgcatatgaacgagcgtatatgagatatttgtttgtgagagagtctgtaccactaccgcatgtatcttatgaattgt

SEQ ID NO: 179293 - DNA, 217 bp, Zea mays
  Clone ID: MRT4577_9509C.1
ccacgcgtccggcatttccttctgaggccgccgcctacacacccaaggttgcgttcgaggccactccaatctccgttgaggccgcggctgatgaacaggtcagctgagaaggtggtggtggaggagccggctgcggcggccgacgttgagcatccaaaggctaatgaggcggtcgctccagaggtggtcgttgccgagcccgatcaccaggaggagg

SEQ ID NO: 179294 - DNA, 337 bp, Zea mays
  Clone ID: MRT4577_950C.1
aactccggcgagcacacgacccgcacgggccggaagagcgctgcatgctctccatgaagggcatcgccgccgcgatggagaatacctggctaagaaggttatctacaatcagctgcagagcgtaacgcaataatcagctttcggatggcggcagactgccagcaccgcatggaaatgccggactgggaacgtctgctatctctatgcatatggaactgcctggagctcgatattgactcttgttgacaagcgcactcgcgcacatcttgccttatcatgcataccgtaataataaagatcgcactatctggatggtgcgtgtgcagacataacgaag

SEQ ID NO: 179295 - DNA, 891 bp, Zea mays
  Clone ID: MRT4577_95100C.1
atttgtctacactatcaatgtagttgctgaatctgtattaacatgcctcactggcaggtacatgcaattctgaaggacctcgtccgcaaggctatcaatgaaacacatgagctgaagcagtttcccacccttcgtgtggaagtaggcaatgcagcttttgagtcattggatagaatgagggatgaaagcaagaaaaatacattaaagctagttgacatggaatgcagctacttgacagtagatttcttcaggaagcttccccaggatgttgagaggggtggaaatccaagccactctatttttgatagatataatgactcttatcttagacgaattggacaaactgttctgtcatatgttaatatggtgtgttcgaccttgaggaactccatcccaaaatctattgtttattgccaagtgcgagaggccaagcgctcgctgctcgatcacttcttcactgaactgggagcaagagagatgaagcacctttccaagcttctcgacgaagatccagcagtcatggaacgcagaactaaccttgcaaagaggctggagctgtaccggagtgcccaatcggaaatcgatgcagtcgcatggtccaaatagccctgatggataagatatctgttcttacatgttctttatccctcgtctggcgattgtctcccctattctggggcatatatagctgatttttgtctcccgtaggtcaggtcattctatagattaccgcagctgtacggtgtcgtttagttgtgcttttgttccttgtacttgagggtctaggggacaccaggctgctgtacgcttgcatcacggacacagttcataaattgtgtttttgttaagaaaaaaaaaaaaaaaaaacccacgcgtccgcccacgcgtccg

SEQ ID NO: 179296 - DNA, 283 bp, Zea mays
  Clone ID: MRT4577_95101C.1
ccttgcctgatatttttggcaaaaggaacttataggaggaaagaagaaaaaaagacaaagatggaattaaagcaaaacaattatatcaatgatgacatcagaaaaaaggcaagaaaacccttcaggccggaaaaaataaaaattagtgcacggccaaaccaaatggaatcaacttctggatcctcacttgcacggcgttgaggtaaaataaggaaaaacgggcggggcggccaaggaacaaggccacgccgcctttttgggtttcccagccccaaatggtggg

SEQ ID NO: 179297 - DNA, 140 bp, Zea mays
  unsure (1)..(140): unsure at all n locations
  Clone ID: MRT4577_95102C.1
aagcagactcagatagaacccacactantaatatctcctaccgacaagaccaacatcaaagccacatgaagtaatatcagcgcgcacactagcgagtataatacggaaaccctgaagaggatattcctatccttccccac

SEQ ID NO: 179298 - DNA, 2619 bp, Zea mays
  unsure (1)..(2619): unsure at all n locations
  Clone ID: MRT4577_95103C.1
aattacaaaccaactccacgcgcaccagaccgctcccatccgcagctggagcccgaccgacgcggctcagctcagcagtcggcgtcgtctcgtctcccccgctcccccctccaccgcctcgatcccgcccgcggccgcgcgatcggatccggccagatcccgcgccggcggccatggagaacctgatctcgctcgtcaacaagctgcagcgcgcctgcacggcgctcggcgaccacggcgaggagagcgccctccccaccctctgggactcgctgccgtccatcgccgtcgtcggcggccagagttcgggcaaatcttcagtgctggagagcgttgttggaaaggatttcctacccaggggttcaggcattgtcacccgtcgcccgctggttctgcaactccataggattgatggagacagagagtatgcagagttcatgcatgtccccaggaagagattaaaaatgctttctttgacagctaagcaccgattttgccgccttgaggaaggagatagctgatgaaactgacagagaaacaggccgttcaaagcaaatatcacctgtccctatccatttaagcatattttctccatatgttgtgaatcttactcttattgatcttcctgggcttactaaagtagccgttgagggccaaccggagaatattgttcaggacattgaaaacatggttcgctcatatattgaaaagccaaattgtataattctggctgtttccccagccaatcaggaccttgctacttctgatgcaatcaagatatcacgggaagttgatcccaaaggtgaaaggacctttggtgttctcacaaaaattgatctgatggacaagggtaccgatgctgttgatatactggaaggaagatcttaccgtctccaaacaccatgggttggtgttgttaatcgatcccaacaagatatcaacaagaatgtggacatgattgctgctaggcgtagagagcgagagtattttgcatctacaccagaatataagcacatggcttctaggatgggatctgaatatttaggaaagatgctttcaaagcatttggaacaagtgatcaaatcaaggattccggggatccaatctcttataacaaagacaattgcagagctggaaactgaacttaatcggcttggaaaacccattgctaatgatgctggggggaagctgtacacgatcatggaaatttgtcgtatgtttgatggtatttacaaagagcatctggatggagtgcgccctggcggagagaaagtttaccacgtcttcgacaatcaatttcctgtagctattaaacgattgcagtttgataaacaactctctatggaaaatgtgaggaagcttataacagaagctgatggataccagcctcacttgatagctccagaacaaggatatagacgccttatagaatcttgtcttattagtatcagaggtcctgccgaggcagctgttgatgcggtccatgcaattctgaaggacctcgtccgcaaggctatcaatgaaacacatgagctgaagcagtttcccacccttcgtgtggaagtaggcaatgcagcttttgagtcattggatagaatgagggatgaaagcaagaaaaatacattaaagctagttgacatggaatgcagctacttgacagtagatttcttcaggaagcttccccaggatgttgagaggggtggaaatccaagccactctatttttgatagatataatgactcttatcttagacgaattggacaaactgttctgtcatatgttaatatggtgtgttcgaccttgaggaactccatcccaaaatctattgtttattgccaagtgcgagaggccaagcgctcgctgctcgatcacttcttcactgaactgggagcaagagagatgaagcaactttccaagcttctcgacgaagatccagcagtcatggaacgcagaactaaccttgcaaagaggctggagctgtaccggagtgcccaatcggaaatcgatgcagtcgcatggtccaaatagccctgatggctaagatatctgttcttacatgttctttatccctcgtctggcgattgtctcccctattctggggcatatatagctgatttttgtctgttgtaggtcaggtcattctatagattaccgcagctgtacggtgtcgtttagttgtgcttttgttccttgtacttgagggtctaggggacaccaggctgctgtacgcttgcatcacggacaagttcataaattgtgtttttgttaccatgcattcttttattccatctaaaagcagctatatgaagcatgttcttcggcacccacgcggagtgcccaatcggaaatcgatgcagtcgcatggtccaaatagccctgatggctaagatatctgttcttacatgttctttatccctcgtctggcgattgtctcccctattctggggcatatatagctgatttttgtctgttgtaggtcaggccattctatagattaccgcagctgtccggtgccgttaagttggcttttgtcccttgccctgggggtctaaggaaccccattcttctgtacccttcctccccgnccaatttcataaattgtgtttttgtccccccccc

SEQ ID NO: 179299 - DNA, 300 bp, Zea mays
  Clone ID: MRT4577_95104C.1
atgcgttattacacacacacacgtgtgaaggctcagcattaactctacctatatctatataatccgaagaggaggttccctgcggcctcctatgcacacatcaacttgtccgcatggcaacggtggctcacgctcggatccctagctcgccccacgtggcgcacaagatcccgcccggcgacgggccttagtctagagctaggcactctcagctggtggagaaggacctggacacgtccatccgtccactgtggaaagggatcagcgggagcatcaggtcggacagacctctcaaggaca

SEQ ID NO: 179300 - DNA, 473 bp, Zea mays
  Clone ID: MRT4577_95105C.1
ccgggacgttccacgcgcacggccgcacgctaggaatctgttgaggctgagtcagtgtctggttttggagttgtggaggccaatggaacggtaaggaacagaggcgacactaaaagctaagcgtggtttatgtaacatgctcaataactagtgataactttgaagtgcctgtgcaatccagcccgtaacaaacgacacacatgcatttgagatgaatgattaattcccgtacaaacaccctatacgatccgaaagaaaatgaagttgcataacataacctgtgagcttaattgccggggaccaagttggtgtgagtatgcccatgccatgttgttgactgggtcaaccaagtggtcagctaggttctacaacgggcccttgccggtgaccatggtctggaccaagaaactctaacattggaaaacatggcgaggcggccgttcttgagctcatttaacttgagctcggagccc

SEQ ID NO: 179301 - DNA, 337 bp, Zea mays
  Clone ID: MRT4577_95106C.1
acgcgaccgcggacgcgtgggcggacgcgtgggctgtggcctcccggccaccaccaccacagcgtcgccgccgccgcttcctcggcgtgctcgtctcctcccaccatatgcgccaccaccagcaccacctccatggccgcctccgccgcttcttcttacccttgttgcctcacccaccaaagccattacaatggcggcggatctgcagggagcagcagccacagtagctgcttcctgttccaccacgagcaccagcagcaggaggagcccgccgatgtgagcatatcgctgtccatagccccgccgcgcagcaacaacgacgcggcttcctgtggtg

SEQ ID NO: 179302 - DNA, 1537 bp, Zea mays
  Clone ID: MRT4577_95107C.1
aagaagtcaggcgcacgaagcaaaaagcgacaagagctgggaggcgatgaccatctccacttcctcgacctcgagtccttgacccgtgtataaaagccggagccggccggcgtcccccctacccacccggagccccgcctccgcctcccgctcctccactccacccccacccatggccaacctcccagacgccgacgccgcggggttcaagctcttcggcaaggtcatccagccccccgacgcgcagcgcgccgcgggcgatggcgatggcgctggcgcccctccgccgtcgccgccggtccttcctcctcctcctcctcctcccccgcccccgccgcagcctctgcccctgcagcaggcggccggggccgggggcaccggcggcgagccgctgccgtgcccgcggtgcggcagccgggagactagggatgaaaacggtcggaaacggtatttattcggtaatcagttttttagtcgtttgcgaataaatagaatatataatatacaatacaaatttgtattcttgtttttaacatccagcttgttaagattcataaaaggtaaacctcaaattcattctatattttctcaaataatagatataaacttcggtatggattcggaaacaaattcggtaaatttttcaactttttgtgttgtagggagcaaataatacataaaacaatttatgtaatattttattcatatttttactaatgtgcttgataacataagaaaagatcaacatcaaattttatacatatctattttaaaatattaaatttgttctaacagtttggattaccactttcatccctacgggagaccaagttctgctacttcaacaactacaacgtgcggcagccgcgccacctctgccgcgcctgccgccgctactggacggccggcggcgcgctccgccgcgtggcctccgcgtccccgggccgccgcaggccgcgcccgaacgcccgatcggccgccgccgccgcggcgccgtccgcctccgcagccgccagggaggtgggcggggagcgttgactcgtcggcggtcgtaggggcggcgggtggccaggtgtgctccgcacgcttcgcttcgcttcgcacggggccgggggcttccttcccgcgtgacgccgtgacgtgatgccgcgcgcccgggccccaagcctcagtgacgggccggccggttcgcggtggggaccccgcgcctcgtcgcccttttcacacctactggtcctctccttttggtttgttagattctgttttctatataccattttaggattcttttggtggccaaaaaagatgctgccggcctgctgcgcttgcgagcgagagttcagttcggtaggccagtcaaaaagtggtagtcgtactagagcagtagtagtagactggtagtgctgctgctgaatgctgatgcaaaattcggcagcggtgaattggtgcctggggtcggtcaggtcaggtggcagatttcagccatggtttgttggaaaggaaggaaatcaatcatcctcttggttcacgtgatctc

SEQ ID NO: 179303 - DNA, 361 bp, Zea mays
  Clone ID: MRT4577_95108C.1
atatctgtatcatacgtatcatttttcggggtacatatatctttgcgctacatgcgcttacaataactggtaagggcatacagatacagtgacgtttatttaagctagatcggctactaagtccgaaattacacgtcaccggccggctgtctctcaactctcgtacttgctgctcgtgtcctcacctcctagagccacagaaggtaattggccggcatgaagtgacatatcggctcgccacgggatccgttgagcatcatgaagtatgcctcatcccagtagctggtatccttgtggcatactgcgatggccgtggcgccgacggaagggtcctcctgtccaacaagttggacacggagcg

SEQ ID NO: 179304 - DNA, 584 bp, Zea mays
  unsure (1)..(584): unsure at all n locations
  Clone ID: MRT4577_95109C.1
gcgttcgcccagcgtccgcggncgcgtggggaaaaaaaaaaaaaaaaaaaaaaaaaaaaaaaaaaaaaaaaaaaaaaaaaaaaaaaaaaaaaaaaaaaaaaaaaaaaaaaaaaaaaaaaaaaaaaaaaaaaaaaaaaaaaaaaaaaaaaaaaaaaaaaaaaaaaaaaaagggggggcccctttttaaaagattcaagggtttggttcccgcttctttggcaaatttttatttttttttttggggcccctaaaattaaatttattgggcggggttttaaaaaggtggggttgggaaaaaccttgggtttcccaattttattggttttgaaaaaattccctttttcccaagttgggttattagaaaaggggcccgaacctttgccttttccaaaaatttggccaccttaattgggaatgggaaccccccttttagggggtttttaacgggggggggtggggggtttcccccaagggtaacctttaattttgcaagggctttaggcccggtttttttggtttttttccttttttttttggcaattttgcgggtttttcccgtaaaatttttaaatggggggttcctt

SEQ ID NO: 179305 - DNA, 261 bp, Zea mays
  Clone ID: MRT4577_9510C.1
tccccaacgcgctttgggagctggtcgagccgttttcgagaatcgacagcgccagaggcacggggctcctcgcgcttgtcattctcgtcctttcgaacgtggcctccaatgtccccactgtcctcctgctgggctccagagtggcagcgtcagcggctgccatctccccggagtcgcagaagaaagcctggctcatactagcgtgggtcagcacggtgtccggcaatctcaccctcctgggctccgccgccaacctgatcg

SEQ ID NO: 179306 - DNA, 641 bp, Zea mays
  Clone ID: MRT4577_95110C.1
gcttccgcttccgctccgtcgctcgcctcacgcctccggcgccacctccaccatggccccgaagaaggagaaggccccgccgccatcgtccaagccggccaagtccggaggcgggaagcagaagaagaagacacgcggcaagccacgcgtgaagccacgcgtcaacaacgctgtgctcttcgaccaggccacctacgataagctgctctccgaggtgcccaagtacaagcagatcaccccatccatcctatctgagcgcctcagggttaatggatccttggcacggagggccatcaaggatctgatggcaaaggggctcataaggatggtctttgttcattctagccagcagatatacaccagggcaaccaacacatgaggggtgttttgcgtcttgtggacgttatctagtctagacgacttgatgttgctattatatcaagtttaatttaatcgtggctcgatcaatcttactgttgtgttgaatgttgaatatttttgagattattgtactattttaagatcatgtttttataacatttaagaccatgttgccatccaaattttaatcttggtgaggaatatcaaccaatctctgctctgcaattacaattgctgaagttgttgcgtgtgttatagtg

SEQ ID NO: 179307 - DNA, 216 bp, Zea mays
  Clone ID: MRT4577_95111C.1
aaacataacaagaaaacacatacttacaaaaagcaatcaacaatacatcacaagggaatatacatttgcttgggcggggttacacgaacaacatttatcattacacacgcaaactgtatacaacaatttcataacactcttcaagcgccaccaatttacaccacattaacctcaaccatcctaacaaatacacctccaaaaaaaaactggatccat

SEQ ID NO: 179308 - DNA, 687 bp, Zea mays
  Clone ID: MRT4577_95112C.1
gccggcagctgctggccccgacacgcatcgactcccgccgccgccgcttccgctccgtcgctcgcctcacgcctccggcgccacctccaccatggccccgaagaaggagaaggccccgccgccatcgtccaagccggccaagtccggaggcgggaagcagaagaagaagaagtggagcaagggtaagcagaaggagaaggtcaacaacgctgtgctcttcgatcaggccacctacgataagctgctctccgaggtgcccaagtacaagcagatcaccccatccatcctatctgagcgcctcagggttaatggatccttggcacggagggccatcaaggatctgatggcaaaggggctcataaggatggtctctgttcattctagccagcagatatacaccagggcaaccaacacatgaggggtgttttgcgtcttgcggacgttatctagtctagacgacttgatgttgctattatatcaagtttattttaatcgtggctcgatcaatcttactgtcgtgttgaatgtcgaatatttttgagattattgtactattttaatatcatgttttttttataacatttaagaccatgttgccatccaaattttaatcttggtgaggaatatcaaccaatctctgctctgcaattacaattgctgaaaaaaaaaaaaaaaaaagcggccccc

SEQ ID NO: 179309 - DNA, 915 bp, Zea mays
  Clone ID: MRT4577_95113C.1
cgaggccggccgggccggtcgtggccccgacgcgcatcgactcccgccgccgccgcttccgcttccgctccgtcgctcgcctcacgcctccggcgccacctccaccatggccccgaagaaggagaaggccccgccgccatcgtccaagccggccaagtccggaggcgggaagcagaagaagaagaagtggagcaagggtaagcagaaggagaaggtcaacaacgctgtgctcttcgaccaggccacctacgataagctgctctccgaggtgcccaagtacaagcagatcaccccatccatcctatctgagcgcctcagggttaatggatccttggcacggagggccatcaaggatctgatggcaaaggggctcataaggatggtctctgttcattctagccagcagatatacaccagggcaaccaacacatgaggggtgttttgcgtcttgcggacgttatctagtctagacgacttgatgttgctattatatcaagtttattttaatcgtggctcgatcaatcttactgtcgtgttgaatgtcgaatatttttgagattattagttcaatatatctcattaagcagcatgtgaataaaaccaaagttttgttttttttgactcatagattaatggatcattggcccggagggcaatcaaggttttgatggcaaggggattcataaggatgatctctgttcattccagccagcaaatataccccagggcacccaacccatgagggctgttttgcatcttgtcggggggtctttagacggcttaatgttgctattaaatcatgtttatttcaatcatggccccgccccccttattgttgtgtcggatgttggaatatttttagattactgcactgtttaagcccatgttgctatccaaaaacccatcttgaggaat

SEQ ID NO: 179310 - DNA, 479 bp, Zea mays
  Clone ID: MRT4577_95114C.1
gggtggtttttttttttttttttttttttttttttttttttttttttttttttttttttttggcccccctcccgcctcgttcgcgggaaaaattcctggggttcccttggttggacctccccgggtgtttttttttttggccctctctttggggggggcggggtccctttgggccccttcccccgttcctttgcccctcgggggccccttgtttttgccgtccaaatgggccgaacgcctctgccttagccttggttgccccttttggcctccttggtgttgtggcgcttgcgtgatccccgctaacctggcgtttgtttttgcctcccgcccctcccgcctcttccttccctccggcgcgcccttggggccttccggcctgccgttttggccttgtgctttggccccctcggccccttctgcgcccctggttctttcccatctcctcctcccgtttcggccccgagcccccctttctt

SEQ ID NO: 179311 - DNA, 947 bp, Zea mays
  Clone ID: MRT4577_95115C.1
acacctgtcatggaccggttggggaccttcgcggccggccgggagctgctggccccgacacgcatcgactcccgccgccgccgcttccgctccgtcgctcgcctcacgcctccggcgccacctccaccatggccccgaagaaggagaaggccccgccgccatcgtccaagccggccaagtccggaggcgggaagcagaagaagaagaagtggagcaagggtaagcagaaggagaaggtcaacaacgctgtgctcttcgaccaggccacctacgataagctgctctccgaggtgcccaagtacaagcagatcaccccatccatcctatctgagcgcctcagggttaatggatccttggcacggagggccatcaaggatctgatggcaaaggggctcataaggatggtctctgttcattctagccagcagatatacaccagggcaaccaacacatgatgggtgttttgcgtcttgtggacgttatctagtctagacgacttgatgttgctattatatcaagtttaatttaatcgtggctcgatcaatcttactgtcgtgttgaatgtcgaatatttttgagattattgtactattttaatatcatgttttttataacatttaagaccatgttgccatccaaattttaatcttggtgaggaatatcaaccaaaaaaaaaaaaaaaaaaaaaaaaaaaaaaaaaaaggccaacctcggagctgaaaaaaaaaaaaaaaaaaaaaaaaaaaaaaaaaaaaaaaaaaaaaaaaaaaaaaaaaagaaaaaataaaaaaaataaaaatgaccaaaaataaaacaaactaagagactgaaaaaaaccatgaaaaaaacgggaacttcaattcgcgtagaaaaaaaattccctttttcgccagctgaccgtaatatccataaatgcctggaccgataaaatttcccaacatttgcgc

SEQ ID NO: 179312 - DNA, 321 bp, Zea mays
  Clone ID: MRT4577_95116C.1
ggcaaacagaaaaaaattcacataaaggaagttaccagatggaaccaggtagaacatacaaaacccaggggccactgatccacgggaaagatccgggaaaatgaaagaatgaaagggaaatatagcgaggataagcaaaacaagaacaggcaaaaaaaagcaaagaaaaaaaaaacccaaggactatgaggaggttgcccaaactggccgacggatcggattgaaatgaatgatgcccagggtgaagagggaagggaaaacaaaaaggggcaaaaaatggaggaagaagaacggggcgggaggaacgccgtggcatggggg

SEQ ID NO: 179313 - DNA, 175 bp, Zea mays
  Clone ID: MRT4577_95117C.1
cagtcaaggttggtggacctctcaatcatgttgtcaccttcaaaaccagagattggaacgaagtagatcttatcagggttgtatccacccttcttcaggtaggatgagactccctttacactctgctcataatccgacctcggaatcgctggggtgggagctgtacctgcccggt

SEQ ID NO: 179314 - DNA, 215 bp, Zea mays
  Clone ID: MRT4577_95118C.1
tccacgcgtccgtccacgcgttcggactaaaaggagggagacatcaagcccaagtttggagggcccaaaggaggccttgggacctaattttgatggggtttgaaattcctgcccctggttaattttagggcccttaataatttctaatggattattaggaccttgggtaaccttgacggtttcctgtttcttaattggttttacacttgtttgac

SEQ ID NO: 179315 - DNA, 344 bp, Zea mays
  Clone ID: MRT4577_95119C.1
ccttggaggggtcccatttttccttaaagggagtccttttaaaatttggaaaaaaaatggaaataggtgttttttggggaaaatttttatccgctaaaaattccaaaaaaaatacaagccggaagtttaaagttaaaaccctggggggcctaaaaagggagctaactaaaattaattggtttgccctaactgccccttttcaaaggggaaaacctttttggccacttgttttaataaattggcaaacccgcggggaaaggcggtttgttttttggcacccagggtgtttttttttttcacaagaaaaacgggaaaaagttttttgcctttaaccgcttggcctt

SEQ ID NO: 179316 - DNA, 1132 bp, Zea mays
  Clone ID: MRT4577_9511C.1
gccggccggctggaaccgggccgccatccgcctgacgaagcacgacgccaatggcctcccccaacgccgacccggctcagcaccacgcctcgacgccgccgctcctcctcgccgtacgccacctgccgttccccggcgtccaccggacgcgcgcgctccccggccccgacgtcctgacccctctcgcccgccgcctcgaggagctcgcgtccgcggcgacctcccacccgctcctgaagccgctcttcgccgcccactcacacctctcttccttctcccagggcaggaggcggctggtggcggcgcggcgtgcgacggtgctgtccggggggcactgcttcgcggcggtgctagggaactcggtggccgggttggtggtgtccaacggcatcaacaacttcctcaacctctacaacacggtgctcgtcgtcaggctcgtgctcacgtggttccccaacacgccgcccgccatcgtcgcgcctctcagcacgatatgtgacccgtacctgaacatcttccggggcatcatcccgccgctcgggggaacgctggacctgtcgccgatcctcgctttcctcgtcctcaacgccttcaccagcacggccgccgcgcttcccgcggagctgccaagctgctcggcaacggcgcagcatcaccagaggactgctgtctcaccctgctcggcgccgcatgaggcgacgctcagccagaggaaatggatgcggagaatgcggtcacagaagccacagggagacgatggtgatcactaggactcgtgagcccgtggatgtgttcctcaaatcgtcagggccttgttgttaccaggctggggaccatgcttcgcatcagacgctcgaggtttgcacggccctgtgttggacatgcatgctctagctttttggttatgggacgcaaactttggcattgccgcaagcaaaattccctttggtcaaaacgttgcttcaaatgttttttttttttggcggtgtaatgcgttggggttgttgcggaactttcttcctttgagggttgtgctttatgcaaagtatgtagaggaccctgcttgcctattactatcccgcaccatgatgcctgttctcagctccaaaaaaaaaaaaaaaaaaggccccta

SEQ ID NO: 179317 - DNA, 385 bp, Zea mays
  Clone ID: MRT4577_95120C.1
accataacaccatgcattactccttttggaacttatttttgagtacaatatttttggtagacgagacaaagcaaccgatctaaaaagaattgttatttatataacgtcaacatgggagaaaagaaaaagggataaaagagtttttttcctagtttcgacaacaccatttatacaggaggaaggatccaatcctcaacttttgaacaagacgatccaaatctacccttcagaaattttcatacttgatggatttttaggggggatgtttctgaactcgaatggtttaaaggactggatgtcataatgaattcacgcttgggggaacacagtaaaggagatacaaaaatctaagactacacagattgttcaacatcaaagcaggggt

SEQ ID NO: 179318 - DNA, 231 bp, Zea mays
  Clone ID: MRT4577_95121C.1
gcgctgttcttgtcagtgtccctctggatgcgcaccaccggcgtcggcgccggcgttgacctcagtgtctcatgtgaagttactccagatccagatgtatgcctaccctcgctgcaggctgataccgagtctgttatgccacaggatttgtcggaggccgcactcctttcggtgacgattgcaagcggagcagcgggtgactacgttcggcacgacactgatgtagtgagg

SEQ ID NO: 179319 - DNA, 172 bp, Zea mays
  Clone ID: MRT4577_95122C.1
cccgcgcatatgccgacttttcagtccgcaatctttaccgcaaggaccctcaggcgacggtggcgaaccttgcgcggtgtgggggcaatcttcctataaacaactctccacttaatgattatgggctagccaagggaaaaagcctgcatcttgttattcgaccgcaagatct

SEQ ID NO: 179320 - DNA, 377 bp, Zea mays
  Clone ID: MRT4577_95123C.1
aaataaaaataaataaaaaaacaaacaatataaaaaaaaacaaaaatacatacacgtacatgggaaaaatataactatgggggtcgcggcatctaaatgctctacgctggccgcccttctactaacgtcgtgactgtcttatcccttgcgttccccatcttattcggtcgttgctgcactttctactttcgccattgtggatcctatgtaataggcccgctcctatctcttttaccaacaccccctcttcctggatggcgaatggcactcgacctgcacaccgacattcattcccacctgtgtcgcgattacactcaccattgccacttcccttgccactgccctataaccttgtcctttcggttggttaccttcat

SEQ ID NO: 179321 - DNA, 1944 bp, Zea mays
  Clone ID: MRT4577_95124C.1
gggaactaggcatacaggaaaaggaaggagcctgatgtagagaagcaaaaggaaccaattgtagagcaagtaacactgtgacatgctctagaattggtcagcttgggacctcgaggcggcttgcggcaaacgcaacaacacggagcgggcgtggggagcggagcggtgagcgaggatcgagggcaacgtggcgaggcactcccgagggggagaggcgactttgcttccagttccaggaaagagtgggctataaaaaggcgctcgagatccagatctgggccgatgcgaccgccctcgctgctctccctcaccctcgacgccgcgctcctccgcatcgccaatatcgccgacctctcccacctcccagaccacctcctcatcgacctcttccgtagaaccctcagtgctggtaagctgacagagaaagttctcaagttgtttctagcaaccgactgtgaggatatcatattggctgttcggttgctcaacattaagcagccactcgtaccagtccttcccacaaggtgctctgagagattctagatctgctgccgctcacatcgttttgattacctgagaagatgcctttggaaattcaagatagtgaggttgacattgtgattgcggcactccagcccaacctgaccactttctttgaggcatggcgaccatttttctcccgtttccacatcattgtcgtcaaagatccagacatggcagaggatcttcaaatccctgcaggttttgatctcaaggtttacaccaagtcagatattaatgggttgcttggtgcctcctcatccataaacttatctggtcactcatgccgttactttgggtatcttgtctcacgcaagaagtatgtgatttcaattgatgacaattgcctcccagcgaaggacactgctgggtcgactgttgatgttgttgcacagcacatggccaatctgaaaacacctgctacacctttctttttcaacacactctatgatccatacaggaaaggtgctgactttgtccgtggttacccattcagcctgcgcgagggggttgagtgcatgctctcgtgtggtttgtggcttcataatgctgactacgacccgatgactcatgttgtgaagagaaatcaacggaacacaacatatgtggatgctgtgatgacggttccgcttggtgccatgctgcctgtgagcgggataaatgttgcattcaaccgcgatgtgctggggcctgctatgttcccaggcctgcgtctacgaaacgaagggaagcacagatgggatacccttgaagacatatggaatggcttatgtgctaaagtagtctgcgacagcttgggatatggtgtgaagaccggactgccttatgtgatgagaagtgatgcagaagcaggtaaagctctggagagcttgaaagagtgggaaggggtaaaagtcatggatgatgttctcccattcttccagtcgctcaagctatcgaggactgcagttactgttgacgattgtgttaaggagcttgctggagttgtccgtgagaagctaggacctaagaatgcaatcttcaccaaagcagccgatgccatggtggaatggaacaatctctggaaagtgcatggtgctcagaatgcatagtttgggagtttgcatgtttcctacagagcatctaatagttgtttggagtgcgcgttttacagttctaaattttccctgtggaactcatgaagctgaaataaacaacggtcctttatgccgtgaatttggcatgaatagctgagcatctcattgtatacgcttaagaattatgtaatgtaatgcatcaaaagaacatgtgatgttttcttgcaaaaaaaaaaaaaaaaaagcggccgctaagaggttggataccagctcagctcagcagaacctctgggcaggcgctgtcaaaatctatgaaagcatttgctgt

SEQ ID NO: 179322 - DNA, 286 bp, Zea mays
  Clone ID: MRT4577_95125C.1
caacgaaaacaggggattgggacttttgtttccaaaattaacaaatttgtacaggctgtaatacacgagggggggggctacaaaagctactgtttacaaagtttgggtttttaaaaagttgatgacaggaacagcgacttttttggtcgaaaggttggtttggccatttttttgggcagggaaacagtcaaagttgacgtgcttttgcggggtaaactgtccaagttggatcaccattgcctgaccgaaccagtttaaaccacggaacatttggcccctggggggg

SEQ ID NO: 179323 - DNA, 126 bp, Zea mays
  Clone ID: MRT4577_95126C.1
ctggcatggaagggcaggatcggtccacatacaggcgagcatatgcgccacaagagtacatcctacaacatcctctaatttattcaacctgacaagtactgaaaaccacaagactactgcccgcaa

SEQ ID NO: 179324 - DNA, 499 bp, Zea mays
  Clone ID: MRT4577_95127C.1
gaactttggtctgatttatgtgcttgtccagctatcggctcgactcggttcagtcccgctcgagaggctccaatcgaagatacgggccgagccccgcttctcaggcggacgtcgtcgactaaagtcgtcctatctacaaaatcagtttcatcattagaagtaataccgatacccgtagatcgactagacgaactaaaaccatcttcactaacgctagtacttaaaggagctatcctactatcggctcgattatcccctagcgttattcgccttagttgccttcctcccagccgtctagtcaccttcctgaaggtacaagaacatctaagcgtaccttagatagcgcaagtaaccagtctaagaccgtctctaatacacggacaccccgaccctataacctcccctaaacgcttaatactcgcaggtactcgtcccgtcactctaaccaaagttccacccggtagcacacaattagcatctctactccttcgatgagtca

SEQ ID NO: 179325 - DNA, 575 bp, Zea mays
  unsure (1)..(575): unsure at all n locations
  Clone ID: MRT4577_95128C.1
aggcaaccaaacaaaccctatgattcatctgtttgaatttgtccatgcaaacaagcaaccaaaacgtgccctccttgcatgatgacagcctaggtctaatcaaatccatagctgttgataatgtgtgcattgacgcctccgccaagcccgcttccgctttcaccagcatcgcctgcatcgagttcacctacatggcaacaatgcaaggtgggtgtggtccgtgtggatgctacctccgttcaacttacctccattacaaacccaccttttcgccaagcccgccttcggagaggaaggagagaagatgtgggaagaaggaaaatatagaaagtcttttaacctactaagactgtctcctgtctaaaataanagacgtggaactatatataacattatttgaccatgtttataaaatacagtttgaaataaaggatgagatatataggatctactagtatactgcaagtggtaaaaaaaaatttactaataatttgaatgttgggaacccgtcgtcagtcgtcaccgtcggaggatgatttcggttggcgcttgcgagctgtttttgcaagtcaata

SEQ ID NO: 179326 - DNA, 343 bp, Zea mays
  Clone ID: MRT4577_95129C.1
aaagaataatcgtagtcatctttcagaaggtatcacacagaacacgatatcaggggtacacgggcgtctacaaacagcgtggtgagctaaatctaaggaacattatctcatatataatctacctcaactatcaccactatagccttttatactcattgggagagctttcctaaattaaaatacttaaaaggtcgttcgtttcataaagatccaatcatcaaatacgctactatagtaccaacttaattattttattttaacaactaaatacatggtaatgcacggcgaatcccaacttttcatctgattaaacaatttctcttcgcacattaatatcaataaa

SEQ ID NO: 179327 - DNA, 663 bp, Zea mays
  Clone ID: MRT4577_9512C.1
agtctacccagtctttctttcccccaagaacacctccaatcccacaccagtccgccccaaatctgatccgcccccaccattcccctcgtcttggcacgagcgcgtcggccccgtcgccccggatcggaggagagccggctacggcgctgctcggcgctgaatctccgctcagattcggattagggtttttggacgtggtcgtcgttgtgggtttgcgccgccggtttgaaaatgtcggcggccgtggtttgcgcagagagggcgacgagcgacatgctgatcggccccgactgggccgtcaacatcgagctctgcgacatcatcaacatggatcccggacaagcaaaggatgcacttaagctcctaaagaagcgccttgggaataagaattcaaaagtgcaaattctggccctttatgtgctagagactctaagcaaaaattgcggggatattgtttatcaacagatcattgagcgtgatatactaagtgaaatggtcaagatcgtaaagaaaaagccagacttaaatgttcgggagaaaatattgagtctgattgacacatggcaagtggcttttggaggtccttccgggagatatccccagtaccacactgcgtaccaagaacttagggcagctggtgtcgattttccacctcgcgaggag

SEQ ID NO: 179328 - DNA, 211 bp, Zea mays
  Clone ID: MRT4577_95130C.1
ggcacgcctatgctttctcttatgccagagcttgttaaagtgcacaaccgttggaactgcgtcgacagcgtctgttgacccctttattaacatgaatgagcataccgtgtctttgtcgcagcaccttgcgttcacgattaatatgtgctcatctcttcgcatccggagcttcaacatggaggtgcacatcttagcctctagaccgggatcc

SEQ ID NO: 179329 - DNA, 301 bp, Zea mays
  unsure (1)..(301): unsure at all n locations
  Clone ID: MRT4577_95131C.1
gcacgagccaaacctagctaccaactcgatcgtcgtcatcacgctcngaccgcaccaactccccctcnttaccatnagtcctcctcgggcttaagggtctcnccttagggttcttgctggcaggcggccgcatcggccggccggccctgcatgggtgggtgttttcttcttttgttcttccgctccgcgccgcgcgccctctgncncctgngcgtcccatcgccagttccacaccgacagcctccgcccctgcgccagccacactcgccccctctcccgccccctccccctcaccgngccc

SEQ ID NO: 179330 - DNA, 236 bp, Zea mays
  Clone ID: MRT4577_95132C.1
ggggcgccaatctcatgaaccaaaaacatataactgggcaactagttttacccccaaacagcaatttttaacagctcaacgggggaatacataaactttgccacaaaaatattaaaccggtacagcatcccttgggtttttaacaacacgggcatttagggcccaaaaaaaaaaaaactaacggatgggggacccgggcttcccaaacaatttaacaagtgggactagggtctaaa

SEQ ID NO: 179331 - DNA, 865 bp, Zea mays
  unsure (1)..(865): unsure at all n locations
  Clone ID: MRT4577_95133C.1
aattcggcacgaggtccgatcaccacttcggcgccgcgcgtccgaaccccaacccaaccgcgctgtctatcctcctcctccctttccgcacttggtccggcgatcctgatcgaattggaaccgccttcacccccacccagtgcagtgctcgcgtgctccgctctgcgccggcagcccgcccggaccggaccaggccgtctctgcatttgcgcggatccgccggcgcggtccctgattcgggccgcgctctcgcagatgatggtggcggagaagcccgcgctggggttccaggcgcacggggacggggacgacgagctggagctggagctagcgtcgccggcgccgccgccccggaagatgcactcgctggaattcgagcacatcggctcgctcgccgccgtggccgagtcgctcgcgcccgggagcaggtggcagagggcgctcaccagcgtgcgcgtcgtcatcttccaggccaagatcaacgtgctcctccccttcggcccgctcggcatcatgctccactacctctccggaacgcaccaaggatgggtttttcttttcagcttaatcggcattaccccgttggccgagagattgggatacgcaactgagcaacttgcttgctacactggcccaacagttggggggctactgaatgctacatttggaaatgcaacggaaatgattatatcaatatacgcactgaaaaatgggatgattcggggtcgtccagcagtcactactaggctcaatattgtcaaatatgctgctggttcttgggtgtgctttctttgctggtggtcttgtccattctgacagggaccaggtcttcaacaaggcatcagctgttgtanactcaggacta

SEQ ID NO: 179332 - DNA, 469 bp, Zea mays
  Clone ID: MRT4577_95134C.1
cccacgcgtccgaccacgcgtccgcttgcgcgtccgttgagagatagcaagcaactgcgtgcctttaggagacgcgacgtcgttcgtcatcaagatcagcgagtccttgctgagcgtgacccttgtgagcctgctgctatgtcgcctatgcagcaccgccgttgcccactataaagacatgcacgttctcggcattgtagactgctgcagcgacgcgtgcaaccccgagtccgattgccgcgtcgactagcggacatcatgctggctgatacggaatctgatgcgccggcgccgtcgccggcgccggtgacgtaatcctgttgaacgtgcaagctttcgtacagactatcacggtggtcaagaccgctaaccagttaacgtctcgaaagtgactgcgcctactactgctcttgccatattgatatatagatgctcatagtgagcttaagcctatgacgttcatgctatt

SEQ ID NO: 179333 - DNA, 1974 bp, Zea mays
  unsure (1)..(1974): unsure at all n locations
  Clone ID: MRT4577_95135C.1
gctcgagggaatattccttgatttccctctttatcttctgcatcccactcccatttactgtgggttgttccgttttctaatgagccaccgccgtcttccttatctgctgcatcccaatcccatttaaattttgtcgtcaacaatttcgtcttctcggtttctgacttattccggggcatttttttttcttgtttcgagcctgtgagcctgattccattttgacccatggcggcggcggcggttcatgagccggaggtgatccgcgacaaggcggcgatgcgcgcgtggtcgcgccgccgccgcgcggagggaaaggccgtcgctttagtccccacgatgggcttcctccacgagggacacctctcgctcgtctccgcggccgtggcggcctccgccggccccgtcgccgtcgtcgtctccatctacgtcaaccccagccagttcgcccccaccgaggacctcgccacctacccctccgacttcgccggcgacctcggcaagctggccgccaccggggtcgtcgccgcagtattttgccccccggacctctacgtccgcggcagcgctgaccgcccctccgccgccagcgcgtccgggggcgcggtgtcttgcctggaggatgcaggtgggcatgcgcacgagacgtggattcgggtggagcggctggagaaggggctgtgcgggagcagcaggcctgtcttcttccgcggcgtggccaccgtggtcgccaagctgttcaatatcgtggagccggacgtcgccgtgttcgggaagaaggattatcagcagtggcgcgtcatttgtcggatggttcgtgatctcgattttgccataccgatggagggttcgaagaaggcgttatcgatcagtagatcgctggtggatgctagaaccgccgccctcagtggaagcaaccgtagccaagaaataaaagatcaaatagtgcgtacaattacagaagctggcggtcaggttgactatgttgagattgtggggcaggaaagcttggtgcctgtggagaggatggaccgcccttgtgtaatttgtgtcgcggcatggtttggaaaggtcaggctaattgacaacatcgagatccatgtagatagctctactgttttgtctatctgatgaacgaagatgtttagacacacggcaaaatggcataccactttctacgtagcagtagcagaccaagaataaatagcatgatgggctgaatctggatagaagaccatgagctcagtgctagccattcttgaatgcctaaatagcaggaaatactcactttaaatatttcaccaagagcaaagagctagaaattaaaaaactgctagaatgcagagaataagtactttcacagtttcagtcaagctaaggcagcacaaatgaatcttaggcatctctaaagtactcaacannnnnnnnnnnnnnnnnnnnnnnattaatgactgaatcttcgaagcttgtggnnnnnnnnnnnnnnnnnnnncagattttacattagcttctctcgttagtcaccagatgcactctatagttaccggaggctcaagggcgcttaaaatctcaagcatgagcaatcaatctggccggacatcttggttctcaactgcccattgatacttgattcaagcactctgccaataacaaaactactcgaactccagcagctccctgtctcgctcactatcttaaactccatgcggtaaacagtataaaaacagtgttttgtacatccatatacatgatccgccgaagacggtctaaggttgcataaatgtatttctctttttgttgtttttctcccccccaattataaaagctctatccttcaattaagacagaaaggaagttagatgccttttcaattaaggtggaaacgaagttacatgtataagaaaagggtagctaaataatgtggagaatattataatcatccatcaaaaaaaaaaaaaaaaaaaaaaaaaacaaaag

SEQ ID NO: 179334 - DNA, 1527 bp, Zea mays
  unsure (1)..(1527): unsure at all n locations
  Clone ID: MRT4577_95136C.1
gtggggacacctctcgctcttgtccgcctcgaggccggcctctgccggccccatcgccgtcgtcgtctccatctacgtcaaccccagccagttcgccccgaccgaggacctcgccacctacccctccgacttcgccggcgacctccgcaagctggccgccaccggggtcgtcgccgcagtattttgccccccggacctacgtccgcggcagcgctgaccgcccctccgccgccggcgcgtccgggggcgcggtgtcttgcctggaggatgcaggtgggcatgcgcacgagacgtggattcgggtggagcggctggagaaggggctgtgcgggagcagcaggcccgtcttcttccgcggcgtggccaccgtggtcgccaagctgttcaatatcgtggagccggacgtcgccgtgttcgggaagaaggattatcagcagtggcgcgtcatttgtcggatggttcgtgatcttgattttgccatacagatagttggttcggaagtagtgcgagaagctgatggtcttgcaatgagctctcgcaatgtaaatctgtcagaggaggataggaagaaggcattatcgatcagcaaatcactggtggatgctagaaccgccgccctcagtggaagcaaccgtagccaagcaataaaagatcaaatagtgcgtacaattacagaagctggcggtcaggttgactatgttgagattgtggggcaggaaagcttggtgcctgtggagaggatggaccgcccttgtgtaatttgtgtcgcggcatggtttggaaaggtcaggctaattgacaacatcgagatccatgtagatagctctactgttttgtctatctgatgaacgaagatgtttagacacggcaaaatggcataccactttctacgtagcagtagcagagcaagaataaatagcatgatgggctgaatctggatagaagaccatgagctcagtgctagccattcttgaactgctagaatgcagagaataagtactttcacagtttcagtcaagctaaggcagcacanatgaatcttaggcatctctaaagtactcaacacattgggggaaaaaagaaaggacattaatgactgaatcttcgaagcttgtgatacattccttntttttttaaaaaaaaaagcagattttacattagcttctctcgttagtcaccagattcactctatagttaccggaggctcaagggcgcttaaaatctcaagcatgaacaatcaatctggccggacatcttggttctcaactgcccattgatacttgattcaagcactctgccaataacaaaactactcgaactccagcagctccctatctcgctcactatcttaaactccatgtggtgaacagtataaaaacagtgttttgtacgtccatatacaaacagtgttttgtacgtccatatacatgatccgccgaagacggtctaaggctgcataaatgtatttctctttttgttgtttttctctaaacaaattataaaagctctatccttcaattaagacag

SEQ ID NO: 179335 - DNA, 1072 bp, Zea mays
  Clone ID: MRT4577_95137C.1
gcgtatcgactcctatgggcgattgggaccctcgaggccggccgggatccatttatagccttttcactcgctccggccgcgtatttacctatccgtcattcccaattccaaaggaccaagcaatgtttcgatacctcgctgctctgattctcgtcgtcgccttggcgacgtgtacaaacaagtctgttgatgcccgcgtggtccaccccatcgtcaccctcgaggccgatggctcatctcccacctctggcgatggtcgtcgcctgatcagctccaccaaccaagatgaacttggagcgttatgccaacagatgcactacaagacgttgtgctccacgatgacgacactgcctggggtgactacgccagagcaactcttagatgcatccctgcggattacagcggtgaaggcagcgatggcggagatgaagctagacaatgcaataaaatcaggcagtgctcagggtaacccgatgatgtcgtcgctaaagacatgcaaggagagctacgcgtcgctggtagactccatcaataccacgcggaacacgctcaaaagcggcggcagcaatgcagacctcatgtcggagctatccgcggcggacaccttcgccaccgactgcggggacaccttcgacgagcgaccagacctcaactcacccatacccggtgcacagcgccacgtcaaccgcctcatcagcaactgccttgacctagcagccaccattaaggaacaaccctagatgcctatgatgtggacactgaaaaaatttatctacaactggctgaagaagaaacagtcccacaacctgacttcaaatttacgacatgtctgcacataccaatgattgtgtggcttatcgattttggctctttttatatcctttgatattgctggggcataaaaagcaatcatcggttattagtaggtggatacgtgtcgcaaatccaaagaaggttgtatgactgtttctctgtagccaactatagaactagaccgcttgcatgcatgtattgacgaggacacacagtgttagcatggtacattatatacatctagtgtacattgctctgt

SEQ ID NO: 179336 - DNA, 208 bp, Zea mays
  Clone ID: MRT4577_95138C.1
cccacgcgtccgatcagcagtttatatatgcgttgtgtacgtattaacaatgcacgactcatagcagaactagcaaaaattgaatccatcatctgcctatattgcaataaagcatgacaagctctctgaaaaaaaaatccacttgcgtaatctgtgcaactgtgcattcgaactattgcgctacataatactttcattctcggtatga

SEQ ID NO: 179337 - DNA, 242 bp, Zea mays
  unsure (1)..(242): unsure at all n locations
  Clone ID: MRT4577_95139C.1
cccccccnaataattgcccccaacagacgacccatatcggaagatttttactcaaatacaagtgcatggcacacactgatccatgcgactgaactttaattcggggggtggggggaggactaaacgacacacatctctacgccacaggccccctcctttacaccaaaaacaaaccacatttttcgcctctatttttactcgcccagcagctacacttggtctagcctttcaagataataccc

SEQ ID NO: 179338 - DNA, 434 bp, Zea mays
  unsure (1)..(434): unsure at all n locations
  Clone ID: MRT4577_9513C.1
gatcccttctccctcttcgttgctgttccgtcgttgtcgtctcaccccaaaaaataaccttaataccccatcattcgctcggggttactctcgcttttacaactttataatactcttttaatcaactcaggcgtcgctgtttcccgttccaccaagaccctgtaacctttacgttcgagtcaaatatcatcaagatgcgtttctccaccgccgacgccgatgcgctctctgcctctgtcagccttgtcgctgcccaggacaagtgcgatgctcaaaacatcagaaacacgagcgattccgggtaccagccgcgcatcgatgcctgcaacaagaagggcaacgacttcatctgcctgagcgacgactaccgagatgccctcgtcagctacaacaactgccccgactcgntcgaacaggcccccggtcgagaacac

SEQ ID NO: 179339 - DNA, 727 bp, Zea mays
  Clone ID: MRT4577_95140C.1
gggcgattccacgcgtccgggggctcttcctactccgcgcccggccgcctttgcctgccttcccatctcctctggtcttccgccatggcccagcccgtattcctctcctctctccgctcccgcctctgctccgcgccgccgtcgccgcaccatcacctccagcccagccgcggctaccacgtcgagctcggcgctcgcgagaaagcgcttttggaggaggatgttgctttgaagaggttcaaatcatacaagaacagtgtgaaacaggtctccaagattgggaatgttctcactttagctgttgtattcggttgtagctacgagcttggtttgttggcggcaagcatgaagtgaaggaaaacacagccattattccgggaagtgatccatcagcgtagactgtcattctatcacctcgtgtttttagcctgtctgtctctctcttatttttttgtcgtgcaccatgtataaaataaaactaaactaggttaaccttgatttgcgaataacgttttctgtttctatggcctagtcgcaaacgaagtggcacaagcattccatggctaatcttgatgcatgagcatcggctgcttttgtttgccacctggcagagtggcagtgcatcctgatgcacagacagtataacagacgtgtcatttgtcgaattcagttcatcaacaaaataaaggtcgttaatcccaaaaaaaaaaaaaaaaaaaaagcggcc

SEQ ID NO: 179340 - DNA, 181 bp, Zea mays
  Clone ID: MRT4577_95141C.1
gcggctagggaggacaatgctcaggtacttcttttcgtgcgatgcaaggacaacaatgccgcccatgccagcgaatctctgcgtcgagctaaggtcaagttccctggccgccaaaagatcatggcgagcaccaagtgggggctgaccaagttcaaccccgctgactacctatagtacatga

SEQ ID NO: 179341 - DNA, 1322 bp, Zea mays
  Clone ID: MRT4577_95142C.1
cagtctctctctttctctcgagtctcgatacaccacagcggaagcggctcgactcgctgagtgacaagacgcgacgcgacgccaagccaagaccaaattaccaaaccctaccccttcgccgcgaccgcgatcccccacatcgttggcgatgagctcctcctccaacagcgggaagaagccggcgcccgccggcggccgcggggggcccaccatccgcacgctcgccgacataaaccgtggccccgccggtttcccaggtgccggaggcggcagcagcgatgacgacgagccccaggagtactacaccggcggcgagaagagtggaatgcttgttcaagatccaacaagaagaaatgacgtggatgcaatatttgaacaagcaagacaggcgggcgctatccatggaatgcccccttttcttggtggcgagtcttccagctctaggagctttactgggactggccgacttcttacaggggagacagtaccatctgctgcacctcaggaaccagtaccagttcgaatacgccacaatatacatttgtggaacaatggctttactgtggatgatggtccactgagatactacgatgatcctgaaaatgaagagttccttgagagccttaagatgtcaaagtgccccaaggagctggtgcctactgatggagaacatgttgatgtgtctgttattaaaaggatggaagattaccgggaacctgtaaggcctcaatcagctttccagggtgttggaagaacccttggtggtggaccttccccagatgagagtgcaacacctgctcctgcaccaacggcccctgctgcttcgaggtccgctggcatagtcgtggatgactcccagccatttacatccatacagctgaggctggctgatggcactcgcatggtcgcccggttcaacatgcaccacaccgtgggagacatcaggtccttcatcgacgcatctcggcctggaaccgcaaggccgtatcagctgcagacaggtttcccacccaagcagctggctgacccaacgcagaccgtggtgcaagctgggctggcaaactcggttatcatgcagaagatgtaatgtttcgacaacatgggtaactaggatgcatcgtactgcatcttttgagaactgtcttattgtggttgatttgctctggtgcgtcattcatggtcttaagagtttatagttcatctatgaactgaattatgctttctgatttacagcagatactgaagtgtcgatttaacgtttatgcatgtctggatataatcaaccgttgttgcttgcatcactattttctctctcctcgtgc

SEQ ID NO: 179342 - DNA, 423 bp, Zea mays
  Clone ID: MRT4577_95143C.1
ctcacgttcacttgctttgtccaaggaagccaaagctcgagcccgcatggaggagcttagcacagtcatggacaacttacaggtttactataatacactacatgaggaagttcatgtattgtattcacaactgcaccctaagtacatgcggatcctgtcggaatggaagcaggatcttttggagcagcgggtgaagcccttggtggggaactggacctttttaggccccctccttcaatgaatctggtcgacgaatggtctcctacacccgacagcgaagctaccaaaagtgataagaagctagagtagtgtaatagaaatagtgataatgtgtaataggtaatgtaatcctgttgtaaattcgagtctgtatcattaccttttgaagtaatgtaaaatagatggtttgctttggcatattat

SEQ ID NO: 179343 - DNA, 373 bp, Zea mays
  unsure (1)..(373): unsure at all n locations
  Clone ID: MRT4577_95144C.1
cccnagatttttaccaaccccaaaagaacgcccccaggcagggatacaggaggaaacgggcgccaacacccaccggagacaggacccgaacaacagaaaccacgcccccccccaaaacgaaagggcacccgaccacacaagcaccagggcgggaaaaacaacccacgaacaaaagaacaccagagagaccgagcccaaggcggagggcgccccccggccgcaggaaggagccgggaaagggggggacacgccccacccagtacacggggaaggagaaaccaaagagggagggacggacgccccccggacaaaggaccgggccgaaacccagcccagggggaccccgccacaaggagcaaaggagaagaaacca

SEQ ID NO: 179344 - DNA, 582 bp, Zea mays
  Clone ID: MRT4577_95145C.1
tttctgttggcacagcacctacatctcctgaatatactgaggagcacgaggacaaaccgactcaaatgttcactgctggtgctgatttcgtattgtgacatttcctgtgggtactaactgaaatcgactgggacattggagctgaggaacaacctgtggacacaatcaggccatggcatctgaatcgcatgaaatgtattcatgcttatatagagctagacggttctgaaaattataaaggccgtgtctcaaacaaatcaatgaacaaagaagactggcatcactctgattctgaactttgctgtgacataactgctgatagttctgaataaatagatttatacagaacgcttcatactgattagagcaatctcacaactaaaatgataactaaagatagaaaatggtttgctggagaaagaatatagaaataatatactggatgatcaactctacgttaaatcattaatgactcaccgcttaggagagatgaggaatgcagacacatcatatctacagcatcaagtgcaagctgcctgaccttttgatatccagaatcatgactatgacagtttgaagaac

SEQ ID NO: 179345 - DNA, 648 bp, Zea mays
  unsure (1)..(648): unsure at all n locations
  Clone ID: MRT4577_95146C.1
gtgatattttntctggaaaatggcaaaagaaattcactgtgttcccactacataaacattctctatactgacactggtccatgctccatttagattactttcattgtattctatttcctccattctaaattataagatattttgacttttctagatatatagcttttgttatgcacttagatatacaccatgtctaaatacataacaaaagcgatgtatctaggaaaaggcaaaacgtgagggagtattatggtggagctatactttttgtagagtttagagattatactatgaggttttataatcccatttaaaattcaaagccatgatatgattctttggtgtttggaaatttgtgcagtataactgatttaaatgtgttgtttagttgctagatcaccttttcatagagtgtaagcaccatggcaaggatctggtcgctgaaggagtgataacctcaaaagatatagaaggaacaaaggcaggcaaagccagcactggggtacttaatgttgggttaccagcatatgttatccttaaggctctcctccgatctgctaaagccaattctgatggtctcgttctaagtaatggatctgagataacatccgacaataggcctacgagtaaaatttttgagtggttttt

SEQ ID NO: 179346 - DNA, 1503 bp, Zea mays
  Clone ID: MRT4577_95147C.1
gggtacctcgaggccggccgttcgtgtttcctttcgggccccggccgcggctggtgatctccgacacggagctcgtgaaggccgtgatgaccgactccacggggggctttgataaggcggcctcgggcggcaacaacccgctcgccaggcagctcatcggcgaggggctcgtcgggctctccggggagacgtgggcgcgccaccgccgcgtgatttcgccggcgtttaacatggagagggtgaaggcttggataccagaaatagcagctgcggcatcacctgttctggataagtgggaggccgaaggtgggagccgcactgagtttgagatcgatgtccataaagcattccacactttgagtgcggatgtcatttcctgtgtggcatttggaagcagctacgaggaggggaaacgaattttccaattgcaggaggaacagatgcaacttgctcttcttgcaatgaggactgtttatattcctggcttcaggtttgtaccaacaaagaagaaccgaaaaaggcagaggttaaaccaggaaatccaatgctccctgcgcaaattgatcgaaatcaatggaacaaaatgcgaggactcaaaaaatttgctggggttaatgctatcagccagcaaagctgggagtgaatacaaaatgggaatcgaagagataatccatgagtgcaagacgttttactttgctgggaaggaaacaacagcgaacctgttgacatgggcaacacttcttcttgcgttgcatcaagagtggcaggtcaaggcccgtgatgaggttcttaaagtgtgcggaaagcatgagcaccctaatgcaaaaacctgagcgatctcaagattgtaactatggtgttaaaagaaaccctcaggctgtatcctccagctacatttatcaatcggactgccactagggatatcaagctgggtaaactagacatcccggctggcacacggctggacttccctatcattcacatccatcgtgaccatgaagtctggggcatggatgcagaggagtttaatccatcaaggtttgcagatggcagcagctatcacctaggtgcttacttcccctttgggatcggccctacaatctgcgttggccagaatcttgcaatggtcgaggccaaggtggcgcttgcaatgacccttcagcggtttgcgttcaccgtttcggcgtcttatgctcatgcaccgatgctggtgttcaccctccagcctcagttcggtgctcaagttcttgtccggaaaatatgagccttttatgtgaaggatccataaggccccccctttttttaatattctttcgaacacaggactctacttttttttttgttcaatcctgttcatgaaaaacttgtaaataaaatttgtcctctacaggaatctgttaaaggcttcaaacccttgagctaaaatggcatgtgttgtacaaaaaccatctagaacctgcatgaatataccgatttggaactgcgaaaaaaaaaaaaaaaaaa

SEQ ID NO: 179347 - DNA, 492 bp, Zea mays
  Clone ID: MRT4577_95148C.1
ttttacacttcttcttgcgttgcatcaagagtggcaggtcaaggcccgtgatgaggttcttaaagtgtgcggaaagcatgagcaccctaatgcagaaaacctgagcgatctcaagattgtgagaccatctatttgaaaagttcatacatttgtagtgcttttgagatgattttatgctgtatttatagtgctatatttttgctatgtggatcaggtaactatggtgttaaaagaaaccctcaggctgtatcctccagctacatttatcaatcggactgccactagggatatcaagctgggtaaactagacatcccggctggcacacggctggacttccctatcattcacatccatcgtgaccatgaagtctggggcatggatgcagaggagtttaatccatcaaggtttgcagatggcagcagctatcacctaggtgcttacttcccctttgggatcggccctacaatctgcgttggccagaatcttgcaat

SEQ ID NO: 179348 - DNA, 406 bp, Zea mays
  Clone ID: MRT4577_95149C.1
acgacgccttcctttacaccatgtacacataacaaatccttcaatgaagtactcacaatggctattataggggaatcttgcacaacatcgtgatgaacagaaaaataccggcaccactgcgtatatatccttttcactaaggtttgtaccggagctgctcctgcaaattccaagcatgtcgacttgactacttattgtccatagcaaaagccttcctcctggcaatacagactgcaacaactgaagacacttctaactacacacgttcgactagttcactaccccttctatattcgcacatatactgataattatcacaatacgatatccagaaaactacatgattcctgtcatacagtatatactgaaagaccatataccgaattcactgcgtgtatctatatgt

SEQ ID NO: 179349 - DNA, 331 bp, Zea mays
  Clone ID: MRT4577_9514C.1
gaagcccggatcctctagtacagccgccccccatttattaattttctccacattttttttttttggttgttttttttttgggaagggcggggacccctccctttgtattggaaggattccaacttggcaccaaacccaaagtgggaaaaccaaaccacccaagtcctacaggtggtcccaaaaaacaccccctattaatgcccagcttggaccaattgtttttaggtcaaggccaaacataaggataatttggcttcctatccccaacagggacgcaccccgctgttagaaaacaaattccgtactgccccatctctaaggtggtttttaa

SEQ ID NO: 179350 - DNA, 405 bp, Zea mays
  unsure (1)..(405): unsure at all n locations
  Clone ID: MRT4577_95150C.1
ggggcttgcagatccaaatcggtatattcatgcaggttctagatggtttttgtacaacacatgccattttagctcaagggtttgaagcctttagcagattcttgtagggaacaaattttatatacaagtctttcatgaacaggattgaacaaaaaaaaagtagagtcctgtgttcgaaagaagaagaaaaaaaggggaggcctcatggatccttcagactactcaaaaaggtatagaaattttatgaccttattnggttgtcacatagaaggctcatattttccggacaagaacttgagcaccgaactgaggctggaggggtgaacaccagcatcggtgcatgagcataagacgccgaaacggtgaacgcaaaccgctgaagggtcattgcaagcgccaccttgg

SEQ ID NO: 179351 - DNA, 1195 bp, Zea mays
  Clone ID: MRT4577_95151C.1
ccgggaagccgataaataccacgttgcctggagattctgcatacgcgcctaaaatctcaactgctatataaacaccgtcggcaccttgaaaccggccgggaggcctggtacccgcactcctcggctcgctggtcgttgccctgccccggctttctcggtgtccgcctgccgctcttggccgccgccgccgccgcggacgacggcgagtgggccgagacttgcctcccccgcgccgcccggcacaccgcaagtgaacacatatagttgccatgagcatggaggtagcaggtgcagaggcacctgtcaaggggaaattccttggtatacttgtctgctggcttttgggaaatggaagccttttcgcgtggaacagtattctcaccattgaagattactactcccatctcttcccggattatcatccaacaagagtactcacactagtttaccagccttttgcctttggaataaccctcatcatgacatattatgaagcaaagatgaacacaagattgagaaatcttgcaggattttcccttttcttcctcggttcttttgcattgataattctggatgttgcaactaaaggacatggtgggcttggtgttttcattggtgtatgcataattagcgccatatttgggacagctgatgctaattgtcaaggcgcactggttggcgacctttctttaatgtgcccagagttcattcagtccttcatggcgggactagctgcatcaggggtcctaacatcagctttgagattagttaccaaggcagcttttgagagctcaaaagatggtcttcgcattggagctatactgttcttttcaatcacatgcctgttcgagctggtgtgcctcctgctatacacattcgtcttcggcaaactacccatcgtgaagtactaccgtgcaaaggcagccgctgaaggcagcaagactgttgccagcgacctcgccgctgcagggatcatctctgaacaacagggacagatggaggaggatccagagaaatacaagcgtctgaccactaaagagctgctgatgcagaacatcgactacgcgctcgatatctacctgatatacgtcctaacgctgtcgatcttcccaggatttttgtctgaagacaccggagcacacaacctgggaacatggtacgcgcttgtgctgatcgcgatgtacaacgtgtggga

SEQ ID NO: 179352 - DNA, 394 bp, Zea mays
  Clone ID: MRT4577_95152C.1
ataactacatgttcatctgtggtcaatgtttcttctttctgatctgcatgttatctgacgggtgcagctaatcaggtatcatttaccactaaactcaacatttgtcccctgtagtcttggataccagaaatagcagctgcggcatcatctgttctggataagtggcaagccgaaggtgggagccgcactgagtttgagatcgatgtccataaagcattccacactttgagtgcggatgtcatttcctgtgtggcatttggaagcagctacgaggaggggaaacgaattttccaattgcaggaggaacagatgcaacttgctcttcttgcaatgaggactgtttatattcctggattcaggtttgtaccaacaaagaagaaccgaaaaaggcaga

SEQ ID NO: 179353 - DNA, 523 bp, Zea mays
  Clone ID: MRT4577_95153C.1
cttacacaaatggtacacaaaagggcgcgccacgcagattgaacctttggggccccaaatgttccagaatggttcagggctcccaacacacaaggcccctacccccccccccccccccaacaacccaacgggggggtcaaccaaagccccaaacatttaacaaaccaaaaagccccaggactagcggatgacccaagcttaaagattaccggagggagggaggaccccaggaaaactttcagcatcttgccccccatgctccccggagggcccacccttggtacaaccttggggagaagggggcctaagtgaaggaccagggaagacccggggaatccctagtggcttagaagcgggcctggaacgaacgggggtacgaccccccttggacccactatgggacaccttggggtgttcttttcaaaggacaaaacaaatcaccctccctggttgctaactggaggtccatgggacctgccaggctaccgcctaaccgggcaccgggccgagcaccaaacctagc

SEQ ID NO: 179354 - DNA, 459 bp, Zea mays
  Clone ID: MRT4577_95154C.1
gggggaaattttttcccgttcctttattgggccccggggaaaaaaaaaccggttcctaaaaacatttttttaaggggggttgggaacccaattttcccaaaagaattctcattttcccaaaggggaaaaaaaactaattttctttgggaaaaagaaaattttttggaaacccgggggtggaaactagccctaacaagtgcaattttgccaacaaaactattcagtctaataatggatacctgccttccaacctaattaactgccccccctaatctcatctttttttctcttaaaattatctcactgccagggcgggcaaactttttaaaatggaaaagcaagaattttccaaagatatggccctttttgtttcatgccttggagggctccccactcaagtcaccccattttaccttgtacttggcggcgagaaagggggcccccacagggccacgggtt

SEQ ID NO: 179355 - DNA, 369 bp, Zea mays
  Clone ID: MRT4577_95155C.1
ctaattatatctttctttatagattgtatcatagacaatacagtcatactatacttatttacctccagcaccagcagctgattcagtattagatcctgcaccagcaccttcagcaccagcaccagcttcagctccggtaccagcagcagtagtgttatttgctgctccagctcctccggcttcagatgtaagattggtagctgcacctgcacctgtaccagcaccagcaccagcaccagcaccggcagcagcaccttgagcaagtttaacagctccaacatttactgtgtaccatccttgataatcagtacaaagcttgtcaaaatcgccaaagaggattgccatagactggaggccttcgacattagc

SEQ ID NO: 179356 - DNA, 444 bp, Zea mays
  unsure (1)..(444): unsure at all n locations
  Clone ID: MRT4577_95156C.1
gccgggccgggcagccgagtgcccactgttgaagctccctcgatggcgcccagaatttcagcagagagcttcttcccatggccgaccccacctctgttgctgccgagctccagctccggccagcagctacggcgccgaggattccctgcgcgcgagcaccagccccatgacacgcccgagatccactacgccgctgctccatcccccatccgagcgcccaaacaacacccttccctgctcccccttttttttctccccacaaaacagcagccgcagcgagctcgccgtcgtccatggcgccccctgcaatcttcccccttggctgttcgacggaatgcccgtgggaaatattgtgttgtgcgcagcagcccccgacgtctccgcgcgctgctggctcgctgttttgctaancccagtggacagaacgccgtcgacgctcaccgg

SEQ ID NO: 179357 - DNA, 344 bp, Zea mays
  Clone ID: MRT4577_95157C.1
gcaattcattatgcagcttacctatcctacggcgggggtggatacatcgttgggcgcccacacacaccatgtgctcgatcgaagcacagtgtcaaactacaaacctacgacatcacgagtgactgtccccaacacactttcctattatacaagatcaacaagcccctcaacaaacttatttatgtcctctaacgctactaataagaccgctttctctaaacttactacgtctaagaagtgttctacaagggttcaaacaccagcctgctataccagctaggcgacgagacctagctgattcattacctgatcacaacctaactactctataggtgtcaaaatga

SEQ ID NO: 179358 - DNA, 706 bp, Zea mays
  Clone ID: MRT4577_95158C.1
aataaatccatcataagagaaaaatagagaccacatatttgtcatcgttcaggtagaagaatgagaagcaccatgttgaagaggaagaatttgaagttgagttggactatcttcattgtattatttggactaataattgttattctgttactcaaagctcgagccgcacaggccagaaatcctgaaggaggacggcaggtgcccagtcctcctgatgtagttggccttctccgatgtcctgttcgcacgctcattgagcttcgcctcagcgctcgcccgcttctcctcagccatccgacgcgtggtggccagccggttggacagctcctcttggccccgtgctttcatctgatcagccttcatctgcattttcttcatctttgtctcggcttttctcttctcatggttctcccaggcctgtatctttacctcttcacgtttatacctcgccatgaacttggcccgttcagcctcatcccaggctgccgcgcgagactccagagagttcacgctgggcacatgaccagccacggggcgctcgtccccgacgcaagcgacctcgtctgctgccgctacctgctcggtcagcgtccctgctacaatggccgtggtcacgcccacgggcccttcctggcgtcttctcaccggggtggacgaccttgaggccatcgggctcagcgcaacgggcgtgcaggcgcgccggggc

SEQ ID NO: 179359 - DNA, 625 bp, Zea mays
  Clone ID: MRT4577_95159C.1
ggactcgagctacttcacaagcctcgatggcatgctacgggatgaatgaagccatgaagaagaagaagaagatgcatgattaagaaaggcgatcgaagagctcccttcgatccaatccaggaggggaagtggtcggttgcagctgccggttcatggatacctctctggtgcagcaatggccgctgctcacctctgcacttgcatgggtgtgcatgacccgggagatgagcccgccatcatctttccctcgtgcttggattgaagggagctcctctctgtctgtctgtctgtctctctctctccctttccttcccgtggcggtctactgataatttctcgtcatttctatctcttacttgcagttgcattgcagacatggatatgcatgctattgcctcccaagcgccgggaaactttaatctggataattggattcatgcataaatgaaccagtatgtatatatatacgtgtgtatcacgtttcaggacaagcctgatgtacaattttgctctatctttttactgtttcaataacttttacagattgttcgtttcaattaaataaatatttatataacaagtttttgaaaaaaaaaaaaaaaaaaagcaagcattaatatatttg

SEQ ID NO: 179360 - DNA, 275 bp, Zea mays
  unsure (1)..(275): unsure at all n locations
  Clone ID: MRT4577_9515C.1
ctgaccactaggcgatccaggtcgtcgaatgttccacgcgaaccgcagccgcgagttccgtctccggctccgccacatggcagaagggtgcttcgttcgttgcagtgctggcgccacgccgtaccgtacactcgcgtttgctgatgttcatctaattactgtatatatctccgggcgaaatatctagcaatcgtcggctttggatgangtgcgagattgctgctcaagtttcatgctctgttgtttgaaacttcaagattgttaatttcggaaag

SEQ ID NO: 179361 - DNA, 439 bp, Zea mays
  Clone ID: MRT4577_95160C.1
ggattccgggtcgaggcacgcgtccggccacgcgtccgcccacgcgtccgcccacgcgtccgcccacgcgtccggattaccatgagcagcgggccctggtacccggttccgctggtgcgcatggactccctgtcgtcgtcgtccacggcgcccgacgtggagctgacgctcgccaacttcaccgtggaccgcctcatacagatgttcggcgccaaggggttcacggttcaagagctggtgtcgctggacggcgcccacacgctgggcttctcccactgcaaggagttcagcgaccgtctctacaacttcagcaaccacggcggcaagccgaagcagttctaccccagcatgaacccgttctacgccagggggctgcacgacttgtgcacggactacctcaaggaccccaccatcgtcgcgtttaacgacatcatgacgc

SEQ ID NO: 179362 - DNA, 326 bp, Zea mays
  Clone ID: MRT4577_95161C.1
cggaaaaggagaggacgggctagacccacgcgtccgcggacgcatgctacgtgttgcactttgataataaaagacatagttgggtacatgtaatatggatgtgcgttgctacactaacacaaatgataatatactaccttcatgtggaattcaagcctgatcgcccaccagatcgatgggtgaacgaaaccatatgtagaaagcaaaatgatggaatcagacaagaccaccactataccgatcctgtcagacaccgtgtattacacacactaaagtctgaattgaactacctgggaaccgaccaaatacatagacattgctatttt

SEQ ID NO: 179363 - DNA, 641 bp, Zea mays
  Clone ID: MRT4577_95162C.1
cactcctatgggcgattgggttcctcgaggccggccgggaggccgccattccaccaaacttggctcttcgccttgcagttcaggcattcaaacgtgaagaagactcagcaaagtcattgaaaagaagaagagagcgccttgaactgggaaacaagaggaccccggaacggtttgtgggacgtcaagcagttgtgacagcgcagtgcttaaatggatggtatgttgtgaagacttcagacaacgcagagagtgtgaagctgcaataccgttccttggcaaaggttgctgatggcaatgggccttctggtcttgtcccaagcaatgtccaaagtacaagctggctataggctacaacagtaccggtagtaggccccaagccccctcttcaacttcacgcatttgctgaggttctgcgatgacgtgagcatgccaaattcagattaggcttgctttgcctttgtcccctctttttgtatcctggggacgcggatcttgtgagtatggccaaagaaatgtttactactttaggccttgttcgtttctgtcggtttggtgggtcggaacgattcctgaccggattgcttctctaatttatataaactttgattagctacaaaaaaaaaaaaaaaaaaggggcggcc

SEQ ID NO: 179364 - DNA, 1426 bp, Zea mays
  Clone ID: MRT4577_95163C.1
cattgggtacctcgactccggccgggaaaactagcgcttactgttttgcacggccatagtctcgatccccaccgagtccagcaaacagcaccaccccaccctcttcgcggctccggcagccgcgccaccatggcttctcctgcgggggctaacagcggggcctcctcctcgagagggacacccttgcctttgcccttccccttccccgctgcggcgcacttcccctcccgcggcgccggtcccttcctgtcgcagcactatcacccgccctccacctccgacggcgacgatgaggtcgaagaagacgagggaagcatggacgacggcagcgccgaagaggatgatgccgagctgtccgacggaggggctctcggctcgccgcggcgacgcgccttctccgctccaggtattggacgtatggagataaatgggggaaatggagtgaggtcaatccaagaggggcagcaatggcatttatgtaaccatggaatcgagattgggcgtccatcaccaggaggggatgaacctggtaccatccccagagatgtgagagtggagaatgggcatggagttgttggaagaagagacgggggtcctgcatccagctattgggacctgttgagagcacacctctctgatcctttaacaggtgttctcatggatgatgcattgattttatcatgtggccattcatatggaagtagtggaatgcaacatgtctacagaatgaaagcttgtggtaagtgtggcatgccaattactgaggccgccattcgaccaaacttggctcttcgccttgcagttcaggcattcaaacgtgaagaagactcagcaaagtcattgaaaagaagaagagagcgccttgaactgggtcataatcaagggaaacaagaggaccccggaacggtttgtgggacgtcaagcagttgtgacagcgcagtgcttaaatggatggtatgttgtgaagacttcagacaacgcagagagtgtgaagctgcaataccgttccttggcaaaggttgctgatggcaatgggccttctggtcttgtcccaagcaatgtccaaagtacaagctggctataggctacaacagtaccggtagtaggccccaagcccctcttcaacttcacgcatttgctgaggttctgcgatgacgtgagcatgccaaattcagattaggcttgctttgcctttgtcccctctttttgtatcctggggacgcggatcttgtgagtatggccaaagaaatgtttactactttagcagtgttggaaacgcgtgacatcactggttacgagtagttttagccgtcttctgtctagcggtgtggccggtagtggcagcaatctggtacacataaaagtttagtgcacatgatttatatattaaattatcactatctattttaaaaaaaaaaaaaaaaaa

SEQ ID NO: 179365 - DNA, 1581 bp, Zea mays
  Clone ID: MRT4577_95164C.1
caatagccgcacttactccaccggggccggccacaatgtcacagccaaacaaaggtagaccgtataaaggctcaggaaacattacacagtggagaatatccaaccctttgcccaccttggccaactccaaatgcattttgcgaaactggggcgtttggtagcaccgattttcaatcactaacttttccccttccaggcggccttctacgtagcccaaatcctccggcaattgatagggcttgaggggtaaactttgccaactagcggcgatcgccagggccaactgttgaatcatcgggttcaacgtaggcatcagggaagaattggtcaaacttaaatcagtgacggccatggtaaatactcaaatctagggcaaagcaatgggaataatgggctggaaattaagctaaaacctacgttggactaccgcctccttcttccgttgacagttccaaacaatagcctgccccatacaccgttttaataaagcgaggtcgacggggattcggttccaacttagtgcggaggtgacgaatgtgcacccggatggtttcaatgtcatcatctggttcgtagccccatacttcccgcaaaatatcactgggggaaaccgtttgcccatggcgctgcaacagacagtgaagcaactcaaactccaaatgggtcagcttgatacttttaccaaaccaaatagcttcaaacctttcgggcactagggttaggggtccctggttaagaatttctgaatgttttgccgcctgggggatgcgatctggcagaggctaatttcagtcgggcagatttgagtggggccgattttcgcaaagccaactttgaccatgccaatttgtataaggtgaatctaagtcaagcccaattacgtcatggcacagtggaggaggcttttctgcagggagcagacctcagtcaagctaatttgaaaggagcgaatttaggcagggcattgatgaaggaagttaacctcagtttgattaatctatcggaaattcatcttaaagctctccccaacaaggagcagattaactgtgccggttgcgccctgcggggcactattttccagggagctaatttccagaatgctaattttgagtatgctttgatggaaaaagctttattggccggggccatactccggggcgccaatttaatcgatgcctgtttacggggggcagacctacgtaatgtcaattttcaaaatagtcacattagcggcataaacttggcaaaaacaattatgcccgatgggagtgtacatccctgatgagaatgctatcggtgtttggggcgatcggaggggtgatggtattggccagtggtgctctgatggcgatcggcaatccgggcaagcctgactatgaagactacgcagtggaaaccctcagtacctatctaaaaaccgagatttgtcccaaagcgcctgcggattttggcggcttcgtgcagagttattgcaaaaccttggtggatgcaggacaaccacaaattaaacaaatcatcgcccaaactactaatcagcaaaattttttgttgtttagtatttaccaaaccacattatctctg

SEQ ID NO: 179366 - DNA, 411 bp, Zea mays
  Clone ID: MRT4577_95165C.1
cttccttttttttttttttttttttttttttttttttttttttttttttttttttctttttttttttctttaaaaaaaaacccggcggggaacaacggaggggaaagtttcgggacagccctcgggggaaagcaaaaaattaatccccccggcccacaaaaaaaggaaaatggcccccgaaaccggaccaaatttaaaaaaccccagttaagggggggcggggcccccaaaaaagaaattggagaaccccccaacaaaacgtagggggcaaaaaagggagggcccttgttggggcaaaaacccacccctggacgctggatccggggggggggggaaacttgggcgacggcacgggggggttaaccccggggaaccccggggaaagccgggggggcacctgacaaaaagggg

SEQ ID NO: 179367 - DNA, 741 bp, Zea mays
  unsure (1)..(741): unsure at all n locations
  Clone ID: MRT4577_95166C.1
acanaatgaagcttgtggtaagtgtggcatgccaattactgaggccgccattcgaccaaacttggctcttcgccttgcagttcaggcattcaaacgtgaagaagatcagcaagtcattgaaaagaagaagagagcgccttgaactgaggtaaaggtgtgcagtttcctttttctgtcttcgacagggtcataatcaagggaaacaagaggaccccggaacggtttgtgggacgtcaagcagttgtgacagcgcagtgcttaaatggatggtatgttgtgaagacttcagacaacgcagagagtgtgaagctgcaataccgttccttggcaaaggttgctgatggcaatgggccttctggtcttgtcccaagcaatgtccaaagtacaagctggctataggctacaacagtaccggtagtaggccccaagcccctcttcaacttcacgcatttgctgaggttctgcgatgacgtgagcatgccaaattcagattaggcttgctttgcctttgtcccctctttttgtatcctggggacgcggatcttgtgagtatggccaaagaaatgtttactactttagcagtgttggaaacgcgtgacatcactggttacgagtagttttagccgtcttctgtctagcggtgtggccggtagtggcagcatgcgtctgcagagaacatatctggtacacataaaagtttagtgcacatgatttatatattaaattatcactatctatttt

SEQ ID NO: 179368 - DNA, 1677 bp, Zea mays
  unsure (1)..(1677): unsure at all n locations
  Clone ID: MRT4577_95167C.1
ccaaactagcgcttactgttttgcacggccatagtctcgatccccaccgagtccagcaaacagcaccaccccaccctcttcgcggctccggcagccgcgccaccatggcttctcctgcgggggctaacagcggggcctcctcctcgagagggacacccttgcctttgcccttccccttccccgctgcggcgcacttcccctcccgcggcgccggtcccttcctgtcgcagcactatcacccgccctccacctccgacggcgacgatgaggtcgaagaagacgagggaagcatggacgacggcagcgccgaagaggatgatgccgagctgtccgacggaggggctctcggctcgccgcggcgacgcgccttctccgctccaggtgaaccaagggtttgcgcagaggctttcaggtcttcattcatctcttaccggtagattggattctactgcttgaagcctcgcaggcctggaatggtcaaatataactcgtattggacgtatggagataaatgggggaaatgggagtgaggtcaatccaagaggggcagcaatggcatttatgtaaccatggaatcgagattgggcgtccatcaccaggaggggatgaacctggtaccatccccagagatgtgagagtggagaatgggcatggagttgttggaagaagagacgggggtcctgcatccagctattgngacctgttgagagcacacctctctgatcctttaacaggtgttctcatggatgatgcattgattttatcatgtggccattcatatggaagtagtggaatgcaacatgtctacagaatgaaagcttgtggtaagtgtggcatgccaattactgaggccgccattcgaccaaacttggctcttcgccttgcagttcaggcattcaaacgtgaagaagactcagcaaagtcattgaaaagaagaagagagcgccttgaactggtatacgcccttttccagcttatcagtcacccttcaaatcgggcagctatatttgttgcatgttcttaaatccattctaccctatgtaattcggcatgaggtgacgatgatccaaatcgaactgaacttgctactagaggtaaaggtgtgcagtttcctttttctgtcttcgacagggtcataatcaagggaaacaagaggaccccggaacggtttgtgggacgtcaagcagttgtgacagcgcagtgcttaaatggatggtatgttgtgaagacttcagacaacgcagagagtgtgaagctgcaataccgttccttggcaaaggttgctgatggcaatgggccttctggtcttgtcccaagcaatgtccaaagtacaagctggctataggctacaacagtaccggtagtaggccccaagcccctcttcaacttcacgcatttgctgaggttctgcgatgacgtgagcatgccaaattcagattaggcttgctttgcctttgtcccctctttttgtatcctggggacgcggatcttgtgagtatggccaaagaaatgtttactactttagcagtgttggaaacgcgtgacatcactggttacgagtagttttagccgtcttctgtctagcggtgtggccggtagtggcagcatgcgtctgcagagaacatgtttggtttttattgcacattatttacatattaaattatcattatccatctt

SEQ ID NO: 179369 - DNA, 238 bp, Zea mays
  Clone ID: MRT4577_95168C.1
cccgagcgtgcggatgattgacctgaccggcgccattgtgaccgaggcggctgtctagatggaatgcttcgatcgctgagctgttttatcattacgtacccattatcatcaccaggtgcgtctgcgatcgctactgctctcttggaactgatagacacctgacctcacctctatctattttgtggaccatcgcgccaaaaagttgaatatggtctgtcctgagacaatcaagtttacc

SEQ ID NO: 179370 - DNA, 315 bp, Zea mays
  Clone ID: MRT4577_95169C.1
atttttatttgtatgtgatacactgatgttaacatggtcatctcatatgtgagcttagcctatcaactgccaaaattgatttagagacatttgcttgatagaagtccactatgacatatgaaacaactactagtgtgcaagattgtctcatgaaacctggttccatccaagtttctttatctccttgccttgtctccacgcagttatgggatttgttattttagttcacaagcagtgagacacctcagcttctgacagatcggaaaggggaattatgcatgtttttggctttcactcatctcactgtatgtgggg

SEQ ID NO: 179371 - DNA, 351 bp, Zea mays
  Clone ID: MRT4577_9516C.1
aagggaaaacgaataaattaatttctacagcggtccccttagttgcgaattgaatacacaagccactgaatttttggcttcccccaaaaaggtttcgggccctatttttgatccataaaaaaattggaatgggctccttactggaaaaaaaaaaaatcacagctggattaagcctttacatttttcattggctttcaaatttaaaggcagaacggggggggggggcgacttttactggggatgtagccccccaggtcatcgctttattttttggggtaaacaatggtggcgctcaattgcttggggggtttttttttttcccgcactttagctggtagcttggtttttttt

SEQ ID NO: 179372 - DNA, 245 bp, Zea mays
  Clone ID: MRT4577_95170C.1
attcgtccacgcctcctctcacacattcaatctaatttcaaaaaccgagctccctagaaaaaagtgaggaatttctgaaggctacatctaatttcaatctcttctgaactattactttcacttgcctctctatcaccttacatacttgattgtaatattggccattttgttttgactagtattgcttattttaatgatccttctccttttcatcctatttactatttctccaaatatgcttttaa

SEQ ID NO: 179373 - DNA, 358 bp, Zea mays
  unsure (1)..(358): unsure at all n locations
  Clone ID: MRT4577_95171C.1
tcggctgccgacgtccaccacacagcacggtcgagtcacccgatccctccatggcggcggcggtggcggcggtcgcggctgccacgacggcggaggacgaggcgcgcctgctgcgtctggaggagcaagcggagcacggcggcggcggcgcctggcgactacctttgtctggaccgccggctccaagcccgtctgcatgtccacgttctactggtcggactagttcttcgtatcaacgccttcggtcgcgtccgtgctnnccgttgatcagcggacgctctaccagcagggggtcctagctagcttggatcgccaacgtatcaatgtggctatagactgctttgaagaactttaaaag

SEQ ID NO: 179374 - DNA, 546 bp, Zea mays
  unsure (1)..(546): unsure at all n locations
  Clone ID: MRT4577_95172C.1
agtaataataaacccngcagcaggtataaagaaataacgttggctacccggatagcatctacggatcactactcttcatacacaaattactaatagagaatgataataaccccaatagtaatataacacagcttgataaaccctcactcgctaacttgaccaccaccgcaatggccgcatccttggccgctttgtacacatcctcgctggcctcactgtcttccccactatcacctctatccaccgtgccagtgtctcccatcgcagccgccctggtggcggcgactctctcactggcctccttgtcttccttactggtgtcaacagcgtcggcagcaaccacggtagcagccatagccttggccatcacagcttcagcgttcccgctattgctggtactattggcaacagcgacagtggcgatcgtgttatctgtggtggctttggtggtggcttatctggctttgtcttctttgttggcttcctccatggctttctccccatttctggtgttcttggccctggtggtttcctccttcctggtgt

SEQ ID NO: 179375 - DNA, 390 bp, Zea mays
  Clone ID: MRT4577_95173C.1
aacaaaaaagtgacctcgattgaagaacaattgtctcacttatttgatgagcttatttacagaagaggcgtgtcccctgaatatgaaagatcaatttacaacttaatcttaggcagcagcaagtcaaggcgatagtccagaagggtcatgttctctcttgtataaaagaataatgaacaaaccacaaatttagtattctctcattcgaaggcgtctccctacaacttgctgcttattttcagcgtgtagactatctgcagcagcttaccccatctacatatctatattcaaactatactctgcaaacagtgcagtctacaatacaaaatagtgtttttggtgaccatatgagtgaactgctggacacggtcttagcatctcatttcctta

SEQ ID NO: 179376 - DNA, 403 bp, Zea mays
  Clone ID: MRT4577_95174C.1
accggagccggacagcgagcaccgaaagggaagttggcggcggcgcatatttccttcccatcttttcctgtcttccaattttgaactgaaaaaaaatacatttttttccggcgtgaatcaagataactataataaacaaggtatatatacgcagaggcagcattgcatttgcatttgcatttgccgtgggggaagaggtggaggaacctgattcctcaccgcccacatcgactctcttcatcagttcgtccgtccaggtcaatttgcttgagttgggtgggccaacaaagttatattctcggtgacgcggcgggaggagtggtcggcgacggcgacgagaagaaccaaaatcttgggataacggcgtaactgaatggctactggcttgtcggccactatttga

SEQ ID NO: 179377 - DNA, 535 bp, Zea mays
  Clone ID: MRT4577_95175C.1
cattggtacctcgaggcggccgggaccgtcgttccatatatcccgagacaaaccctctcctctattcgtcacccgccggcgccgctcccagtctccacgcggaagcagctgcctcgaaccgctcctagcctgatggtgccgacgccgaatgtgtcgatggacatcaaatgcgcgtcgaggacgcacgcgtaccaccgacgcgctttctgcatcatcgaggccaaaaatggatgcatattcctcaagggctagaagcccgccgtcgcagcataacccaatttctaccccgccgactacgatgacatctcacatgcccatgaccctcaagcctagtctgaccaagatcacgcctagcatcacgcctgtctacttgctgatcctcctcgcatgattcttcttgggaatgagagtgacgatcctatcacatgtcaactccgggctgatcctgagctctgcgccattgaagatgactggagtaccgatccgtcgtgacaaccatacctatgtgattgctacatcagcctacgccgacatc

SEQ ID NO: 179378 - DNA, 331 bp, Zea mays
  Clone ID: MRT4577_95176C.1
tctttggccgcccttcttttttttttttgtaggggtgtattgaacattttactatttgaacgagacacaccttagccatgaacaaggcgggctacttggtcttagcactagcacaatcctagccgaaacagaaggagataaaaacaggcccctgcgccttggaagtacggagggattagctaaaacaaccatccactattgatcattgcacaagtgcatagagcgaaggcagtgactcatgcacaccggagtagctatgcgccagagttcttgggcgagaacacgtagaaccgacagacattgttgcttgccccactgattgccatgggct

SEQ ID NO: 179379 - DNA, 1147 bp, Zea mays
  Clone ID: MRT4577_95177C.1
acgaatggtttgaaagtgatggcaattttgtccacaaaggactgcagtttggaagagtatatgggtgtgcccgcagcatcatcgttgctgaaagggttgtgctgcccgtccagcatgcatattggaaacaaggaaaactgctccaggtttacgtctgattgacaagtgggcagtactgattggtggcggaaagaaccacaggcttggtttatttgatatggttatgataaaagataatcatatttctgttgccggtgggattgcaaatgcaatgagatctgttgatcaattcctgcagaaggaaaaactcacaattcctgtcgaggtcgagacaaggacaatcgaagaagtgaaagatttgttgaagtacgctgctgagaacaaaacttcattgacccgtataatgttggacaatatggttgttcctcttggaaatggagatttagacgtttcaatgcttaaagatgcagttcggttgataaacggtagatttgagactgaggcgtctggaaatgtgacagttgatacagtgaagaaaatcggagaaacgggagtcacctatatttcaagtggagcattaacgcactctgtgacggcgcttgacatctctctcaagatagacaccgagctggctcttcaggttggaagacgcacaaatcgtgcttgactcccacagcattacgttgtggacgcaacgcacgcaagcaggatgacagagggaccagcgtggcaaaccagcttaaatagcttaataataacttggcgctgaggcctctgactgcaactacgtgggattcattcttcagtttcatgcacaaacgaccgcaatattgatcggatcagaataattggcaggacatacaggttttgttctagcaccaagtttgggagcttgcgttctgcggcagataggcaggccaggtaggtgtacctcctcctgggcccagccacagctcgacagcaggtaccaggtaggtctactgtaaacgggggatgtcgcactgaactcgcaataccaaggacaaaataacaaaaggtggagataagatgcttatcttactgccattggtgataaaagcaacgtcaactcacatctattatttattgtatcgttccatcaaaaaaaaaaaaaaaaaaaaaaaaaaaa

SEQ ID NO: 179380 - DNA, 1846 bp, Zea mays
  Clone ID: MRT4577_95178C.1
ctcgaggccggccgggctccaccagtccgggaccgcgccgtcatcaccatcacccaccatcagccgccaaagatcacgaaagcgacgcgcacaccccaagaaagggcggctccccactccgcctcgccgcacccctttcggcctttcttcctcccccacctcttgctcgcgtcccagctcccaacaccagtacaccacgcgccggctgcgagcgatgcccgcgatcccaacggcccccgccccctgccccgtgcgcttcctcctcgcccgccgccacagcctccacatctcctacccgtcgccttgctctaaccaccagcggctcccgccccgcctcctgcgcctgcccgctcgcccccgggccgctcccatgtcggccgaggcgcgggcacccgcgtctccggtggcgccgccggcgcaccccacttacgacctcagggccgtcatcgcgctcgccctcgcagaggacgccggcgaccgaggggatgtatcctgtttagccaccataccttctgatgtcgaagccgaagccacatttattgctaaagcagatggtgtcattgctggaataagcctagcagatatgatatttaaccaggttgatccatctttgaaggtcgaatggtttgaaagtgatggcaattttgtccacaaaggactgcagtttggaagagtatatgggtgtgcccgcagcatcatcgttgctgaaagggttgtgctaaatttcatgcagcggatgagtggcattgcgaccctaacaaaggctatgtctgatgctgcccgtccagcatgcatattggaaacaaggaaaactgctccaggtttacgtctgattgacaagtgggcagtactgattggtggcggaaagaaccacaggcttggtttatttgatatggttatgataaaagataatcatatttctgttgccggtgggattgcaaatgcaatgagatctgttgatcaattcctgcagaaggaaaaactcacaattcctgtcgaggtcgagacaaggacaatcgaagaagtgaaagatttgttgaagtacgctgctgagaacaaaacttcattgacccgtataatgttggacaatatggttgttcctcttgggaatggggatttagacgtttcaatgcttaaagatgcagttcggttgataaacggtagatttgagactgaggcgtctggaaatgtgacagttgatacagtgaagaaaatcggagaaacgggggtcacctatatttcaagtggagcattaacgcactctgtgacggcgcttgacatctctctcaagatagacaccgagctggctcttcaggttggaagacgcacaaatcgtgcttgactcccacagcattacgttgtggacgcaacgcacgcaagcaggatgacagagggaccagcgtggcaaaccagcttaaatagcttaataataacttggcgctgaggcctctgactgcaactacgtgggattcattcttcagtttcatgcacaaacgaccgcaatattgatcggatcagaataattggcaggacatacaggttttgttctagcaccaagtttgggagcttgcgttctgcggcagataggcaggccaggtaggtgtacctcctcctgggcccagccacagctcgacagcaggtaccaggtaggtctactgtaaacgggggatgtcgcactgaactcgcaataccaaagacaaaataacaaaaggtggagataagatgcttatcttactgccattggtgataaaagcaacgtcaactcacatctattatttattgtatcgttccatcatcacttccagaatccatttgtatacagtgtatacgaccggtttgctcgccg

SEQ ID NO: 179381 - DNA, 437 bp, Zea mays
  unsure (1)..(437): unsure at all n locations
  Clone ID: MRT4577_95179C.1
attgagtaccaactagtcaacattagaaagcacaatagntgtactcaacaagtggcnnagctaaaatatttttgctctcncnnntatgctccttcggtncatttctgcaaangtgcctgcgtacgnngcgactcatttttctccaccaatggcttcacatagctctctattagcttccacttcttcccccgtacctctcaccaacggtgtcttcggtatgtgaaaacccaatcttaaccctacggaccaacggaatcgactggctttacttatacctgtctccatataccataacagtcttggatatgcaaatagcacatcaatgtgacttctataaagttatacatttatttttaaaatctacttttctcaattatacatatattttagaattctcattgacttcttaacattctcctcatgctataatttaatta

SEQ ID NO: 179382 - DNA, 392 bp, Zea mays
  Clone ID: MRT4577_9517C.1
gcgcgctgcaagatgcacaccggggcggatatgatccccaccgagaagggggtcgacccctccgaggttgacgacgcccttgcccacgctttctttgatctggagaacggccaccaggacctgcacagcggccggggggagcctgtgcatcgacactgctatccagatggctgttaccgttagtatgaaggctcgctgtgcttcacgccccatgccgcctgcgcgcggccttcgggacgatccgtggcagactcctcagggagctggtgaagaaattcatcgcccagggtggggtcgttggcgctcacggagggttgtgaggccacccatcactggctcagcgtgttcttacgcgctgcgcaccgatgactcttgactgctgttgcacgacg

SEQ ID NO: 179383 - DNA, 355 bp, Zea mays
  Clone ID: MRT4577_95180C.1
atattcgttgcgcttagatctcccaccctctgatctctcccgaggcgcgagcagaaagacgccggcgggcggctccggcgaccggagactctgcggtcttcgctccgccctttccatattgctaccagagtgaaactagtctgttggtggaaatggccagtacagcatgcttcgtgattgtaagtaagaacgacatcccaatctatgaggcagaggttggatctgcacccaaaaaagaagatctggcttatcaccatcagttcatcctgcatgctgcgttagatgttgttcaggacctagcatggaccacaaatgcaatgttcctgaggtcggttgatagatttaatgaccttgt

SEQ ID NO: 179384 - DNA, 182 bp, Zea mays
  Clone ID: MRT4577_95181C.1
tcgagcaggagacaggctgggtagtggaatctaatgctaccaggatcggatcaacggcttgtgcgcttcaattggcggccgccgcattaaggttgtggtgaccggccccaaggggtacctgggaaggcggctgtgccccgcgcttgccggcgcgggccacgccgtgcgcccgcttgttcggc

SEQ ID NO: 179385 - DNA, 492 bp, Zea mays
  unsure (1)..(492): unsure at all n locations
  Clone ID: MRT4577_95182C.1
gtcctcgtgtgtactgtgagaaccagccaatgcttcccattggcctttcagacatcccaggtgaagccatggtgaagctctactgccccaagtgcatggatgtgtacacacccaagtcatcaagacaccatcacacggatggcgcctacttcggcactggtttccctcacatgctcttcatggtgcatcccgagtaccggcccaagagacctgccaaccagtttgtgcccaggctctacggtttcaagatccatccgatggcctaccagctgcagctccaagccgccagcaacttcaagagcccagtcaagacgattcgctgattccctcccccacctgtcctgcagtctttgacttttcctttcttttttgccaccctttcaggaaccctgtatggtttttagtttaaattaaaggagtcgttatcgtggtgggaatatgaaataaagtagaagaaaaggcaaannanaaaaaaaaaaaaaaaaaaanaaa

SEQ ID NO: 179386 - DNA, 381 bp, Zea mays
  Clone ID: MRT4577_95183C.1
tcgcggacgcgtgggttcaagtcctcctcctcccctggcttcttcttcttcttgctcctgctgctcctcttctttcttcctcctactcgatccgtctccactacctcgcacgtacggacggtacagcacaccacccctcatcaactgcccccggccccgaacccagagctagatctatatagcctgcagtcctggagcttgcgagcaaaggcatacgtacatacatacgcgttcgccgtgtcgggccgtacgtacgttgtcgtgcgatgggtgcggcgccggcggcgaggaggtgcgcgctgctcttggcgctggtggtgctggtcgcggccgcgggcgagcgcggtggcagtggtgccggcggtgaagcgggggcggagc

SEQ ID NO: 179387 - DNA, 502 bp, Zea mays
  Clone ID: MRT4577_95184C.1
gagtgtatattgaacaacaagttacagcgagagcttcgactcaggcagaaatttgggaggctctggacaagaccaatgcagttgcgagtgttatttcaactctacagaattacaccgaagatgtccatccactgaactatctgacagagatgatatctctgctaagaagtatactgtgtgatttggccttcctcgagataccatgtatggagcaatcacaacttgatggccaaactagcacattactgtcttactgctgaaacaacagtttcagctaaaattcttaagctatatgctgctttagctttatgtggcaatggagcaatggtccttcttaagaatgaagagctgatcattaagactggtaaccttatgggaaaatctcatcctactgttactaggattgaagcattgaggctctgccaggtttttctgagatcttcaaggggctgcaattggttgatgactgcacatggtcagcctattgttcaaggcataacca

SEQ ID NO: 179388 - DNA, 433 bp, Zea mays
  Clone ID: MRT4577_95185C.1
cccacgcgtccgcacaactaaacccctcgccgccagcgcctccgaatccggcgatgtcgttggcgtcgacgcctagccggccgcagcgccgcgcggagtcgtcgcggccggcgtcgtacgatgagtccctcctagacgccgagctgcaggtctaccttggcgacgccgcctcgcgccgggtgcggaggctgcgccggctctcggcggaggagcgcgagcgggagacggagacggaggcgctcatcgcgctctccctgagatttcccatagacgagctgctccccgaggagcggcccttactgcccgcccacatcgtcgacacgcccaacgactacatggtcgtgcgcaacacacatcctcttctccaggagcgcatactcggaggcgccgatgccgatcgagagcgtactctagaccggcataggcaactacg

SEQ ID NO: 179389 - DNA, 415 bp, Zea mays
  unsure (1)..(415): unsure at all n locations
  Clone ID: MRT4577_95186C.1
ggnaccgggcgcgccccctctaggcggccgctatatttttttctctttttttttttttttaaagggtacatcatacgtgggttaccaacaactttggggagctccaaaaagggcacagggattaaaaataaaaattcattgccctacttaataaagcattactagtaactttcataaaaaatgtacaaactttgttaaaaatttatcaagccttcaaatgatttggttacagatatttataatacatacatttaaaactatttgttaactgatacaatggaatatgattttagaaaatgactcaccaaaagattccaaaaaacacccctgtgagctttcacaatctgaaacggcaaaatgaggtaaccaaatgtaccaacagggggacaaacaaacagctctctaatgaaaaggc

SEQ ID NO: 179390 - DNA, 141 bp, Zea mays
  Clone ID: MRT4577_95187C.1
atagagggcgctctacgcttgaactctccttggttggaaaccagtacagtgggtgaatggagcagaatgatgcttctactcggtggacaccctgggctgagcagcgcatcaactcccctgaaccctcctgaactttccgaa

SEQ ID NO: 179391 - DNA, 721 bp, Zea mays
  Clone ID: MRT4577_95188C.1
aattcggcacgaggcctcgtgcccatccacgtctctgggccgcggaggccatctttcttgtgcggcaagaagggatggcggccgggagaagaggccgccgcgccgcaagcagagagagaagagaagccgcggttcaacgaacgtcggcggccattcacagccggtcggcacctaccccctgccccacggttcaaccaaagtcggcaggttcttccctccaggcaagataatagtagcacctttgagcactgctgctgaaaatgagctgcgccgaattgccactgcctgtgaccgtgacgctacctgaaaccccagctgtgaacggagaagggtcatctgccgccaccgccgccgctcctggtgccgggtcgaagccgaaaaagaagatatgctgcgcgtgccctgatacaaagaggctgagggatgagtgcgtcgtcgagcacggtgagcctgcttgcaccaagtggatcgaagctcacaagcgatgcctccgtgctgaggggttcaatgtctgaaactttagtctgtcgggctcgctttcctagaaccgtaactttgtttaggaaaatagaaatcggttagaaaaaaagagttattaaaccagcactaataatgccttaatgccaggagttatacagcaagggaaatcacaatgtgaaaactgtgttggcgatgaaacgtatatttgagaatgagaaaaataaaaaataaaggggcggcc

SEQ ID NO: 179392 - DNA, 1384 bp, Zea mays
  unsure (1)..(1384): unsure at all n locations
  Clone ID: MRT4577_95189C.1
catatacctcgcctcgaggccgggccggccggagagaagccgcggttcaacgaacgtcggcggccattcacagccggccggcacctgcccccctgccccacggttcaacgaaagtcggcaggttcttccctccaggcaagataatagtagcacctttgagcactgctgctgaaaatgagctgcgccgaattgccacctgaaaccccagctgtgaacggagaagggtcatctgccgccaccgccgccgctcctggtgccgggtcgaagccgaaaaagaagatatgctgcgcgtgccctgatacaaagaggctgagggatgagtgcgtcgtcgagcacggtgagcctgcttgcaccaagtggatcgaagctcacaagcgatgcctccgtgctgaggggttcaatgtctgaaacttgtagtctgtcgggctcgctttcctagaaccgtaggaaatggaaacattagaaaaatagagttatcaaactagtcataataataccttaatgccaggagttatacggcaaggggaaatcacgatgtgaaaattatgttggcgatgaaacgtatttgagaatgagattgttgaattttattcgctaaaaaaaaaaaaaaaaaagcagctacggcctgccaggagttatcagaagggaacaagcttcctcctccttcatcttccctgccatgctgcaaggtctatatcgactgatgcaaggttgaagtccgctgctcactagctgctgcctgtttggtggttccagtaaggcagtggtatgcggtatgctatgttaggttgagcgacccagcgaatttcccacacatctggtttgccttggttctttcgttgcgcgacggggtgcaaattcaccgttatcttgtaacgatcaatgaatttcgcaaaccatgaaacgaacggtatgcttttatgcctagtcttaggtttttcgttttctggttgtgatctgccaacttcagttcagactactggttagtactgctgacattttactacaaacagtttatccaattgttgctgattattgaaaatatttgccccggtgaggcataataccgtcccgtccactcttataccagcagtattggtagttctttaagatcataaaccatttttacagactaacacaagtcttctatgtacactttatcatcactcacacacacttaagaagatttttcggccacttatcctaagattaatctgaccaaacacgtttaattaagacagaggtttctttcaatacagacttccaaaatgaagatatatcttggtagtatgggtattctatcaatcatattanaccttgagatagcatatcacaatccactnctttagaagattgatgttctcatcttttaacccctaacccc

SEQ ID NO: 179393 - DNA, 1144 bp, Zea mays
  Clone ID: MRT4577_9518C.1
ccacgcgtccgggccaacggcatagccggatgcaatcgtgaagatgacgatctcggtggtgaagtatcatatgagtctgcttcgaagaaatgtaggtacatggaattggatgatctagtcagctgggagatgctgcgttcactctccctctggttccctgccggtgaggtactctccccactcatctctgctgggcttgatagctgccctgttctagaggagatctcaattaaagtggagggtgattgccggacatgtgcacgccctggcccattatttggcctgagtgatcttgcaggtttcccagtgctggccaagatgaagttggatctgagtgaggcagttggctatgctcttactgcaccagcaggtcaaatggatctctctctgtgggagcgattttatttgcagggtatagattcactaatgactttgtatgagctggattattggcctccccaagacaaggaagtgaaccagcgtagcctaacactgcccgccgtggggctgctccagggctgcgttggactcaggaagctcttcgtccatggcaccacgcatgagcatttcctgacctttttcttgaaggtgccaaatctgagggacatgcagttacgggaggactactatcccgcaccagagagtgatatgatgaacacagaaatgcgagccgagtcttggctccggttcgaggtgcagctgaacaacaggctaattgaggattaacggtgaatttggtgagctgtgagagcatcagatgaatacagagaggtgctgatttacttgaaccaagtggagttgatgccggggtggtgctgtgcgatggatgatcacggaagtagcaagggtagctgccgtgcttgtgtatccgacaaatatcggtgatctttactagttgcttttccttttaaaaataagagtgtatgataagggagttgatgcagaattcagatatttgcatgagtttggacgataaactagaatcgagagaattttgcagggatgcttttttccctcccacttttgagctgagtccagttgaacaccgaccggattaagtggcaattaatgaatggtcctgtgcgctgtaacaatctacgtggttctgtaaaaacaaattaaaaaatgtcatttttgtggtctg

SEQ ID NO: 179394 - DNA, 411 bp, Zea mays
  Clone ID: MRT4577_95190C.1
ttgagcctagaggagtgaaaggcagccaagaagcatgctatcttaaatatctgggaccatgagatgactgagaacatgaaaaacactactgtccgatctgggactatgctttacaatgctcttcatagggataagagtcgagactcgcactgacatacttgatatcctcggacaattgcatgagtgtgagatgatggcgatactactggtggaggctgaactctgcatatatgaagaatgagctattcgatctaccgctcaaaaaactaagctatcactgatctggaaaaggactacgtttacgctgatcagttgcgatctgaagatttgacacatacctaaacacggagccggttatgaagacatctgcccataatcattgcccgagctgacactgaatgtccttctcat

SEQ ID NO: 179395 - DNA, 183 bp, Zea mays
  Clone ID: MRT4577_95191C.1
accctcccctcccgcagccagtccctgctgtcctgccctcttccgccgggtcgtcccctcctacgttcccctctccctcggcccgcctagatctctccagcatttgccgcgactcgtcttgatttttgctcccccatcaggactccaatcgggcgcacaaaggaaggaggggttagccatccc

SEQ ID NO: 179396 - DNA, 342 bp, Zea mays
  Clone ID: MRT4577_95192C.1
gtcaattaaaagtttagactgtcacgttttcataccaatgcaaattatcatctatgatgacagtgaaggccaaaagcctggatcctatgtggtgtgtgctctcactggacatattgccgagctctcattaatatcacatggattttcccaagatggtcctgttgaaactgatgaattcatgagcttcgagaaacctacaagtcctgcttttaaggtgaaaaaacacacggatcttgttgatattacaccagctgtggactccgctttgcttatgaatgagctgcaatgaataggattaatcgtttggcctatcaactattctatatatggtggaattttgca

SEQ ID NO: 179397 - DNA, 280 bp, Zea mays
  Clone ID: MRT4577_95193C.1
aatccgaaacagccgcaatcccaccgaccccaccaccaatcaccctccatctcctcaccactacctctcatttctcttttcaataatcaagataagccgtaataataataccgatagtaatcaaaattctctagattatctctttagacgcaataagccccccaaaccagcagtggcaccagctgacagtactccacctattgaaaaaccatctactgacaagactgatgcagccaagcagattactactagggttaccgaccaaaccaataactaacca

SEQ ID NO: 179398 - DNA, 277 bp, Zea mays
  Clone ID: MRT4577_95194C.1
ccccccaaggtttgtttaaaacggaaatggggtttttttctaacacaatgtggttgtgaagaaacaaaacttcaccccgttattggggcaataaaacatgattttcccaatccaacttaaatggtttaaatgaccccattaggggtgaaacaaggacactaaatgctaagtttttgagaaaagttttaaaaaacggcgtctgggggttccgtctttccattttgttctactaaaagaacattttggttttgattggggggggtttcctgtccaaaaa

SEQ ID NO: 179399 - DNA, 451 bp, Zea mays
  Clone ID: MRT4577_95195C.1
gggtacctcgaggccggccggctcatccttggcacctgctcaggaggtggagttttcaggtggcggtgtaaatttgggttgatttgcgagttcttttcatgcccagcttgtcttggagggaatttaagtaaacaaggattgggattcaggcttggtggttaacattatgttctaatggttgtgatggcccacgacgtgaagcataactggtttctgatttcgaaaaatgttatcaatgattgcagtcatcaaaattggactgggtttgtagtattagattcagggtgctccgaataatttagagttttctatttttttaggattcttatatttgcacgttacaattttcctatattttttatcgggtttgatataaaggataatgatgtacaagaatttcccttgtatttatgaagcattagctatgaaaaaaaaaaaaaaaaaagcggcc

SEQ ID NO: 179400 - DNA, 251 bp, Zea mays
  Clone ID: MRT4577_95196C.1
cgaggatgcattgaagggcgagcgcagggcactgcagtgcacgcatgaactgacctgacgacgacgcgcgccacagtccatagcttctcagtcagacatcgcaatggaggtcgcttccatgctactggtgatggtttcgctagagacactgcttctcgtacgtggcgccggtgacggagcggctatccgtctgaccagcgatgtcggcggcgttgatgcagaccttgagacggagatggcgaaggcgatgg

SEQ ID NO: 179401 - DNA, 394 bp, Zea mays
  Clone ID: MRT4577_95197C.1
ggaagacacacaacgccaccatcatctccgccaatgacagtacttttacaaagtgggcaaggaaaacctacctgtcagccttcctcacctgtcacagcagatttgttcaatgcggcgaaaagtttggagttcggatccttggggccattctcattgggacttccctcaacctcgacacagtttgaggaagaattcccagcgcttcctactagaaagagagccgaaggccccatttcagtggcgcccagcgctaaggctgttgaaaccaaaagcaggtcagaagagagtgaagagatgttccgactgagaaatgaatctgatttccctcccctccaagctggctgccgctgagactgacaggacgtcgagataatccatgctaatcgtaatggta

SEQ ID NO: 179402 - DNA, 337 bp, Zea mays
  Clone ID: MRT4577_95198C.1
ggcgattgggttttaccgtcaaatagtatatatttacccgagagggcgcttcctattctagtttagtttattaccggtcggccatcggccgtcgatgaagctcaggcatcatgtaatggctaatctacctaatcagtgcctactgccttgtcatcactcagatcgaaaaaaacaagcaataacattgactagcgaataatctaaaccagcagagcaccgcacctgcatcacgggaaggatgacgaagaagtccagcaacagccccctcctggacgccgcgtcctcggggagcttgcgcgcggcctcggcgaccgtatagtgagtcttcttatagcct

SEQ ID NO: 179403 - DNA, 413 bp, Zea mays
  Clone ID: MRT4577_95199C.1
cccacgcgtccgtgcagatttctgttttctaaaaaaaaaaaaaaaaaaaaaaaaaaaaaaaaaaaaaaaaaaaaaaaaaaaaaaaaaaaaaaaaaaaaaaaaaaaaaaaaaaaaaaaaaaaaaaaaaaaaaaaaaaaaaaaaaaaaaaaaaaaaggggggggccgttttaaaggatcaaagtttatttacgcgtgcttgcaaagtaataatttttttttgggggcacctaaattaaattcattggccgtggttttaaaacgttgggattggaaaaaccctggggttaccaaattaaatcgctttggagaaaattccctttttgccaggtggggtaaaaacaaaaaggcccgaaccaatcgccttttcaaaaaattgcccaccttgaatggaaaatgggaccccccctttatcg

SEQ ID NO: 179404 - DNA, 1138 bp, Zea mays
  Clone ID: MRT4577_9519C.1
gccggcaacgtcaccaccgacggcaacactccccctccctcagtagtcaaccccagcgtcccgcgctcgcccggaagcacatcaacaccagacagcactacagtctacagcagcagggcaccaccaccacagcaatgcagcagaacgccgcccgcctgctggccgccgccgtggcctgcctggcgctggcgctggcgccatcctcggacgcgcaggggacggcggtgccgtcgtgcgcggcgaagcttgtgccgtgcacggggtacctcaactccacgtccacggcggcgcccgcggcggcctgctgcgggccgctcagggaggcagcggccaacgagacggcgtgcctctgcgccatgctgctcaacagggccgcgctgcgggcgttcggcgtggcgcccgagcagggcctggtcctcgcccggcggtgcaacgtcaccaccgacgcctccgcctgcgccgccgccggaggctcagccacgggcggcagtactgctgcatcttcagcttccaccggcagcgcttcctcctcctcctcttcttcttcagtggccaaaccaacagccaacggaggcggcgtggcgcgtcgcctgagcatgactggcgcgtcctcattgctaggcttcagtttcatctggtggtgggcggtcatggcgtaggagtatctgccgtggcaccggcgattttcctggctggatccagaattccagacttatatgtactactgttgagtagcaggtttcattgcttctttttatatataatatgccctgttgtaccactaccattgatgccgtgagcagaacaagagaaaaaaattgtcaagaacgatgcaaacaaccagaaggaaagaacgtactctcattttaaataattaatagattcattatgtttttatatgtgtctagctagattcaacatcatctacacataaaaccaagagctaaaataaatattattttgagacggagggagtacatgtttcgacatcctgagcaactccccctgatgtcaaaaacctgataagatcgtggcaatgcttctccaacatcagatgagcaagtctattcgcttgactttaatctgtaccggcttctactacttttactttatgaatcacagctagctgtaatagatt

SEQ ID NO: 179405 - DNA, 632 bp, Zea mays
  Clone ID: MRT4577_951C.1
ctcgcagacctggtatggctcgcgtcctgcgcacctccctcgtcgcgccctcgccggccggcgccgcgctccacgagcgctctctcccgctcacctacctggatgcgctgtggctccacgccacgcccgtcgagcgcgtcttcttctaccccgacgccaccagcgacgtcctctccaacctcacggactccctgtccaatgcactcgccgcattctaccctcttgccggccgcctccgcctcacccccggtgcgcacaaccgctacgagctccactaccagccgggcgacggcgtcaccttcaccgtcgccgagcaccaccacgtcggcttcggcgagcttgccacggacgacccgacggaggtcgccaagatcgtgccgctggtgccgccgctgcccgaaggcggcgccgtgctcgccgtgcaggccaccgtgctgcgcggcggcctcgctatcggcgtgaccgttcaccacgccgcctgcgacggggtgtcctcgacgcacttcctccgcacctgggactgggcggtggcggcctgcagcggtgcgagcgcgtctgagccgccctgcgtcgaccgatccatcatccgcccacgagacgacctgtacgacgctatcacagtgtacaggctg

SEQ ID NO: 179406 - DNA, 121 bp, Zea mays
  Clone ID: MRT4577_95200C.1
gatgaacaaagagactatttacataaaggagaacaggaggggcacaacgccttttccccttgggggcactcgaggtgcgtgagggggatatttatggatggatactttttggggctataac

SEQ ID NO: 179407 - DNA, 419 bp, Zea mays
  Clone ID: MRT4577_95201C.1
gagaaaaaatggatattattggttgattcccttcttatttttgtaatgataacatctacgattatttctgttgggagcgctcttacatatgtcataacgttgcaagaatgaaacgcaccacaggtaaatgaacgttagttattgagagtgaacagggaaaaaaatgaactttggacattcctaatggtcatgccaggttacattgcgcggacacgccacttttatgcatttcaaaccggtgacttcgctggtgacctgtaacaccgccacatagaaggcatctacactagctaatgcaaaatagctatcgggactgggaactttcaagtctaaatctcgcggtaacttgtacaaatacatattgtactagctgaatggtgggtggggttgttcaggcgtcttgagctgccagatccttt

SEQ ID NO: 179408 - DNA, 424 bp, Zea mays
  Clone ID: MRT4577_95202C.1
gcacacttggcactccaatcttgccctaccaacgtgggccacacgtgcatctttcgctgatttgtttgttcctttctttgtccgctacgccaatggaatggatggataggtaggtactgttggtaggttcatgctgctatgctggctactggagacatggccaattgagattaacggagtttaatccgtgtgattcaattcaattcaatccaattagatacaaatgcgattagatgaccgagcgaccccgttcagcttcagcggagcgaagcaaattctacatctcgcagccaaagaacggaaaccaagaacagagcagccaaggagaggagggatcagcacgtaccattcggatctgccggcgccaggatccacccgagacgtacggccaaagatacccgcagttcgccacgccacgccgatc

SEQ ID NO: 179409 - DNA, 126 bp, Zea mays
  Clone ID: MRT4577_95203C.1
ggctatacgacaactatattgtattgtatgttttctgaagtaacactgtatcgtagattagcattctcaattagcataatcatgctatgtatatgatcgactactgggcttgtgagggaatgtgtg

SEQ ID NO: 179410 - DNA, 787 bp, Zea mays
  Clone ID: MRT4577_95204C.1
gggtacctcgaggccggccgggaccccttctccagccttctctactcgagcacctctcctctctcgatcctcttcctaggtgcttatatctggtatcagattcagtctcctgatccgcttgctgttgtgccacgacgaccccgatcttcgacgatggagcaatcaagacgccgccatccgcaagctgctcgacgaaatgcgactcatgaatgcgcgcctgtccgagcgcatcagcggatgctgcgacggtgtcgagcgctgtgaagagccctgtgacgagacgtccatcttcgacgagggtcccatcttcgacgaggagccctgttcccaccgctgcttccttgattcggatccagactctccctgcgattgggtcgatctgccctcggtcgtccttgccgcggccccaggctcccaggacttgcttcctccaccgggcatccacgccgtgccgagcatcaacacctcgatcgtaggcgcgcgccggtccaagatccatgcgcgcaaggtccgtgacgttcgtctcctccatgtctcctcgccatcgccggaccaggagctcgacctccccatcggcaagcatgtacctgactgcgccagcgtcgacgggaagtcgtgcttgcgggcatacacgacgacgggcatggaggacgaggtcggccacttcggcctcgacgccaaggagcacttcctggacgagcactccaagtttcccaacaatggactcatgaaccagctcctgggacccgctcccactcgatccttacatcgacgcggctccatcctc

SEQ ID NO: 179411 - DNA, 453 bp, Zea mays
  Clone ID: MRT4577_95205C.1
ataacttgacttgggatgctgtgacaggaccacatcgcatataggatacgtatcagaaaagcattcacatgccctgcccagccaagttaactccacgattaacgtacataccttacgcacagctccaagacttgtttagtgcatagtatacaccttaacgagtcgagtcttgtaccagcccaacctatccccttgatttagaacccgaccctatccacactactcttttcttcactccacgcaccgagctgatctagtaaacaagcgcagcgctgggttggctatcccttgcctgggcgtcgatctgcactccaaccgcatcgtctccaatctatgtgatggtggcgaccttaccgccgagcttggcttgtatagatttgatcacggcacactgcagcatcaggttaaggcaacgagggcaccgtacagttcaggtactggactccccggtgg

SEQ ID NO: 179412 - DNA, 322 bp, Zea mays
  Clone ID: MRT4577_95206C.1
ggggcaaccgcttttacatttaaaattttgccaatacaacattttgcctttataattgggggccaatgatctgtttttttgataccggacataaacatttacataacatacttcagacatttattttcctttacatgccaaggaaaacgctgatttttccaacttcacaaaaggcccttgaacgtccaattaaacccgcagaagcccttttaaaattttagttggattaaaattggccgggccctttttaggggcgggttcccttttacccataaaaattttaaaaaattcagggtttcttttggacccccctttctaaagg

SEQ ID NO: 179413 - DNA, 294 bp, Zea mays
  Clone ID: MRT4577_95207C.1
tcgattgttggcagaggcccaaatcatctttgtggtgaaagcatggatcatagagccgagcctgatcaagcacagctcaatcgagacgattcccctggacaggctcaagctcaagctctcttcgaacttaaataggacagtgctggtcaaattcacgaggctggaaaatacagtgtgggtgaccacgcagccaatctaatacatactgtccgtactggttatggacaacgtcaagcggaagcctaagcgcacgacctattttaggaattctaagggcattcacgagaaccctaa

SEQ ID NO: 179414 - DNA, 303 bp, Zea mays
  Clone ID: MRT4577_95208C.1
gaacaattcaatagaacagttgatagtaaagcagaccaagaagcatatcagcactcctgctccccacgattcctattcggtcctttcagttagcagttctggaaagtatgttgcaattgtatggccagatatcccttcttttgctgtatacaaagcaaatgattggtcagttgttgattcaggcacagggaagctttttgcctgggacacttgtcgagacagatatgctctggtagagagtgcattggccccaagaatgccacttgttgttaaaggtggttcttctaaaaaggcaaaagaagc

SEQ ID NO: 179415 - DNA, 760 bp, Zea mays
  Clone ID: MRT4577_95209C.1
gtagcggagtatgttaaacaaaacatgttcaataatcttgctagtcatccaaagttcatcagtgatactaaagtcgctatagctattgctgtttcaaaagatcacaaacctgatcaaactgatgagcggcagcgtattgaagatgctggaggttttgtgatgtgggcaggaacatggcgtgttggtggtgtacttgctgtttctcgtgcttttggtgacaaactcttaaagcaatacatagttgtggatccagagatccaagaggaagttgccgatggcacactcgagtttctcatccttgcaagtgatgggttgtggtctctaatgaggaagctgtcgcgatgaccagatccattcgggacccataagaggctgtgaacaagctcctgcaagaggcctacaagagagagagtagtgacaacataacttgtgtcgttgtgcgcttcttacatgggcagggtagcagcggatacgcttaaatcatagcagtaaaaaatcactgtacgcagtggtgtgatatatgtgcattgattgattttccgaggttgaagtggagaaaagtaagggtgcgtatattatgatgagttgaactcggaaatgtgtaccctgtatattaggttagacaataatttcccggttgatgttcggggtctgaaggtagtgtcgaacgcatgtttgagacgtccgtatggtgcttaaatatgatgattgttaaagagatgatcgtctatagttgagttcgtgtgcttaaatatgatgc

SEQ ID NO: 179416 - DNA, 512 bp, Zea mays
  unsure (1)..(512): unsure at all n locations
  Clone ID: MRT4577_9520C.1
ccgtctctcccgcctcctggaccagnaccgccgccaccaagcgttcgctnggggtcctgctgcaccaccnccatcaagagggccagcagggcggcngcggcngcggcggcggcggcgacatggggcgtgacggcggtggcggtgtcgccggcggcatgtctgactcggtgctccgggnggtgctcctctcctacttgggcgggggggtgtggttcttcctctccttctccggcatcgtctaccgcaggtgcgtcctcggcccatagatgtacaactggcccttccccgtctcgctcaccatggtgcacatgggtttctggtcatccctcgccgtcgcgctcgtccgcgtcctccgggtcgtgggcctccccgcatggtcctccgtggcgccgcagtgctgcgcctgctccgtcgtccccgtgggggcgctctacgcggtgtgggtctgggtttgcacctcaggctacatctacctgggcggggtgttcctcccgatgcttaaggcgctgttg

SEQ ID NO: 179417 - DNA, 264 bp, Zea mays
  unsure (1)..(264): unsure at all n locations
  Clone ID: MRT4577_95210C.1
gggttaagctgctgcttggacaaaaaactaaatttttaggaaaccactcctggtaggcgtccgactgccatccgatgggcgtgtttgctttctattcttatcccctggcgaaatcccaaggtgtgagcttgcagcgatcgttggtcaccgtgccacggttgatggtctcttctgagcctctttcgatgctctctaggccaaaggacgagtctctctttcttttctgtgcctccagggattggnggcgtttgcgggatggagttc

SEQ ID NO: 179418 - DNA, 1706 bp, Zea mays
  Clone ID: MRT4577_95211C.1
ctttcagatggcttatagccaagtgttggttaaattgagtccatgaaccatcaattatatccatgacgtgtagacggtatgggaatttagcatctgaattttctcgaaaaaaaaaaaaaaaaaaaaaaaaaaaaaaaaaaaaaaaaaaaaaaaaaaaaaaaaaaaaaaaaaaaaaaaagggcagccaaaataaaggaaaccaacataaaaaacccatacatgcaaaaaaattaactttcttataaaaacacttccggccgggacacacaaaaaccccaatgcgagcgcccctggcttgtcggcgtcgcctccttcagccaaaccctagcttgcatacgcgcccgaacaaagcttcgtctgcgaggggcgtcctcctgccgccagaagctttcaggagcatcagcgatggtgtggttccaatgcgaggactgtggcgagaacctcaagaagcccaaacttgccggccacttccgctcctgctccgcgtacaagctgtcatgcatcgattgcggcgagttattcagccaggacaccgtgcaggggcacacgcagtgcatctccgaggccgagaagtacggtcctaagggacagaccaaaccatccaatggtgcacagggtaaggcagataagccaaagccaaatgcagatgtcgatatcaatgttgggctgtcgacacggcctccttggttctgtagcctatgcaagaccactaccacaagcaagcaaactctcttactacatgctgatgggaagaagcatagggcaaaggcgaaagccttccatgtgtctcagaaacaaaaagatggtgcagaacaaactccagatgtgaaggaagctggagttgtacccacaaaagaatctgctcaagtaaatggtggcgtgagtggtgatcatgaaagaaatgaagataaagatgctgggaaaaggaaacgaatggatgacatgaccatagagccaggtaacacaaaaagacagttgacacagtctggagatgagaagtcagaaaacaaagcgaagagtaaggccgatgaactagcaagtggtactgactgcaaaagtgttcaaaagcaaaagatcaaatggaagaagattattactaaaacattgaaggcgaacgcagatggagttatgaagctaaagaagctacaaaagatagtctccaaggagcttcaggaatgtggtgtctccaaagacaaggaggagctccgtgctaccttgatggataaaatagcttcaagttccagattttctgttgatggcaagaatgttagactggtggccaagaatgaagaagaatcttagaaagaggttgtcagtcatttttttggcattgttgctggtttcattctttggtgtcaactttcagatggcttatagccaagtgttggttaaattgagtccatgaaccatcaattatatccatgacgtgtagacggtatgggaatttagcatctgaattttctcgacaaccgttcaaaagtgaaatgtttactctttatgctgtcaagcaatggcaatgatggttgatagtggcggcgtagtcgcaggggagagatgagagatgatacaaataatgttcattggatttgagtaagggagaagatgttatgtagtgctctgaaccatcgattttgatggtgtgataattctgggtgcaattcgtttggtggatttagtaaatattatgagttgagtgatttggttgg

SEQ ID NO: 179419 - DNA, 240 bp, Zea mays
  Clone ID: MRT4577_95212C.1
acaaaaccatagtttataataacatggtttaacgtatgtcataacaaaaaaaaagcatactccacataattgcaaaaaaataacagtcctgagacaggggcttttaatttcagggggggggggagacaacattgagggtgtgtgcagaccacaaatccgtggatactaaaactacctttgttttgacaaaatcataaagaagaccccacagttcttatttacgcccctaaacaaagggga

SEQ ID NO: 179420 - DNA, 377 bp, Zea mays
  Clone ID: MRT4577_95213C.1
aaaaagcatacaaaaacaacatacaaaaaaactaacaataaaagaaaaaatagataaaaaagagtggaaataaaaaaaaaagagaagggaaatggcaaaggataattcgattcttcgacctcaacacgggcgccaagatcccttcagtcggcttgggaacttggcattctgatcctgtccttgttgctgaagccgtcgcggctggccatcaaggttggttaccgccacattgattgtgctcaaatctatggcaatgagaaggagattggctctttgttgaagaatctgtttgaggagggtgtagtgtagcgcgaggatttgtggattacatctaaactctggaatactgatcatgcttcataagatgtaccactggc

SEQ ID NO: 179421 - DNA, 740 bp, Zea mays
  Clone ID: MRT4577_95214C.1
tttttttttttttttttgaaatttcccaaatttatggaaacaaagttatattttcaaagcacttatcttgtgctgattattgatatttgtgtgggccgagattggactataaagtgaatacattcgaaccatataaatgtcaggcgaatgtaaaatcgaagcactgtactgggaaatagaacgtccatactcttgtcagttagtcagatccagtagctacggctggaaacacaggtacacaacatgtactgaatcactgattaagttgtacagtacttgcttggcccgcttgcagtgactttgaaaggataatggtggcttgtttgaaaaacttccaagtcgatcggagaggaacgttccagccataaaccatctctgcaggtggcgacgaggagcgcagagatccagcgagggcgccgccgtgtggcccggtgcggggtgtcgagtgcggctccgcgcagcctggcgtggggcgccgccttgcggcatggagcgcggtggcgagatcagctccgtgcggcatgcaacgagcagccgggtcgtcgagcgtggctcctcgcggcctggagcggggcgtctagcatggctccgcaaggcctggcgagggccaccgtcgactgtcgtatgacctagagcgaggcgtcaagcatggctctacgtggcttggtgaggggcggctcaaatcctgctatcctgggtccagcggtggccaccctcggtgagaagattcggcagtgtga

SEQ ID NO: 179422 - DNA, 854 bp, Zea mays
  Clone ID: MRT4577_95215C.1
gccggccgggtcgggcagagtcacgcacggatgctccctatataacatggccaaggactggccagcctggaggagccaggcaccacgcacggaccactcggtcccatgtagctagcagctagcactcactagcagcgaagagtgaggagtgagaggacacggtaaccccagcgggattcgctgctggtacaccaataatcaagcagcgtggcgagagagagagagaaaccgagccacagagaagagggaacgcgaagctactggcgaactgacataacacgcctgcgatcggtagatagatctacatcatctacaccgccgaggcgccgacaaccacttggcgaccatgagcacgggcacggacgccgtcccggtcgccgtggcgccggcgaagcgcccgcccatcaacaagtacgccttcgcctgcgccctgctcgcctccatgaactccgtcctcctcggctatgacatctcggtgatgagcggcgcgcagctgttcatgaaggaggacctcaagatcacggacacgcagatcgagatcctcgccggcgtcatcaacatctactcgctcttcggctccctcgccgcgggcctcacctccgactggctcggccgccgctacaccatggtgctggcggccctcatcttctttacgggcgcgctcctcatatggtgctgatcgcattttctacccaaatacataatatagttgatcaaagtcttgcctctggaaagatttatgttgacaacgtgttcaactacataaaacattcttttcccaatgttactcttcaccttattgtccccctgatctgccggtggtgtaatatccaggcatgaccaactacatctac

SEQ ID NO: 179423 - DNA, 267 bp, Zea mays
  Clone ID: MRT4577_95216C.1
tctagcatgcttcactcagtatatcattctctcggcaacgagcacccaaagatgggggtgcttctaccagatcggatcctgagcgagctgacgtgcatgtaccagcggggaacggataagggcttcgtctgtgttaccactgaccgatcaactctcaagggcgaggtacaggttgagaagacggagaatacggggcaaggggtcgagcacatgtgcctcattcgcgccttcaatgggaagaagaacatcttcacctggggttgtcta

SEQ ID NO: 179424 - DNA, 308 bp, Zea mays
  Clone ID: MRT4577_95217C.1
gtctttttttttctttgacacggcacctgcttgtggtcctgttaacgatactgggggtcatctcgggcccgatggcaagtgggacacattgacatgcctgagcgaaattgatgcttgcatacaaactctcacaacatggttgcctaaagtacaacttggagcgactgcggtgcctaatgggtcgaccaaaatgacattacaggtgctgtgctcactgatgggtattgaaccggacatacccgtctgtgccgtctcgttggtggtccaaggcaactcactggtagaggctgttctcgcattgaccgccc

SEQ ID NO: 179425 - DNA, 346 bp, Zea mays
  Clone ID: MRT4577_95218C.1
tcgatcaaatcctgattaaatgcagtctattctctcttctgaaggagattcatgtcctgtaaggtcatgtacagattgagctgttcttgatcaacttgttggtttcctggaatctcgataggctggatatccaacatctttggatgttgattaatctatagttgctgatagctttttttaaccaaagaaggaatgtgcttctatgcttgtttagtttgttaataagatgcttcattcctgtcttcatgccacaaatgtgtttataaactactttgtcaacctcacattgtctccctgtcctgtttcatattcccctgaattgaaatgagattgcatgttttttttt

SEQ ID NO: 179426 - DNA, 710 bp, Zea mays
  Clone ID: MRT4577_95219C.1
gtacccgggcccccccctcggcctcccccccccccccccccccccccccccccccccccccccccccccccccccccccccccccccccccttttttacagggccaacaccaattttccggggccaaaccatttctttaaaagccccttttggggggccccccccaaaaattttttttgctcgaaccaacccctttgttggcaaagggcaaaggacccaaaaaattaccccctccccaccccaaaaaaggggaaaaggccataaaacatacccggaaaaacttttttttcccccttccttgggggaggaccttccctttgggggggggaatctgtttggccggcttttagggttttaaaaacctcctaaaaaaaaccaccggcccgggcctaaaaaacatcctaagaaatgggggggtcgttttaaaccccctccctttcgaagccataggggcccccccccggacccctttaaattttttgggcaaaaaccttgacctccccctcgccctcctgaagaacctcctaaattggccccaatccaattgggccctggaggcccttccagccgccctcctcctggaaaatttgggggcgggaatggggaaagaactcaccggccttggggaaccccttttttttggggacggcctcaatttctttgagcgtccccgtgaaaaccccaataaaaccctcccgcgcgtggggccc

SEQ ID NO: 179427 - DNA, 265 bp, Zea mays
  Clone ID: MRT4577_9521C.1
cgttctttcagcgtcgccaattttcattccatcaacgtccaatcacccagacaatagtcatcgctgattgcattgaaaattcgtcaagatggttctcgcggtcgatctcctcaaccctactcctcagtctgaggctcgcaagcacaagctcaagacccttgtgcctgctcctcgctccttcttcatggacgtcaagtgcccaggctgcttcacaatcaccaccgtcttttcacacgcccagaccgtcgtcatttgcgccggctgc

SEQ ID NO: 179428 - DNA, 383 bp, Zea mays
  Clone ID: MRT4577_95220C.1
ttgacttttacttgttttttttagtcaacattttgattaaagatggcccgcaaagtgatatctcgtaaagtccgcaagggagccccacgtaaaaatgtgctttctgttcgtccatttgcaacagctttgcgtaaaaagctccgagttgctttagacaaacgtgaacagcgtcgtgtatcaaaagtcacattgacaactgaggagaaaaagttgcttaataatactttgcagaccctttctactccaaagccacgcatccacaaatttaagtccggcattgaagctggtcgcgttgtaattttgttgactggtccatatcgcggacgtcgggctgttgttttgaaaactttagcaagcggtttgatacttgttactggcccaca

SEQ ID NO: 179429 - DNA, 242 bp, Zea mays
  unsure (1)..(242): unsure at all n locations
  Clone ID: MRT4577_95221C.1
gtatgtactaatcaactatatatatatatatatatatatatatagtagtcatgatatacagcaggtctgcctctcaaattaaatatgtacataataacgataacaacatctagcagtaatgttatggcaaaaattatggtccaggattagaatttgctacctaaagtccatatggggctgatagatgtattttaatgggtgcggcccnaataaatattacaaagagcgttattaagatattc

SEQ ID NO: 179430 - DNA, 585 bp, Zea mays
  Clone ID: MRT4577_95222C.1
gggggaacaacccatatttttggggctctcccaagaaaatgctgtttgggcacataacatatgaggcaaaccccccataagcacaaaaattagccctgcctttttacctcctcaaaacctttccccaaaaaaacttttttttttttttaaattttaaccacccttttctccattttttttttgattcgccctttggatgggcccgcacaccaaaaacgttttgttttcctaaaaaccaatgttcgcgccccacgggggcaacccacccccgtaagcaccgaaagttaacaagggggaaagccaaattggggcgcctgggaggacgcaaaaaccccgccctggggggtaaaaccttccttgggccggccgatctcctttccacgggggaaatggatccctgcgccccctgttccagggggcccaccacgtgggccatggacggccggaggctggggttgtccccaacacaggccggggccagcgcccccaccgggggggcctcgggggggttttaggcggggccgatccttttgtagacaacccgggcgcgttaaaggggcgggtcgcctgccctgaaccgggggg

SEQ ID NO: 179431 - DNA, 308 bp, Zea mays
  Clone ID: MRT4577_95223C.1
ggggcaagagccgtagttctaaaactactacatgcttcgatatcctttcaatgctaccgacggtaaacgttttcaaaggtgctgttcaggaggttccgcacaaaaaaaaaatttgggggggagtttgaacatccaactaacacgaggaaatttcccatgattgcggtcacggacgtttaattctagctaagggggcctactacaaatatatgattccataaaattgccccgggtaacacttggccccacatctaggtcgcattagcggccttcagaaacttgggccctcccgggaggtctttttttgg

SEQ ID NO: 179432 - DNA, 575 bp, Zea mays
  Clone ID: MRT4577_95224C.1
gccggccgggcctagactcaagaccagggcggcggccgcgttccattctgcgcaaggcgacgactgcggttgggaagggaagacgcctacaaacccctctctacctctcctctgcgaaccacctgccgccggaagccctagagggctcgacccatggatccgccgcagcagccggagcctgtcacctacgtctgcggagattgcggagctgagaacaccgtgaagctagtagacgtcgtccagtgccgtgaatgtggccaccgcatcctctacaagaagcggacccgccggattgtccaatttgaagcacgctgaggagtgacgacaggggaaaaacactggagatggttgatctattactcgccactcacctatgtaaagagtcttgtgagggaaatgaaagtgtcagacataatgtttgaatgaatgtcgtgtgcctcttttgggcttgaaaactttaatatgtaaggcttgaactagggtcggatttgagcattgagatactgcagtaatatgttgatgggtcctcctaagtaccgaaaaaaaaaaaaaaaaatcatacgcgcgttattatt

SEQ ID NO: 179433 - DNA, 807 bp, Zea mays
  unsure (1)..(807): unsure at all n locations
  Clone ID: MRT4577_95225C.1
ttgggtacctcgaggccggcccggctccgcttcttcgcgccaaaccttgaccatagactgggatcatgggcttcgaattgggtaaaaaaaccgcgttgcctggggagtggtacacctccgcgccgcgtctgagttccggcaaactcagcgcgaggtcatcaacggggtgctgcgggggctccaccgaagcacgccgcgaacgtctcaagtctctctggggaagatcgtgggccaggccacggagaattcctcgtcgttggcaatacggctgcaaatccaccacggaggaacaactccaaatttcttgtgccattatcaccggaagcaccgttactcgtgcatcacatgggacatagcgccgccgtgggttggcgtcgtcttcaccatggtcggagtggtggaggaagaagaagccgctcaggccgttggatcatattccatggtcacgattagatctcatggtaatcaagtatgtgtcgttggatccgtaatggacgcctatgattagatcgactcataccggttcaggatcgtgaattgtgaccattggtgcaagatctagggccgggaattgatcggggcatgggtgtatttgggccatgggatcttgatccattggccactagcatgtactagtccgcgagggcgtaaatttaatctgtgccattgatgtctgatcgtgtggctgagatatgaacttacacctctcgtcgtgtacgtttaacatatgaaacccctatggatttggggaataaacccgcggtccggngcaagcgaaaaaaaaaaaaaaaagcgggcctcgagctc

SEQ ID NO: 179434 - DNA, 1726 bp, Zea mays
  Clone ID: MRT4577_95226C.1
aattcggcacgaggctcccccacttacgcttgcgctgccaagctctccgaggtccaacaatggctgcgctgctctatctccatccctatctcgcggttcttccgcttctgatctccccgatctgctctggcgcttcgccatggcgaaccatgaccaccggctcgcacatgagaggagaggaccacgacaaggtcaccctcctctcgcccgactctaccttctcctgcggcttccacgaggtgggcacgaacgccctcaccttctccatctggtacacccccagcgccagcgccagcgccaccgagaggaccgtcgtctggacggcgaacccctactccgcagagcgaggccagcactctccggtgaacaagtacggctccagactgtcgctgaaccgcgacggcaacctggtcctcacggacaccaacggatccacggtgtgggagaccaagacgtcgtcgggcaggcacacgacggccgccctcctcgacagcggcaacctcgtgatccgcgactccagcagcggcaacaacaaggtcgtgtggcagagcttccgctcgccgaccgacaccctgctccccgggcaggagctgaccaaggacacgaggttagtctccggctaccaccacctctacttcgacaacgacaacgtcctgaggatgctgtacgacggcccggagatcaccagcatctactggccgagccccgactacaacgccctcaagaacggccgcaacaggttcaacagcaccagggtagcggtcctggacgacctgggtactttcgtatccagcgacgggttcaggatagaggcttcggattcgggtccaggggtcaagaggaggatcacgattggctacgacggcaacttcaggatgtacagcttgaacgcgtcgacgggggcgtggcgcgtcacggggcaggctgtcatacagatgtgctatgtgcatggactgtgtgggaggaacgggctctgcgactacctgggtggcctcagatgcagatgccccccggactacgagatggtcgatccgacgaactggaacagaggatgcaagccgatgttcttgacgactgacgacggaaaccaatcacacgaggaggagttcacgttcgttgagcagcctcacgctgactactacggcttcgacctgtcctccaacgagtccgtcccgttcgaagcctgccgggacatgtgcttgaacagcagcgcctgcttgtcgttcacgtacaagggcggggatggctggtgctacactaaaggcctactctacaacggccaggtgttcccgtacttccctggagacagctacatgaaggtaccaaagagtttcaacagctcggcggcctactcatcgatctccaaccagaaagaagccctcacctgtgggccggcgggttctgctgagctgatgctgggaccggcgagcatgtacggaacaaagaaggacaacatcaactggacatacctgtacgtcttcgctgcagtgctgggagctctggagatgcttgtcatcgcgacaggctggtacctgttcttcaacaagcacagcatacccaaatcgatggaggacgggtacaagctggtcacaaacccttggatgaatacattctaggatgcctaaggaacatctctgccaactagttttggcagattccttgcaagcatgaagtttgggaattttgcctcttcttgagaaaaccccaaacaatgagatggtttttt

SEQ ID NO: 179435 - DNA, 261 bp, Zea mays
  Clone ID: MRT4577_95227C.1
gcaacgcatccggggacacctgggcgttcacatgtgaaaacaactgcaaaacaaacggagagtgcccagaatgttgcaggtctatcacacgacaatctattaacctggactgcagttttagggactccatgacctttcacattcccatacgagtgccagttgtactatagtgcaagctaaatgcaatgaacttgccgaatgttatcaagcaaccgactgagaaaacactgcagttgcctactttattgcctacgaaggata

SEQ ID NO: 179436 - DNA, 459 bp, Zea mays
  Clone ID: MRT4577_95228C.1
gccagacaaaccaacttaaccgtttatgtgaaatggaggaatacataagcacttggcgacccacagtaaatgtccatacaaaccaaaacttaaaacacagccgttgatatgcttagcgcagcatttcacagttttgacctaagccttgatagcatacttcctcatggggaaggactactaacgcttatatttactctaggtcttcatagagagctgaagctagacaatacggcggcggatggcacgggtctttttacggcggatgaagagggggagcaagatcttcttgttgtacgcctcccacaacgcctacttctggttatgcgagatcactgtgagcactgcgcgcgattgaagtgcgcaccaccttgatcttgaagagcttgttatgagcgccgacggcgacctttgctacgctgaggagggagagctgatacttcagcttcttgagctgtgcct

SEQ ID NO: 179437 - DNA, 296 bp, Zea mays
  Clone ID: MRT4577_95229C.1
gggtgtcttgagttcatgggttgtctcatggagacccagtggtaagatccaaccagttgtaaattgtgccttttcagattcttgccacgcagtatgcttctggaagtcaggggccctctgctcaaacctactcttactgaaagtaatttcaagcaaaattttcctacgatcatatgacatttccatcaaacaataaccgaaacactacttccattcgcaactctaaaattttacacgatcccaaaaatcttacagccttggtcagactatctgacccacgctcacctgggggtagg

SEQ ID NO: 179438 - DNA, 275 bp, Zea mays
  Clone ID: MRT4577_9522C.1
ggaaagttctgaaacatcttgtagaggtaattttgtattatatactctctcttgctgtgtctgtcttgtagttccttcctaaaagttgtttatgtgtgtatatacatatagagggagagagagagcagggggttcgggggaggagagagactagacagagatttttctcctgtacacatatatgtctcttatttgcagcaaacacaaacacacacattgtaacacaagtctcatgatacaatgtttaccttattacatgggatacactctatttt

SEQ ID NO: 179439 - DNA, 312 bp, Zea mays
  Clone ID: MRT4577_95230C.1
gcgtccgcatggctgcattttgatttgctgcatttatagacaccacgtcaactcatgcagagaacaaggctattccaatgagcagaacttgcgacgcagatgacaggactgttcaaggagcggtaagaatgggtcttgttgcgaacacttgccgtgcttctagccttggccgagagcgggtgaagcaagaacaccgtggactggctctcgaagccagcgggaaaggctttgatgctacgtagaacagtaaggtcttctacactccaactatgacgctcccgaagcaggacattatgattctggctgacggca

SEQ ID NO: 179440 - DNA, 249 bp, Zea mays
  Clone ID: MRT4577_95231C.1
agctcacccacgcatataacaagatttttttttgatcctacaccgaaaccctcaaggtggtgtctcgtacttagtgcgaacccaaatacaaatatcaccctccgaaatacagagcaccggtctttacacaccacgagataaaactcatggagcaacctgatgcatactagaaaaaatctgtatacaaacatcggaaagatagcatattttcggcagaactactaccaaatgggttgcatgacacacgac

SEQ ID NO: 179441 - DNA, 524 bp, Zea mays
  Clone ID: MRT4577_95232C.1
gggttttgtttttttttttttttttttttttttttttttttttttttttttttttttttttttttttttttttttttttttttttgggaaaaggggggttttattaaataaagatgggtacagggacattccaaagttgggggccttttgggggggggggcaaaacatgaattttaaaagggactaaaggccataaacggttatcctaaaaaagggcgctaaaaaaaagggcaaataaccataaacggttaacctgaaggaaatcactcattggaaaatagcctttttcaaaagcaccagggatttccacagggccggggggaacctaaggggcgaaaggagaatcaccctccacgggaagaaaaccgacatttgaatgggcctcctccatattcctcctaaagaaagggggctcaatacggggccccattttggggaccggggccagttttttggaatattcggaacaaaaaaaaaaagtcctggggaatttcaaggggggggtggcctttgagggggaactt

SEQ ID NO: 179442 - DNA, 324 bp, Zea mays
  Clone ID: MRT4577_95233C.1
gggcaaccaaaaaacaattaaggggaatccccaaaaacaaaaaaaaccaaaaaccccttttggcacctaatccggccaaaaaataaaaaatcacccccaaaattttttgaccacaaaccaaatagttagctacagcaacccctttttataggttataaaaaagcataaacccccccttaaaagggggtcacccttttaacctaattggtggttgacacctgtttcgaaacttgcccaacaatccatttgcaaaaactgataatactgcctcgggccaatccttaactcccaaaaaaagaaaccacctgcttttaaaaaaggaaa

SEQ ID NO: 179443 - DNA, 117 bp, Zea mays
  Clone ID: MRT4577_95235C.1
cacagaagttggattcactcttgatgatggtactggcaagaaagatgtgagtggtgtgggaaaatgaggcttgcgatgctaatgagacggctgttgctaataacgagatctatgtca

SEQ ID NO: 179444 - DNA, 1193 bp, Zea mays
  Clone ID: MRT4577_95236C.1
aaatggatatgtccggctcgccatggttcctgtctgacttctccctccaaacgaacaagctttaaggccattccaaatcacttgctcaattggttaaacatagctttgtattgtttttgtgcagatttacctagtaagatctatcttttcaagtgttgtactgaattcctgtctgtgcaaacttacctatattgtattatcttgaaagaaaaaatatataagtcagagttcctgcggccagtgctccagctccgagccccattccaagatacaaatggatatgtcgacaaacccatgagctttgtctgacttcttcctccttagctggaagcttgcagtctcctcaacgactccaggttgctccccgccgtgctgaaatttgtcgaaatactccttcatctggacaacagcagctccctggaggtgctccctgaggaagatgggctctctcctgtacacttccaccgtcagcaccatctgctgcaggttgctcagaccatgctcgtcaaccgagaccgagaacttcatgccccagcttgggtcggagctccctgacgcatccaccttggtgcagtacttgctgttgggatcgacccatgcgacggagaaccactacggcttgagcagcgacgatctgcggcccaggccgcgggcagagatcacacagaactccaccgacattttcgccatttgcgtgaagaggaaaggtgagcaggtcagccggacggcgaagtgggccggtgaaaacgatggtgtgagattcgttgcctcataggtgctgctttaccacgcttttttttccgtgttagctttgctgttaacttctggccatggaattgattccaaatctgcggcactaggagagggaaaagcatagctgaaaaagggtgtgtgattcttcgattggtcattggccattgcaaatgtacacgcttggaagcccttcgtcgcgctgcacagacgtccgaatcgtgtgaccaaattcccattttttttgcgaaaaaaaaaaaaaaaaaaaaaaaaaaaaaaaaaaaaaaaaaaaaaaaaaaaaaaaaaaaaaaaaaaaaaaaaaaaaaaaaaaaaaaaaaaaaaaaaaaaaaaaaaaaaataaaaaaaaaaaaaataaaaggggggggccccttttaaaaaaaacaaattttacttcccgggacttgggaaggtaaaaatttttt

SEQ ID NO: 179445 - DNA, 422 bp, Zea mays
  Clone ID: MRT4577_95237C.1
ataaaaaaagggggggtaaacgggtgtttttgttttaaacagggggttttttgggggggggacaaaaaggaggggaatttttgggaaaaacccccccgggaaaaaaaacccacgctttttttcttataaaaaggaagggggggaaccctgggtctaatgggggaaaactgaacccccggggtttgggaaaaacctaaggccttccaccacgggtccttgccgggcctgaaggggggttccccccccgggaaaaaaaggacctttgccccgttaaacttgggggaaaccaaggccaagaaaaaagggcccggtccaaggacaaccttgccctggttggggaaccgggaacccggggaggggcaaaaaaaattttttttggggccgtttcccgggacaaaccaaccggggggggggccccccgg

SEQ ID NO: 179446 - DNA, 328 bp, Zea mays
  Clone ID: MRT4577_95238C.1
tttttacgaggtaaagctggtgttattttcgcttgaagcgctttctacttctgtttcttcagattcgtgtaaatccctttatgcatctttacttatgtatctacggaataaagcatcaacaactacacaaaatatgaggggagctgttaccacctgattcttcatggttatattaaagctgggggcctaaggtcaaaacagaaggtttataaatttttgccgtcaccttgcatggtgatcgagagccctatcttagggacaagtgctgcctatggagctatgagaaatacccatcttattcaccgtagagttgttattctcttgtgcc

SEQ ID NO: 179447 - DNA, 745 bp, Zea mays
  Clone ID: MRT4577_95239C.1
ttttttttttttgtctgtcggctgaagtttgtggagcttattgacaagctggatgaaggttctatgtcctggactgagttccagactgtggtgaggaagcaacatgagaatagactcggaggtccgtacgagagattgcgtggggcaagcccaaggcaggaggaatacttctactcaaacccgatccctgggtgcctctgcaaaagggttcagaggagtagatgatatggatttttctgggttccattgaaattgttcagtcttagaaacataccgtaccgacagcttcagcggctggagcgtggatggagatgaaccttcctccgcgtagcagagatcatcaccccgaagcgaagagcgagagctagcaaactgactttacactagcagtttcgattattttttttttcctaggctgacaggcaacacgtgcagctgagatatctggagagggcacagggtgtgcagaatgtgaagtgcgtcgtcaaaagagttgtgtaaaagcaaggaatgcagatgtgcaggtaatagggcgagccaaaaatgtttcacggtggctgctgtttgtagttgttggtgtttctgattaattcggtttagaaggtaccagtaccatacctttttttgatggatggattcatcgttgcctcttcttaagaataatgtataaatgctctctttgtagtaggcctgttgaaccagatgtgtacatagtaaagtaaagagtggacaactgatagttttg

SEQ ID NO: 179448 - DNA, 233 bp, Zea mays
  unsure (1)..(233): unsure at all n locations
  Clone ID: MRT4577_9523C.1
cggacgctgggnaaaccttttgggttaaaagctttaacatctattaggaagaatttgtcctgtgggtttggaatcttggattttccccctttatgaactgtactggctgttgaccaccagacacctgaccgcaaatatcttttcttgtattcccatatttctagacaatgatttttgtaagacaataaatttattcattatagataaaaaaaaaaaaaaagggcggccgctct

SEQ ID NO: 179449 - DNA, 386 bp, Zea mays
  Clone ID: MRT4577_95240C.1
gcgagaagcgcctgcccgaccggggtccgttcccgcggtcacgctccgtcgtttcgagctcggcgacgtcgacgcgatgctggagtgggcgtcggaccccgaggtgacggcgttcatggcgtgggacgcctgcacgtcccgggacgccctcctggcgttcctgcgcgacgcggtgctgccgcacccgtggttccgcgccgtctgcctcggcggcggcggacactgccgccccgtgggcgcggtgtccgtgacgcccaccgacgacgcctgccgcgccgagctccgcgtcgtgctggcgcgcgcgcaccgggggaagggtgtggccacagcggcggcgaggcgcgcggtatccgctgcgttcggcgacctacccggcgtggagcgcg

SEQ ID NO: 179450 - DNA, 269 bp, Zea mays
  Clone ID: MRT4577_95241C.1
ctctccctcacctctctctctcacgcctcgtgctctctcactcttatctctctgccccctggcgtcttgctacacacacgccgagcgccaggccggctcctccgcgccgagcgggcccaccggcggccccaccacgacgccgcggcatcctgccctgctccggccatccgcgccaaactaggtagcccgagccgagcgcgccaaacgaggccgcgatgtcgcgcagccgcccaacgccaaacgcccagcctcgcctagcgcgcatgcag

SEQ ID NO: 179451 - DNA, 1301 bp, Zea mays
  Clone ID: MRT4577_95242C.1
cattgcgtacctcgaggccggctgtcgcgtgctccgccgtcacgacccaaattattgagagcccaggaagtgagagatgagcctgcagattccggtgagatcaggcgccctgcgccgccttctccttctaggtggcgccgagggtctactgcgcacctactccaccggcgaccggcgccggcgggtgatccgcgaggcaaggcaagaggaggaggacgaagcgttcctccgcaccctcaacttcggcgctgaccccgagaacaaccctcttcccccgccgccgaggcatggcagaggattatccgacgcctcagccgggaagcagcagcagcagcccgagcgaagcgcgcagaaggtcgtcggggagacgctgctggagaagcttaagctgggcgatggtccctccgccgccgctgctataggaggcggcgatgagccacggcagtctgaggacgagcctgcgcccgcgcagccggtggacgtggacgagatcttccgaaagatgaaggaaaccgggttgatcccaaacgccgtggccatgctcgacgggctgtgcaagaacggcctggtgcaggacgccatgaagctgtttggtctaatgcgagagaagggagccatcccggaggtggttatctacacagctgtcgtcgaggcattctgcaaggtggctaagctagacgacgccgtgagaattttcaggaagatgcaagggaatggagtcatccccaatgcattcagctattggctcctgatacaggggctgtacaaggggggcaggctggatgatgctgtcgggttctgtgtggagatgtttgaggctgggcttgcaccgaatgcggagacgtttgtaggcttgcttgatgcagtgtgcaagacaaaaggtgtggatgaaggcgagaatcttgtgaggagcttccaggacagaaacttcgctattgatgagaaatcaatcagggatcacctggacaagaaaggcccattctcaccagtagtgtgggaggtgatctttggcaagagaaaatcagaccgaccattctaatctctaccagaaagtagtatgtgcacactctcatcattttgttagccttgtagttattatttctcaagagtttgcttgctttcatggttaaacaaatggctaccatgtcttcttttatggaatctataattatggcgatctgtatgcacttttgtcatatgcaattcacctccatctattcaactgccccaattaggacatacttgctgcattcaccttgagctattcaaccgtcccaattagaacaactttctttgttatt

SEQ ID NO: 179452 - DNA, 213 bp, Zea mays
  Clone ID: MRT4577_95243C.1
aacacacatatacactcaagagcagaccatgaaagctgcacgctgccgtgacctgacagcttgcactagcctccagttcttggttctcctatcatcctatacacagatcgatcacgacgtcgactaccatcaccatgatgctatctagctgccgccgggcgtggccttggagcccagggactaggtgatcatcacgactacttctctagaaag

SEQ ID NO: 179453 - DNA, 424 bp, Zea mays
  unsure (1)..(424): unsure at all n locations
  Clone ID: MRT4577_95244C.1
acccctaaaacccccccctgtggggggggggggtttatggaaccgtgggtggcgcgcgcgccttcactcctgcctgctgttttcatgtctcatgacacgattgcttttcccgctttgacattgttccgcaccacatcctttttcacgcnaggcactttcttgctctcggggggggggggtatcacacnatacccnctttcacggaacacctattggttcgagagaatctaatatatgctcggtctcactccacgcttccgacttgtttggaatctagaacttggtggtgctcttcgcttcaagcggccgcaactgcttgtggggccaacaggcttttctccacgttgtcattgacaccttgctgaatctgctcgcctttttgtgtcacgatctttcttttcttggccgccctcacggtgccaac

SEQ ID NO: 179454 - DNA, 332 bp, Zea mays
  Clone ID: MRT4577_95245C.1
catgactgccatgtatgagctgcaagggctaaaaacatacataaagagaaatacaaagagatccctacccttcttagagatactgactatggacgcaaaaccaccaaatgactccatatttctgctgcttcttgtgtcgcaaaatccttcttcctcctgtgcagacaaccaggattgcttttacaccactcaccgcttggcgacctggtgcgtgtactgaacctgcaagttcagctgcctgaacgactcccaacagttccatacctagtacaagaacagatcacgcgaaagctccacgagaggcatgtttcactggcacttctgcgactgat

SEQ ID NO: 179455 - DNA, 531 bp, Zea mays
  Clone ID: MRT4577_95246C.1
aagctgagcagtggctaagggaggggtcccaacttcaagaatccttgcccaagaatgtggacccagtactttggtcctgtgaaatcaagagaaaggaagaagagctggatacgttctgtcgaaacataacaaggcacaagggctctccagcaaggacagatggcagcaggggttcagattacatgcctacacctgatagagattaaatattttcacgatcacgaggtttctttactgtacggccacacatgtcttaatcattttgtagcaatatatgaatgaacgagttcctgctaacaccgtcatataatcgactctgtacaacactaggcccgccattgggtgaccgcttcttggttctccaaggtgcagttgtcacttgagagcctactgatcatgattgtcgatacctgtgaattcttttccggtacatggatcaaggttgtctgcttcagtttgtgctgaatggaaaggataattaaaaggaaattgtatgcaatagatattgttgacgccgttttttagcttgca

SEQ ID NO: 179456 - DNA, 602 bp, Zea mays
  Clone ID: MRT4577_95247C.1
ctgtgttggaagcagttctgagcggcgacctttcagccgcaagtagcgcggttctgtgtggttgtttactggaggaggagataatgttagttaagccgagttcaccaatgggatcaggtttcttggcccagaacgaactgcattttgctaagcctggcatcagtgtcatgcgcacgctcgcatcggccaggttaggagtagaccgcgttattttcggaatatttgtaatgtatacaattttatgtgcgggccagtgcttggcacgatccgtttaggcacggcgggctatcgggccggcacggcgggctgtgagcatggccgtgccgtgtctgggcagacgcctgagcacgtggggccggcacggcccgacctgaaccattaacgggtcgtgcttggcctgaccctatttggaccgggccaaatcggggtttgggtcgtgctcgtgccgggtggcccgtttggacatcaatacttagggaacagacagggcaatgtgttgaggcggtggggtaacactaaacgctaatagtagtaagggagggggcgacttgttggacaccgctctaactctgggtcgcgtagacacgaagctgaactctaag

SEQ ID NO: 179457 - DNA, 777 bp, Zea mays
  Clone ID: MRT4577_95248C.1
caggagttgccaatcactgagtacatctgttgtgcaatgagcaagcaggaactgctggaagctcaggagcaagagcaccaattggcttatcaggataaacttatggaacggacaaaggacaggaagaatgcattagaatcttatgtatatgacacccgtaacaagactgaagattggctttatgaagaaaggtgatgatgagacagaagtggtttacagtagcaaacttgaggagctgaaaaagcttgtagatccaattgaaaatcgttgtaatgatgacgaagtgagagctgaaatcgcaagggagcttttgaagtgcattgttgaccacagaatggctgccaagtcattatccgcacctgaaagggatgctgttgacaatgagtgcaataaagctgagcagtggctaagtgaggggtccaaacttcaagaatccttgcccaagaatgtggacccagtactttggtcctgtgaaatcaagggaaaggaagaagagctggatatgttctgtcgaaacataacaaggcacaagggctccccagcaaggacagatggcagcaggggttcagatcacatacaaaacacctgatagagattagatatattcacaaggtttcttcactgtacgactgataacaccgtcatataattgactctgtaccacactaggcccgcattaggtgaccgcttcttggttctccagggtgttgtgcagttttcacttgagagccctactaatcatggttattgataccctgttaaaaaaaaaaaaaaaaa

SEQ ID NO: 179458 - DNA, 2633 bp, Zea mays
  Clone ID: MRT4577_95249C.1
gcacgaggccgctctggttcatctccaactacatccaccgcgccccaaatcgcaccccgcctcccccattcgcgccgatcgaaccccaaatcggtggcgatgagcgtggtcggcttcgacgtcggcaacgacaccctggtggcggcggcggcgcggcagcggggcatcgacgtgctcctcaacgccgagtccaagcgcgagtcccccgccgccatcgccttctcccgcaacgcgcgcctcatcggctgccacgccgcgtccgcctcgtccgcgcacgcccccttctccagcgtcaagcgccttctcatgggcgccacggggaggcacccggactcctccctactccgcgacctgtcccgcctccccttccccgctgccgtcggtggcggcgctgtcgtccacgccgaccacatcggccgccgcatcgcgctctcgccgacccacctcctctccatgctgctggcctacctcaagcagctcgcggaggccgacctcggcggcgcccccgtagccgactgcgtgatctccgtgccctgctacttcactcaagcgcagcgccgagcctacctcgacgccgccgccatcgcggggctcaggccgctccgcctcatgcacgacctcgccgccaccgcgcttggctacggcctctaccgctccgacctcggcggctccgggggtcccacctgtgtcgcgttcgtggacgtcggccaatgcgacacacaggtcgcggtcgtctctttcgacatgtcggggatgaaggtgctgtctcacgggttcgatgcagacctcgggggcagggacttcgacgaggtgctgttcgagcatttcgccgaggagttcaaagacaggtacatgattgatgtcacaggaaatgtcaaggccagtatgaggttgagggcagcctgtgagaaggcgaagaaggttctgagcgcgaacgcggaggctgtggtgaacattgagtgcctgatagaggagaaggatgtgaggggggtgatccgaagggaggacttcgagaagctatgtgccaggctgctggagagggttgttgaaccttgcaacagggcggtgacagattcaaggattggattggagaggctgcattctgtggaactcgttgggtcaggttctcgtgtgcctgccattgccaaggtgcttaaggaattcttcagaaaagaacctagtcgcacactcaattcaagtgagtgtgtggctcgggggtgtgcattacaatgtgcaatgcttagtcctacgttccgtgttcgggaatacgaggtgcacgatgcaatccctgcttccataggattttatactagtgacggcccagtttcaacattgtcaagtgatgcattgttccggagaggcctgccctttcccagtgttaagatcattactctacagaagaacgacagttttagttttgatgcctattatgtggatgcgaatgaattgcctcctggtacctcaacagacatcggtagttttcagattggcccattccaagcacatatggaagcttctaaagtcaaagtaaaaattcgtttgaatttacatggtttggtttcagttgaatctgctgctttgatagatgattatcaaaggaatgcaacttctgctgaccatatggaggtggataccagcggtgatgacatgggtcacaagtcaagaagtgaaaggtctatccagcggcaggagttgccaatcactgagtacatctgttgtgcaatgagcaagcaggaactgctggaagctcaggagcaagagcaccaattggcttatcaggataaacttatggaacggacaaaggacaggaagaatgcattagaatcttatgtatatgacacccgtaacaagctttctgagaggtaccggagctttgctactgattcagaaagggaacaaatctcatttaatttacaacagactgaagattggctttatgaagaaggtgatgatgagacagaagtggtttacagtagcaaacttgaggagctgaaaaagcttgtagatccaattgaaaatcgttgtaatgatgacgaagtgagagctgaaatcgcaagggagcttttgaagtgcattgttgaccacagaatggctgccaagtcattatccgcacctgaaagggatgctgttgacaatgagtgcaataaagctgagcagtggctaagtgaggggtccaaacttcaagaatccttgcccaagaatgtggacccagtactttggtcctgtgaaatcaagggaaaggaagaagagctggatatgttctgtcgaaacataacaaggcacaagggctccccagcaaggacagatggcagcaggggttcagatcacatgcctacacctgatagagattagatatattcacaaggtttcctcactgtacgactgataacaccgtcatataattgactctgtaccacactaggcccgcattaggtgaccgcttcttggttctccagggtgttgtgcagttttcacttgagagcctactaatcatggttattgatacctgttaattctttttctgtactcggaccatgggtattgtctgcttcagtttgtgctgaatgaacaggaaaactaaccgcgtgtttggttggtggacgagtgcgtgcagctgtatgcacggagcgttg

SEQ ID NO: 179459 - DNA, 335 bp, Zea mays
  unsure (1)..(335): unsure at all n locations
  Clone ID: MRT4577_9524C.1
ccggccgggcgtccgtcccgccgatcgaacagccaccgctcacctctcccacccgccaaaaacctccggcctcctctcatattcatatagctagcccctgccacaaggtagagcgtcgctcacacctgcgtcgccctgcctcgcaatcgcgaatctgtcgagcacctgaggggtcggaggccgagagctagcctagcacgccggcctccgcgcgcgatggaggccagcgccgggctggtggccggctcgncnanncaaccggnnaacgagctgggtgctgatccggggccacgaggaccccaagccgctgcgggcgctgagcgggcaggtgtgcg

SEQ ID NO: 179460 - DNA, 1694 bp, Zea mays
  Clone ID: MRT4577_95250C.1
cctagtcgcacactcaatgctagtgagtgtgtggctcgggggtgcgcgttgcaatgtgcaatgcttagtcctacgttccgtgttcgggaatacgaggtgcaggatgcaatccctgcttccataggatttaacactagtgacggcccagtttcaacattgtcaagtgatgcattgttccggagaggcctgcactttcccagtgttaagatcattactctagagaagaatgacagttttagttttgatgcatattatgtggatgctaatgaattgcctcctggtacctcaacagacatcggtagttttcagattggcccattccaagcacataccgaagcttctaaagtcaaagtaaaaattcgcttgaatctacatggtttggtttcagtcgaatctgccgttttgataaatgattatcaaaggaatggaagttctactgatcatatggaggtggatagcagtggtgatgacatgcagggtcacaagtcaagaagtgaaaggtctatccagcggcaggagttgccaatcactgagtacatatatggtgcaatgagcaagcatgaattgctggaagctcaagagcaagaacagcaattggcttatcaggataaacttgtggaatggacaaaggacaggaagaatgcattagaatcttatgtatatgacacccgtaacaagctttctgagaggtaccggagctttgctactgattcagaaagggaacaaatctcagttaatttacaacagactgaagattggctttacgaagaaggtgatgatgagacagaagcagtttacagtagcaaacttgaggagctgaaaaagcttgtagatccaattgaaaatcgttgtaaagatgacgaagtgagagctgaagccatgagagatcttttgaagtgcattgttgaccacagaaatgctgccaagtcattatccacacctgaaagagatgctgttgacaatgagtgcaataaagctgagcagtggctaagggaggggtcccaacttcaagaatccttgcccaagaatgtggacccagtactttggtcctgtgaaatcaagagaaaggaagaagagctggatacgttctgtcgaaacataacaaggcacaagggctctccagcaaggacagatggcagcaggggttcagattacatgcctacacctgatagagattaaatattttcacgatcacgaggtttctttactgtacggccacacatgtcttagaccttgttcgtttacgtcggattgcacccggaatcgttccagctaatcaaagtttatataaattagagaagcaatccggctaggaatcgttccgacccaccaatccggtagaaacgaacaaggccttaatcattttgtagcatatatatgaatgaacgagttcctgctaacaccgtcatataatcgactctgtacaacactaggcccgccattgggtgaccgcttcttggttctccaaggtgcagttgtcacttgagagcctactgatcatgattgtcgatacctgtgaattcttttccggtacttggatcaaggttgtctgcttcagtttgttctgaatggaaaggataattaaaaggaaattgtatgcaatagatattgttgacgccgttttttagcttggcagatttatgcttcagtttgttgatcccaggaagttacccattatttaattttgtttgtta

SEQ ID NO: 179461 - DNA, 345 bp, Zea mays
  Clone ID: MRT4577_95251C.1
agcatgctcactcagcaccacccccacgtcacggcctcacgccacggagaacacaacgtcgatccggagggcggagcacgcaatggagcctgtggccgtcgtggcggtgccgttcccggcgcaggggcacctcaaccagctactgcacctgtcgctgcagctcgcgtcgcgccgggtggacgtgcactacgccgcgcccgcgcagcacatccggcaggcgcgcgcgcgcgtgcacggttggggcgaggaggcgctccattccatccagtcacgacctcggcatccccagctacgtctccccgaccgcaaagtccatggtaaactggtgcaaacgccgctaactcc

SEQ ID NO: 179462 - DNA, 544 bp, Zea mays
  unsure (1)..(544): unsure at all n locations
  Clone ID: MRT4577_95252C.1
nggtggggggacctctanacggacgcccttggtttttttttttttttttttttttttttttttgttttttttttttttttttttttttaacgcagaaaaaaacaaatacatgcatataaatattaaatccggcccgaggacggacatgaccgggagcacgttacagatgaacatgaggggggggggggggcatggttcgataatggggggggccattgacagggtcttatttagaccccgtttttttttttagtacgactcggggtggtcctttggacttttgggcgccatcgcctgaccggctcagttgcagctgcggcaggggcagccgcagttggggccgcagttgcaggggttgcagttgcagccgccgcccttgggggccgccttnaagccgccggggctggccttgggggtcggggcggggaggaccggggtcttgatgctggtgggggggggggtctccacgtttggggacatgcagttgcatgagctgccgnaggagcngttggggccacagtcncacttgccgttggtgtgggac

SEQ ID NO: 179463 - DNA, 381 bp, Zea mays
  Clone ID: MRT4577_95253C.1
gacgatttatttacacaaacagggtaggggggcaaaatatagagtactgtgaaaaaacaaacctggggcaacaagaaactaggatatataccccaagagggcaaaaatattctttgggggggggggcaaaatggtaaaaaggggtgcgaggtgaaaaagccacggggggctaaaaaaggaccagggtgggaaaaccgactggggtaaggataagagggggctttgtggaaaaactcgcacgagagtgaatcacttggggggacatgatgggggagagagagtaaattggtcggacctttgggatggcaggggttagaaaaggtgctcatagacttgggaatggacaaaaactgggggggggaggggaaccggggtgggttg

SEQ ID NO: 179464 - DNA, 510 bp, Zea mays
  unsure (1)..(510): unsure at all n locations
  Clone ID: MRT4577_95254C.1
acacacgagagccacagagaccaccccccagccagcggaggccgcagcgaagaaggcacacgccgacgccacgccggagacggcacgggcagcacagcaaccccggcggcaccacgacgcaggcggccccaggcagcaccaccaacagcacaacgcgccgcccgaccacggcgcggcgacggaacagcgccccgggcgacggcggagggcgcaggaggaggcgacggcggcccggcccgcgagccagcacaaccagggcacggacgagcagacggccccggacgcgcggaagaccaaggcccgcgacggcaccaacggcgcggccgccaccgcgaaccagcgcccgacggcgcaccacacgccggcggagccgggcgacaacaaggccccccaccaggaggacgacgagggcgcgccgcaggccgagggacgcgagcgccaaggccgngaacggacaagccggcgcggaacgaggccaagcacgagacgcgcccgccccgggagcgggac

SEQ ID NO: 179465 - DNA, 262 bp, Zea mays
  Clone ID: MRT4577_95255C.1
gttcgtttctgttatgcagatggacccctttaatggtgggtcgttcctggcaaagaaattcagttgaagaaatcttaagtagagaaccagagggccggatacacactcttccttcaccttatctctgtcttccactcatgagtatcatgaacattgccagggagtgtggatggaggtatctaaaccagtcacctgtttgtatcgacccttgtgctgtctgcttagaagggagctggtccgttgctgcagaaggttgcaaaca

SEQ ID NO: 179466 - DNA, 769 bp, Zea mays
  Clone ID: MRT4577_95256C.1
ggaacttgcgtacagagttgggcgcagagaatccccaagcaaacaaacagggtagagggagaggagaggagaggagaggagaggagaggttgggtctgggacaccatggctccgatgaagctgtacggggcggtgatgtcgtggaacgtgacgaggtgcgcaacggcgctggaggaggctggctccgactacgagatcgtgcccatcaacttcgccaccgccgagcacaagagccccgagcacctcgtccgcaacccgtttggtcaggttccagctctgcaggatggtgacttgtacctcttcgaatcacgagcaatctgcaagtacactgctcgcaaaaacaagccagagctgttgagggaaggaaacctcgaggaggcagcaatggtggatgtttggatcgaggtggaggctaaccagtacaccgctgcactgaatcccatcctcttccaggtcctcatcagtcctatgcttgggggaaccaccgaccagaaagttgtggatgagaaccttgagaagctgaagaaggtgctagaggtgtacgaggcacgcctgaccaagtgcaagtaccttgctggagacttcctcagcctcgccgacctgaaccatgtgtctgtcactctctgcctgttcgctgccctgatgaagccatctgcttgaaacggttgccctgtcaatcggtgaatggaataagccaagtctgttctgggttgtttgcttgttcagtgatgtgtcttctatgacgaaagttgagtgcctacgtgtgggc

SEQ ID NO: 179467 - DNA, 403 bp, Zea mays
  Clone ID: MRT4577_95257C.1
gtccggaggtcggcagcatgaaccaccaccaggcccagcccgtccgcaccggcgacgtctacccaccgaccgccgtcaagcgagaggcgagccacgagcgggacaagatcattgaacaaggagatcagcggggcggcgccctccacgtcgaccagacagatcttcccgccggcagacgcatggtcaccgccagcgcaggcggccaggtgatggcacagttcaccgtgcccgtgccggacaccaaggtcgcggaggccacggacgcggtcaccctcggcgaggccctccatgccgcggcgcagacgtcggcgggcgacaagcccgtggacctcgccgacgctgcggcgctgcaggccgccgaggcgcgcgcgacggggctgggcggcaacgtacgcggcggcgt

SEQ ID NO: 179468 - DNA, 414 bp, Zea mays
  Clone ID: MRT4577_95258C.1
ggcagcgtagtccatggccatgatgatgtgtctccagcttgagaaggccgaggtccaaatggagctccaccagttccactgagttttgcttaagtcttctggatggcacactcctgtcgtaccacaaatcagaaccaatgcgtcaataggcaccgtagttgataataatatctgccacccaacagaatttgatttcttcgtgtgcatccatgctggggccaagggaacaagccgtcctacgcattaccatgtgctacgagatgacaacaagttcaccgcagatgctctgcagtctctaacatataacttgtgctacattgcgcagatcatccagggcggacctataagatgtcaagtgtgtacgccccaacaacccacagatgcggctcgacgctctccatcgtctggtatacc

SEQ ID NO: 179469 - DNA, 1506 bp, Zea mays
  Clone ID: MRT4577_95259C.1
gttgggcgcagagaatccccaagcaaacaaacagggtagagggagaggagaggagaggagaggttgggtctgggacaccatggctccgatgaagctgtacggggcggtgatgtcgtggaacgtgacgaggtgcgcaacggcgctggaggaggctggctccgactacgagatcgtgcccatcaacttcgccaccgccgagcacaagagccccgagcacctcgtccgcaacccgtttggtcaggttccagctctgcaggatggtgacttgtacctcttcggtatgatcctatgtcttcggatccttttttgcatggaaataggacagttgtttttattatacattgttgctgtgactaattctcgcttgtgttgtaccatgtgacatggttagcacatcactgtccacttaaatgatatctcagattttgctagaaggtagaagcacatgattttaagagatttgactaaatgaagccacatttatagatacaccatgatgttaaaagaaaaagattgtctgagtgcgaaatgtcatagtatcttgttctgtctcgtcatatgctgtcgcttggggagtgtgtattgttccatacgagtgaattacttggcaaacatgatgggttcaataagcttatcggagcaaacacattatttcacttgctcttcatggggcatgtagcttccatgtaaaatcaaatcaataggctgtcaaggtgtgtgcaccttcataaaggtgagcgtgcactcatgtatacatgagcatctgcgtctggactaggtctcgcaaaaaaaagagatagtcaaatgctagtgttgtttgcatctctaatgaataatgatgttgctttcctaattttattgttatttaaatattttccatctgtgtgctagaatcacgagcaatctgcaagtacgctgctcgcaaaaacaagccagagctgttgagggaaggaaacctcgaggaggcagcaatggtggatgtttggatcgaggtggaggctaaccagtacaccgctgcactgaatcccatcctcttccaggtcctcatcagtccgatgcttgggggaaccaccgaccagaaagttgtggatgagaaccttgagaagctgaagaaggtgctagaggtgtacgaggcacgcctgaccaagtgcaagtaccttgctggagacttcctcagcctcgccgacctgaaccatgtgtctgtcactctctgcctgtttgctacgccctacgcatctgtgctcgacgcctacccgcatgtgaaggcctggtggtctggtctgatggagaggccgtctgtccagaaggtcgctgccctgatgaagccatctgcttgaaacggttgccctgtcaatcggtgaatggaataagccaagtctgttctgggttgtttgcttgttcagtgatgtgtcttctatgacgaaagttgagtgcctatgtgtgagcatgcttgcttgtaacgagaccttgaattgttcggaaatgagcattcctgtgctcttcttt

SEQ ID NO: 179470 - DNA, 425 bp, Zea mays
  Clone ID: MRT4577_9525C.1
cggcataggagcgaccgcttctgatcccttgaggaaaacaggctttgtggcctcgcgtaccgcgcctaccggtgatgacacagagagggataaaacatgctgccttgctccgggcaccagaggtcggctacggctgcctcattgtacgacttattctgcctcacagggcttggcttcctatgcctcagctgcaactcatgcatggccaattatcggtgcaactgagacgccggcttcaccgcttgcgatatggtatcttatctcgacctgatggccctgttcgtctgcttgcactactacgagcagtggtatcaacagcactcccaatagcgcgcgagggtcaaggctggtgtttgaagcctcacgaccctacttactatcatgttcagataccaggtggctgagaatatgcccctgccagtcaa

SEQ ID NO: 179471 - DNA, 950 bp, Zea mays
  Clone ID: MRT4577_95260C.1
ccggccggaacttgcgtagagagttgggcgcagagaatccccaagcaaacaaacagggtagagggagaggagaggagaggagaggagaggagaggagaggttgggtctgggacaccatggctccgatgaagctgtacggggcggtgatgtcgtggaacgtgacgaggtgcgcaacggcgctggaggaggctggctccgactacgagatcgtgcccatcaacttcgccaccgccgagcacaagagccccgagcacctcgtccgcaacccgtttggtcaggttccagctctgcaggatggtgacttgtacctcttcgaatcacgcgcaatctgcaagtacgctgctcgcaaaaacaagccagagctgttgagggaaggaaacctcgaggaggcagcaatggtggatgtttggatcgaggtggaggctaaccagtacaccgctgcactgaatcccatcctcttccaggtcctcatcagtcctatgcttgggggaaccaccgaccagaaagttgtggatgagaaccttgagaagctgaagaaggtgctagaggtgtacgaggcacgcctgaccaagtgcaagtaccttgctggagacttcctcagcctcgccgacctgaaccatgtgtctgtcactctctgcctgttcgctacgccctacgcatctgtgctcgacgcctacccgcatgtgaaggcctggtggtctggtctgatggagaggccgtctgtccagaaggtcgctgccctgatgaagccatctgcttgaaacggttgccctgtcaatcggtgaatggaataagccaagtctgttctgggtgttttgcttgttcagtgatgtgtcttctattgagtgcctatgtgtgagcatgcttgcttgtaacgagaccttgaattgttcggaaatgagcattcctgtgctcttcttgaaaagaaaaaaaaaaaaaaaaaagcggcc

SEQ ID NO: 179472 - DNA, 258 bp, Zea mays
  Clone ID: MRT4577_95261C.1
agtggtttactgcaaagctgaagactggctcagctcatttctacaggcgatgtaccttaacaactgaagggaaaatggtctaacccttgacatgggacttcttgttgctgacatcaaagaccttggagaattttaagaaagattaaagaatctgatgtaggaaataaatcaaagtgatgagataaaactctttaatttgaagttcacactttgatagtagcataacatagaaggtgctatatatgctgctaatatctt

SEQ ID NO: 179473 - DNA, 1301 bp, Zea mays
  Clone ID: MRT4577_95262C.1
gcgcgccctcccagttcgtctattaaaggggaaccagtgaaccacccgatgcaacttgcgtagagagttgggcgcagagaatccccaagcaaacaaacagggtagaggtagagggagaggagaggagaggagaggagaggagaggttgggtctgggacaccatggctccgatgaagctgtacggggcggtgatgtcgtggaacgtgacgaggtgcgcaacggcgctggaggaggctggctccgactacgagatcgtgcccatcaacttcgccaccgccgagcacaagagccccgagcacctcgtccgcaacccgtttggtcaggttccagctctgcaggatggtgacttgtacctcttcgaatcacgcgcaatctgcaagtacgctgctcgcaaaaacaagccagaaagttgtggatgagaaccttgagaagctgaagaaggtgctagaggtgtacgaggcacgcctgaccaagtgcaagtaccttgctggagacttcctcagcctcgccgacctgaaccatgtgtctgtcactctctgcctgtttgctacgccctacgcatctgtgctcgacgcctacccgcatgtgaaggcctggtggtctggtctgatggagaggccgtctgtccagaaggtcgctgccctgatgaagccatctgcttgaaacggttgccctgtcaatcggtgaatggaataagccaagtctgttctgggttgtttgcttgttcagtgatgtgtcttctatgacgaaagttgagtgcctatgtgtgagcatgcttgcttgtaacgagaccttgaattgttcggaaatgagcattcctgtgctcttctttaaaaaaaactttgccttaggttcctcaaaaaaaaaaaaaaaaaaaaaaaaaaaaaaaaaaaaaaaaaaaaaaaaaaaaaaaaaaaaaaaaaaaaaaaaaaaaaaaaaaaaaaaaaaaaaaaaaaaaaaaaaaaaaaaaaaaaaaaaaaaaaaaaaaaaaaaaaaaaaaaaaaaaaaaaaaaaaaaaaaagggggggccctgttttagggttccaaattttactccccgggtttgccctgttatttttttttttttggggccccaaaaaaaaaaaccgggggccggtttttaaaacgggggggggggaaaaaccctggggtcccccaaataaaagcccttggaaaaaatcccctttttcccaggggggttaaaaaaaaaaaggccccccccgttttccccttcccaaagtggggccactttttaatgggaatggggaccccccctttggggggcaataaaagcggggggg

SEQ ID NO: 179474 - DNA, 260 bp, Zea mays
  Clone ID: MRT4577_95263C.1
ccagcgtccgcggaccgtgtggtgagcgtgacggaaggatatggatgtggcacaggtgcctcaagtgcaaacctaaggatggtgttccacctgccacacggcggataatcatgtcagatgctgtctggtggctgtcgcttgggaaattcctagagctaagtttctcaaaccatgcttctgccaaccgagtttcaagctgtggacattcactccagagggactgccttcgtttttatgggtatggacacatggtggcattc

SEQ ID NO: 179475 - DNA, 444 bp, Zea mays
  Clone ID: MRT4577_95264C.1
cccacgcgtccggagaatccccaagcaatcaaacagggtacagggagaggataggagaggagaggagaggttgggtctgggacaccatggatccgctgaagctgtacggggcggtgatgtcgtgaaacgtgacgaggtgctcaacggcgctggacgaggctggctccgactacgagatcgtgcccatcaacttcgacaccggcgagcacaacatcctggagcacctcgtgctcaacccgttcggtcaggttccagctctgcacgatggcgacttgtacctcttcgaatcacgagcactctgctactacgctgctcgcaaaatcaagccagagctgttgacggaaggaaacctcgacgaggcagccatggtcgatgttttgatcgaggtgcaggctatccagtacaccgttgcactgaatcccatcctcttgcaggtcctcatca

SEQ ID NO: 179476 - DNA, 289 bp, Zea mays
  Clone ID: MRT4577_95265C.1
attccagggtgacataatgcatttaaatttgggatttgggtggagtattatgtttaactggagttgtcaagtatgagtccctcaggaaaaaaaaaaaattctgttttaaaaagcaatctgattcttagctcttgaaactattgctacttaaatttccaataattaaaaatttaaaatttttaaattagaattgccaatacttctacatttgagaagggtttttttagaaatacatttagtaaagtccccaagacattagtcttacatttaaacttttttctttaaaaca

SEQ ID NO: 179477 - DNA, 914 bp, Zea mays
  Clone ID: MRT4577_95266C.1
ccccaggcgaacaaacagggtagtggagaggagaggagaggaaggttgggttcggacggagagagccagaggccatggctccgatgaagctgtacggggcggtgatgtcgtggaacgtgacgcggtgcgcgacggcgctggaggaggccggctccgactacgagatcgtgcccatcaacttcgccaccgccgagcacaagagccccgagcacctcgcccgcaacccgtttggtcaggttccagctttgcaagatggtgacttgtacctcttcgaatcacgtgcaatctgcaagtatgctgctcgcaaaaacaaaccagagctgttgagggtaggaaaccttgaggagtcagcaatggtggatgtttggatggaggtggaggcaaacccagtacacctctgtattgaatcccatcctcttccaggttctcatcagtccgatgcttggaggaaccaccgaccagaaagttgtggatgagaaccttgagaagctgaagaaggtgctagaggtgtacgaggcacgtctgaccaagtgcaagtatcttgctggagacttcctgagccttgctgacctttaccatgtatctgccactctctgcctgtttgctacgccctacgcatctgtgttcgacgcttacccgcatgtgaaggcctggtggtctagcctgatggagaggccatctgtccagaaggtcgctgccatgatgaagccatcagcttgaagcgggctgccctatcaatcggtgaatggaataagccaagtttgttctgggcatttgcttgttcagtgatgtgtcttcgatgttgaaagttcagtgcttatgtgtgagcatgcttgtaatcaggtcttgaattgttttgaaacgagcattcccgtgctcgttttgagaataaactttgcgttaggttcctctgg

SEQ ID NO: 179478 - DNA, 815 bp, Zea mays
  Clone ID: MRT4577_95267C.1
aacttgcgtagagagttgggcgcagagaatccccaagcaaacaaacagggtagagggagaggagaggagaggagaggagaggttgggtctgggacaccatggctccgatgaagctgtacggggcggtgatgtcgtggaacgtgacgaggtgcgcaacggcgctggaggcggctggctccgactacgagatcgtgcccatcaacttcgccaccgccgagcacaagagccccgagcacctcgtccgcaacccgtttggtcaggttccagctctgcaggatggtgacttgtacctcttcgaatcacgagcaatctgcaagtcctcatcagtccgatgcttgggggatccaccgaccagaaagttgtggatgagaaccttgagaagctgaagaaggtgctagaggtgtacgaggcacgcctgaccaagtgcaagtaccttgctggagacttcctcagcctcgccgacctgaaccatgtgtctgtcactctctgcctgttcgctacgccctacgcatctgtgctcgacgcctacccgcatgtgaaggcctggtggtctggtctgatggagaggccgtctgtccagaaggtcgctgccttgatgaagccatctgcttgaaacggttgccctgtcaatcggtgaatggaataagccaagtctgttctgggttgtttgcttgttcagtgatgtgtcttctatgacgaaagttgagtgcctatgtgtgagcatgcttgcttgtaacgagaccttgaattgttcggaaatgagcattcctgtgctcttcttgaaaataaactttgcgttaggatcttgatggttt

SEQ ID NO: 179479 - DNA, 615 bp, Zea mays
  unsure (1)..(615): unsure at all n locations
  Clone ID: MRT4577_95268C.1
gtttttctcagagaatccccaagcaaacaaacagggtagagggagaggagaggagaggagaggttgtntctgggacaccatggcgtccgtatgaagctgtacggggcggtgatgtcgtggtacgtgacgaggtgcgcaacggcgctggaggaggctggctccgactacgagatcgtgcccatcaacttcgccaccttcgtgcacaatagccccgcagcacctggttcgcaacccgtttggtcaggttccagctctgcaagatggtgacttgtacctattctaatcacgcgcaatctgtaagtacgctgctctcaaaaacaagccagagctgttgagggaaggaaacctagaggaggcagcaatggtggatgtttggatcgaggtggaggctaaccagtacatcgttgcactgaataccatccttttgcatgtcctaatgaatccgtatgcttgggggaaccaccgaccagaaagttgtggattagaaccttgagaatctgaagatagtgctagatgtgtactaggcacgcctgaccaagtgtaagtaccttgctggagactttctaagactactcgacctgaaccatgtgtatgacactctctgtctgtttgcta

SEQ ID NO: 179480 - DNA, 673 bp, Zea mays
  Clone ID: MRT4577_95269C.1
agcagtggtaacaacgcagagtacgcaggtgctagttagggttttattctaccgtataatccgatacctcccttgggatggtccaaccccttggtctgacgctcttcaacttttttcttgctttgtttcttcatgttttgtacatagggttaatttcatcttggactcttgcatgttattgtatatcttcaatgagtctttcaatatctttcttgatgtattgatcatctcgatcaccactttgtctttgtccaagttcacatttcatcatctaaactataaaaaaaacaccaacaaataatactagtgcaaatggttatgttgatcatcgaataccaaaactttaattattaatggatctcggtctattttccttataacacagctagactatcttatcagtactaacgtggaaaataatcactcatattgtgcctctaatattgacacattattggcatgtaaaaatgtgtaattgtctaattcatgaccctttattagtgacaccttatagacaaaaacacgtcattgataaccctttagtgtaacacgtatagacaaaacatgtatctggcgagggtctcatcgtagactcgctttggctaaatgcatcactaataacaaaaaaaaaaaaaaaaaaaaaaaaaaagtactctgcgttgttaccactgct

SEQ ID NO: 179481 - DNA, 337 bp, Zea mays
  Clone ID: MRT4577_9526C.1
gaggggaagggtttttttgtttgggctttgtttagaggggtaaaacttcccccacataggtggggggggggcattatttttgccactggtgacattgaattgttttaactaagttttgggatcttagggggcccaggtggtacagttttttggatggttttgttttggggggggcaaaaatggggtacctgttgtttgaaacgttgtcgtacgcgaagtcccttaggaacagaggggccaattttgggaaaacgggcagcttcgggaaggggaggttggggttcttcattatttttaggaccgctttaaaattgatgaaagaccttttttttttgag

SEQ ID NO: 179482 - DNA, 872 bp, Zea mays
  unsure (1)..(872): unsure at all n locations
  Clone ID: MRT4577_95270C.1
cattgggtacctcgaggccggccgggacttgtgtagagagttgggcgcagagaatccccaggcaaacaaacagggtagagggagaggagaggagaggttgggtctggaacaccatggctccgatgaagctgtacggggcggtgttgtcgtggaacgtgacgaggtgcgcaacggcgctggaggaggccggctccgactacgagatcgtgcccatcaacttcgccaccgccgagcacaagagccccgagcacctcgtccgcaacccgtttggtcaggttccagctctgcaggatggtgacttgtacctcttcggtatgatcctatgtcttgggatccttttttttgcatggaaataggacagttgtttttattatacattgttgctgtgactaattctcgcttgtgttgtaccatgtgacatggttagcacatcactgtccacttaaatgatatctcagattttgctagaaggtagaagcacacgaatttaagagatttgactaaatgaagccacatttatagatacaccatgatgttaaaagaaaaagactgtctgagtgcgaaatgtcatagtatcttgttctgtctcgtcatatgctgtggcttggtgagtgtgtattgttccatatgagtgaattacttggcaaacatgatgggttcaataagcttatcggagcaaacacattatttcactcgctcttcatggggcatgtagcttccatgtaaaatcaaatcaagtgcacagatgggacgccttctgattttacttgttactttctgagaagtgttaggcagtcaaggtgtgtgcacccttcataaggtgagcgtccactcatgtatacatgagcatctgcgtctggactangtctcgc

SEQ ID NO: 179483 - DNA, 424 bp, Zea mays
  Clone ID: MRT4577_95271C.1
ctttgttgtggcaatcctcttagtgctgatataatcttctaaaaaaaaaaaaaagaaagaaaaaaaaaaaaaaaaaaaaaaaaaaaaaaaaaaaaaaaaaaaaaaaaaaaaaaaaaaaaaaaaaaaaaaaaaaaaaaaaaaaaaaaaaaataaaaaaagggataacacattaaagattacaaacttacataagctaacctaaaaaacatgatttaactgtaaatgaaactcaaaacaatatcaccatcaatataacaaaaaaactgagatttacaaaacgcacagataaatcacactgaatgtcaaaaagaactaatcctattatttcacattatacacaataacaaaaacgcctacatatatcccgacaaaaaaaattgctaaattacaaatggaaattacaatctatcttatcactaaattt

SEQ ID NO: 179484 - DNA, 362 bp, Zea mays
  Clone ID: MRT4577_95272C.1
gggggcccaaaattaaatgggtccaacatggaaaaaggggccccggacagggccaatccccgggggaaaaacaaaggggccaaacatgataaaggttccgaaattaaaaaaaaaaaccgctttaaaaaagccgaaaggggggattggaattctgcccccaacaaaaatttttacagaccgaaacaggaaaattttgaagttaatctgaattccccgtacaaaagggcaggggccaacatttctgggccttgaatatatgccccagaagcaaaaaaaaaaacagggctgccaaaagtcctccataaacccctatgaatgaaccccataaagggtttgcaaaatttcctggctaaaaaatccaa

SEQ ID NO: 179485 - DNA, 703 bp, Zea mays
  Clone ID: MRT4577_95274C.1
atcctcacttcaggtctgcagcccccaactacccccagcctcggaaggaaccttccagaagcgcaagactctaaaggccgtcgccttcccattcttcctcgccgcgggggtcgcctgagatcacataaacaatggtgaaggctgttgctgtgcttggtagcagcgatggtgtcaagggcaccatctttttcacccaagagggagatggaccacactacaatcctgcgagcaaggagcatggggcaccagaagatgagaaccgccatgctggtgatcttggaaacgtgacagctggagcagatggtgttgctaatatcaatgtcaccgacagccagatcccactgactgggccaaactcaatcattggcagagctgttgttgttcacgctgatcctgatgatcttggaaagggtgggcacgagctcagcaagagcactggaaacgccggtggccgtgttgcttgtgggatcattggactccagggctgaaaacgatcgccggacttgggggtgcctgagaggtccgtctcctgccgtccccagcagacgagcctgaacattcggagacatcgtgaaataagagcgtcgctgatctgtgatcatcgtatttgtcattatgcacctgtagcaaccgatggactggactgtgctggattatgctgttggatcacctgagtatgtgttacatggtcggttttgatgtg

SEQ ID NO: 179486 - DNA, 391 bp, Zea mays
  Clone ID: MRT4577_95275C.1
attcggctcgagctgatgtacatgctaagggtttatctaactgttccagcgcacaagtgcctgatgaagctaaaagcgggcccagagttaggccaaggttgggtcttaagaccgtgtgtaaagaggctgctggacctgttgctaatgcttgtgcttctcaggtcaaacagtcattaatggatccattggttgtggagatagctgtacccctgagattcattgcacatatttgtttgaaaagggaagattgatgctcaatgtgagggaaaatatgctacgtactgaggcatacaacgtgatcctcagtctgttcgaagatatgccccaccttcaccacagacgtgcatgttaaaatggacccgagcacaaagaagctcccaccgtctattga

SEQ ID NO: 179487 - DNA, 492 bp, Zea mays
  Clone ID: MRT4577_95276C.1
gcgcgggtcctccagctcactagtcagcagaactatccagaagcgcaagactccaaagccgtcgccttcctatccatcccttcctcgccgcgggggtcgcctgagatcacataaacaatggtgaaggctgttgctgtgcttggtagcagcgagggtgtcaagggcaccagcttcttcacccaagagggagatggccctaccactgtcactggaagtgtctctggcctcaagcctggcctccatgggttccatgtgcatgcacttggtgacaccaccaatggctgcatgtcaactggaccacactacaatcctgcgagcaaggaacatggagcaccagaagatgagaaccgccatgccggtgatcttggaaatgtgacagctggagcagacggtgttgcaaacattaatgttaccgacagccagagctgttgttgttcacgctgatcccgatgatcttggaaagggtggacacgagctcagcaagagcaccgg

SEQ ID NO: 179488 - DNA, 813 bp, Zea mays
  Clone ID: MRT4577_95277C.1
acctaccaaaaccctcacggatccctggcatttcgatcgcctcactctgtaccccggacgagttgcagttggatctcagatcggtgatcacataaacaatggtgaaggctgttgctgtgcttggtagcagcgatggtgtcaagggcaccatcttcttcacccaagagggagatggccctaccactgtcaccggaagtgtctctggcctcaagcctggcctccatgggttccatgtgcatgcacttggtgacaccaccaatggctgcatgtcaactggaccacactacaatcctgcgagcaaggaacatggagcgccagaagatgagaaccgccatgccggtgatcttggaaatgtgacagctggagcagatggtgttgcaaacattaatgttaccgacagccagatcccactgactgggccaaactcaatcattggcagagctgttgttgttcacgctgaccccgatgatcttggaaagggtggacacgagctcagcaagagcaccggaaacgctggcggccgtgttgcttgtgggatcatcggactccagggctgaactgaaacaaatggtcgctggacttcgggcgcgcctgggagtgccgtcaccagcaggctagaataacatcccgaagacatcgtgaaataataataagagcgcctaatatgtcatatgtgatcagtggtgtacttgccattaagcacctgtggcaaccgatgagctgaactgtgttggactgttggctaaaatgctggttcgcctgaggatgtgttacatgtctgtcggttctaaaaaaaaaaaaaaaaaagcggcc

SEQ ID NO: 179489 - DNA, 1008 bp, Zea mays
  Clone ID: MRT4577_95278C.1
ccagcctcggaaggaaccttccagaagcgcaagactctaaaggccgtcgccttcccattcttcctcgccgcgggggtcgcctgagatcacataaacaatggtgaaggctgttgctgtgcttggtagcagcgatggtgtcaagggcaccatctttttcacccaagagggagatggccctaccgctgtcaccggaagtgtctctggcctcaagcctggcctccatgggttccatgtacatgcacttggtgacaccaccaatggatgcatgtcaactggtgtttatttttctttttctttggcttgcttatgtgatcagggtgtgtgctaagttaatatcagtcattgaactttctacttgttggtgaaatcaaggaccacactacaatcctgcgagcaaggagcatggggcaccagaagatgagaaccgccatgctggtgatcttggaaacgtgacagctggagcagatggtgttgctaatatcaatgtcaccgacagccagatcccactgactgggccaaactcaatcattggcagagctgttgttgttcacgctgatcctgatgatcttggaaagggtgggcacgagctcagcaagagcactggaaacgccggtggccgtgttgcttgtgggatcattggactccagggctgaaaacgatcgccggacttgggggtgcctgagaggtccgtctcctgccgtccccagcagacgagcctgaacattcggagacatcgtgaaataagagcgtcgctgatctgtgatcatcgtatttgtcattatgcacctgtagcaaccgatggactgaactgtgctggattatgctgttggatcacctgagtatgtgttacatgtcggttttgatgtgacatcctatcgtttcgatgtgttttgtggaagtgttgttgcaagatttcaacagtcacgacttggttttgatatgcagtcagcagcagctcctgagttgtgattaaaaaaaaaaaaaaaaaaaaattaaaaaaacaaaacc

SEQ ID NO: 179490 - DNA, 410 bp, Zea mays
  Clone ID: MRT4577_95279C.1
cgggaggaaattgccactaccaccgccggatctcaacgacgctaggcggctctcgcgctatgggccacacagtagggctcaaaggggacatgccctagcgaggccggcggtgaagctgtcaagcgcctcctgcgcacgatggaaggcggtagaggcctacgcacggaggacatcatggcaacagaaggtcacggtgaaggaggatgcgacacctgacgatgtccagcaaactgtttccaagaatgttaagaacacgtccttctgggagggtgagggcgtgacaggggaatccgccacacctgcagcggccaccgcctgaaggttcgatgatcaggaagtgcccggcacaggcgtgcaaaaaaaaaaatgcgaatgtatgtagagtggatctgatacaaaaacttgcagac

SEQ ID NO: 179491 - DNA, 365 bp, Zea mays
  Clone ID: MRT4577_9527C.1
ccacacctctggcaaggagtacaagctgaaaccaattggtgatgctggccctgtaatggaggcgggagggatctttgcctacgcccggaagacaggaatgattgcgtcgaaagctgctgcatgagggaaaggccttagactgcaggtctgatcaactacggtggttggcgtggtgagagatctgcgagcggtatcgaactagtggattggcagggagaggttgagaggaaatgcactaacttagcagcttttgcgttttgggaggtggatccaccagtgggcagactgcccaaaatgatggattggcagaaagaggttaagaggaaatgcactagcatagcaggttttgcggtttgggaagtgga

SEQ ID NO: 179492 - DNA, 712 bp, Zea mays
  unsure (1)..(712): unsure at all n locations
  Clone ID: MRT4577_95280C.1
ggccgggctcatccttgcttcaggtctgcagcccccaactacccccagcctcggaaggaaccttccagaagcgcaagactctaaggccgtcaccttcccattcttcctcgccgcgggggtcgcctgagatcacataaacaatggtgaaggctgttgctgtgcttggtagcagtgatggtgtcaagggcaccatctttttcacccaagagggagatggccctaccgctgtcaccggaagtgtctctggcctcaatcctgcgagcaaggagcatggggcaccagaagatgagaaccgccatgccggtgatcttggaaatgtgacagctggagcagatggtgttgctaatatcaatgtcactgacagccagatcccactgactgggccaaactcaatcattggcagagctgttgttgttcacgctgatcctgatgatcttggaaagggtgggcacgagctgagcaagagcactggaaacgccggtggccgtgttgcttgtgngatcattggactccagggctgaaaacgatcgccggacttgngggtgcctggagaggtccgtctcctgccgtcgncagcagacgagcctgaacattgggagacatcgtgaaataagagcgtcgctgatctgtgatcatcgtatttgtcattatgcacctgtagcaaccgatggactanactgtgctggattatgctgntggatcactgagtatg

SEQ ID NO: 179493 - DNA, 872 bp, Zea mays
  unsure (1)..(872): unsure at all n locations
  Clone ID: MRT4577_95281C.1
aaaaaaaaaaaaaaaaaaaaaaaaaaactcgtcgcagcccccaaggccccaactacccccagtctcggaagagaactatccagaagcgcaagactccaaagccgtcgccttcctatccatcccttcctcgccgcgggggtcgcctgagatcacataaacaatggtgaaggctgttgctgtgcttggtagcagcgagggtgtcaagggcaccatcttcttcacccaagagggagatggccctaccactgtcactggaagtgtctctggcctcaagcctggcctccatgggttccatgtgcatgcacttggtgacaccaccaatggctgcatgtcaactggaccacactacaatcctgcgagcaaggaacatggagcaccagaagatgagaaccgccatgccggtgatcttggaaatgtgacagctggagcagacggtgttgcaaacattaatgttaccgacagccagatcccactgactgggccaaactcaatcattggcagagctgttgttgttcacgctgatcccgatgatcttggaaagggtggacacgagctcagcaagagccccggaaacgctggcggccgtgttgcttgtgggatcatcggactccagggctgaactgaaacgaatggtcgctggacttcgggggcgcctgggagtgccgtccccagcaggctagaataacatcccgaagacatcgtgaaataataataagagcgcctaatatgtcatatgtgatcagtggtgtacttgccattaagcacctgtggcaaccgatgagctgaactgtgttggactgttggctaaaatgctggctcccctgacccaaaaaaaacaaccaaaaaaaaaaaaaaaaaaaaaaaangtattt

SEQ ID NO: 179494 - DNA, 369 bp, Zea mays
  Clone ID: MRT4577_95282C.1
attccccgcccgacccatacgtccagtcacacttccgtatcacttcttctttttttcctttatctccctgaatcaccatttgccggctacttagagttccaaaataaccaaatcatacttacagattctcatcataatacaattccttacctacaaatctacactatacaactacctaccactactttcataacaccttcataaactacaccgaaaacctatactcaaaaatcatcctatacacacacacacatatgtacctctaattaaacttcaacaacttatccacgtatcaaacaatgccgaaatccattaacatcattaaccccaatcatctctaccatcatatcatcaacttctactaatccc

SEQ ID NO: 179495 - DNA, 838 bp, Zea mays
  Clone ID: MRT4577_95283C.1
gaggtatgctacctaccaaaaccctcacggatccctggcatttcgatcgtctcactctgtaccccggacgagttgcagttggatctcagatcggtgatcacataaacaatggtgaaggctgttgctgtgcttggtagcagcgagggtgtcaagggcaccatcttcttcacccaagagggagatggccctaccactgtcactggaagtgtctctggcctcaagcctggcctccatgggttccatgtgcatgcacttggtgacaccaccaatggctgcatgtcaactggaccacactacaatcctgcgagcaaggaacatggagcaccagaagatgagaaccgccatgccggtgatcttggaaatgtgacagctggagcagacggtgttgcaaacattaatgttaccgacagccagatcccactgactgggccaaactcaatcattggcagagctgttgttgttcacgctgatcccgatgatcttggaaagggtggacacgagctcagcaagagcaccggaaacgctggcggccgtgttgcttgtgggatcatcggactccagggctgaactgaaacaaatggtcgctggacttcgggggcgcctgagagtgccgtcaccagcaggctagaataacatcccgaagacatcgtgaaataataataagagcgcctgatatgtgatcagtggtgtacttgccattaagcacccgatgagctgaactgtgttggactgttggctaaaatgctggttcgcctgagcattgttacatggtctgtccggttttgatggcattccgaccaaaaaaaaaaaaaaaagcggccctcgagctcagctttgt

SEQ ID NO: 179496 - DNA, 881 bp, Zea mays
  Clone ID: MRT4577_95284C.1
ggctgcgcctacaaatccagcacaggcgcgcatcccggcatcccgctcctcctccacctcgtcgcagcccccaaggccccaactacccccagtctcggaagagaactatccagaagcgcaagactccaaagccgtcgccttcctatccatcccttcctcgccgcgggggtcgcctgagatcacataaacaatggtgaaggctgttgctgtgcttggtagcagcgatggtgtcaagggcaccatcttcttcacccaagagggagatggccctaccactgtcaccggaagtgtctctggcctcaagcctggcctccatgggttccatgtgcatgcacttggtgacaccaccaatggctgcatgtcaactggaccacactacaatcctgcgagcaaggaacatggagcgccagaagatgagaaccgccatgccggtgatcttggaaatgtgacagctggagcagatggtgttgcaaacattaatgttaccgacagccagatcccactgactgggccaaactcaatcattggcagagctgttgttgttcacgctgaccccgatgatcttggaaagggtggacacgagctcagcaagagcaccggaaacgctggcggccgtgttgcttgtgggatcatcggactccagggctgaactgaaacaaatggtcgctggacttcgggcgcgcctgggagtgccgtcaccagcaggctagaataacatcccgaagacatcgtgaaataataataagagcgcctaatatgtcatatgtgatcagtggtgtacttgccattaagcacctgtggcaaccgatgagctgaactgtgttggactgttggctaaaatgctggttcgcctgaggaaaaaaaaaaaaaaaaaagcggcc

SEQ ID NO: 179497 - DNA, 129 bp, Zea mays
  Clone ID: MRT4577_95285C.1
ggggggagggatggaagcctcgggccgggatttccgggttggcccaaggcttccgggaagggaaattggcggtcctgggggcctgaccaaactttccgtggttgttccattcgggggcaatgggctggg

SEQ ID NO: 179498 - DNA, 994 bp, Zea mays
  Clone ID: MRT4577_95286C.1
ttgggtacctcgaggccggccggggtatatagagacctgctggtcgtcgaggaatagcaacgcaacttgactgctctgtccggctgcgcctacaaatccagcacaggcgcgcatcccgctcctccacctcgtcgcagcccccaaggccccaactacccccagtctcggaagagaactatccagaagcgcaagactccaaagccgtcgccttcctatccatcccttcctcgccgcgggggtcgcctgagatcacataaacaatggtgaaggctgttgctgtgcttggtagcagcgagggtgtcaagggcaccatcttcttcacccaagagggagatggccctaccactgtcactggaagtgtctctggcctcaagcctggcctccatgggttccatgtgcatgcacttggtgacaccaccaatggctgcatgtcaactggaccacactacaatcctgcgagcaaggaacatggagcaccagaagatgagaaccgccatgccggtgatcttggaaatgtgacagctggagcagacggtgttgcaaacattaatgttaccgacagccagatcccactgactgggccaaactcaatcattggcagagctgttgttgttcacgctgatcccgatgatcttggaaagggtggacacgagctcagcaagagcaccggaaacgctggcggccgtgttgcttgtgggatcatcggactccagggctgaactgaaacaaatggtcgctggacttcgggggcgcctgagagtgccgtcaccagcaggctagaataacatcccgaagacatcgtgaaataataataagagcgcctgatatgtgatcagtggtgtacttgccattaagcacccgatgagctgaactgtgttggactgttggctaaaatgctggttcgcctgagcatctgttacatgtctgtcggttttgatggcattccgaccgtttcgttgtgctttgcgctgaaaaaaaaaaaaaaaaagcggcc

SEQ ID NO: 179499 - DNA, 157 bp, Zea mays
  Clone ID: MRT4577_95287C.1
acccaactatcttaatcggtcagggagttgggcgttcttttttgactgcaaaaacccaaaacaatggccgcaaaagcccatgattacgcctaaagggcggacgccaactcacaacgacgtacccacggcatcagaggcccacacagaaaaagggaga

SEQ ID NO: 179500 - DNA, 524 bp, Zea mays
  Clone ID: MRT4577_95288C.1
ttgggtaccccttcgaggggccggccgggccctctatctactagcggcgaccgcgtgtggtcctccgtctgccttcatttggttcacgataatgtacgttccgaggcgcgagagcaccacgccggtgtcctagcacgttgatcggaccgtgactagagcaccattggcgcccagggcatgcatgaagcatacgaaggggccacaggctgacctacgactgagacggccacacccctcggttacgttatagagcatggacgtagagtccgattaagtttcactgcctgctaccatataaagggcaaaactgacagttcttcaagctatttgttacatccggatcatttcgcgagcatcaacttgccatggggcacaaggccatcatgctcatctctacatccgtaagcattatccggtatcttaggatcatcatacatttgatcgcattcgccgtgagctattacaactaggctctctttgctgtcttgatacttcgtcagctactggcttgatggctgggatgg

SEQ ID NO: 179501 - DNA, 355 bp, Zea mays
  Clone ID: MRT4577_95289C.1
caccgcgtcagatcgcgagtaagcactcccatcctcaatccctgccctccgcggctccgccgtaaaccccgctgttcttcgccggagcactccctcccggaacccccgccgcccccgggcccccgacctcgatatcgtgggagcccgccgttgggggcctactgcatgctcaaatcgtcgacactggggcggggcgaggtagagatccggacggactacggatcgatttcttcgctcgctggacggtactcaagttatcattcatcacactattatatatcatgccatatttgaaccttcatgagtattggatgtgatacataatgtacacataatccacatggaactattctta

SEQ ID NO: 179502 - DNA, 248 bp, Zea mays
  Clone ID: MRT4577_9528C.1
caataagcatgggcttctggtaataaataactggtggtcaaccaaatccacccaagcagcaggcaaatccggttgccaatgaggaggcagcctcagacaaagcaccctgagctgcagctagcctagcaatcggaaccctgaaaggggagcaagaaacgtaatccaacccagccttcgcgaagaagggcacagaggaagggtctccaacgggttctccaaaatgcccacttcaagttaggcctagcttt

SEQ ID NO: 179503 - DNA, 357 bp, Zea mays
  Clone ID: MRT4577_95290C.1
ttttataaaaaagggcgggcaccagcttctttttttcgcgctccaacaggaaaccaacctttcggccttgcaaataaacacatatcaccccgtgtggcaggaacaacccaaaacggaaaccccacccgttcgctccaacctgacaaccgcaaatggtaatcacacccccccaaaaaaacaagaggtgctcttagcaaaccaacctttcaatctggaaccaaagggtgaaccccaccttttgccattcttttaccccaaaaataagattcccaggtatataaaaagcctcaaatctggattcccaccggaggggcaaaaaaaagaccagggggcgccccctttttatcataccccaaa

SEQ ID NO: 179504 - DNA, 237 bp, Zea mays
  Clone ID: MRT4577_95291C.1
atggcgctgaccaacttcatcgtgacggtggccgttgtcggcgcgggtgtgctcctcttcaccaccgacatgcgcaggtccggcgccctcttccgccgcaatgcgcgccagctccagcagtggctccaggaggacacggcctccgccgcgtccaaagtttattttggtgtccgttgccaaagatttttccctatcatcttcattgggatgatttttgcgacttcatcatatttgtga

SEQ ID NO: 179505 - DNA, 775 bp, Zea mays
  unsure (1)..(775): unsure at all n locations
  Clone ID: MRT4577_95292C.1
ctgtgcggcgctcgaggcggccgggctgcgagtcgtgttcgacagtgattaatcctccgcccgtgaggattagtctgcctgtccaccatagctgtcctcagcgccgtcagtccttgtgtagccgtcgcccgttgtcttgctccgcccccgctcgccaggtctagacgcgtgcgcagactccgcctgggcgtcccgctgtcgtgccccgtctaagatgcgcgagctagctgatcccctcttacagccatggctgctccggtcgttgcatgctccccggcgctccgggtccaagtgaaagcagccgtgaatgcagcgtcgtttcgggtaccggcatctctcagtttccccaggcaaagagtaagctttccatcaattcggacgcggcggattctgaaaagctcctgctcgctaataagtactcccaggcaagtgatgatgacttcgtcatctactatttactcattatgaataagaagatgtcgttctttccttggagcgccaggcggacggacgccaatggtcatgtacatcggcacatacctgccgttggtgagcaccttgacgacgtagtcctcgacgctgatccacgcacggcacctcctgattaatcactgtcgaacgttcctcgtcgtctaccacaggaagcagcaaaggtaacaggtagctgacggcgtgacatccaagcagattaatcactgccgaacactcctattaatgcagagatcgagtctatatcgacgtttgcatgttgatcngaactctctcctgcgctttt

SEQ ID NO: 179506 - DNA, 942 bp, Zea mays
  Clone ID: MRT4577_95293C.1
gcctcgagctcaaggcgataaggccatttatcatcgggccgaaaccacgcactaaaacaccataccgcgcgtgagagctcgtcgtcgtttccgacggtgaagccacgcggaggatagccatggccgccttactccaccaagcggctaccccgaccgcaaaaccaccccaccgcccatgggctctcaactccacacacagccgcctctcaccgctctctaaacgacggcgcgccccagccatccgctcggcggccacggacagcagcttcagctccggcgagacgccgtccaagaagaccacccggaaggagaagcaacaggagcggcggcggcagcaggacgtgcaggaacggcagcagcagctcctggggatggaagaagcgtccctggcgaagcaagacggcggcggcggcagcaacagcaacagcaacggcgaggttgacgacgacgacgagcttccgcagcccgtgttcgaccgcatcctgcgccggatcgcgttcacggtgggccttcccatggcgtcgggcgtcgcgctgctcaacgtgtacgacgcgctcaagcgcggccagggggtggtggtgccatcgtgggtgccattgctgaccatcctcgtcgccttcggcacgtcggcgctgggtatcgcctacggcacgctgtcggctagctgggaccccgacaaggaagggtcgctgctcggcatcgacgaggcccgggccaactggcccgtgctgtggcaggaagagattgagaagcagaaggcaaagcagaagaagaaatgaccggctggacatgagactgaaaatcttgcgcaccttgctactgatcatgtaatattcgttgggggtatcgatcctacctttcagtaaaaagaaaatataaattagctgagtaataaaaaaaaaaaaaaaaaaaaaagaaaaaaaaaaaaaaaaaaggccccta

SEQ ID NO: 179507 - DNA, 804 bp, Zea mays
  Clone ID: MRT4577_95294C.1
agccgcaccttccacctcacctcacctacccgctccctctccctctccctctcccactccacggctgcaccgcacctgctccgttggaagggagcaaaccctccgtcgcctatttagccgagaccccgagcgtggagactgcacacatcccatcccatccgcagcggctttacctaccgagaagaagagagaaaaaaggttcgagtgcgttccagagtgaggagtgagaagagatggctccggtgaagctgtacggcgcgaccctgtcgtggaacgtcaccaggtgcgtggcggcgctggaggaggccggcgtcgagtacgagatcgtacccatcaacttcggcaccggcgagcacaagagccccgaccacctcgccaggaaccccttcggccaggtgccagctttgcaggatggtgacttatacgtcttcgaatcacgtgctatttgcaagtacgcgtgccgcaagaacaagccagagctgttgaaggagggcgacatcaaggagtcagcaatggtggatgtgtggctcgaggtggaggcccatcagtacactgccgctctgagccccattctcttcgagtgccttatccatcctatgcttgggggagccactgaccagaaggtcatcgacgacaaccttgttaagatcaagaacgtgctggcggtgtacgaggcgcacctgagcaagtccaagtacctggctggagacttcctcagtcttgcggaccttaaccatgtgtctgtcaccctgtgcttggcggctacaccctatgcgtctctgttcgacgcgtacccgcatgtga

SEQ ID NO: 179508 - DNA, 212 bp, Zea mays
  Clone ID: MRT4577_95295C.1
gcagatgcccttgttcttaatgctgcggcgtcccttcttgtcagtggggaaatgaaaaattttcatgacggggttgctttttcacacgagacacaacggggccgggaaaacacctatacaccttgggcctggataaaaaaatcaaatagttccccaaactgagggaagatgggttgccatatataggtttttgcgataagacatgaggaatg

SEQ ID NO: 179509 - DNA, 371 bp, Zea mays
  Clone ID: MRT4577_95296C.1
acatagactctgggcctaggaatatcactgcgcgctgtttcaacgctgtgtctctcatcttaaggacatgtttggagaccatgctatttctaagaactagcttggatgacaacttgagaagcgtgagacatcaagatcaaccacatagatttaccagagcgagctgaacatggcatcatttttatactaacaactcttgattaaatgctactcgactgctctcagtgatgtacatgattttcatgattacttgaagtctgataacagaaatcaaaattgaggcagtattaacctgggacatactgtggtggtctttgtctctaaaccattctgatgtaaaagtatctagatactgcatcacactaacggcc

SEQ ID NO: 179510 - DNA, 425 bp, Zea mays
  Clone ID: MRT4577_95297C.1
ttaatttttttatgtgttttttttttagtttggggttttttaaagaagaaaaacaaattaatgggtatcaacatttaaccaggtggaaacaaaaaccaccacttttggacaaacatgggtcatcttaggggacaacgccaactcatcatttcgacttggctatgcaatgcaacttgaaacaaaagacacacatgcattttggagcatcaattaatccacgtacgtacaccctttccgatccaaaagacaatgaaggctctttgcatagccgttgagcttaattgcgcggggacaaaatttgtggcttaggcccatgcgttgtttttgactggtgtaacgatttggtcaacgaggttcttgagcgggccctttccggttactatgggccggactaataaaccgaacttggaaaacatggggagggg

SEQ ID NO: 179511 - DNA, 355 bp, Zea mays
  unsure (1)..(355): unsure at all n locations
  Clone ID: MRT4577_95298C.1
taanggggnttatnttggtatttgtctggggtcgccntaggaggtctggtgagaatagtgttaatgtcattaaggagagaaggaagagaagtaagccgagggcgtctttgattgtgtagtaagggtggaaggtgattttatcggaatgggaggtgattcctagggggttgtttgatcccgtttcgtgcaagaataggaggtggagtgctgctagggctgcaataatgaagggcaagatgaagtgaaaggtaaagaatcgtgtgagggtggggactgtctactgagtagcctcctcagattcattgaactaggtctgtcccaatgtatgggatggcggatagtaagtttgtaatta

SEQ ID NO: 179512 - DNA, 736 bp, Zea mays
  unsure (1)..(736): unsure at all n locations
  Clone ID: MRT4577_95299C.1
ccggccgggaattgcttcacccagacggccgaaggattgccaattgcctacgccatcaatatgatctcgagatcgacccttgcgcgaaccgcgcagcaggctgcccgccagtcctgccgcgtccagcgacgaacatacgccgccgctgcttcgaccggatcatacgagacctcggatgcgtctggcctcaagattgcctcgcgggatgcccacggccctaccaccaagctcgctgttgtagccaaggccggtactcgataccagcctctacccggcctcactgctggccttgccgagtttgccttcaagaacacccagcgacgatctgctcttcgcatcactcgcgagtctgagctccttggtggtcaattggcttcttcccactccagggaggctgttgttgtcgaggctaacttcctccgtgaggatctgccttacttcaccgagctgctcgctgaggtcatctccatgaccaagtacaccacccacgagttccacgaggatgtcgagcgtgttcttcaccacaagcaggccgccctcaacgccgacgtagccgccactgctcttgacaacgcccacgccatcgctttccactcaggtctcggttcctccatcctccccagctcatcaactccctaccagaagtacatgaacgaggagtacattgccagnctacgccgatgtcgcttatgccaagtccaatatcgccctcgtcgccgacggtgcctctgccgat

SEQ ID NO: 179513 - DNA, 231 bp, Zea mays
  Clone ID: MRT4577_9529C.1
cggacacgaaccattcgctgtccccgtcgctgtcgacgactatgcccgcgaccgatctacgggcatcgctacgatgatcctgatctgcatcgaccacttccaacacattttgagcgtgatgaacacctacgtggatgggtagcacaagatcacgattcacatgacctccatacaggtcgtgctgctcagcatatcaacatcgtatgcaacaaagccgacatcgacatgaac

SEQ ID NO: 179514 - DNA, 400 bp, Zea mays
  Clone ID: MRT4577_952C.1
ggggtggggggggggttttttttttttttttttttttttttttttttttttttttttttttttttttttttttttttttggaccaaggccacgggactgcaattttcctatttgcaaaattcctcataaaacaagcgattttaaaaaaccggggggggggggcacactactttgcatcaaaaacaccggtaccttggggcccctaaaggctctcaggaataataataataataataaaagcaaaagggggaagctactaagggcaccagtatgcaacacaaaaatcaaccggtgcaaactgggcttattttactagcaagaagagggggacctacttaagcaatgctagggacctacttcaactttgaaaggatctcctcggaaggaacttccaggggag

SEQ ID NO: 179515 - DNA, 295 bp, Zea mays
  Clone ID: MRT4577_95300C.1
cggacgcgtgggggttcccaatgcaaatgtaaagagagaaaggaagtacaaaagcgtgatgatgtttaccttttccaattgcatgccattgagcaattaaagcaaccgggggtatctaattagagctgaccctctccccacttgaagcacatttaatcatcccttttttgtgtggttctgcctaggaaggtcatttggatatgtgtgacaaccagcgcagtgccatttacattaggatggtaaattgtgcatcaagagaagatagggcttgatttctatgattgagcaaaggtga

SEQ ID NO: 179516 - DNA, 820 bp, Zea mays
  unsure (1)..(820): unsure at all n locations
  Clone ID: MRT4577_95301C.1
tcgaggccgtgccgaaaaaaaaaaaaaaaaaaaaaaaaaaaaaaaaaaaaaaaaaaaaaaaaaaaaaaaaaaaaaaaaaatcccctccctcgccccttcgcctcgcctctcttcttcggatcgagcagcagtactgcactgcatgccgccgatacaaatcccatcctctccctcctctactgcacctgcaccacagtagctagctagctatctttgctacggcggctctgtaatctggtccactagcgctccattcgaccccacccacagccatggctgccgtgaccgcggcggccgtctctctgccctcctcctcctcctcccctgccgccgccaaggccaaggcgtccgcgtccgcgtccccgtcgtctccatgcggccacctccagttcccgcggcggcacggcggcccgcgcgcggtgcggctgcgggtgcaggtgtccaccaccgagaccgcggaggcggagccggtcaagaagctggagaaggtgtccaagaagcaggaggaggggctcgtcaccaacaagtacaagcccaaggagccgtacgtcgggaggtgcctgctcaacaccaggatcaccggcgaccaagcgcccggggagacgtggcacatggtcttcagcagcgccctcggagatttcggcgactccaagacggtgtcgctgtgcgtgaagaggctggtctacaccaacgatcagggggaggtcgtcaaaggagtctgctcgaacttnctctgtgacttgaagccaggcgctgaggtgaagatcacagggccagtgggcaaggagatgctcatgcccaaagaccccaacgcaacaat

SEQ ID NO: 179517 - DNA, 262 bp, Zea mays
  unsure (1)..(262): unsure at all n locations
  Clone ID: MRT4577_95302C.1
ttttactgaagttttgtcgatctcgaatgatattatttgaaaagactttgtngacaaaaaaaaaaaaaaaaaaaaaaaaaaaaatnntaaataaaaaaaagaaatgaaaattaaatattaaaagaacaaaaaagaaataaggacctatttataacttaatattgaaccttggtgtctttatatgtttaaatctttgtgccatatgccttatttcttgcttccataatttttttcttataaatnggcaatttggttttatatt

SEQ ID NO: 179518 - DNA, 1780 bp, Zea mays
  Clone ID: MRT4577_95303C.1
gatcctcccacccgtccgcgccttcccactagctatggctgccgcgcgccccgtcccccgctccccgtccgcctcaccctccattggtcgcgagcctcgagggcgggccgggacaaggagtgagtgggcagcagccactcgctctccccacctcgtctctcttccactcatcccctccctcgccccttcgcctcgcctctcttcttcggatcgagcagcagtactgcactgcatgccgccgatacaaatcccatcctctccctcctctactgcacctgcaccacagtagctagctaggcagctatctttgctacggcggctctgtaatctggtccactagcgctccattcgaccccacgtacccacagccatggctgccgtgaccgcggcggtcgtctctctgccctcctcctcctcctcccctgccgccgccaaggccaaggcgtccgcgtccgcgtccccgtcgtctccatgcggccacctccagttcccgcggcggcacggcggcccgcgcgcggtgcggctgcgcgtgcaggtgtccaccaccgagaccgcggaggcggagccggtcaagaagctggagaaggtgtccaagaagcaggaggaggggctcgtcaccaacaagtacaagcccaaggagccgtacgtcgggaggtgcctgctcaacaccaggatcaccggcgaccaagcgcccggggagacgtggcacatggtcttcagcacagaaggcgaggtcccctacagagagggccagtccatcggcgtcatcgcggatggcgaggacaagaacggcaagccgcacaagctcaggctctactccatcgccagcagcgccctcggagatttcggcgactccaagacggtgtcgctgtgcgtgaagaggctggtctacaccaacgatcagggggaggtcgtcaaaggagtctgctcgaacttcctctgtgacttgaagccaggcgctgaggtgaagatcacagggccagtgggcaaggagatgctcatgcccaaagaccccaacgcaacaatcatcatgctcgcaacgggtaccggcatcgctccgttccgctccttcttgtggaagatgttcttcgaggagcacgaggactacaagtacaccgggctggcgtggctgttcctgggcgtcccgaccagcgacaccctgctgtacaaggaggagctggagaagatgaaggagatggcgccggacaacttccggctggacttcgcggtgagccgggagcagacgaacgcggccggggagaagatgtacatccagacgcgcatggcggagtacaaggaggagctgtgggagctgctcaagaaggacaacacctacgtctacatgtgcgggctcaagggcatggagaagggcatcgacgacatcatgctcgacctcgcagccaaggacgggatcaactggttggactacaagaagcagctcaagaagagcgagcaatggaacgtcgaagtctactgatgatgatccttcattatactgttcagctcaagcaatctggtggtgatgagtttgcattgcattgtacgtagtattgcggagatcaatcgaatcgtttggctcgtcgtcattctatcgatgtacatacattatatatgatgaaagacatatataatcgtttctttcaggaatttgttgtctctctgcacgtgaatttgttgcgagaaagaaaggacacacattagccttttctttattagggcaattatgaattatacccttctctgaaaaaaaaaaaaaaaaataaaaaaaaaaaaagcggcc

SEQ ID NO: 179519 - DNA, 186 bp, Zea mays
  unsure (1)..(186): unsure at all n locations
  Clone ID: MRT4577_95304C.1
gttttcaaaatggggctgnctgcactggattttcaaacatgcctgtccgtatgcatcctcctgatgtgtccattctccgtgattgagtccgcggcttgctgaaggcatccgacccctacctccagccgacacgccaccaacttctcaaatctacatctctacccggacaacgtgcaggcctccata

SEQ ID NO: 179520 - DNA, 376 bp, Zea mays
  Clone ID: MRT4577_95305C.1
cggacgcgtggggcctctcttcccgaaccccgtccgagagggcgagagcgagagcagtcgctccggcgagagaggaaggcagccgtccctccgcgatgagggccaagtggaagaagaagcggatgaggcggctcaagaggaagcgccgaaagatgaggcagagatccaagtaggcagatccatggagtgtccgcctggagtccttgtgttcggttgctgtttaccgaataattttagttttctttagtaacagagtctgtaatgtatctgaaggtctttacaatcatcatctgtccgtgatctgtaatgaagcctaccgtcatctgaatattgttccgaaacattttttttctccatatagaaccattattacatc

SEQ ID NO: 179521 - DNA, 749 bp, Zea mays
  unsure (1)..(749): unsure at all n locations
  Clone ID: MRT4577_95306C.1
aattcggcacgaggcttgccgccgcagatgtccctgatggcaagcctcagcaacccgtacatcgtcgagtacaaggacggatgggtggacgaggggacctccgtctgcatcgtcacaagctactgcgaaggaggggacatggccgagaggatcaagaaggcaaggggcatcctattctcagaagagagggtgtgtcggtggttcacgcaattgctcctcgccctcgactacctgcactgcaaccgtgtgctccaccgtgatctcaagtgttccaacattttattgacaagggataacaatatcagactcggtaagatgtgaagtgctgaatcactgaactgtctttgtcagacaatgagtatcttgacacgaatgaataataattcaccatttctttgacagctgactttgggctggcaaaactgctcatggaggaccttgcctcatcggtaggaataggatccacactttttcgttggagcatttttaatgtaaatcagtatataataatacaggcaaaaaacacattntccgggttggaattaggaaactggacacaactcttccactagtcatgttttcccacaccgaatcacggcacgatgttatcaccagtatgtctgtatgacatntgatattcagtgacatttttacagctcatgttaaccaaanaagagtagcatgaaaagtaaatgccatttcaaaaattagttggcagaaatttctgcatatccccactatatgctaac

SEQ ID NO: 179522 - DNA, 332 bp, Zea mays
  Clone ID: MRT4577_95307C.1
atcacttctcccactcccacgacgaccaccaccaccattcccacggggacggtggcggccatgcggctgggggatcgtgggtaggggaggacggactcgtgtggctctcggacgtcggattggtgcgcgacttccaggagcccatggactccccctgagtcttgaccatgcatgcgccgtcggtcgcctcgcgcgacttctttgacctcgccttcaccgtcggcattggcggccccgtaagcaccgtgaaaactgccctcatgctagcgttgtgcagattcctacacgacaagatatagtcttgcagctgtgacagagggtatattcacaaa

SEQ ID NO: 179523 - DNA, 278 bp, Zea mays
  unsure (1)..(278): unsure at all n locations
  Clone ID: MRT4577_95308C.1
accttagctccacaatcattgcgtcgcaagattcgaattaattggtcctgggcgatttctttgggggtctgatgaccactgtccatgccatcactgctacccagaagactgttgatgggccctcgtctaaggactggaggggtggaagggctgctagtttcaacatcattcccagcagcactggagctgctaaggctgttggcnnagtgcttcctgtccttaacggaaagttgactggaatgtgctttcgggtccccaccagttattgttttgttggt

SEQ ID NO: 179524 - DNA, 245 bp, Zea mays
  Clone ID: MRT4577_95309C.1
aaacgatccctcctggcgcaaggcaacaggcaaggggagaacatctcgcgaaaggccgcagagcccaccgacaaacaggaacaagacaaggccacgggccggaggcaggacaaccagaggacgacacgagaccaaacaacggaccgaggagcagcgcaggggaacaagcccgaccccaccgaaaaccaagggcccagaaagaagcgaagcgcgcaccgagccaagccagtgcacgcgcccagacg

SEQ ID NO: 179525 - DNA, 192 bp, Zea mays
  Clone ID: MRT4577_9530C.1
ctgttgtgccaataccggacgtgggggtggcaccggcccaaatcattggtgtgtaggacaggatacgaggcgtgtaccatatgtggttgcggccaacatcctacattgtggtcggtttcttcgtctgtcttagtcgttgtcagccgatcggcttgcttatcttcgatcagcaaaagagaatagtagtgggat

SEQ ID NO: 179526 - DNA, 110 bp, Zea mays
  Clone ID: MRT4577_95310C.1
tcgcgctttcgcagccgcgattactcacgcggggcaaccttagggcaccccagttttcattatagatgtgctttttatcgctgggcataagcagactaatagtctgaata

SEQ ID NO: 179527 - DNA, 617 bp, Zea mays
  Clone ID: MRT4577_95311C.1
aacacgaatagaatgcgggaatcaatactatgggagctacaaaactgaatatgaagccaaataacaatgagctacattgcaaattcatcggtgcggtgtgcttttcagctcagcatcaaatatttcaccaagacaccaattcggagcaattttttgttagcgtcaacaccttggcatggaagcattcattgggcaacttgacacaaatttgcagaaacggcacttccacatctcctcttcagctacaagtttaggctcgtgtgatcctgtccagaagctgaggacgtcctggatttgatccctgaaccacctagcatcataagtgaaccggtattcttcaagaagggaacgatcttcctgtagctcgtatctcaagagcagctgttcttgagaccgtggtagcgtgtgacaggtaaccttgaaatatttcaatacatcttcaaaggtctttgcatcgaaccccaatgagctaatataccccttgacatcatctgataacaagtagttggggtccaggttaaaatggctgaagaaattatctgctgggaatttctctgcgatcaaattgtcccatagatacttgtaacacattagttgaagccttccttttttttttg

SEQ ID NO: 179528 - DNA, 1043 bp, Zea mays
  Clone ID: MRT4577_95312C.1
ccggccggggaattgaagttaaagaaaggcgtcacagtccaatcaggaacagcaagataaacttgaccgaggtctcgaacatgcatctagaatcaatatctgatacttctatggggggcgggggcctatggaccgttcgacgtccacaacaacaattattcatggttacggaaaatcatctagcacatcattcaagatatccggcgcaaggaacaaagtactctgcttcacatgtgtttattagaacttataacactgcacaaggaaaatataagaagacccggctcaaacgccaacagcccaatgtaacttgatattcatctcaaaaaaaaaaaaaaaaaacccgcggccccccattcgtccactgtttcatattccgcctgattgccgcattgcggcttttgatgttatcactctgattgagtctagttggagtggttcttggacttgtcggtgattcggaggacgaagttgacaacgacagccaagagaaggatgatggccagaactgtaggaccaaaacggtcatcgaaaccagcctgtcccttcatacgtatagactgggctcgccaatggtaggtcacaagtgcatataccatggtacacatagcaacgccggtgaataggaatgccgagatgaatgcgactctgtcaccgaagttgagcataccaatggcaagggcaccaaggataacggtgaagttgagccatgataggaacgttcgttcgttggcgaagaagaccttgggctcgacgcgagtgggcagggcgatgcgcttgccgggggtggtctggagaagaggctgagaagacatggtgaagtcggttgttgataatggcgggtagctacagtagcaagcgagtgggtggtgttaaagaaccaagtgtagttctgctgagtatgtgtatagctgtgctgctcttgtggcctgaacagattgatcaattgatgatgccgatgcaagcgattggtgattggaattttaacttggcaagaaaatattcccggccggcctcgagggtcccaatcgcccataggagtg

SEQ ID NO: 179529 - DNA, 489 bp, Zea mays
  Clone ID: MRT4577_95313C.1
cttgaaggataatgcaggggatgtaatgaccatctgcagttatattggacatgcacaactgatcaaggacccaataggcccctaactaactacacaggtcccggaacaccatatcgtattctatggaatgaataccgtgcagattcgtagattgaacatacaactttacagtttacataatgccacacgatggatatagtttactataccaaacaaagagatgcacacactacagaggacagtagtagcagaaaatacacataccacatcaccacggggaccgttccatcttgtcatgctacgcaaacgtaaacgtcattggacacacggacgcggcggtcgcacgcacacatgactttcactgcgcacacgaccccgtatatgtaaccaaagatggtgagcagcacactgatccagaactccctggagcaccaaccgcggcggtggcagactcctaggggcagaatgaagaccgatcacatcatctac

SEQ ID NO: 179530 - DNA, 318 bp, Zea mays
  unsure (1)..(318): unsure at all n locations
  Clone ID: MRT4577_95314C.1
cggcccaaacttgaagctgcatgcatgggaacttgggaaggtttcagcaacataattggcacactacctaaatttgaaatgtataaaggaactcccccatgcaaaacggaaatagatgggggggtttctacaacggnagctttatgcaggaggttagtaccctagagctgaagcacacttcatgaataaggaataaatttggtcattctattccattctatttccaaaaatggaagggatggggtttttttgcttgctttctaggttgaagccttacgaaccttgggcggacgggatggggcctgcgcggaagccaga

SEQ ID NO: 179531 - DNA, 534 bp, Zea mays
  Clone ID: MRT4577_95315C.1
ggtggggtggtttttttttttttttttattttattttgagcgcatttaaaaacaaatcacggtggtgccactcataagataaaatgctgagttgcttaattagctattcacgcctccgctccaacttgctccatcagtgctggataatatggctgccgggggggcggtgggaccatactcaaaacatggagggggaggccgccttctggaggtggatgccttcccacatgaggtagatgaccaggtcggttcaggtgctggacctgttcatgccggacctccctttttttttttaaccactcttgacctggccggccttgcccgattataccttgaggaccaccttgtagccctaagtaatgaggggcccagatcatatggaacacctgtgagaccaaaataggacaccatcatccgggacaaacgggcccttactgggcacaacaaacaagttacgactgtaggacaccagtcatagctagaggacaggacagcactggcgcaattgctcgctttaatgattgcatcaccacg

SEQ ID NO: 179532 - DNA, 411 bp, Zea mays
  Clone ID: MRT4577_95316C.1
ctcaatttttcccagccgccacagccattcttcctccctgtcttcttatctccacggcagggagcctctcccatggcgcagcagcaaatcccatgcagcgagctcctcccccatgcggtgtccggccaccacttcttcacatgtgctgcgtaggatcccctagcccaaccccttgcggcgggagcacaaccgtcgtttctcttggtgctcagctcctaggcgcagatccctccatggccgtcagctgcgctcgagctccactcctcccatggcgccacaaccccagccagcccccttcttccccatggccgagcatctccatggctggcgctcccctttccttggtgccccatggctgctcgttcaggtgccctgctccacctcgcacagcgcctgctcttcccctactcg

SEQ ID NO: 179533 - DNA, 533 bp, Zea mays
  Clone ID: MRT4577_95317C.1
cttctggacccagaccctagtccctagaccaccccactcaggttggagcctccggcactggctctgcctttcttttagtgctcttttagacctgatgctgaatgactaattgactattctcgttttgatattctataacgtcttcgtgttttatcttgaggggtgtggatacagagagaagcatggagactcactagccacttgcatgcttcacctagatatggctttcgcggctatgtcttatacaatggtctcatgggttggagttggagacagtgctgacttattgcatatgcacagaagagtctgaacagacaaggggtaccatgtaactgtgctgtctgttcagctcaatactagtgatgctttggctatcaatctgagatatcctcagacctaactgtaatctagtactgctgatatcatgcgttggcctgattctatgaaactttgagaaataatgagggactatatgtcacacagtgcttgcatacacataggtgcgataatgggctctaaatgtcacactacga

SEQ ID NO: 179534 - DNA, 1549 bp, Zea mays
  Clone ID: MRT4577_95318C.1
aatagtgctccacaacaatgaacccggcatatatgtaatatttttcttaggatggcacaagacatggaagatgaagaacatgagttggaggttgcgacgtaccaacatcttaggtgtcgtgcacgcaacgagcgccggtacgctggttccattctcggtcgtgttcgaatccaccgtgaccatatgagtggcgatgcaagaatccgagcggaatacttttgcgcccaaacgtacttcacacttgtactgaaatataggtttatccaatataggtttcgcatgcgtcgccatgtgtttgagcgtctcgttcttgctgtgcaacaagtggatccgtacttcgttcaacgtccaagctgtgcgggtgagctaggcctatctgcccttcagaaagttgttgctgccgtacgtatccttgcatacggtgttcctgcggatgccgttgacgagtacgtacgaattggagaatctacagcacatgaggctttgaaacacttttgcactgccatacaaactgcttttggggggtattatcttaggaaacctactcctgctgatatcgctaggcttctccatgttggagaatcacgcggctttcctggtatgcttggtagtgtcgattgcatgcattgggagtggcgtaactgcccaactgcatggaaggggatgtttaccggtcgtggtaaacaccctacaatgatcctcgaagctgttgcctcatatgacttatggatttggcatgcatacttcggcatgccaggtagctgtaacgacatcaatgttcttcagcgttctaacttgttcgattcgcatcttcatggtgatagtccaccagtgagtttctccgtcaatggacacacctacaacatgggatattacctagcagatggtatttatccggactggccagcgtttgtgaagacaatccgtcatccgtatgatgtgaggacccaacattttgccactgttcaagagtctgctagaaaagacattgaacgaacatttggagtactacagaagcgatgggccatagttcgtggtcctgcatatggttggtctccacaacacattggagatatcatgaaaacatgcatcatattgcacaacatgatcgtagaagatgaaggaccttcgtctatgaacacaagctttgacaacatcggagttctggcggatactagtcatggttcattttccgagcgcaatgagtatatcaacaacaggtacgaccaactacatgatccagtcaaatataatcagttgcaggttgatctaatccaccaccactgggcgcggcttggatcgggagctgcttaagtatgaagtttatgtctcccatgtgttaagtatgtttgtcattgtctagtctagtgtgctatgtcgtgaagctatggtaatccgaaggtagtatgtgttaagtaacaagtttgtcatgtcgtctgttccgttattccgaagctactatgtgttaagtacgatgcagtttatgtttgtactatgtttgtagtaatccgaagctggcgaatgtgtaatgctataattcaggaatgat

SEQ ID NO: 179535 - DNA, 315 bp, Zea mays
  Clone ID: MRT4577_95319C.1
ggggatacaatttctgttcctgcttttcccttccaaactccaataaaaatgggctgaaggaccctattcaaaagcagtcttacactttcgtaaactgttaaagtttaacaaacggggggggcccttcaactccaagaagttcttcaccacactttttaacaaagcgacacccccggaaagtgcttttctccgaaggtgcacgaccacttttgttttgggagtctccaaaagaggcaccaatctaggccggcagtaaaaaattacatcggggtcacaacaaaacatggggggtccctatgtaccttaaaattcaaa

SEQ ID NO: 179536 - DNA, 192 bp, Zea mays
  Clone ID: MRT4577_9531C.1
aggaatttttgggacgacctacccgtccgcgcaatgatattaccgtatcatttagaatagagatcttttattctactagtatcaccaacttactagtgagggaggttgattacttgtctaggactggggggccgtgatgactgtagtagcatgagcttcatcgggtgacgggagctgcgcatatggctgtat

SEQ ID NO: 179537 - DNA, 268 bp, Zea mays
  Clone ID: MRT4577_95320C.1
agcggtctaaccaggtacattaactgtattgtaaatgactgacgagtatgtagtagtgtggtttggggtgccgtatacgggtcacatgaatacagggtctagaacagaaagtatgtgtaaactcactcctttagctggaacaaatgtcgaatcgaccctttgttcactgactggctgataattgaccgcggcgctttccttttgctcatgcggccggcccggcaatggtcctttccttcccagaaggtgcggaatatgggggggacca

SEQ ID NO: 179538 - DNA, 170 bp, Zea mays
  Clone ID: MRT4577_95321C.1
atccttaccgccaggacacaagagatgaaaatagataattcaccatgaacagggggacaatgcagtaacccgaagcaagacaatggcagcgctacccaccggggcgcggcggcacgagacacactgacaggacaggacaccaatgtggaaagtcaccccaccaagaaaca

SEQ ID NO: 179539 - DNA, 214 bp, Zea mays
  Clone ID: MRT4577_95322C.1
cggactctgggtctgctgactccctagaagatcttgcaggtcgattctgtgctcctgcgactcctgtgtcattgcagactgggtgagtgcggctaagcagaacgggtatatggttgggtgtggcttggaccccgaatggtcagtgcaagatgcaacttgagataaagcctgttgccaaatcatgatctttgcctcgggggaaaattccgtctag

SEQ ID NO: 179540 - DNA, 389 bp, Zea mays
  Clone ID: MRT4577_95323C.1
ggccgtgctttaaaaaggcgtgtcagcgaggcagcaggcgtgatgagcgtgaaggtgtacaagaaaccgacgatggttgttgcggcaacgacgatgaagatgtgttctggaagaaggatgtgaagggacttcgctgcaggcaggtgcaggacgacgacgctccatactgaacggacggcggggacgtgtcacgtgtggatccagcgcttctatcgacgacattcacccttcacatataacacccacataatttgtagggtgccgacgaacaatagaaatctggatacaaggatgtatcaaaaaaaagtatactgcatccttctctggtattgtgttaattactggtgttccaaaacaagtttatagactttttttttcatgtctgtgtt

SEQ ID NO: 179541 - DNA, 552 bp, Zea mays
  unsure (1)..(552): unsure at all n locations
  Clone ID: MRT4577_95324C.1
taccctcccgaggccggcccgggccggggcttctagcatgcactccttacgnccgttcacctctagccgcccgccgtccgtcctcctctacaccccgccgcccgcttcctttctccgttgccagatgagatcgagcactaaaaatacagctagtgtggtcaatatagaacagaggtggtgataatttgcatacgcacatctgaaaccaagacgtatctcggcattccaagtactttcgacagttctgtggcaggtccgcctcgcgaacacgatcgcactctccgaatttactattgccctaactgtgctaaggggaatgctgctggtgcttacaccatgaacactgctagtgcgaactcgcgacaagagcacgatccgccgcctgaggtagcagactgaagcatgatatagctctttatactattgcagattcctgtagttgctcttgtcatgcatgttgtgggggccttctctagtgcaaatgtggaatcactgtactggctgttttgccgagacaatgctccttatatttggtttatgctctaggatctc

SEQ ID NO: 179542 - DNA, 209 bp, Zea mays
  Clone ID: MRT4577_95325C.1
ccaaataaacaaaatggctttccatggaatctgaacatccaacaccttaggtaaacgcttgcgttggcaaaactaaaagctcccaacatgcaacaaaaaatggggctcgggctaaccctgggggggtggaaaaaaacacccaccacacaaaaaccatgtccttgcagcattgttgcgctaactttttattttttaaaccccatcacaca

SEQ ID NO: 179543 - DNA, 123 bp, Zea mays
  Clone ID: MRT4577_95326C.1
gaggatcctacggtttgtcatgggcgccacgtgcgggtgcttgatgcacgcatacgagcactgcaaaggactacacaagagcctacccgcggacctgatcaggacacgtaccaaacaaccgtg

SEQ ID NO: 179544 - DNA, 2233 bp, Zea mays
  Clone ID: MRT4577_95327C.1
gctgcttctgctcctgctacttgccccctcttatcagagagagtggtgtggtggcgcctcccgaaaaaacacaccatcaccaccagccagcaccacccctcctgcccctctgcgctggcgggccgagcgccgcgagcgagctgggccgcgggcggaggaggagtcgaggctgaccgaccccgcggccggcggcgacgagcggacgcagattcggcagccgtgcgcggaatgcccgtggaaggaggggagagagggagggcgcaggcgcagctgagctgagctgagcccgcgaggttcgcggtctgcggtgcggcggcggaggtctcgccagcgcgatggccagcggcggctcctccaggtacagctcgtacaaggcgccggggctgcgcggcgcgctgctggaggcggcgcacgtgtcgtgcctcgaggaccggtacgcgctgggcccgcagctggggtggggccagttcggcgtgatccggtcctgctccgacctggtcaccggcgaggcgctggcctgcaagtccatcgccaagggccggctcgtgtcccccgacgacgtgcgcggggtcaggctggagatcgacgtcatggcgcgcctggcgggccaccccaacgtcgtggggctcaaggccgtgtacgaggaccgcgactcggtgcacctcgtcatggagctctgcgccggcggcgagctcttccaccgcctccacgagcgcggctgcttccccgagcgcgaggccgccgcgctcttccgccacctcatggaggtcgtcgcgcactgccacgccaaggggatcgtgcaccgcgacctcaagcccgagaacatcctcctcgtcagcaggtcgccccagtcgccgatcaaactcgcggactttggactcgccacctacacccagcctggccgaagcttgagcggcatggtaggcagcccgttctacattgcgccggaggtgctctccggcgggtacaacgaggccgccgacgtctggagcgcgggggtcatactctacatcctcctcagcggcatcccgccgttttggggcaagaccaagtccaagatcttcgactgcatcaggtccatggagctgcggttcccttctgacccatgggacagggtttctgattccgccaaggagctcgtcaccgggatgctgcggcgcgaccctaggctgcggctcacggccaagcaggttctagagcatccgtggatgcaggaacacgcggacccacaagactcgtgcgggcagtgccacgagaccggcctccaacgggagggcgccggctcgtgctccttctccacgccgttggcgtcgcggagcagggacgtgagctttgacacgcgtggccccatcgcgtggaggggtgggggcgaggacgaggcgacctgctgctcgcccacgttcgccgccgtctgcaggtcgtcgttctcggcgttcatcaccgacccggccccgccgccctgctcggcctcctccgccttgggtggctctggcttctcgttcggtgagccctgcgaaccacttgacggaggaggaggaggagggttcccgatgcccatggcttccatgccgagcttctcgttcttctgcgcgcgggacagcagcgagccagctgagccacagccggtcgctgcctcctcgactccgaggacggcgaggggatccacgccacggggcgtcaacggcaggcggaaccacacgatcggcggcggcgggcgggagcacctggacgtggcggtggagtctgtcatccgctgggcgtcgtgcaccaacttctccacggcgccctcacttcgggcctccctcgtatgctagcactagcaacgtcgttccgcgcgccggcgccgccaacgccgggctgagggtgaggaggagaattccgacgagacgagcggtagagagtgtgcagtagcctcgaattgtataatatatatacagacacagtgctgttatagtggtgatgatagattagagagtgaaggtgaagttgctacggagggatggatgcatggagatggagagcgagtggcagagctggaactgatgtgttttattcttcgctgtcacgctgctggtcagataagatttgggaacgctgctggtcagataagatttgggaacacacctggcgacggagagagaaggcgtctgataatttgatatgaacaagaagcaacaatgttcaggatgcatggccaggccacacataaaaggactgtttcagtttgtgtgtc

SEQ ID NO: 179545 - DNA, 211 bp, Zea mays
  Clone ID: MRT4577_95328C.1
aaggaggcgcttttattactgcgtccttcaaaatgcagggtaaaaactacgggagcgactttgtgcctttttactgcttatgccaaaataaaattaacaaaactattcttcccccttttgaatgacacatcaaaccccaagctaacttaatccacctttccctggaaaaacaaaacaaaacctccccgggaaccaataacacctttgggaa

SEQ ID NO: 179546 - DNA, 418 bp, Zea mays
  Clone ID: MRT4577_95329C.1
caagagaaaaaccatttggcggggttttggaaaaaaaaaaggagggccccccgtccacactatcccccgcccgaggggaaaaaaattaggggggcccaatccaggggacctagctctaaataaaagctaaacaagagggttgggcctaacccacatgggtaaaatcgggaaagcgggaaatggtttttttggggggcatcttttttttggttgctggcaaccttgaccacccaccgaggggaccctttttttgggggaaccgaggcatctgcccccccaatcgtcctccccaaagatgcagacccggttattttaaaacaatttttcctgaaaaacagcccactccaggggaaaaatttttaggcttttagcgattaacaaacctgaggtatttatattgcaaagagaaccaaaagtg

SEQ ID NO: 179547 - DNA, 361 bp, Zea mays
  Clone ID: MRT4577_9532C.1
cgtccgagtcagccgccgcctcagacgaatctcccgccgccaccttctcatcccccatccgcgtccgtgcttctgccgcctcagcaccaccagggcgacgggttccaccgtcctggagggaactacagcggcggtcctgtcgttgtcgccaacggagccggctttggcgggggcgatgtctccggcggcacgacgctgttcgtcggcgacctccactggtggactaccgacgctgatctggaggcggagctcagcaagtatgggacggtgaaggaggtgaggttcttcgacgagaaggccagcggcaagtccaaggggttctgccaggtcgacttctacgaccctggtgccgctgcttcct

SEQ ID NO: 179548 - DNA, 616 bp, Zea mays
  Clone ID: MRT4577_95330C.1
cccacgcgtccgcccacgcgtccgtgcctcctcgactccgaggacggcgaggggatccacgccacggggcgtcaacggcaggcggaaccacacgatcggcggcggcgggcgggagcacctggacgtggcggtggagtctgtcatccgctgggcgtcgtgcaccaacttctccacggcgccctcacttcgggcctccctcgtatgctagcactagcaacgtcgttccgcgcgccggcgccgccaacgccgggctgagggtgaggaggagaattccgacgagacgagcggtagagagtgtgcagtagcctcgaattgtataatatatatacagacacagtgctgttatagtggtgatgatagattagagagtgaagacgaagttgctacggaaggatggatgcatggagatggagagcgagtggcagagctggaactgatgtgtttcattcttcgctgtcacgctgctggtcagataagatttgggaacagacctgccgatggagagagatggcgtctgataacttgatatgaacaagaagcaacaatgttcaggatgcatggccaggccacacataaaaggactgtttcagtttgtgtgtcagatctgttttccacc

SEQ ID NO: 179549 - DNA, 375 bp, Zea mays
  Clone ID: MRT4577_95331C.1
tctaaaggttttgcttaaggtcgaagtggcggtgccattttttcagcagactaaaatcgaatcaaattcctgttaattgggattatgacacctatctagtgagtagtgatctaacgtttttttcaagtaaaaaaaatgagacctttacttctatactagtctagagaccccagcctattctgttcgtgtgctcagcatcatctatgtgacatttatcaatgttttgagtgtccagcttcaacaagaacggcaacatcactatctacctgcatttcactaaattggctggttcttgaatcttgatgatgcttctgtcaaacattttcatgtcatcatcctacaattacaaagaacagatgcagctgttcagttatt

SEQ ID NO: 179550 - DNA, 262 bp, Zea mays
  Clone ID: MRT4577_95332C.1
cgcagtcgttgcccttccctgtccctctaaagcaataatggtcgcatccaggcagtcgggggctggcctaggcgatatctgggggaggcggcgacctctccaagggcttctgcaccctccagcctgtcccccagctctggtgagtcttggcggcagcagccatcataggaagggaccaaggcgaggcaggtgcctccaggtgtgcacgtggcatgtggcctgtggcctgtgtcccatgacccagccctgtgctccgtgcctc

SEQ ID NO: 179551 - DNA, 573 bp, Zea mays
  Clone ID: MRT4577_95333C.1
ctcgaacatcacgaggctacgccgatgcacctcatctacgctgaatggatatggcgaccgttccacgggatctgttctgctggattgcgaggaagaacaactccttgctggcgaaccaacttggcaacggcaatgcccaaggtgctgctgacccaagagcccaacaacctttacaatgtacactcctacacgtctctggcttaacagacaagaaaactgtaacgatccaccagatgctgaaaaggactaccctgaggccctctttactaccaagaccaagaagcactaacacacccggcaagctcactcactagtctgtaatgcacaaggagttccacatgatggccaaggctgagaaaaaccaccttgtcgacaactattacaggcctgatctgaccaagacggcccttggtcggctgagctatgtgtaccacagcctccagaataccaagtctggtgtcaagaaaaaagaacaggcagcctacgcactaagcctgggttttgatattggtgcccatatgctcagatcatatttatgcaatgtattcaacagtttttagacttggtagaact

SEQ ID NO: 179552 - DNA, 619 bp, Zea mays
  Clone ID: MRT4577_95334C.1
aatcgatccccatcccgtctacgtcgtcgcaggccacccgccaccagctgatcgccgccgtgccaccccgctgccaggcctcctcggccaactgctcgacgccaggcagccccgccactagctccagcggccccgccgccccgctgcgccgccgccagctcccagttcccagcctttccttccacgcagagaccttcacggccagctcctagccgccacagagatctccctgccagcgcctagtcaagctcctctccgcgcccagggagacctccctgcagcgtgcctcatcgagctcctctctgcttgtggttgcggccacctccccccgcatcgtcgctgcttggatagctggctgaaatgtaggagcagtgtatgctgaaacttgctgctgaaagttcagggaaccggcaaggtgcagttcctgccgtaatgctgtagggaatgctgaaacttgtatgctgaaacttgctgctgaaagttgagggaacggcaaggtgcagttcctgccgtaatagaaacctgaagacgtgtgctctgctttgctattataacagcagtcctcatctagccgtaatagagtttctttgcttgcgaaaaaaaaaaaaaaaaagcggcc

SEQ ID NO: 179553 - DNA, 376 bp, Zea mays
  Clone ID: MRT4577_95335C.1
atgcaatccggcgtgaacaagggaatcatccaggggggtgagcacatgctcagggacttgtatatcctgcagcaagactttggcggaagcccagacatggcggatatgatgacaaggcacatccttctattgatgcaaccaaatattcagaaggggaaagagactgtagtccaaaccacactagatcgtgtgagtctggtgcccaacattcgcttgcatgctgctctcaaccggctgacggagctgaaacatctgggaccatagacatatctggtgaacaattctatgcatgaaggcgggtgataccagctaaaaataatctggatgtggaccgctttgactcatggagtggaacgggacttacacacatacaaca

SEQ ID NO: 179554 - DNA, 324 bp, Zea mays
  unsure (1)..(324): unsure at all n locations
  Clone ID: MRT4577_95336C.1
tggtctttttaacaataacactcancggttccagcgaaatttctttgggttggccgccgtcctcccttccaccaagacaatccttcctaatgcacctatggagaccatccacaaggttaagaacatcctcctactggactccaagggcaagctcgtaaaaaccaagtactacacaaatacctcacctactatctgaccaaacctggccttcctaaactaagctttgtccacaacccacaacacgaatgctagaacggatgaaataggaataacagacggtcctatactctaatacaaggttatgcaagacctcaacttttttct

SEQ ID NO: 179555 - DNA, 198 bp, Zea mays
  Clone ID: MRT4577_95337C.1
caccgatataccaagatgacggcgcaagctgcggaggagctcgccgcccaaatcgagcagcaaaagctcgaggagcagaagaccgaagcaaaaaaagttgtggtggaagaagatgacgaggattatgaggattacgattattatgacaaggattatgattaacttgattgacaagaaagggatgggaggggcaagtcg

SEQ ID NO: 179556 - DNA, 1402 bp, Zea mays
  unsure (1)..(1402): unsure at all n locations
  Clone ID: MRT4577_95338C.1
cttgccacacgatacgaactagccaaccagctgccgagggaggaatcctagcggaacactgtccaggtgacggcggcgcgctaccggtgacgggggatacggcggcatcgtcccctcctccatccccggcgcggcggcgccagcagccggcctgcagatcagctcaacaaagataaccttgcgccgcctcctaagaagatcaagactacccagccaggttctacagaccctcaaaaccttaatcgttagatcatcgccggtctcatgaagaattccggaggaggcgccgcccatggcgatggcggcgacatctacaatgtccgggccgccgagatcctcgccaacgaggccctcctgctccccatcaatgaggccgccccaatctacgagaatctgctcgccactttccccacggccgccaaatactggaagcagtatgtcgaagcctacatggccaccaacaacgatgaagccgccaagcagattttcagcagatgcctgctcaactgccttcacattagtctatggcgctgttacatcaactttatcaggagaattaacgataaaaggggctctgagggtcttgatgagacgaagaaggcttttgatttcatgctcgactacgttgggaatgatgcagcttctggccctgtttggatggagtatattaatttcctcangtccatgcacggttgtgacgccccatgaagagtcgcatcgcatgactactgttcgtaaagtgtaccagaaggcaattttagttccaactaatcatgtagagcagttgtggaaggattacgagaacttcgaaaattctgttagccgcaccttggcaaaaggcttgttatctgaataccaaccaaagtttaacagtgctaaggctgtttatagagagcgaaaaatgtacattgatgatattgattggaatgtactgtccacctcctctacaggcttgttcaaggtatgtgcatctagtgtattggtatgataatatacttcttgattatttttaaaaattccatgctgttttatttttttaattatctctgtatatattggttcgttattattctattgttttcattgtaatgatatgttatcttttttttatatctccatttaaatatatttttatttaattgtttttttatttcatttatttatattttttaattcttttaatttatatttatttttttatatattttctattatttctttctttcttctattctaatctttttttttttatttttttatattcttttttaataattttatcattcacttattattaatctattcactatccttattttctctcttttctattttattattattattttctatcttcttattttatattattattttcttttattattaatttttattcttt

SEQ ID NO: 179557 - DNA, 485 bp, Zea mays
  Clone ID: MRT4577_95339C.1
ggggggggggaaacccccaaactttccccggggggccgggacaaaaaaaaaggtttttaaaaaccaaaaccgggctcgacggccaaacagattcaggcaagcagatcagttttcccccccctcggaaccggaaaaactgcccccctttgggggaacctccttggagtccttttccaggggggccaggtcctcgggggcctgggaaaactcccccttctccatgccctcgccaacgaaccaaggcaaaaacccccccttggggaaaaaaagggcaaacttggtgttgagggggaaaaacaccccgacaaccctgggggagggggagaaaatgcccacggcaccctgcaccttggggaggggggcacccggaaccactgtgggggcctggtatttgatgccccacttgaaccccggggggcaccagtccaaaaacgggggggggcccttcgttttgaggggggccaccggggggttcacgtccttgg

SEQ ID NO: 179558 - DNA, 343 bp, Zea mays
  Clone ID: MRT4577_9533C.1
cccacgcgtccgttgaatgcacgttgattgacagatatgaagctccaccattggctcagtctgtctaccctcaactcgctgatctttatgacatattcagcgcgatattccatcagctagatacggctatgacccctgtttttaaaacggtgagacaagcctacaagggggacccaatcaggaacaatcaatcaggctgaagtgtatggatgcagaactggcttacaaggacccacgatgggcttatacagtgcatccaggcccactattgataccggcaataaacatggttcaaacgatcgggatcactgaaaactgctatctaatgagaagagccactttc

SEQ ID NO: 179559 - DNA, 182 bp, Zea mays
  Clone ID: MRT4577_95340C.1
cggacgcgtgggttcagattcacttgttaaaggtgaatgcataaatggaaccaagctgtttaagccgattgcggcaaaatgatgggtgaatcagcttggttccatttatgcattcagattcacttgttaaaggtgaaaaatcccaatttatgatataccatggtactctccgttcttttttt

SEQ ID NO: 179560 - DNA, 274 bp, Zea mays
  Clone ID: MRT4577_95341C.1
accaaaaaaggacaagctcccagctttttttcacaccattttattttccatgcatgaggggcactagtaacacgggccggtctgaattaataactaacagaagcctgccgttcttttagctttggggttcgttggtgatcgaactcagtgcttaacggggggatggttgatcggagttggctttggctgcccctacactggagggggaggggggtattcccgcgggggaggggggttctccggcgccggtttgctgtgctcaggcaccgggggg

SEQ ID NO: 179561 - DNA, 574 bp, Zea mays
  Clone ID: MRT4577_95342C.1
tacacgcaatttggttgggcagacacaaacatgataaaaggatgacagagaacatgtcgcactctacacagggggcatccatgctttgctgaagacatgactctcgactgcctaaaggacatgaccacaccatttacaagctggggccttcactcccaagcagctgataactggttttcatgggatgattgtggcaagaagtattataagacatcctcgaggggaacctgatgtggctaccttttataattattgagttgatgaaccgactgagatcgcagtgctaataaggctgtcggatgctggatcagaaaactaaaatttctggtcaaccatgttaagtattcatttgcatgtcaggatgcgcttagaaaatttatacactatatgatcaaagtcgcactacctttttggtatgtgtggctgcaccgcagttgaatgcagtttttagaagcttctgtcttttgtacaggttagaaagaggacagaggactaatattggactcatacctttttttagacttcaatcgtagctcgagcacatttttttagtaatttcatttggatgagactt

SEQ ID NO: 179562 - DNA, 422 bp, Zea mays
  Clone ID: MRT4577_95343C.1
tttctttagttacaaaccccgccgcccctccggggggctttttaataccgactcccgtgtcctctcttcagccccgttcgctccccctcatcgcaaaaaccctaacccctcgacctctcaagatggcgtcgccgccgtcgcctcccgccgcagccgcagccccagccgccgcggcgtccggaccgccgccgccggcgcaagtggtgggcaacgccttcgtgcatcagtactacaacggcactgtcggaggggatacagtgactgtgcctcaggatgcttcgccgcagcccgagtgccaggtggcagagcctgcacttaatccgaaggaggaagttttgaacagggaggtggtttgtaacccaccaaatgacgtgaatcctattgttgaggaaacaccggttcctgaggtcataaatgaagtg

SEQ ID NO: 179563 - DNA, 459 bp, Zea mays
  Clone ID: MRT4577_95344C.1
gcagaaaaaagaactgaagctatcgatccaatggcagagggcaagagctccggcgacctgttctccagcggcggccgagatcctgcacgcggcgtccacgtacggcaagttcgaggacaagccggccgggcagtacatcgagaaggccgagggctacctcaaggagttcagcgcgggaggacacgccgccgagcctgcggctgcaggcgacgcggcgccgccgaagccagcggaggaggcgcccaaggagaaggagccggtgcctgcgccggcgcccaaggaggaaggcggcaagtcgtcgtcggaagggtttggcctcggcgacgtcgtgaagggcgctgagcaactcgtggagaagcacggcggcgccggggaggaaagcgccgccggtgggctgtttaagatggcacagggcttgctcaagtagatggaactgagtcaaagctgcatccacacact

SEQ ID NO: 179564 - DNA, 936 bp, Zea mays
  unsure (1)..(936): unsure at all n locations
  Clone ID: MRT4577_95345C.1
atctctcgctatctgtttcctctcgccagctttgcgggaaaatcggctccagaaacaaaccccgccgcccctccgcttctctcccgagtcccgactcccgagtcccgtcttctgccccgctccccctcctcgcaaaaaccctaacccctcgacctctcaagatggcgtcgccgccgccgcctcccgccgcagccgcagccccagccgccgcggcgtccggaccgccgccgccggcgcaagtggtgggcaacgccttcgtgcatcagtactacaacatcctgcaccagtcgccggagctcgtctaccgcttctaccaggagtccagccgcctcgggcgtccctccggcaccggcgacgacggcatggagacggtcacctccatggacgcgattaacgacaagatcgtgtccatgggcatcgaccgggcggagatcaaggcggtggacgcgcaggaatcactctgtggcggcgtcacagtgctcgtcatgggccaccttacggggaggaacagcgtcagccgcgagttcgtgcagtccttcttccttgcgccgcaggagaagggctattttgttcttaacgacatattgcgctacgttggagaggagggaggggacgaggggggcgagcagcagccggcaacggaggtcgctgctgatgtggtcgctgctgatgtggaggccgccacccctgcttctatcctggccaacggcactgtcggaggggatacagtgactgtgcctcaggatgcttcgccgcagcccgagtgccaggtggcagagcctgcacttaatccgaaggaggaagttttgaacaggggaggtggtttgtaacccaccaaatgacgtgaatcctattgttgaggaaacaccggttcctggagtcatanatgaagtgcgaantaatgtangagtggctcccacaatttcatctccctcg

SEQ ID NO: 179565 - DNA, 276 bp, Zea mays
  unsure (1)..(276): unsure at all n locations
  Clone ID: MRT4577_95346C.1
ccgggncgacccagcgnncgcccacgcgnccgggcaacacacccgggngcgggcgcgaaagagcaagccacgagnngcangggggcaaagcgcacacacagaacaacaagcccacaggcgacaaccagggccggcggcaagcggcaaacagcaaccaaaangcacacgngcaacaacaangcnnggcacaacgaaggggggggaccagngcaacgcaacaacaacaacaacaacagngaacagccagcacngagccaccnagccggggagaaccca

SEQ ID NO: 179566 - DNA, 2084 bp, Zea mays
  Clone ID: MRT4577_95347C.1
ttgggtacctcgaggccggccgggaaaaaaaattcaaaaaaaaaaaaaaaaaaaaaaaaaaaaaaaaaaaattggaaacctcgaggccggccgggaacctttccctctcctctctgtttcatctcgccagctttgcgggaaaagagacaccagggacaagccccgcctcctctcccgagtcctgacgtgccccttttgctccggccccacttcctcgcaaaaccctaacccctcgatctcccaagatggcgtcgcagccgccgccccctgccgcagccgcggcatctggagctccgccgccggcacaagtggtgggcaacgccttcgtgcatcagtactacaacatcttgcaccagtcgccggagctcgtctaccgcttctaccaggaggccagctgcctcgggcgccccgccggcaccggtgccgacggcatggacacggtcaccaccatggacgcgattaacgacaagatcgtgtccatgggtatcgaccgggcggagatcaaggcggtggacgcgcaggaatcgctctgtggcggcgtcagcgtgctcgtcatgggtcatcttacggggaggaacagcgtcagccgccagttcgtgcagtccttcttcctcgcgccgcaggagaagggctactttgtgctcaacgacatactgcgctacgttggggaggggggaggggacgagggggctgagaagcagccagcacctgaggttgctgcggacgcggagacgaccacctctgcccctatcctggccaacggcactgtcggaggagacgccacgactgttcctcaggatgcttcgccgcagcctgagtgccaggtggccgagcctgcacttaatccaaaggaggaagttctgaacggggaggtttgtaactcgctaagtgatgtggagaagcctgttgctgaggaaacgccggttcctgatgtcataaatgaagtgccaaataatgttgcagtggctccaccaatttcatcccctcctgtaccattgaaggaggcaccaaagaagtcatatgcttcaattgtaaaagtcatgaaagaacatcggccattagcacctgcagttccttccagacctgcacccccaataacagagaagcaagcctctcctgcccccactccagttactgaggctccagctttctcccctaatcctcagagcggcggctttcaagatccagaagttgatgcacatgccatatatgtgcgaagtctgccattaaatgccacaccacaacaattagaggaagagttcaagagatttggaaccattaaacatgaaggcatccaagttagaagcaacaagatccaagggttttgctatggctttgtagaatttgaggatgccagtgcagttcaagctgcaatagaggcttctcctgttactattggtgagcggcaatgctttgtcgaagagaaaaggactactggttctcgtggcggtggtagcaggggaggaaggtttccaccaggtagaggtggtaatttccgaggtgaaggcattagaggccgtggtacatacaatggaggcagagggtacggaaggggcgagttcagttaccgatccgattatggaggccgaggtggcggcaggggtggctcattacacggaggtgatgtcggctaccagcgggtcgaccactctagtacagccagcggtcgtggtgcccgggcaccatcagccgccactgctgttgcaaagtgagttcttggtagggtatggattgtgttttatggccaccatcattgttgaccaaaagagtggtgggtgtggtggattcgagttcatgtgaggaccatcaacaaaagtcgggtcataaatttatgcttccttgttttgtggctaggcaaagcagtggtgatatcggttactaactgtagaatatacgtctgttgagatgtcctagtatgactggcttcggcgggcagctgatttgtgttttgccttttgttacttattgccaaatttatagaggttgatttgaggtgccaacaatttatagtattccctgcgctgctaatatgagtaaggccatgtctgtttccttccagcaaaaaaaaaaaaaaaaaagcggcc

SEQ ID NO: 179567 - DNA, 527 bp, Zea mays
  Clone ID: MRT4577_95348C.1
ggggctagatgctcccgtgctgtccatgatgtacatttgcgccaaaagaagaaatgacctgaatctgagctgtccctggagctcgacattgcatgtaatagaaatgaatacttcttatgtatgctagataactgcgtgtactttggaacaagacattcgataggaaacacagtagcaatagagcatgatatacagtgaggggaacaccagccatatgtttgaagcatgcactgctgatatagctcatcaatagtggatggacacacattcaccgacgtgctactgaatagacaaggagactaacacctaattgcagcgcatgtacataagtatctacagcacagtatgcctatgactctggttgttgaacgtggaatgctactgcttggactaccggacagaattatcgtggcaccacttctaacgcacttggcatggacaaagcactggctgagatcatggtcatgaagagtacaaagctggccagggacaccatacctatacacatgtcacgtgacagcacagct

SEQ ID NO: 179568 - DNA, 289 bp, Zea mays
  Clone ID: MRT4577_95349C.1
cgacgccacgcgtccgccgactcttacccacacactgcctcatttgcatggacttggcttgcatctagggcaggatacagaatctcatgccatcacattatctataaaccattaccagcaatgctcctatgacttccaacaccagggcctttgtcctcgcccaccccgttcaagctatacaccgactactatgaacatatgcctaagcttcacagtcagcccaacttatacatgaacagcaccttgggctcgagcacatttcactacaccggatactacaacttgtcgt

SEQ ID NO: 179569 - DNA, 733 bp, Zea mays
  Clone ID: MRT4577_9534C.1
atgtaccgctgctccgagcgtataatccttgattagcaaccaccgacggccgcaattacctcccacccccaccccacccctcgtaaaccccgattcctcgatcgaatctagagcactgaagaggaggtagccggcggcgggcgagcggccaagtctctcaggtgtcttcgacgatggggttcatctcgggggtggtgatggggttggtggtcggcgtcgtgatcatggccgggtggagccgcgtgatgcagcggcgcagcaggaagcgcgtcgccaaggctgcggatatcaaggtccttgggtctcttggcagggaggacctcaagaagctctgcggcgacaattttcccgagtggatatccttcccacagtatgagcaggtgaaatggctgaacaagcatctcagcaaactttggccttttgtttcacaagctgcaactgcagttgttaaggaatctgttgaaccactgctagatgattatcgacctccaggaataaaatctctgaagttcaacaaattctctcttggaaatgtctcgccaaagatcgaaggcatccgtatccaaaatcttcagccaggccaaatcataatggatatagatttccgttggggtggtgatccaagcataatccttgctgttgatgctcgagttgcatcaccgcctattcagctcaaggatctccaggtctttaccgttggtcgtgtcgtatttcaactatcagaagaaattcc

SEQ ID NO: 179570 - DNA, 1118 bp, Zea mays
  Clone ID: MRT4577_95350C.1
gcacgagcaaggccacaaattctttacgtaattactataaggtgggaagactgaaaccagagaaggctatccctgatactatacttagacatgcaaaaggtcttgctattgatactgtggtgaaggttgagatgatggttacatacaaacttggcactgggctagttattgctcgaagggtggatggctcctggtcaccaccttcagcaatctccacctgcggtattggatatggagctcaggctggaggtgagatagctgattttatcattgttctgaggaacacggatgccatcagaacattcagtgggaaggcacatctgtctgttggtgctggtgttagtgcttctgctggccatgttggacgtgcagctgaggctgacttccgtgctggtgatggtggttatgctgcatgttatacatacagctgtagcaaaggtgcctttgtgggctgtgcgttgaatggcggcatagtatcaactagagacactgagaacgcacgattttacggaggtcctgtccaggcatctgatatccttctaggatcgatggcgaggccgcctgcagcctctcctctgtacaaagctctgtcagaattatttgacaagattggaaagtaatcctctctcttgcagaccatgcctcaccttgtaaatacaatcgaatttgtgcccttcaggaattggttggaaacaattgcgcaactgtacagtaaggccattcttcaacacgtcaaatgtgtttagtgatgctaccaacaaaaccactctgtaaatatttgtacattggattgacaatcgcatcaagatgtgaaaaaaggtgtttattcattgaaaaaaaagatagggaaagaatcctctttctcccggacctttgacgattatgattcgaataacatgggaagtacagtaatttgtaatgctaggatgaaaacagatggaactattgaggactaaaaaggacggaaatagactgagaattcaccattttttagtggataccagcaacaaaaccactctgtacatactctacattggattgacagtcgtatcaagatgtgaaaaaaggttctgacgagtatgatcattgattcgaattacatggctagtacagtaatt

SEQ ID NO: 179571 - DNA, 484 bp, Zea mays
  Clone ID: MRT4577_95351C.1
cccagaaaaaaaaccccaaaattttgggaaaacccttttcccttggttttccggcccctcataaaaaaaaatttcggggggggggggcaaaaaaccgggaaaaagggcccccccttgtttttatttttaaaacccccaaccccctcctttggaagggacaaaaaaaaaaatcccttgaaggccccaccccccctcctaaaaaaaaaggggggaaacctctcgtttaatcccccccccccccccgactataacagggggggaacggggccaaccccacaaatgtttgatccctggaaaacctaacccgggggatcgggggccccctaaggttgggggggccccattggccgggggggaggctccttgggggccccctgggggggggggctttccccacctgattgctgctgctttggggtcaaaggctaaaaaccttgtttttttcccacaggcggagccgggggttaaaaacctggtttcggtt

SEQ ID NO: 179572 - DNA, 341 bp, Zea mays
  Clone ID: MRT4577_95352C.1
acgagcaccatgctcgacaccgtgcgcaccgacgttgacacctgcgaccagggcttcgaggagcgcgaggagctcacgccgctcatggctaagcaggacgcggagctcgccaagctctccagcaactgcctcgccattgccaccgctgccggcttgcgctagaccccctatgtatcgttcggtcatccatagctgtgcatgtgctagctcctaggcagcagcaacaacatatactgcccctataattaactctccacgcatcagagaagcttcactcatgcaacacacttgtaattgtatatcgaggaagaagatgtagttagtgcaatcgttccggttct

SEQ ID NO: 179573 - DNA, 356 bp, Zea mays
  Clone ID: MRT4577_95353C.1
tttctgttttgtccacagaattagacaggaacatcttgtgtctgatcctggtacacttattccttcagatgtttctgttttgtccacagaattagacaggaatttcgtctctgataatcaacactttggccaagatgataataccaatctgttgggatcttctcttagcggtgtatcgagctcagcgtatggttcttttgagtatgagttacttgaccgaagatccacttcaagcaatgttggtccttctgatactgatggacctacaactaatctgacaagcaatcaacaaaatatgtcctcaaattcattcgataaactatcagttagcacattcacaagtgaaaataggcctg

SEQ ID NO: 179574 - DNA, 366 bp, Zea mays
  Clone ID: MRT4577_95354C.1
atggcgagcttctctgccgcatccctcgccgcgtgcggctcatcttcttccgctcttcttccccaaatccgcgccgagctcaactaccgcgcgcaccagtgcctctgccggtgggctccgcgtgctgggtcttcgtcttcccggaacccgcgcggcgtcaacaacctccgcgccgcggattccgcgcgtgggccaagtccgtggcttgccgaactccgcactgaacctcgggaaaaactgtgctctggtgtgccatcgggggatggctccgacgagtcgccgccgcgttcgctggggcacctcgcctgtgtgtccgtcggaaggaaggagaaccttgtgagccattggatccgggatggagggtag

SEQ ID NO: 179575 - DNA, 584 bp, Zea mays
  Clone ID: MRT4577_95355C.1
attgggacctcgagccggccgggacagtctttcgctctcctcccgttttcctacgacggaactcctgccgctaggcctcgctcgaccacgacaaccaggacgccaccgccaccaagaccggagcgaatagctctggcggtgaaccgacggcgccgcccttcgtcgacaaataacgcccacgagatccaccccggcctgctatggagcccgcgtcgaacccgaaggcggacccgctgattgatgctgagatgacgatggagtatcctcgatatcatccaggagggcgccaactacaatgagatcaagaagggagcgagcgaaccgacgaataccctgaatatgggcgtatatcagagatcgttgagatggtggcggacacggagcctctcgagatcctgctccacctccccttgctatccgaggataagaacgtcccatagtgtatttggtccatcgaaacaagcacttggacgggctagtggagtgacaagacccgacattgcttgctcaaagaccagcaatgagggcaaacagctgaaacaacagatacagggactcaaggactctattgataagcttctcat

SEQ ID NO: 179576 - DNA, 333 bp, Zea mays
  unsure (1)..(333): unsure at all n locations
  Clone ID: MRT4577_95356C.1
ttgtactcttggcatctcgttgctttcgagcacaagggcgtcagaggccaggtgtggcagcttgggcaggagagggcgagcagcagcaggccggggcatttattttttttttccattatgggcgngaatattgggggggggggctgttttttttgctcgccatggccgctacctcgtcgggcgtgatctacaaggtcngcgacccctccgggtgggccatccttggcgncgtcnactacgccgactgggcttccaggaagaactttcgtgtcggtgacaccctgcagtttatgtaccgcggcggcgtccgcagcgtgcgtggtggtggggagg

SEQ ID NO: 179577 - DNA, 354 bp, Zea mays
  Clone ID: MRT4577_95357C.1
atcactggtagcagctctgggcagagcgcgcacgtggcgcacactagctgggtctgctagcctaccatggcttgatcaccagccggcggcgctgacacggagggggcgcgggagctaccagcaaccatgcagcgcgtgaggcacggatgctacggggaggcgcagcaccagcacaagcagggcgccatgatgacggtgctcaaggtcgtgacggccgggaccttgagcgggttgacgctggtgctgcccgggctgatgctggtcagcaccgtgatcgtgctcaccgtggtcacccccgtgctggtgatcttcaggcccgtgctggtgcccggcgtcatcgtgcttgcgctcatg

SEQ ID NO: 179578 - DNA, 350 bp, Zea mays
  unsure (1)..(350): unsure at all n locations
  Clone ID: MRT4577_95358C.1
agtgcaacaagcaagatttacctgcccatcgatcatatcgtcaactggtccggcatttcgcgagaccattagctccacggggtggggctncttcttcttctgctccaagacgtcttgtcctgatgtggtcgtgctgagcgtggatgactccaagaaggtgatcctcaagtactatccgtacgccgacatcgttgtgctgcccttctgcttcttggttaccgctgattatctcccttaccttgtccgcatcttcttctacattctcgtccagactccctacatttccttattatatataatctatcctttattttctttcctttgtccaaaactttaaataaatatttttt

SEQ ID NO: 179579 - DNA, 216 bp, Zea mays
  Clone ID: MRT4577_95359C.1
caatgggtatccgaggaggccttgcaacctcaaaccaaggtggtcaactggttacattattggagcacttggttcattgggcttgttggttggaataagaatgatacattggggtggcctaattggtgggcttttcttcatttcaaaatcttcaaagggggttgtgagaagtgtcttttgctatggtggatcaatggtggtgcgcgcagatgtacc

SEQ ID NO: 179580 - DNA, 623 bp, Zea mays
  Clone ID: MRT4577_9535C.1
gggaccctcgaggccggccgggacaccccgtggagaggtgaggaagagaagactctcgatatcctcaggcttcaaggtgttgcacagtcgtgcaggccaatctcccacaagggagattcttgcagacgctgctgcagaatgttactacaagaggagaggaactgtctcacctcgcacctctactatgggaaggagaggtcgatgaaggactgggagacatacttgatggttccgctcatggcgcatgagcactagctggacatcatcgatctgagcctacggaccgtgaggtagaataggacggatggcatacgtgcgcaaacgacagcgaaagagacgccccgtcgaggacgcccatatggaacgtggttaagaacatcctccgcaaggcatcggcgtacatcaccgaagaagggaaacgacactcgggctcagcgcatcgaggagagacctcgatgtataaggaaagaggaaaggctgaatggcctgcctcgactacctccaggagtcccgagagagatggggagccaggaggtgcaaggacagaatcaccgaaaggcaactgtgacctcgcctcactggacagcgaacagcagatccgacttgaaagtgggtgagctgga

SEQ ID NO: 179581 - DNA, 654 bp, Zea mays
  Clone ID: MRT4577_95360C.1
cacgtcgccttgttccaaggtcacacgcgcgcgttgtcgtcgccgctggaggaggagccgccgaaggcttgctcggaccagcaccagaccggccgcgctgggagccatcgggaaccagaaccagcgaaagtcccagctggctcagtgggcggcggcagcggcagcagcagcagcagcttcgtgtggggtgcctcgtcctcaggggagaacagtgcgctggatatcaaaggttttgttgatggatgcagtggtgacttcctctcgacggcgaactttggctccttcagcctcagcttcgggcctgctgacgggttcacaggagagccttctagtggtggttcgttctcgatgctacctcctgagcactttcagagtgctcagaagaaggggcagaactgaatatggataatctcagacagctttagatgtatgtatctgggcggcttcagatgcaccaccatcatctctggttcatgctcgtttttctccactgtagtagaacattgtcacagtttgagattggtgtctccttcctatgtacccgcctttatcgctggaagccgactgttgagcttctcctgtgttaacgactgttgaactttcgcactaaaaaaaaaaaagaaaaaaaaaaaacggacgcgtgggtactctaga

SEQ ID NO: 179582 - DNA, 694 bp, Zea mays
  Clone ID: MRT4577_95361C.1
aattcggcacgaggatttctcctcgccgcctcgtctctgccgggctcgctcgtacgtcgctccccacccgcaatggcggccactttcgccctcctccttctcctgatcctgtcctcgtcggtccgcgccgcccccgacgccgtggtgtcgaggatcgccttcggatcctgcgccaaccagagcgagccccagcccatttggaacgccgtcgcggggttcgacccgcaggtgttcgtctggctcggggacaacgtctacggcgacaacaagcgcccattccgggtcttcgggagggagcgcaccgtggggccctggaagaacgtgccgcgcttctacccttccaccgaggaggagctgcggaggcggtaccagctcgccagggcgcagcccgggtacgccaggctcagggagagggctcaggaaaagaacttagtgggaaagtgattgctcaaaggcttctgttagatttcttggatgaacctgaagacagtaaacggaggaaacaagctggtgtttatgcctcatacatgtttggccctgaaggaaaacgtgtgaaggttatcttgctggataccagatatcacagagacccgctattaagtgatggaactattctgggagatccccagtggcagtggctagagagggagcttcatggtccacaatcagagatcaccatcattggatcttcgat

SEQ ID NO: 179583 - DNA, 500 bp, Zea mays
  Clone ID: MRT4577_95362C.1
acataagtgttcttctatatttaaagtttgttcttcttcttgtttgtgctaacattgagcctaagtatataacttgatacatatgtatgaactccgacggcctcaatagaaataagggtactctacataagcgtactctaaatggagcctaccctaagtatataaatcgacgtccatgctcattggggctcctaggagagacatatgagcttgtcgaagggggaactattccatgtgggccatgaaaaagctcgaatgctgactcaaagcctgacccttcctaaaaaattggaccctcccctccttgagcacctactcgcctagcccaaaagagggaaccggttgtaactccatcgatattcctcaggaatgggcatctctcgacatctgggcgaccaaaaaggttctgggggcgatacctgattccctgagaaagctgcccaaaaaccttcccatcctgggaacagccgaggccgatgcccattagccagcaatgacct

SEQ ID NO: 179584 - DNA, 179 bp, Zea mays
  Clone ID: MRT4577_95363C.1
gcggtacacaagtaacagaaacgcaaaggactactctgtgcacatacacagaagaagaggatctacaatcaatgcactgaagctagaataccaaaactagtaggagacttggaaaaagctttaaaatatcaacagcatctactacctcttggtcagacaggctaacgtcttaataattt

SEQ ID NO: 179585 - DNA, 1890 bp, Zea mays
  Clone ID: MRT4577_95364C.1
aaaaaatagccgaggagctttctcgaggccggccgggaactttcttcctcgctctttctctctctccgtgcgtctgcggtctgccatcggcatcgcccccaccccaccaccacacgtccacctctcccgcaattgggaatttctcctcaccgcctcgtctctgccgggctcgctcgtacgtcgctccccacccgcaatggcggccactttcgccctcctccttctcctgatcctgtcctcgtcggtccgcgccgcccccgacgccgtggtgtcgaggatcgccttcggatcctgcgccaaccagagcgagccccagcccatttggaacgccgtcgcggggttcgacccgcaggtgttcgtctggctcggggacaacgtctacggcgacaacaagcgcccattccgggtcttcgggagggagcgcaccgtggggccctggaagaacgtgccgcgcttctacccttccaccgaggaggagctgcggaggcggtaccagctcgccagggcgcagcccgggtacgccaggctcagggagagggctcaggttcttggaacatgggatgaccatgattatggattgaatgatgcaggaaaagaacttagtgggaaagtgattgctcaaaggcttatgttagatttcttggatgaacctgaagacagtaaacggaggaaacaagctggtgtttatgcctcatacatgtttggccctgaaggaaaacgtgtgaaggtaatcttgctggataccagatatcacagagacccgctattaagtgatggaactattctgggagatccccagtggcagtggctagagagggagcttcatggtccacaatcagagatcaccatcattggatcttcgatccaggtagtgtctaatctttcagccactactgggcctttgttctatgtggagtcctgggcacgcttcccgagggagagagaaaggctgttcagattgattgatagtagtaagagacctggagtgctatttattagtggggatgtccatttcggagaaatcaccagattcgattgtggagctgaatacccatcatatgatgttacttcgagtggtcttacccaatctgtcgagaactctgtgccagaagtgtttcaacctcttatgagacttctggcaatactaacaccaactaccatgcgagttttgagcccaaattgccaatataaatcatgtacaataggccaaccaaattttggagcgattgaaattgattggaacgctgtacctccgcggattaaacttgaactaagagatgttgagggtcattctgttcacagcgtagagttccctatatctgaactgcagccctcggaagcgcatgcaatcaaaagacaaacccatactttccaacgtcactgtactctcgaaacagagctcccatggctaacacgataccggcttgctctgatgttgtttgtcatcatagctgtttttgcggtggttgtggtgatgctagcgatcgcctgcttgtcaaactttaccaagtccagtaagaaaagcaagaaggaatagctgtgagctgcagaggagaaacgaagattcggtccagctataagctggatttcacactgaccagggatcacctatctcaaaccatgcctttgagcaggcaagagccagattgcaccacagtatcaagcagtacactgcgttgtgcaatttgcaaagcgcagattggatagatagatatgatagctaacaaataacttacaaccatgtgcctgcctcgtatagcttcgccttttgttttccgtcttcatgccttccgccctgtttttgttttctggtaagcattacattgactaagaaaaatcttggtggtggaagtgtcccacaagtcaaaaaaaaaaaaaaaaggggcggcc

SEQ ID NO: 179586 - DNA, 395 bp, Zea mays
  unsure (1)..(395): unsure at all n locations
  Clone ID: MRT4577_95365C.1
aattcggcacgaggatggcctccgcctccctgcaccccgcttctccctcccacccaaaccctaaccatagccccgacgcagatctccgatctgatcgccccatgcccgacgccgacgccgtaagcggaggcgcctcgcccacttccccggagaagcgggaggaggaggaagaggaggcgccggggaaggaggaagcccggcggcggcggcggaggagcagccgaccccacggaagacgcgccttccgcgcgcttgcaacaataagcccaaacccccgccgccgccgccgnccgagcgtccgcgccgccgngccgcggcggcgncgggcgccggcggcgcggacganacgccccanngccgngngggcncgccgcncgggccggagcccgaggcgc

SEQ ID NO: 179587 - DNA, 638 bp, Zea mays
  unsure (1)..(638): unsure at all n locations
  Clone ID: MRT4577_95366C.1
ttattcggatattaagtttttctgtcttgttttttaactgcgaataaatgagatatagaatgtgctatataaattcaatatttttttgtaccattgatcttgttaaggttcataaaaagtaaaccttaaatttatcctatatcttctcaaatgatagatataaaatccagattttttcatatttttcgttgtagagagaaaaataatgcacaaaaatatataaaatctttgtcttaattcttttcataatatgcttcataacataactaaagatcagcataaaaaattacatagggttttgtctttttatatttcttaagataagatgaaatgaagctcaaaaaattatagaattttctcttaaaatgaattagggcttgaaatttgatatactgagaataaacaatgaagtacgtctacagcttttttatgtagctcgattacacggtgattgcaaaaaaaaaagttaattgcaccgtgttttttcctagtgccacagcatgcttggagagacatgcacgcgggcatgtacgataggacacattgagggccggccttaccctcaacagggcaggcaattggtggtttccttgcgctttgtgcctnctctggccctctgctanctgcgttgggacttt

SEQ ID NO: 179588 - DNA, 268 bp, Zea mays
  Clone ID: MRT4577_95367C.1
ggaacccctaagccagacgcccttaaaaaatgatctttctgacatcggggaagcacaaccatctctccataagagatcgaactggataccatcctatgtcctagctgaaacgaatgcctacccaacccaacccctcaacagaggcgcccacacacaagaacacattgaacaagctagaagccctcgttacttgcacataacgcctataaacctcctccgaattctgttccttgaccctactcgggaatggaggatgcccccagggatg

SEQ ID NO: 179589 - DNA, 629 bp, Zea mays
  unsure (1)..(629): unsure at all n locations
  Clone ID: MRT4577_95368C.1
ggtccggnatatcccgggnaactaatcacgattagtcggtgactaggacgactaatcgcttcctagtcgctttagtcgagtcggtgaccctaatcgagctccctctagcgataaggctgactaatcgcgattagtcgcgattagtcggacgactttaaaaccttcagcattgtaagtgtagatacatttgaaaggtccgctgctgattttttgcttctgacttggtcactttaccagatgtgctatccattttttgctcatgtattcactctcttgttgataaagctcctctaccgtatttgctaaaagatgtgaatgctatgcgcagtagggaaagatttgtgtcttcatgccttgaaacatgtactttattcctactattgcctaaaatgcaaaatcatcagatttttgtgaattaaactctcaaatgtgatacctgttgtttgcccatatattcatctgctttctagttaaacattttcttgtttcttctaatttttgtaagaagacatgattgcaaccttctactaagccttgcccttagtttattgtgcatgattgcctgcccatatgtgattntgcatttttgcaataatagatcatggagaaaaagttgctcttaaactata

SEQ ID NO: 179590 - DNA, 338 bp, Zea mays
  Clone ID: MRT4577_95369C.1
agctcgtctgtgtgtagggcgcaaaaaacaaatctgaatgcataattgttcaacaacaggtacagaatgcggtcgctacattctgcgtggttttaccacctggtgaggacataaatgttcattgactacagacaattgggatgactccaacacgaattccttggaggggtttaccacttgtgcacccattgaagatctatataggccgttgcacttgggccaaagctgcagagcatatcccatgacctgcgagtgccctcaccagcactttgtttgtgaggtgacagcgtcatccatgctatcgatccccaaactcacttggaggctgctacactggc

SEQ ID NO: 179591 - DNA, 556 bp, Zea mays
  Clone ID: MRT4577_9536C.1
ttccgagggttttagcctctccaccgcacgatggacaccgacgcgagaaggcagggggagagaaaatggcgtatttgtcccgcacagccgccgccgtcgccgtcgccgtgaggtcggcggtccgctccgcacctctcactggccgcgtcctcggagcgccactgccttcccttgcctcgccttccgctgcccggtccgcccgaatcctccgcaggacggcggccgcggcgtcggcggggctggagactctaatgccgctgcacagcgcggtggcggccgcgcggcttaggtcctgcatcgccgtcgactcctcgtgctggagctcgctctcgcaaggatatgctttgcctttatgacaggagaggtgcacctgaagaaaccaatgaacattatgaattacaaacaagggctgtaataatgtgattgttgtaaactaattttacctttgatgttcattgaatcatccacagatgtacaactggcatttgttgatgttgggattttatttacgtggatccatgaattacctgaaaaaaaaaaaaaaaaaaggccccta

SEQ ID NO: 179592 - DNA, 377 bp, Zea mays
  Clone ID: MRT4577_95370C.1
tttttttttttttttttttttttttttttttttttttttttttttttttttttttgaacaaagccaacttgagggtggagattttgtaaccaggggccaaatcggggcgtggatttaaaacaaaacaggtctataatcttaatgaagcaaaaaaaagaacgggtcctatatacacaagggaaaaaccgggcgaggggttttaatgaaaaaccgcgcaaaactcatccaataagccaagggggggctccatggacaaacacgggggcacccgaaggggcctctgaaataaaaaccaggggcacaaaaatttttgcttggaagtccaaaccaagacctttaacaaaaaaggaggggggatcaaaacaaaccttttctct

SEQ ID NO: 179593 - DNA, 515 bp, Zea mays
  unsure (1)..(515): unsure at all n locations
  Clone ID: MRT4577_95371C.1
cgaccagacacgcagcaacaacccgagcgccaccgggaggcagnagctcgccctcccttgtctcctggctctcgcagcaagcgccagctccacgcatacaaacggcacaatgctgcacgacaaccaccgtctccggcgaaagtaccggcgacggagcacccaccaactcagggggacctggcacatgaggcccatcaaccaccgacggtacagctatcagcatcaacccaccagccaccatcggcccaagtgccacagccatcctaagtgcagccgtcaccacaacaataccctactcaaccgccacgacctcagccgcaaccaacaacacacccatgcccgggccaacaacccgtgatgcaatacctgcaccaacagcagggaacctcatgcaatcaactaaacgggatgcaccctcatatctactagcaggcacagcatctactaccatcgaaccaaattgcctacagcccttatgactgcctactgcagcaacagcagctaccatagcatct

SEQ ID NO: 179594 - DNA, 403 bp, Zea mays
  Clone ID: MRT4577_95372C.1
aatacaagagctgcgcccgtgcggcagctcggaattcggctcgaggtgaaccttatgatttggcactgcaccatccgcggcaagcaagggacagattgggaaggtggatacttccctctcacccttcatttcagtgaggattaccctagcaagcctcccaagtgcaagttccctcagggttttttccacccaaatggttggagaccagctattactgttaagcagattctcgtcgggatccaggacttgctagatcagccaaatcctgctgatcctgctcaaacggatggctatcacctttttatccaggatcctacagaatataagagacgtgttaaactgcaggcgaagcagtaccccgcgttgctagtgtcttgaatggaagactaaagaacaaggtcaa

SEQ ID NO: 179595 - DNA, 478 bp, Zea mays
  Clone ID: MRT4577_95373C.1
ggaaaacctggggaaacaagccttccccattttttggaaaaaacattttttagaccatccccctttaaagggggggaacagttcaaccctaagggccaaaaacaaagcccccttttttttacaaaagggaatcgcctccaatttaaactaaaggcaaccaacggcaagggggccccaaaaaaaataaagcgggccccaaatcaaggaatcaaaaatttttgggggaccccccttatagttttcccagggtaaactttacagggaccccataaacgggatacttccaaggccggggtccacgggccaaaaattgggcacgtttaaaacccaatttaacaacaaatcctttgggacaaaaaggaattctttcttcaggggcggggggcccaaaaaaaaaaaggggggggggggagttaaaacaaaagggaactttcaatccaaaaaattttatgggtatgcataggggcaaaaacttttc

SEQ ID NO: 179596 - DNA, 570 bp, Zea mays
  Clone ID: MRT4577_95374C.1
tcgagtttttttttttttttttttttttttttttttttttttttttttttttttaaaaaacgtctttgatttcactgagctcatttattcgatcgatcctacgagcaacatacactaataaaccctccctccttttaatttatgctgttaataaaacttgcatatatcaattaaagggatggacttgggctcgggtttatgtaaatactatactgaaaagggggttttttgaagttcctgatcgggccccctcccatgaaaaaactgaagtttttgacatgaaaattcccagggatcccgagttgtttttgcccccaatatcccataattaaaaaaagagaggtacttttcgttcacaaaacaacaggtttaacgccccataatatttatgctacgtactacccccctcaggagcagggacatttaactacaatacaaacatttaatctacctttccctactgggggggcacgcttttcgccaaattccttggttgggccacggggaatccccgtagaacaggtagatggggcgcgagcaccgtggagggaattatggggatcactgggt

SEQ ID NO: 179597 - DNA, 835 bp, Zea mays
  unsure (1)..(835): unsure at all n locations
  Clone ID: MRT4577_95375C.1
ccccgcgtccgccccgcgtccgccccgcgtccgcccacgcgtccgccccgcgtccgaaaaaagtccagtcctcaaactctccagcgggggcgagccgaggaagaagaggccgccgccgccgccgccgccatgtctgggggaatcgcccgtggccgccttgccgaggagcgcaaggcctggcgcaagaaccacccgcacggtttcgtcgcaaagccggagtcgctgcccgacgggacggtgaaccttatgatttggcactgcaccatccccggcaagcaagggactgattgggaaggtggatacttccctctcacccttcatttcagtgaggattaccctagcaagcctcccaagtgcaagttccctcagggtttttttccacccaaatgtctatccttctggaccagtctgtctttcgatccttaatgaagatagtggttggagaccagctattactgttaagcagattctcgtcgggatccaggacttgctagatcagccaaatcctgctgatcctgctcaaacggatggctatcacctttttatccaggatcctacagaatataagagacgtgttaaactgcaggcgaagcagtaccccgcgttgctagtgtcttgaatggaagactaaagaacaaggtcaacatgaggaagactactataaagattgtgaggagttctaggccattgttgcttcgatcaaccaccatgtggaaagtcgttagttttctagtttatgttataaagatattcnnnnnnnnnnnnnnnnnnnnnnatattggtttgcagagaaatcatcatatttgtataatctggtcttgactcctagctacac

SEQ ID NO: 179598 - DNA, 1310 bp, Zea mays
  Clone ID: MRT4577_95376C.1
gcgtcctgcccacgcccgtccgcccagttttcatagaacggcggaggcggcacgcgcagcagcgtagaaactagaaagtccagtccccaaactccccagcgggggcgagcagaggaggaagagtagccgccgccatgtctgggggaatcgcccgcggccgcctcgccgaggagcgcaaggcctggcgcaagaaccacccgcacggtttcgtcgcgaagccggagtcgctgcccgacgggacggtgaacctgatgatctggcagtgcaccatccccggcaagcaagggactgactgggaaggtggatacttccctctcacccttcattttagtgaggattaccctagcaagcctcccaagtgcaagttccctcagggtttcttccacccaaatgtgtatccttctggaacagtctgcctttcgatccttaatgaggacagtggttggagaccagctattactgttaagcagattctcgtcgggatccaggacttgctagatcagccaaatcctgctgaccctgctcaaacagacggatatcacctttttatccaggatcccacagaatacaagaggcgcgttagactgcaggcgaagcagtatcctgcattggtctgagagcttcgccctactagggatccatgctgcacatccgcatagttgttgctagtgtcttgaatgaaagaccaaatgtaacatggtgcttggagaagtaactatcgccattgtggactgtgtgtcttttaacagccttattaactgtttggagtgtgtgatttgcgggatgatgtcaaaaccttgctgtgtcttgttatcaagaattgctgtgtgttgtctgacaaatctaaatatgggaagaaacgcccatgacgtttcagctgagggcactcctggttctgtactttgacagatatgaagggaaggtagcctgtggtttttgattcaacagtcattcctaacgccaatgcacatgattataacgatatcgatgctgttgcttgcttcagatgagctgtattatgtagcctacttgaacatgcttaaacattggcatgagtagagtgcattgttagcttcatttcttggttgatgtgcaactttgaccttgagtatagcaaaaaaaaaaaaaagattcagtgtcaagctttcgcaacggacaaacagcagccatggtgaactgagatgttccgtagtgcatctgacaagtactagtgtgccggtaatttatccgtttatatagtatactagcagaccaaaaaaaaaaaaaaaaaaaaaaaggggcgggccgcgttttaggaggatccaaagctt

SEQ ID NO: 179599 - DNA, 547 bp, Zea mays
  Clone ID: MRT4577_95377C.1
gggagacgctaaacagtttttgcattggagacctaatccgtcaacgggggtactacaaagataaattagacacaccgttaactagcaatagatgctccaaactcgagctcactacaactacaacattttgcagtttaaacgcacggggttgttttttttcccttttcaagcccaacaccgttgtcatgttttgccgcatctccttggtagctcgagctctggggcctggccatgaacctgctcctgctgcccctgcgggtgccgttcccctccctgccgccccggccccggcccttgcccgacgacaacccggggctttggctgaggcggggcgccagccgcctccgcgagttgcccccggcgttgttcccgagcgccgcctgcgcgacgctgtccttggccacctcgcgcgcgcgctgcgggttcacgccctgcttgttcaggtagtcgatccgcgggagcaggcccgacaccgccttgcggagcgtgtcctcgccggtgttcgcctgcaccgggttgcccagcaggctgatcgcccgcagcgagc

SEQ ID NO: 179600 - DNA, 2850 bp, Zea mays
  unsure (1)..(2850): unsure at all n locations
  Clone ID: MRT4577_95378C.1
gtggggggggttgttgggggtttatttttaacataacacaagcaccatattcaatattcatacaagttcaagtccataagaaagaagttcaaatccatctaaaacaagttaaagtccatacaaaactcattgtttgtaagnnccacataagccttccatatgaggtcattccgttggtgggtcattggagccgccgccacttgggttcatcaataagtccataaacgtgctctgatccagaggcggactagcatgatgtgagcctgaacctgatcctagtgagtgtgagggcaatcctggtgattgtgactgcccgcgaggaggaaatccccacggcatcggcggtggcatctgtgtttgcatcggtggccaaatgcctggctggcgaggtgcccacgacatcatttgccctcctatcacacccgatgccatcaattggtcttggacagaagttgcagaaccctgtgatccatccgccgctgcagtggagcggtccgatgattgtccagacaccggatgtgtgatgatagggggttgttgaaaaggcggcatgccgaactgagttccggcacctccgtacatctgatgtagcatccaattttgcatttgttgcatctgttgctgtacttgttgcttatattgggccatactctcctccatttgagtcatcttctcaagcagctctccttcacgtgcagatgatcgtcggggtcgattcgacccagctgagaaattggaccgtctactgtaactccgacgggggacaacaccgtggccgattgctaacctcccatgtggcacgcctccaccagccttataagccgcctccgtatcgaactcaccagtgagccagtccgcgtctggaccatttttgtctctcacgttctcaatgtagcgagccagtttctctgtcgcattactatcattcagtatttccggatgattcggatcgggacccttgtgtccctcgacgaagacttgaagcaaagtaggctccactccatttcgagcctccatacgtgcggccttgccaacgtgtccatctgccccgaagaagtggacccctggcttgctcaatcgattcatacgatttctattagatatggacaggaactcctcagaagcccaatacttgcacatccacgcccaagcatctgaatggtggctcaaccaatccacctcactctctttgtactgctgagcagtcaggtggatttcctttgccatattcgcgtcacaatagttcccctggcgcttttggtacaccgtgacggccctcaatcgtgctttatacatcatgccctttactgctctatctgctgagccattgaatacctcacgcacatatggatcatccaaggtataggggtcgcacacgcgaaattggccccaaaacaaatcccacactttgcttgtgtatgtcccgtcgttcccgtacggcttgaggtcccaatgagcccagtaatgagcagctatctcttgaccgccctctgtcaccatcgccgggtaggcgaatcgcaaacaaatccccaactctgtgaggactggtgtgcgatgccctgtcccgtcccaactaacctccttccatgccctagtgcctttcggttcaataaccctccgctgatcgaagggtttagaaggcttcaatgtgagggaccgacgaaacctgatggcacgccatggcgcagcctgtgtggcagcctcctttgtagaagcgtctgctccagaagtctcctctccatcctccagttctgcggcagcttcctcagcctcctcgtccatagccgcctcaaacatgttaggagtaccactggaaccccttgaccttcgttgtctggatctcctaccagacgaatccatcctaaacataatactatcattgtcgctatcgtctgcttgatcaccgacttcttggaagacatcatcatcatcatcatcgttggtgcttaaattgtagttttgatatcggtaagggtgaacctctggattaactttatatgcaacccaccaggttttaaaacttttatgaggataactcaaatagtacacctgatgcgcttgatgtgccaggatgatattgttgtactcatttcctttataccttgatgcgtgctttacctccaccatcccgaattcgtcaactcgcgtgccaacatgtggatcaaaccatatacaatcaaacgtcacaagtctcaaaggtttgtgacctccaaatgtatactcggttatgtcttgaacaataccataatagtcctccaattgtccatcatcgctatacgaacttgctacaactccactgtttgttgtagctgcaagtggatgactcacttctagttttgctgttcgaaaacggtatccattaataccataacgatcaaattttcttgcggtcaattgaccatgtgatatttgttgcaagtctttggagacactggcttcaggtttcttacaatgctcgtggaaccactgcacgaaggacgggccaccgtgtaaccctttcaagcgtaggtcatccaactgcttttgagtaagttgtttgttgggtttatatatgctatcaaagatttggaaataaggatgaagttccggcatattgacatacaagaaaagcaaggtcttgttacgctctatcgttcccacaagatgtgatgtgtaagctccgacacctttaccgtcccacttaaaagcacttagatcagtgattggagcttgctcgacaacatggtaccgtgtcgtttgcgcattcacgttgtttgtgtgtgaaaaatacttgcttgagaataatgtgatctctctggctgcgaacgcctctgcaatacacccctcaacccttgccttattccgcaccat

SEQ ID NO: 179601 - DNA, 377 bp, Zea mays
  unsure (1)..(377): unsure at all n locations
  Clone ID: MRT4577_95379C.1
attcatttttttcttttttttgcgccgtcttttaactttttttgcgaactnaacacacttttttaatatttcaatcaaatctctttacatgatcacctccctccatttaccaatataccaacaaaactatatatttatacatataaacccatcccacttctcttaatacaaaccatattaaacctaccatcccacactttattttaaaaaaaaaccactaaatcaatcaactaaccccctctctactccaaatacatgtcatgtccaccccaactttcatgtcttctaaataaaccttttacaccccaaaaaaacaatatctctacaccccaaacaacaaaaaattcattttacttaataatcacaccataaaaata

SEQ ID NO: 179602 - DNA, 441 bp, Zea mays
  Clone ID: MRT4577_9537C.1
ctacgcgtatgcatggatctcatcacctacaacagagcggttgattctctgaatgtactagattacaacaacctaacctattaatgtgcgaagatattctcccatcaaccatctgtgcgtgcccagaggaggacgagattgacagcgcctacgacattgcgcatgacgagtagcaagactgagagacttctcaatacacaagtcatggacaagaaggtcaccctctggcaggacgcccttgacatcatagtcggcgtcttcgacggcctgaccgctcccttccctgctcgccgcagtccatgcgtggtgctcactcggaggacttcaacaatgtggacgctttcttcatgtctatggtgctgttagggtagcctggcggtgaacacgatactgaccaatacaaccttgagcagtacagcgagcaggacgagatcgacaccg

SEQ ID NO: 179603 - DNA, 411 bp, Zea mays
  Clone ID: MRT4577_95380C.1
ccgatacgatatgttgggtagcactgatcataggtacctgatagggtgacgtagttgtctttaaatacgtagtccactccttggatggtgatccgtgtacttacgccacaaccacgttgtgattgactatcaatgcctgtgacaattgggatgttggagcaaatggcgatgatcactgatacgcttcggatgtttgactttctaaggcaattgtcaggcgttcatccagacagaattcatcggatagatacgcatctaaggtggacacttggtgaatatgataatccgttacatctgttgttagccctagttggtttgtagacgtaaacagcgcattcaccggcttctgcgctctttccagattatattcagcctcgagtggtgcagtaactggaataaattcaaatctgt

SEQ ID NO: 179604 - DNA, 570 bp, Zea mays
  unsure (1)..(570): unsure at all n locations
  Clone ID: MRT4577_95381C.1
cgnntccgccggcttctttccgctgtagggcgttttctcgtgtcctcggtaggggcgagncctggggaagacggcaaggggtactgcgntngctgcgcgccgaggcggtcngnntcggacgaaccgtacgagtgaccgangctnggcatnnaggcgcccgtgcccatggcngctttcacnngaacntnntcatcncnntcacnnggtgngtnngggcggtgggggcngcngnngcggtgaatgcttgcttttgcggaaaggaccgnntcaagcnnagtcggcccaccnnngtcttccgcnncgcaaccgtgccngccacaatcncnngcaactggctttcgannngaggagtcnncgccgcnncgccgcccaaaattctaactganacnaagtcttcaagtgaaaggggagttggcaagtcccaaagcttggcaaagaaaagaacgctttgtgcccaaaggaccgacannaacattagatgatncttnnacaccctgtttcttgtaaatgcgttggccagtttgaggtccaaggatttttgaattgggtcctttaaaaaaaatgtatgtg

SEQ ID NO: 179605 - DNA, 239 bp, Zea mays
  Clone ID: MRT4577_95382C.1
ctgctcccttctgctcacccgcactattgcgcctgatgcgagtgtgatgcggcgctggtgtacagagacgcattggcgccagtggaggaaatggtgcgagacctgctgggccgcatgacgctgcgtgagaaggcagcgcagatggcccatatcgagcgcaccgtcgcgacgccgcgagccctcacggagctcggggctgtcagcggttctcaacgccgggggaagcacgccctgcgagc

SEQ ID NO: 179606 - DNA, 326 bp, Zea mays
  Clone ID: MRT4577_95383C.1
gtgcggcgctcgagccggccgcttcatctcggcctggagttccgcccgcgtactgctcaccctgccgtcgacgatcaccgtgagcagatcatgatttgttttcgcgcttcgaggaatcgacgatcaagcgttggtgaccaagtgatcaagctctctgagttctacgaggttgaagatcctgagcatctgtttggtgaaggttgcctttggtgcaatctatgctcaggtaaagaagaaggcgtcgaggcggatctccaggagttccaggacttcgacgagttcaaggattaggctagtgacctcccccagtaagctgcctatggtgg

SEQ ID NO: 179607 - DNA, 667 bp, Zea mays
  Clone ID: MRT4577_95384C.1
accgtaccacagcggtcaaaagagctcgagctgaagcttaagatggccaaggttaacgccggcgccgccctgttgtctctgtgcctgttgctggcgtattctgccgggcaatcggcggccgcctacgtggacgtggagggcaccgtaaggaaagaagtagagaatgccatcaagggcaaccccggcatcggcgcggccctcgtccggctggtgttccacgactgctgggttaatggttgcgatggatcggtgctcttggacaagacgccatccggtggcaacaccgagaagaaggcgatcaacaacatcggcctggacggcttcaacctgatcgacaccatcaagtacaaactgggcaacagcgtctcgtgcgctgacattgtcgtcttcgccgcgcgtgacgcggccagatacctgagcggcggcaaaatcgcctactccgttccctcagggcgcaaggacggcattgtctcgtcggatgctaccgcagacgccatcctcccgcaatccacctttgagttccagcagctcaaggacaacttcgccaacaagggcttcacccaggaggagctcgtcatcctctccggcgcgcactccatcggcgtctcccacctctcgtctttccaggaccgcctcaacgattcaaccgcgaccccgatcgacgaca

SEQ ID NO: 179608 - DNA, 457 bp, Zea mays
  Clone ID: MRT4577_95385C.1
agccacgcgtccgcaggggttcgcttcatgccagttcgtgtccacctcgctcatcaaagcaaaagcggccgttggctcctcagttctaggtccactgaagatcatccaggatgctggcgagatggatttggtgtcatggggagtcgccatctctgcgttcgtgaagcatggcttgggtcaagaggcactgtctctcttcaactcgtgcagagttgactgcccagagaagcctgatgagttcatcctgggcaccatcctgaatgcatgtgcaaacgccgcgttgataaggcagtgcagatgcatccattcgctcgttgtcaggacaggacacagcaagcacttgtgcgtgtccagtgctttggttgatgcctatgcgaaatgcggtgacatcactgctgccaaaggcgctttcgctacgggttcgaccaaggacgccatagtgtacaacaccatgctg

SEQ ID NO: 179609 - DNA, 874 bp, Zea mays
  Clone ID: MRT4577_95386C.1
aagcacctgcgcaggcctcgattaaaatctcaccggtctctttctctttcctcgccggcaatccttctcctccctcccattcccattcccatcgccgcttccaagtcccaaccgttcccttctccgccctcgccgccggccaacatgatgcacatgaccttctactggggcaagtcggccacgatcctgttcgacggctggcgcacctccacgtggcccgactaccttctctccctcgcggccctgctcctcgccgccgctttctaccagtacctcgaggccctgcgggtccgcgtgaagctcgtcgcaggaggaggcgccaagccagccccctcctccatcatcccgccaccggccggctccgacccgcggacgccgcttctcgcgcccgccttcgcggccggcgccgggcgctggccggcgcgcctggccgtggccgcgatgttcggggtcaactccggcctcggctacctgctcatgctcgccgtcatgtcgttcaacggcggcgtgtttgtcgccgtcgtcgtgggcctcgcgctcgggtacctcgcgttccgcagcagcgacggggaggatctcgtcgtcgttgacaacccatgcgcctgcgcctaaagaaacggaaggacgaaccgagtgaagcatagccatacctgttggaagaattctagcttagatctgatcactggaaagagaaggcctgtcctctattgcgtcttttatgagttgtactctgtagctacctgtccctatgactgtgagtacaagtacagaaactacgttaccttttgttgtaaaagtgtatatccagttcttttaagattaaatatgaaccagacttgtctacaaatcgcagtaaaaaaattcaggttatatc

SEQ ID NO: 179610 - DNA, 937 bp, Zea mays
  Clone ID: MRT4577_95387C.1
cattgcaagcctcgagggtgcccggggctcggatcgccgcgttccaacggcctgcctcaggccgcacccgccgcatccctctattaaaatctcaccggtctcgccggccggcggcaatcctcctccttctttcccctcgccgatcccaggtcccaatcttttccttctccgccctcgccgccggccaacatgatgcacatgaccttctactggggcaagtccgccacgatcctattcgacggctggcgcacctccacgtggctcggctaccttctctccctggtggccctgctcctcgccgccgccttttaccagtacctcgaggccttgcgggtccgcgtgaagctcatcgcggaaggatccgccaagccagcctcctccatccctccacccgccagctccgacccgcggacgccgctcctcgcgcccgccttcgccgggcgctggccgccgcgtgtggccgtggccgcgatgttcggggtcaactccggcctcggctacctcctcatgctctccatcatgtcgttcaacggcggcgtgttcatcgccgtcgtcgtgggcctcgcgctcgggtacctcgcgttccgcagcagcgacggcgaggatctcgtcgtcgtcgacaacccctgcgcctgcgcgtaagggtgtcgggctcgccggattgccttgtccccaggtttgccttgcttgttgatgttgtagtataacacaggtatcataataaaaaatcatgtacagatccaattgtgcgtttggaggacttgcagtgttcaggtgtgtttggggtgcattgtagggtaaagaatcagattaatgtatctgagcctctgaggagatggtttaactgtttttgagatcaaatttgaaaaaaaaaaaaataacaaactctactttgtttgcgatgctactaatcccagaaacggaaaggcaactgcat

SEQ ID NO: 179611 - DNA, 417 bp, Zea mays
  Clone ID: MRT4577_95388C.1
ggggctcccacccatccagctagctagcatacagacgaataatctgttcttcacctcactaacaccagctagcaacctctttctctcctgcaaaagggccgctcgctcctcctcctcccagccgcaactggtcacggcggcggcggtcctggcagcgacgctgctgttgcaggcggcgggggccggacacggcctagagacgcgcgcgaagctaaagcgaggaggacggtcgtctgggacgaccaagccacgaggacgcaacgggaactgcggcaccaaccctccccggctggctgaagcacgagagcgcatcgctcaacaaacgcgcaccgggaactgtgaaccgagaagacaacggcaactgccgcaagaccatgaagaaaactgtcgtgggctggatcatcatggtcaatgacg

SEQ ID NO: 179612 - DNA, 744 bp, Zea mays
  Clone ID: MRT4577_95389C.1
cgcttcctgtcccaccgttcccttctccgccctcgccgccggccaacatgatgcacatgaccttctactggggcaagtcggccacgatcctgttcgacggctggcgcacctccacgtggcccgactaccttctctccctcgcggccctgctcctcgccgccgctttctaccagtacctcgaggccctgcgggtccgcgtgaagctcgtcgcaggaggaggcgccaagccagccccctcctccatcatcccgccaccggccggctccgacccgcggacgccgcttctcgcgcccgccttcgcggccggcgccgggcgctggccggcgcgcctggccgtggccgcgatgttcggggtcaactccggcctcggctacctgctcatgctcgccgtcatgtcgttcaacggcggcgtgtttgtcgccgtcgtcgtgggcctcgcgctcgggtacctcgcgttccgcagcagcgacggggaggatctcgtcgtcgttgacaatccctgcgcctgcgcctaaagggtaacgaatcagtaatattgtcttgttgctttctatcgattaatggatcggaagagatggtctttagcagttaattgtttgacttcatttgagatcaaattggacaacctctacattgaacatgtttattttgtctgcaatgctactggtccaagaaacggaaagacgaaccgagtgaagcatagatacatgttggaagaattctagcttagatctgatcactgga

SEQ ID NO: 179613 - DNA, 1509 bp, Zea mays
  Clone ID: MRT4577_9538C.1
acgagcttctgtcttgagaaaaaaaaacttgaaatatacaagagttgaattttgctcattttcatttcaacgtcaaaatgagccttaaaactaatagtatgccatttgttgtttgagtggcgcaaattttagtgagtggatgtgtcgggaaggttttttgagcctccatttgggagttcttttcctttcttacagaaaggcgaaagggcctctagcctggtggttaaggacttccgagtggcacctccaagtcctaggtttgatttccctcgagagcgtatttccaggcttggttcaaaaaatcttctcgctgtgtcccatctactctcgggttacgatgtcctgccggttgggctgttgtagagtggacagttgatgccggcccgttagtgatgggtcagggttcggggattttctcggcgcgtcgcccacgcgtccgcagtggaggagattgtggatttttgcggaataataaaggaggacccagaaactaaaaagccacgggtgaagatttatactgataaggaaaccggcaggaagaagggtgatgccttggtaacatatttcaaggaaccttctgtagctttagcggttcaattgttggatgggacatcattccgttctggtggtaagactcctatgtctgtaagtccagccaaatttgagcagaaaggcgatgttttcatttcaaagaaaagtgacaagcaaaagaaaaggaagataaaaaaggttgaagacaaaatgcttggatggggtgggcatgatgataagaagctgatgattcctgctacagtaattttagttcacatgttcacgcgtgctgagctgagtgctgatgccaagcgtctttttgttttatcgggactattgtttcggtcttttcttaatataataccgtttgggtggccttttccttccccggccgagttaaattaactagttagtaatgaacctactagaacctatttattcatgacaatgttgttgacagcaaattagaagctaaattcctccatccacagtccaaagttgaactattttataggaacatggagaatctgtaggatgagatcctcctttttgtggatgtaggtcatcaaatagccccactccacttttctggtgtcaacatcccttgtagtacatattacctcaataaaccaaacagaaaatgtttcagcacctcatgccgaaaataactcctcatccaaattagaagcatttatcaagagattgttgtttcagtgtggctacagctaagaatgaaatgcactatcaaagaatagttgtgaagtccagctagttgccgaacaagactgtacatcgacatcatgtgtcacaactcacaacaaagaggtttggcgaatgcaatagaattatacaaacttattagttcatcatcttaatagtgatctatttggctcgaccaaaaaccacataaacttgctgcaaaagtacacaactacttgttaagataacaaatagcctcaatcagattttcctagatct

SEQ ID NO: 179614 - DNA, 132 bp, Zea mays
  Clone ID: MRT4577_95390C.1
cattccgcaccccacacacctgttcgtaggagcatcgcactccctctcaggctctcacaaccgtctgcaggtggttgcagcagcgccgcaccaccctcgtggtggcggtggaggactacggtcggggatcga

SEQ ID NO: 179615 - DNA, 352 bp, Zea mays
  Clone ID: MRT4577_95391C.1
aaactaaaaggtgatcaactaccatgcattacctcagtgcaaggtatgtaaggaaccagggcttgagaggcgtcaggaccgtctatcctatcaattagtcattcgtgtggaaaagaagatcgagcaccatacattagtgcaagttatgtaggggtaaccaaggctttagaggcgccggaaccatccatcctaccaatggaaacaaagaaggcggtagagggaagcggtaaagtagagcctcacctcatgttctatggcaagacatgtattcctgccgacgttcttagactcaaggtgtattagaatttcttgctgagaggccagggtcatacctgaaggggatgtggagggt

SEQ ID NO: 179616 - DNA, 435 bp, Zea mays
  Clone ID: MRT4577_95392C.1
tgcttggtttcgtgaataggtttgctcggcaaagaaaagacccagcacaaggaagtaggagacaaaagcacacagacttgtggctcgctctatgcacgaagggaagttccgccttattaatcggcagtcagctccgcgcgcatcgtctccctgatggccatggacgccacggccttggcccacgcgaccagctcccgcttcatcctcccctcgtcactccacagcaccggcacgtccacggacacctccgcgcccggcgcggacgaaacgccgccaccgttcccggttcttcgcgttcccgagcagacttcgagggcggggacggacagcaccggaagggacgtcgcgtccagtgccatggcgcgcacaaccgagtccgcaagagccggccgatcggcagcacgacgcacgttcttgcaacaggccggggggggg

SEQ ID NO: 179617 - DNA, 587 bp, Zea mays
  Clone ID: MRT4577_95393C.1
cttcctagatctgggcgccgcgcgcctgtgtagaaatgtacagtgtatttggctagcttttcgattttgtgcatatgtatgtagctgactggctgatactataaaacagagtggcctctgtgtacattggctccgatttggtacttagatgaccattctttaggccgcgtttggttacctgggcaatctcatgatgagataaattttatctactaaaaatccaaacacttcagtttttttgcctttaaaaaaaaaaaaaaaaaaaaaaaaaaaaaaaaaaattacactattcggaaggggatatagacttgttttttcacaaaacctcccatccgatacttcaatggtcgccctacgtccaacaaaaaaaaaaaaaaaaatacccctagcccttccccccggggcctgtaatttcccgctttccctactgcaacaacagtccttgaccacttcctccctaggtaccatcgccccgcggtcacccccactcccctctctgccatcactgagccccctagccgtggtgaacccctgtccctacttgcaacagcgtgtgcttgcttccaacccacttgctctggcgaacg

SEQ ID NO: 179618 - DNA, 310 bp, Zea mays
  Clone ID: MRT4577_95394C.1
atgatcatgatggttattttttttttttgtttgatgcttttgttttttggttacgggacaaaaacagcgacagctgatttttagagaggacaccggattcgatcgtaaacgagccgaaaattgcttattctcctatataaaccgacatattagcatcgtcggcaccgacgatgggatgagtatgtcccattttaatgatggtttatccacacgacctatacgcatccgacttcgaagcttctattccaaaggggtccgggattatcttttgggccaaagaggtgattgtcctggacatggaccagcggtg

SEQ ID NO: 179619 - DNA, 461 bp, Zea mays
  Clone ID: MRT4577_95395C.1
ggggaaaattgaaggcgtccaagtttcacaatctttcaaatgtaacagtgaaagataagaaagagctgaacctaacatcagcgaaaatttaaacaagaacccccgggccccccaaaaaacctttcagaaaatgccccaaatctcatttgattggaggaccccaagtaggttctccctggagagcagcgacttggagttgtcctacatcaagtgatagccttcttatcgggtgaacccaaaaactggggagaaaaaccagtccccccaactggtgcctcgtgggagcagcacccacccgggccctgatggggggggggggggggcttcttgggctgtggctgcccgagcaacttgcccatttcgaacccctcctccccatcggcatagtacttggcccccatgtcccggatctggtcccccagggtagaggtgtaaaggttgaaagcaccccgttggatccg

SEQ ID NO: 179620 - DNA, 709 bp, Zea mays
  unsure (1)..(709): unsure at all n locations
  Clone ID: MRT4577_95396C.1
ggaggcggcagctctcggccggccttgggcagttgggctggtcgcggcgcgtgcacagctagcaggtgggcggatcgatcattgatggctatggcggcggagacgacggtgctacgacggccgctgtcggcgttcttggcagcgggcggcggcggcatcggggaggaggtgtcgtcgggcaggcagcaggtccctccggtgttccttgccacggagaaggacgacgaccggccggcggtggacccagtgatctgggccgacgagaagcggatgaagcgggagctgctggtgtgggccaaggccgtcgcgtccatggtggccagcaacaacacctcctgctcctctccgccgtcgtcgtggtcgtccacgagacacaggggatagctagtatacgtacgtccggttgggtttcttgatggttcagcttgtatgtttttggctagccttgaagatggatcgatcgaccggtgacgtgagccttcccttggtgtgtttttgtctggcttattctttttgtgctcaattggtgcatctatctaagctagtttcgcttgcttgatttggggaaggttgctctatcttttttatggtctatttatctagaatctagggctagctacttaatngttatatatgtgtacaatttccctatatgtctcactttctactttcgctgtacaaagatatatgaatatataggcctccgtat

SEQ ID NO: 179621 - DNA, 319 bp, Zea mays
  Clone ID: MRT4577_95397C.1
ggggcaaaacccatcatcagttcatcacttcattatggaactctggaccaaccattggagcaagcaaacaaacacattgcacaagcccaatacacaagttggagtttacgcaacacaacgcaacgcagggtactgacgtccccgtcctgggcctttgaatcccgctttgaaaaacaaacagattcccgcaaaacaaacagggcaaacggatcgggtcagtttttgggggccttcactacacaacagtttacactttacaggctacaggggcccagttaaaccaagacgatggaatccagcggtccagccccccggaccc

SEQ ID NO: 179622 - DNA, 409 bp, Zea mays
  unsure (1)..(409): unsure at all n locations
  Clone ID: MRT4577_95398C.1
tcccgccagccgccctccagcgtggcgccggcatctctggcacgtggcttgctcatgctcttgctccgcccccgcagctaccacagcagcaggaaccccccgggttttatggccggaggaggtacgaagatgaatacaacagtaaccctaacggctggcctaggcgagccaatggcactagtagcagcactagtagcagagatgattgcagccgtggcagctacaatggaagagggaagaggaagtatggggagtacaggagggggtatctggactcanggagagacagggaggagagaggaaggccatttccgaacggccggcgctacgaggaggatggggatgaagatggggcaccctgggttcaaaaaaagcgccgcggcaatcggggaatgatgaggcgagtact

SEQ ID NO: 179623 - DNA, 530 bp, Zea mays
  Clone ID: MRT4577_95399C.1
cgaggccggccgggaatgaatttcaaatagaaggcgaaccaccagcattttttcgttccagatgaagatttcgtaccacatcttatctcaacgactatggaccaactgctgtttgatatctacggctaatcggagtcgtgttctgatggaattgcagaccgaggacgagcagagctaggcgaacacggacctcagcgactgtgatgattccctcgacaacagatactacaaagactgtatggaaccagttcacccctaagctctaccaattcctacgcctccaggccacaagaacgatagacgactatcatgttaagctacgacaatttcattacagagttaactggcaaggtttatgtgtttacgcttagcaagattgcggggatcgctgctcgccaggaccttgatccggctgctgtaatgacgttactatatggggtgatacctcagatgatggattccggagagagacggatgaatgcacatgttctctatgggaagatctttatagctcctattcggcttgggaa

SEQ ID NO: 179624 - DNA, 439 bp, Zea mays
  unsure (1)..(439): unsure at all n locations
  Clone ID: MRT4577_9539C.1
cccgtccgaaaaaaagtggaaaataanannaaaaaaanntcgtagaggaggttctgattgggggcagttgggctgagacccgagccggcgcccnnttccggcgctcgactaagctctgggaccccctaccttccgctncggcgggcgatgtgggcaatnctcgcagtgcttcnngccggcgtcccgccctccanngtctcccgnncttcgtcaatggcccctcgaggggggccttcctnncgaagcangnngagcttggaccggccnnntccgcgagccctattcnngcctcccttcgcangcngcangnntcgcggaccccggcggcccgcttcttagagtggatccannagcttaccgtacccgcgttgcattgcgacngnntcatagctnnncttctattagtggtcgacgctgaaattcaaaattcaactggcnc

SEQ ID NO: 179625 - DNA, 1497 bp, Zea mays
  Clone ID: MRT4577_953C.1
cattgggtacctcgaggcaggcgggggggcttcgaacccctagcgtccggaaaaaagaaaaaaaccacaaagagattcctctcaccaccaccaaccctagacgatcctcctccgccatgatgcgggacggcgtgcctccgtcggtggccggctccggcggcgcggcgggcggcgacgggcccaggcgatgctcgcagtgcgggcaccacgggcacaacgcgcgaacctgcacggcgcggcccgtcaagctcttcggcgtgcgcatcggggacaagcccatccggaagagcgccagcatggggaacatcgcgcacctcgccgcggagggcagcggcggcagggaggaagggtacggctccgacggggagcgcccgcacaagaagcgaggtgaggcatggactgaagaggagcacaagaagtttctgcttgggttgaataagctagggaaaggcgattggcgtggtatatcccgtaaatatgttgtttcaaggacacctactcaagtggctagccatgcgcaaaagtatttcaatcgccaaacaaatgtgcatagaagaaagagaagatcaagcctattcgatatggtgattgatgacccgtctgatcaacttccgctctcgcgttcatcttcacaagaaatggagcagcaacatttagatgatccacagcctgttgcagccctgcctgcacctgtggtctctccagctactgtggtacctcctgtgcctgtggaagtgtctgcttcagttccatcgccagttcaggtcccagttccagtttcagccccagtgatgacatctcagcctatggaacaggactcagataccacaagttcaattgctggagaggcaggaacggtgatgccaggagccatgcccccctatctttatccaatgatgattcctcctccatactaccatactgcttttgtaccaatgccctgctacggttatgttcctttttactgtgagccacaaggtgctgcacaggctccgcatgaggttgtcaagccagtggctgttcattcaacgcctccactgaatgccaaagacctttacaacatgtctgaattgagcctgaagggcgactcgaatgcaaacggtggtgtgcctgcttcccccttgcctccgaagccgatcggtagaccagagaggcaatctgctttccatggcaaaggacctacacctaccggtggctcgtcaggtggactgattcctgcagtcaagtgaattcgattatgctcctaaacatgccttcatgtgtatgtaatactagaaatagccaaatcgtaatagccgcctgtgctgctaaaatggtggtgtgttttctagcaaaatatctatactgctcattttagccttcaccagtttggaagtcatgatccgagggtaaatatattgttagcttgttgtttttgcaatagtcttctttttttccccatcaatttgccccaattttcttcatcaatccttaaagttatcaattattatttgtttt

SEQ ID NO: 179626 - DNA, 535 bp, Zea mays
  Clone ID: MRT4577_95400C.1
ccggccgggctctctcttcttcacgaaatctgactccgtctatcacgtccagtacactggcatgtccaaccggtccaaaacctgcatcatcctgctgctcgcgcttaccattgcatctctgcggctggaaacaaaaatgacctctcgacgcccttattgatgccgaagacaggctcaccctggatgagtacagctaggattatgacatgggcgtcaccaacatgacgccctgagtagctatacaccaactgccttgggaactgtactaaactggatacatatgatgagactggttctgagagctatagctattgtgagctatggagcgcgcttgatagaggacaagcttattttgagaacatcacgcagtgagctaccacacgctaaacacaggatggactatgcatgcaacatattgagataccaggtgtaggatcattacttgaatccaaggctcgtagacatgctgttatgcatcagacgactaatgaaacaagtattgcttccttgaatacatggatagcaagctctgaac

SEQ ID NO: 179627 - DNA, 503 bp, Zea mays
  Clone ID: MRT4577_95401C.1
agcagtggtaacaacgcagagtacgcgggttacattttactgttggcttatggaaaaatctatgaggactggatagccgtttacgatttcagtctgtgtccttttcccgcgattgagccgaagctcctttgagcatatctttgaagtagcggcaacctttgaaacgatcatgtacttctcatcgtatatgcttgtaatgctgaatccccaagtacctattgataaaccatgcttggcaaacactgataaactacgtttttgaggaccttcgaaggcacgaatgccctaacaaatgttacctctgtttgcaagattcgcaatctctaaatgatatatgactctctgcgtttgtaggctggttatggggggattctgagacttgttggacactgctttctgttagcgcctggaaaatccgctctctttgtgcgcttgccgccaggctctttgctatcaaattacccgacaagtacaccctcctgggtgttttacccttggggtgc

SEQ ID NO: 179628 - DNA, 608 bp, Zea mays
  Clone ID: MRT4577_95402C.1
ggccgcttttttttttttttttttgtattgaaaaagaaaacccttatctgataatattaatgcctgatgattcatcatcatatataattattaataacaatctatttagccttgtgccgcgcagcaagatcgtcgacaccgaaaagctaaattaaggcaacgagcagcagcatccatccatccatcagttgtcgtcgccggcggccggcggagacaggagtacgatggatcgaaagacctggcgcacaaagctaacttatctccgacgccttttccggcagggggcctagtgtctcgcatcttctcctccgcgcagcagcggcagcggcagctttagggaggcgcacgagtgccgtatctgtctgcactctgcaggctagctgctgcagcaggtaataaagaagaaggggggatccgtagccagctcgctcgtcacatccaggtagatttcacgatcggcagggagagatcagctgattggactccagctagctagctccatccatcgccgacccgtcgcctccagggtatcgacaggtgggcgggtgggcaaggcatgcatgctaggtgcgcgcgccaaatgcaagggcatgcgctttcccggccgg

SEQ ID NO: 179629 - DNA, 325 bp, Zea mays
  Clone ID: MRT4577_95403C.1
cgtggtaattagctcatcgactccagataggagaactctacaccatgaatgtgctgatcgttgcccttgctatcctggcgctcgctgcggagcgccgactacagtacaagcggcggctgcggctgccagacaccaccgtgtcatctaccgcctccgttctatatgccgcctaaccactatctgccgccgaaggagcagccggacccatggcattaccccactaaaccaccgcagctaaacccgtgccagcagctccgatcctgccggatccggagccttagcagcctgttcctaggccaatgcgtctagttcctgaggcaccagt

SEQ ID NO: 179630 - DNA, 527 bp, Zea mays
  Clone ID: MRT4577_95404C.1
tcgagcggccgcccgggcaggtacaagcttttttttttttttttttttttttttttgtttttttgtttttttttatattttttttttttttttttttttttttttttttttttttctaaacataaatataatcttggccctcccacaaccaataatcaattccaacccaaagcagaaggaaaaacccccaaccacaaacacccataaatccgatgccccaaaaatggcgaagaccccccaaaacgcccaaaagccggaaaccccaaagtggccccaacccccccccggccccgaccaccatccccaccaccccccccccggctacttcccgccccctgcccacccccagccgagtccccgtcctgggttaagcggtcctcggggggcccctctttgcccctcccctcgcccaaccgttgtcctttctttttttttttgcccaacccccccccacccgattgccccccccctctcttgccctggcatgtttcccacctctctcagtgcccacagccccccctcccgtt

SEQ ID NO: 179631 - DNA, 425 bp, Zea mays
  Clone ID: MRT4577_95405C.1
cagtggtgatgggatactctggcagaaagttcggccctctcgaggcgggccggcccggggcaggggtacttttttctttctttttcttctttcttttctttactttttttttattattttttcttttttttttcttttcttttttttttttttttttttttttttatcagcaaaaaaaactttattatggaactataactcataagcaatctaaaagggggcccccccaagggggggttgggggtagaacacgggggggttgggcaaagtaagggggccgaagggcagcaattggtgcagttgtaagagggggccaacgttaggcgcagggggcaggtagaacggcaacaaatggtgctgggtcaagaaggcagcagggcccacagcagctagctggctgaaggggagtagttggtggtttttgg

SEQ ID NO: 179632 - DNA, 522 bp, Zea mays
  Clone ID: MRT4577_95406C.1
gtcatattccatatatggtcccctacctggtgcagcattcttccgtgtgcgtgcactagtgttcgctcttcacctcgccagagcatgggcaagatgaagatcgtaatctgtggtgtacgaaggatcggcggtctcgcggacagagtcgtcctgcagagcgaggatgtcgagctcgtcgccgacaacgaccccttcatgaccacggattacatgcacgtacatgttcaagtactgacaccgagcacggacaatggaagcacagcgacatctatcctcaaggtctccatgacgctaatcttcggcgagaagccgttcaccgtctttggcatcaggaaccccgaggagatcccgtagcgtgaggctggtgctgagtatgtggtgaagtccaccggtgtcttcactgacaaggacatggctgctgcacatctgaagggtggcgccaagatggttgttatctctgccccaagcaaagatgcgcccatgtttgcttgtgctgacaatgaggacaagtacacctgcgat

SEQ ID NO: 179633 - DNA, 728 bp, Zea mays
  Clone ID: MRT4577_95407C.1
ggtaccctccgaggccggccgagatatacgcgcgcggcttcctggtgcttgctccatctccatcgtgcgcgcgccctcctagctccatctccctccgtgccgcgctcctttgctccagccagccgagcagctcgcccgagctccttccctgcttgcctagccgcgcgctgcttccatggcctctgcgcacttgcccctgctcggctcccattccagcgcgcgcccagccatggtctccagctcgccggacatgggccgctgcccatgtcgtgctccctgcgtgctcggtcctgccatctccatggcactcggccgcgtagcgtcttcctcagccatggcgagttcctcgctaccacggttgtccagtggttggcccgcgccatgtctgctcctctcgtcctgatgttgcgtgtgcttgtgttcgagctcgtctggccatggcctcgtcgaactgcgaaactccctcgttgtgcgctctagcatcggctgccgctgattccgccattgagttcacgagcactccttgctctattcgtttctccatgggcgatttctccacgcttcaaatccgtgctgctcgtcccacgtgcgctcgctccccatccatcgggtttcggcgtgttcgtgtttgccgtcgagtcgttgaacccgtcatcccctactcgagctccaagcaaaccccctgatccgtgttctgcttgtcgtcgactctcggcaccacaagctca

SEQ ID NO: 179634 - DNA, 277 bp, Zea mays
  Clone ID: MRT4577_95408C.1
gctgaagagatttgaagacggaggccacgcgcagggcgatagcatcaggtggaggcaagatgaccgtgctccaacatccggatggagttaggagcatcgcgacctccttgatggctatagtcctactagccatgctccatcgtgttactcctttaccgaggccataagcagcgagtgcaaaaggcagaggagcagggactccaagaagcgcaggtgaagctggaatgcagcctacaacagccgacgaaagagggacagccggagagggggagccaag

SEQ ID NO: 179635 - DNA, 344 bp, Zea mays
  unsure (1)..(344): unsure at all n locations
  Clone ID: MRT4577_95409C.1
gaggcggtggtagcggcggcggcggcggcggcgcaggaaggaggccgccgacgacggcgcagtccctcgtcttctacgtctccatctaccagatcgcgctcgggaacggcgcgtaccagccggcggtcaccacgttcggcgccgaccagttcgacgagaccgacgcgcgggagcgccggtccaaggccgccttcttcggatacttcttcgtcgccaacaacctcggcggcgtcctcgccgtcaccgcgctcgcctacatggaggacgagggccagtgggtcctggccttctggnatcgccaccgccgcggcgcttgttcggggttttccttcccctcttttttt

SEQ ID NO: 179636 - DNA, 435 bp, Zea mays
  Clone ID: MRT4577_9540C.1
gggaggaaggtccccttcccccttgtttcttttttaaaaaatcaaagctcccgccgtttttgttcatacacaaaaaagaattgctccattttttcccatgggcaactgaattgccttaaaaagcccaaattcgagtctcaaacccctaaagtcccctccgggtgacggcagctttttcaaaaccttttaaacagttcttggaaaccctcccccatgacatgtccccaatccggaaaacttccccctacagcagcgcattgttgcctgtttccacccccccggggaacaaaacaagaaaattcttccgtaggcgatgaacctttcccacgggccctccaaatgctcaccaaaaaaaccactttttgttatcgggctcgaatccctcccttttccttttggagctgttttgaataaccaccacccttaccatttagg

SEQ ID NO: 179637 - DNA, 438 bp, Zea mays
  unsure (1)..(438): unsure at all n locations
  Clone ID: MRT4577_95410C.1
ccaaaaataattttttttttttattttctatttaaattttttctaattaacaaaaaaatanaacgccgcttatattaaaaacagggtgtgcgtcctcccccttacccaatttaaaccttttttattaagtcccctatattcaatttcccttgccatcattttacatcggcccccctttttaaaaccctccctttacccaccttaatcccctccctaaacattcctttttttccacctaaaataataacaaagagcccctttctaaacaccttttccaacaaaaacccccccttattcccaaataaacccccccctaaatatcccattatccccttcggttttattttttacacgcaccataacctttacctttcccaacaccctacccccctttatttaaatttccccccctccctttctcaccattatccccccttt

SEQ ID NO: 179638 - DNA, 369 bp, Zea mays
  Clone ID: MRT4577_95411C.1
gcggacgccactcccggaggaatccccacccaaattaccgtcttccccattggcggcctttttgggggccgtaaacccttaccccggaggtcgccctgcgcttgcgtgccctcctttgcaccggcggttgttcgaggtggtccttaccaaaaacttacccgaacctggagaaccctatttccgaaggaagccggaaaaggtaaaggccgcttcccccaaaatgaacccggcggccccccccaaggatggggccgcctccccaggttcttgcttcggttcaatgggggccaaggttgcctgggacaacggaaacctggggcagtcgggggaccggcctttttctaaggaaggggcgggtgaactgaagga

SEQ ID NO: 179639 - DNA, 140 bp, Zea mays
  unsure (1)..(140): unsure at all n locations
  Clone ID: MRT4577_95412C.1
tgtcaacccnacanaggnatgcncataaggaaaggttaaaaaaagtanaaggaantcggnnaatcttacnccgcctgtttaccataancatcanctctagcntcancagtattngaggcaccgcctgcncagtgacacat

SEQ ID NO: 179640 - DNA, 2059 bp, Zea mays
  Clone ID: MRT4577_95413C.1
ctcacaatcactcaaccactgcctccagctccagcagcagctagctcagctcgatcgtcctcccgacccgatccatccaccccactccccgtgctccaccatctcggcatctcgctcgctcacttagctcgagctgcggcaaacagccggccggcagtccggcacacgggagatgatgaccgggaggctgaacgtggccacgtcgtcctcgccaggaggagacgacttcctgttcatgcccatgcagcagcatcagccgccgccgcctcctcctccgccctacgtcgggttcgagcacggccacggcgtggcgggaggcggcagccagcgcgttgccggaggggtgcagcaccacctctacgacggcctcgacttcgccgccgcggcgctgcagttccagcagcaggcggaggcgccgcacctgcaccagcagcagctgctcacgctgccgtccagtctcggccccatggcgccgccgcctccgccgccgccgccgctgcccatgcctatgcccgtgcccgggatgcccggcgaccacgtgtacccggcgctcgggatggtgaagcgcgagggcggcggcgcggacgggaggatcgggctcaacctcggccgccgcacctacttctccccaggggacatgatggccgtggaccgcctcctgatgcggtcccgcctcggcggaggcggcggcgcgttcgggctcggcttcggcttcggtttcggcggcgcgcaccaccaggctccccccgcgcgctgccaggccgagggctgcaaggccgacctctccggcgccaagcactaccaccgccgccacaaggtctgcgagtaccacgccaaggcctccgtcgtcgccaccggcggcaagcagcagcgcttctgccagcaatgcagcaggtttcacgtgctgtcggagttcgacgaggtcaagaggagctgccggaagcggctggccgagcacaaccgccgccgccggaagccgcccaccaccgcctcatccaaggacgccgcgtcgccgccggctaacaagaagcccaactgcggctccatcacaagctcttactccactgacaacaagaacctgaacacggccaagtcgaccatgtcatcgaacacgggcagcgtgatcagctgcctggaccaggccgcgggcaacaagcagctgcaggcgaggccgacgctgaccctcggcgcgtcgccggacaaggaccagcagcagcagcagcagctgagagccatgctccaggcccaagcggcggccggcggcggccaccaccaccaccaccaggagcagcacttcataacctctctgcaggttcacaacaacgacggctgcggcggcggcaacagcagcagcaacaacaacatcatcctgtcgtgctcctcggtgtgctccagcgcgctgccgtcggccaacggcgaggtctcggaccagaacaacgctggtggcatgcataacctgttcgaggtggacttcatgtagaccgtcgagatcggggcaaagcaaaaggcaggcaggcaagcaagcaagcacgggagtacgtccgtccttctggcaaggtgtccttggtgtgtatcagtgtaggtaaaaaggaataggagagagagagagagagagagcaaaacagctaggcatggagtgggaggagaaacaagacgagaaaagacacatagaaaagagagagagagagaaaggacgcagagaaggattctatccatccatcagtccatcacactccatgcatcagtagctagctagctagcagcaagctgcagagcctgcagcaagctgctgctggtctacaacctcttgttgcaaggttccatggccatagcaaagccatgcgtccgtcccgttgcattggctctctctctctatatatatacctgtacgtactgtcgtgctgcagctgctgccattgcaagcctttctacctttccatttcaagcggggaataataactgctatttcactttaaaaaaaaaaaaaaaaaaaaaaaaaaaaaaaaaaaaaaaaaaaaaaaaaaaaaaaaaaaaaaaaaaaaaaaaaaaaaaaaaaaaa

SEQ ID NO: 179641 - DNA, 272 bp, Zea mays
  Clone ID: MRT4577_95414C.1
cactttcactcagcagtctcgacggagaggaggtcgtcccggcagattttcctgagggtgtctacatcagaaacggtccgaaccctctcaacccaacacagacggtcgcgggctccgtgttcggctcgacgtcgtacacgtactacgaaggccatgggatgctacacgccgtgtactttagcaggagcggcggcgcaggaggatgggaggtatcgtacaggaacaagtacgtgggctcggacaccttgcagctggagaggaggaagaaggac

SEQ ID NO: 179642 - DNA, 295 bp, Zea mays
  Clone ID: MRT4577_95415C.1
cggggatccatatcccgcggtacatatctgcaaagcaaccgtggcgagcgatgaggaaggaccgggcgacctccgtctgcaacgctgacttatatggatggacggtcggtggaggtctcaacctggctgtgaagatgaccatgctgctactgctgtgggtggaggccacgaatctggtcgtcctggacaccgtggtcatggagggcatcctcatggggctgctctttgggagcagctctggagggtcacatggacaggattcattattagtgaggtggactccattcgctcaatc

SEQ ID NO: 179643 - DNA, 338 bp, Zea mays
  Clone ID: MRT4577_95416C.1
tctctgttcggctgcctccgcctctcgagtctggtccacccgtcgtcctgctagctcctttactcgccaggcgccatgcgcaagattaagatcggaatcaacggcttcggaaggatcggcaggctcgtggccagggtcgccctccaaagcgaggatgtcgagctcgacgccgctagcgaccccttcatgaccacggactacatgacctacatggtcaagtacgacaccgtccacggccactggaagcacagcgacatcacactcaaggactgcaagacccttctcttgggtgacaagccggtcaccgagtttggcattaggaaccctgaggaaatccc

SEQ ID NO: 179644 - DNA, 1295 bp, Zea mays
  Clone ID: MRT4577_95417C.1
cttccttcatctcgagcatctcctatctccgtcgtcctcgttcttcaactcgccatgggcaagattaagatcggaatcaacggtttcggaaggatcggcaggctcgtggccagggtcgcgcttcagagcgaggatgtcgagctggtcgccgtcaacgaccccttcatcaccacggactacatgacctacatgttcaagtatgacacggtgcacggccactggaagcacagtgacatcaccctcaaggactccaagacccttctcttcggtcagaagccggtcaccgtctttggcatcaggaaccctgaggagatcccgtggggcgaggctggtgctgactatgtcgtggagtccactggtgtcttcactgacaaggataaggctgcggctcacttgaagggtggtgccaagaaagttgttatctctgccccaagcaaagatgcgcccatgttcgttgttggtgtcaacgaggacaagtacacctcagatattaacattgtttccaatgctagctgcacaacaaactgcctggctccccttgccaaggtcatccatgacaactttggtatcatcgagggtctgatgacaactgttcatgccatcactgccacccagaagactgttgatggaccctcagccaaggactggagaggtggcagggctgctagctttaacatcatccccagcagcactggagctgccaaggctgttggtaaggttcttcctgatttgaatggcaagctcactggtatgtccttccgggttcccaccgtggatgtgtcagttgttgacctcactgtccgaatcgagaagggtgcctcctatggggatatcaagaaagctattaaggctgcttctgagggaccactcaagggtatcatgggctatgtggaggaggatttggtttccaccgacttcgttggtgacagcaggtcgagcatcttcgatgccaaggctggtattgccctgaacgacaacttcatcaagcttgtctcgtggtacgacaacgagtggggctacagcaaccgtgttgtcgacctgatccgccacatgttcaagacccagtagagatttttctgctttccatagcatcccaatggccttggtcgctgtccatcccgctgcttgtctatgctgagaataaatgtgaatggtgcctctggacgcccgctccatgctgggtctgaacatgttttgtgtttccatttctgctaccatcctgtaacaaattcactaatatgggacctgagtttagttttttgcttgtgaagaatataaacagtggggttgcaatt

SEQ ID NO: 179645 - DNA, 334 bp, Zea mays
  Clone ID: MRT4577_95418C.1
acatgaacagaaattgtatgccacatcgtgggggcttgttcaacctcgcgggctattcataatagatgatgtccttgttgaaacatttgatgacctgagctaatgtgatactacggcaaataatctcattgtacacaatgttttatactcagtctgcaacttgcatatattgtttaggcaatcgaccttcacacatcagttttggtctaacattaagactgatcgcggtgctttccttgaaggttttgaattgcttggttcaagaatagcaaacaatatatttctcctgtttactttaacatctattgatgtatctggatgtagtctcgacacc

SEQ ID NO: 179646 - DNA, 464 bp, Zea mays
  Clone ID: MRT4577_95419C.1
taatatccgcatccgctgcctccgcctctcgagtctcgtccacccgtcgtcctcctagctcctctactcgccagtcgccatgggcaagattaagatcggaatcaacggcttcggaaggatcggcaggctcgtggccagggtcgccctccagagcgaggatgtcgagctcgtcggcggcaaagacccctttatcaccacggactacatggactacatggtcaaggtacgacaccggccacgggcactgggaagacagcgacattacactccagggctcccagaaccttttcctccgtgaaaaagccgtcaacggctttgggatcccggaacccgggggaatccccgggggggggggtggcgcttaatacctcctggaagccaccggcggctttactggccaagaccaaggtggctggccatcttcagggggggggccaaaaaggtggtaattctggccccaggca

SEQ ID NO: 179647 - DNA, 333 bp, Zea mays
  unsure (1)..(333): unsure at all n locations
  Clone ID: MRT4577_9541C.1
gggtttctcggggcatggnattcaagatgggncccggccgtgggngaagatcctggcggagatggccattgatggcgactccccgacggcggcagaggccgacctcgacctcggcttcttccggatcggccgcttcgatgggaacccagtgggaaatgccaacaaggatcagtagtgagctcctgctgcctatccacggaattctcctcgaccgtagtcgtagtcgtagatgcattggaattggaataaaataaaaatggatgggaatgggatgaattgcactagcatgtaacggaacttcttcgtaggccaaatattactttggcattgaac

SEQ ID NO: 179648 - DNA, 265 bp, Zea mays
  unsure (1)..(265): unsure at all n locations
  Clone ID: MRT4577_95420C.1
aagcatcctatcgccacccggcccggatcggggctgccgtctgtttccgccggcgctggcgccgacgccgatgggctccgccgatcgcagtttgtttttttttttctgnatcgtgnnnactgtgggggggggggggggctgcttctaatgccgcgccaccaccacgcccatgtggcgcagtggccccaccgggcccaggtcactttgcaacgcttgcgggtttcggtcccgtaagaagaggaggcaagagcttggccttgagcac

SEQ ID NO: 179649 - DNA, 386 bp, Zea mays
  unsure (1)..(386): unsure at all n locations
  Clone ID: MRT4577_95421C.1
cacctncacgctcccatatnaaagtcccctacctttccagcatcctcccgtctgcggcgtctcgtctccgctcctcacctcgccagccatgggcaagatcaagatcggaatcaacggtttcggaaggatcggcaggctcgtggccagggtcgccctgcagagcgaggatgtcgagctcgtcgccgtcaacgaccccttcatcaccacggattacgggacgtacatgttcaattactacaccgtgcacggtcaatggaagcacagngacatcgccctcaaggactacaagacgcttctctttggcgagaagtcggacaccgactttggcattaggaaccccaaagagatcccgaggagtgaggcttggtgctgagtatgtcgtggag

SEQ ID NO: 179650 - DNA, 486 bp, Zea mays
  Clone ID: MRT4577_95422C.1
agtaagcgaacagcatatccatgcaatgctgccggtacacataactaaactcactgttcatagcaccaagacacaagctgcttagtgtagcttgccgccaaaatgatcctacatatataaaggatacaatgtcttggggtacctatatatataagactaaaacataggaggactttgtcaagatttgctgttacacgccacctctttttagttcaagtcggaacaaatttggagaacagttctttcagaaggctgggacagctaactgtcaggtggtcaaacccatctgtttccatgaatgcaccaagagtcgcagcggagcttagtaacgcgaagcacgcatccttaagcccatggcagttgtgcttttcagctaaagccaggatggtcgcagcggagcccgtatcgatatacctgcacagcttatcttcacagatcaacttcagcctctccaggtcataccggtcagcggcgacgagcagatgc

SEQ ID NO: 179651 - DNA, 1477 bp, Zea mays
  unsure (1)..(1477): unsure at all n locations
  Clone ID: MRT4577_95423C.1
tgcccagcgtgcgcccatatccgctcccctacctctccagcatcctcccgtctccgtcgtctcgtctccgctcctcacctcgccagccatgggcaagatcaagatcggaatcaacggtttcggaaggatcggcaggctcgtggccagggtcgccctgcagagcgaggatgtcgagctcgtcgccgtcaacgaccccttcatcaccacggattacatgacctacatgttcaagtacgacaccgtgcacggccaatggaagcacagcgacatcgccctcaaggactccaagacgcttctcttcggcgagaagccggtcaccgtctttggcatcaggaaccccgaggagatcccgtggggtgaggctggtgctgagtatgtcgtggagtccaccggtgtcttcactgacaaggacaaggctgctgcacatctgaagggtggtgccaagaaggttgttatctctgccccaagcaaagatgcacccatgtttgttgttggtgtcaatgaggacaagtacacctccgatgttaacattgtttccaatgctagctgcaccacaaactgccttgctccccttgctaaggtcattcatgacaactttggcattattgagggcttgatgacaactgttcatgccatcactgccacccagaagactgttgatggaccctcagccaaggactggagaggtggcagggctgccagctttaacatcattcccagcagcaccggtgctgccaaggctgtcggtaaggttcttcctgaattgaatggcaagctcactggcatgtccttccgggttcccaccgtggatgtgtcagttgtagacctcactgtcagaatcgagaaggtttcctcctacgaggaaatcaagaaagctattaaggctgcttctgagggcccactcaagggtatcatgggctacgtggaggaggatctggtttccaccgacttcaccggtgacagcaggtcgagcatcttcgacgccaaggccgggattgccctgaacgaccacttcatcaagctcgtctcgtggtacgacaacgagtggggctacagcaaccgcgtcgtcgacctgatccgccacatgttcaagacccagtaggctagtagagagatagatttctgcctccctatcgtgggtcgtccccaatggcctttggtcgcagaccatctttgctgcttgtctatgctgagaataaatgtgaacggtgcccctggacgctggatccatgctggttttggacacgctgtccttttgtgtttaacttatctgctgccgtcctgtaacgaattcgctaagttctagttcttttgtgctttgttaagaatataaacaatgaggtttcagttttggtggcgccatccggtctgattgcgtactagtatcatgcatacctgagtggtctttcgggagtaacagnnnnnngngtttcgtgtcagtggtactcagactgttcatttaaccctaatccatatc

SEQ ID NO: 179652 - DNA, 622 bp, Zea mays
  Clone ID: MRT4577_95424C.1
ccggccgggatctccgcatccgctgcctccgcctctcgagtctcgtccacccgtcgtcctcctagctcctctactcgccagtcgccatgggcaagattaagatcggaatcaacggcttcggaaggatcggcaggctcgtggccagggtcgccctccagagcgaggatgtcgagctcgtcgccgtcaacgaccccttcatcaccacggactacatgacctacatgttcaagtaccacaccggccacgggcactggaagcacaacgacattacacttaaggacttcaagacccttttttttggtgacaagcccggcaccggctttgggattaagaaccctgaagaaaatccgtggggggagggtggcgcttagtatttcgtggagttcacccgcgtttttaattgccaggacaagggtggtggacatttcaaggggggggcccaaaaaggtggtattttttgcccaaacaaaaaatccccccggttggtggtggtggcaatgaagaccagtacaccttgggtggtaacaatggttccaaaggttggtggaccacaaaccggcttggttcccttggttagggcattcattaccacttccgcattggtgaagggttggtgaccact

SEQ ID NO: 179653 - DNA, 2674 bp, Zea mays
  unsure (1)..(2674): unsure at all n locations
  Clone ID: MRT4577_95425C.1
cccatatccgctcccctacctctccagcatctcccgtctccgtcgtctcgtctctgctcctcacctcgccgccagccatgggcaagatcaagatcggaatcaacggtttcggaaggatcggcaggctcgtggccagggtcgccctgcagagcgaggatgtcgagctcgtcgccgtcaacgaccccttcatcaccacggattacatgacctacatgttcaagtacgacaccgtgcacggccaatggaagcacagcgacatcaccctcaaggactccaagacgcttctccttcggcgagaagcccggtcaccgtctttggcatcaggtgctccccctctcccgctccttccagagacacggattgcgtttacgtgttctagctgtgagctagtgtttgaaccgctgcgagtctacaggaaccccgaggagatcccgtggggtgaggctggtgctgagtatgtcgtggagtccaccggtgtcttcactgacaaggacaaggctgctgcacatctgaagggtggtgccaagaaggttgttatctctgccccaagcaaagatgcacccatgtttgttgttggtgtcaatgaggacaagtacacctccgatgttaacattgtttccaatgctagctgcaccacaaactgccttgctccccttgctaaggtcattcatgacaactttggcattattgagggcttgatgacaactgttcatgccatcactgccacccagaagactgttgatggaccctcagccaaggactggagaggtggcagggctgccagctttaacatcattcccagcagcaccggtgctgccaaggtatatgataaaatacacaatgttgcatgcaatcaactctgtaatggttgtttgcacaaactagttaaatcaaccattgattctctgttttgtgttcacttagctttgtgaataacagtataacacattgcagttccatctaagggcttgttcggttagctctcaatccatgtggattgagtgggattggatgggtttgaatcccaaacaagtcaaacttcttaagaaaatttttcaatcccatccaatccatatgtattgggtataaccgaacaaggcctaagggcttgttcggttagctctcaatccatgtggattgagtgggattggatgggttttaatcccaaataagtcaaacttcttctcaattttttccaatcctatccaatccatgtttattgggaataactgaacaagccctaaatgagcatgcacacatctcttgggatgaagcattaggagatcctttttttattgatacacaagtttttactgatacagcatctatatcttctgattggtggttgaatattatttttttatcccctgatgttttgatgtcctgaggtgcaggctctttagctgaaatatcatgcttgaatgtttcaaaaggccatcataaaaatcatgcatgtggtacacctaaagttgtgtagcggcaatcattcagtttaaaatcatctttgacccctggggatgctaaatctacaacgttacacctcattgtgctgctgcttactgtagttgtaacaaattggtacctcgtccattctgatgacgaatatagttaagagtgcttacttccaatattgatgtattgcaggctgtcggtaaggttcttcctgaattgaatggcaagctcactggcatgtccttccgggttcccaccgtggatgtgtcagttgttgacctcactgtcagaatcgagaagggggcctcttacgaggaaatcaagaaagctattaagtaagcttatacatttttaatactcagtttgagtgtcatttctttttttttttctttttataaaccaatgtctatgaatgcaataacattccttgttagatttattgctactatcacatttaatgctcaatgttgtctgttttctgcattgtcttgcttgtacatagtagtttctccgtctgcttcggttaggattcacagnaatagcattgacataattgctattgctttacagggctgcttctgagggcccactcaagggtattatgggctacgtggaggaggatctggtttccaccgacttcaccggtgacagcaggtcgagcatcttcgacgccaaggccgggattgccctgaacgaccacttcatcaagctcgtctcgtggtacgacaacgagtggggctacagcaaccgcgtcgtcgacctgatccgccacatgttcaagacccagtaggctagtagagagatagatttctgcctccctatcgagggtcgtcccaatggcctttggtcgcagaccaactttgctgcttgtctatgctgagaataaatgtgaacggtgcccctggacgctggatccatgctggttttggacacggttgtctttttgtgttttaacttatatgctgccgtcctgtaacgaattcgcaagttttagttcttttgtgctttgttaagaatataaacaatgaggtttcagttttggtggcgccatccggtctgattgcgtactagtatcatgcatatctgagctgtccttcgggagtaacagttttttgtttagtgttaatggttctcagactgttcatttgaactgttcatttggtctgttcatttggtcttaatacatatcgacttttagaaaaaaaaaaaaaaaaaagcggcc

SEQ ID NO: 179654 - DNA, 1536 bp, Zea mays
  Clone ID: MRT4577_95426C.1
ttgggtacctcgaggccggccggggccttttctcctccctatcgtgtgtctcctctcgccggctttaaaaacgcacacaagcgctaaaaccctctccaccgtccacctcagctcccatatccgctcccctacctctccagcatcctcccgtctccgtcgtctcgtctccgctcctcacctcgccagccatgggcaagatcaagatcggaatcaacggtttcggaaggatcggcaggctcgtggccagggtcgccctgcagagcgaggatgtcgagctcgtcgccgtcaacgaccccttcatcaccacggattacatgacgtacatgttcaagtacgacaccgttgcacggccaatggaagcacagcgacatcgccctcaaggactccaagacgcttctcttcggcgagaagccggtcaccgtctttggcatcaggaaccccgaggagatcccgtggggtgaggctggtgctgagtatgtcgtggagtccaccggtgtcttcactgacaaggacaaggctgctgcacatctgaagggtggtgccaagaaggttgttatctctgccccaagcaaagatgcgcccatgtttgttgttggtgtcaatgaggacaagtacacctccgatgttaacattgtttccaatgctagctgcaccacaagctgccttgctccccttgctaaggtcattcatgacaactttggcattattgagggcttgatgacaactgttcatgccatcactgccacccagaagactgttgatggaccctcagccaaggactggagaggtggcagggctgccagctttaacatcattcccagcagcaccggtgctgccaaggctgtcggtaaggttcttcctgaattgaatggcaagctcactggcatgtccttccgggttcccaccgtggatgtgtcagttgtagacctcactgtcagaatcgagaagggggcctcttacgaggaaatcaagaaagctattaaggctgcttctgagggcccactcaagggtattatgggctacgtggaggaggatctggtttccaccgacttcaccggtgacagcaggtcgagcatcttcgacgccaaggccgggattgccctgaacgaccacttcatcaagctcgtctcttggtacgacaacgagtggggctacagcaaccgcgtcgtcgacctgatccgccacatgttcaagacccagtaggctagtagagagagatagatttctgcctccctatcgtgggtcgtccccaatggcctttggtcgcagaccatctttgctgcttgtctatgctgagaataaatgtgaacggtgcccctggacgctggatccatgctggttttggacacgttgtctttttgtgtttaacttatctgctgccgtcctgtaacgaattcactaagttctagttcttttgtgctttgttaagaatataaacaatgaggtttcaattttggtggcgccaaaaaaaaaaaaaaaaaaaaaaaaaaaaaaaaaaaaaaaaaaaaaaaaaaaaaaaaaacccccccccacccc

SEQ ID NO: 179655 - DNA, 236 bp, Zea mays
  Clone ID: MRT4577_95427C.1
gaggaaggtgctctagcggatgccgactgagctattgcaagtggataccaaaagggggataggcaaccgcgctattaacatgaccgtgtgcgcatcgcccaactacgtacgccattgccgcgatgtcagcctgcgtctgctggatacctgatgcattgacctgtactaccagtatcaactctatgccatcgtacatatttatgatacgatcggtgagctgaaatactgtgcatatg

SEQ ID NO: 179656 - DNA, 1786 bp, Zea mays
  Clone ID: MRT4577_95428C.1
cgcctctcgagtctcgtccacccgtcggcctcctagctcctctactcgccagtcgccatgggtaattcctcgctcccggattcagcgtcgggtttctctctctctctctctctctctctctctctctctctacaattatcactacctgctgctccctcatgcaccgtgctcaaatctgaccaaagtgggttctgctgactgttttttgtttttttggggtctctcgatcttctctggatgcaggcaagattaagatcggaatcaacggtgagtttgtcccctctccccatgctacgctatttctcctcctcgagctggttcggtccgatctgagttgcgccttctctctgcgactgcgtccgcgtccgcgtccgcgtccgctcaggcttcggaaggatcggcaggctcgtggccagggtcgccctccagagcgaggatgtcgagctcgtcgccgtcaacgaccccttcatcaccacggactacatgacctacatgttcaagtacgacaccgtccacggccactggaagcacagcgacatcacactcaaggactccaagacccttctcttcggtgacaagccggtcaccgtctttggcatcaggaaccctgaggaaatcccgtggggtgaggctggcgctgagtatgtcgtggagtccaccggcgtcttcactgacaaggacaaggctgctgcacatctcaagggtggtgccaagaaggttgttatctctgccccaagcaaagacgcacccatgtttgttgttggtgtcaatgaggacaagtacacctcggatgttaacattgtttccaatgctagctgcaccacaaactgccttgctccccttgctaaggtcattcatgacaacttcggcattgttgagggtttgatgacaactgttcatgccatcactgccacccagaaaactgttgacggaccctcagccaaggactggagaggtggcagggctgccagctttaacatcattcctagcagcaccggtgctgccaaggctgttggtaaagttcttcctgatctgaatggcaagctcactggtatgtccttccgtgttcctactgtggatgtctcggttgttgacctcaccgtcagaatcgagaagggggcctcctatgaggatatcaagaaagctattaagtaagtgatcaacaatttatttgttttaataaccactcaatttatttctaaaccattgtctgaaggtaataagcaccccttgttggattaatcgccactaccacatgttcagtgtctatgtttggtaatgcttgctgttgattacagggctgcttccgagggtccactcaagggtatcatgggttatgtggaagaggatctggtttctaccgacttccttggtgacagcaggtcgagcatcttcgacgccaaggccgggatcgctctgaacgaccacttcgtcaagctcgtctcgtggtacgacaacgagtggggctacagcaaccgcgtcgtcgacctgatccgccacatgttcaagacccagtaggggttttttccccctgcttctcatggatggttgctgcttgtgtatgccgagaataaatgtggatggcgcgtgcctctgggtcgccaggttcatgctgagtctggacacgttttgcacttttgtttcccttcctgctaccatctgtgacagatccgctcgctaatatgggacctgagattagctttttgctgcttgtggtgaggttgcagttttgttctgtgttgttagtactcctatgattcaggtgttcgttatatagaattaaccc

SEQ ID NO: 179657 - DNA, 1467 bp, Zea mays
  Clone ID: MRT4577_95429C.1
cattgggacctcgagccggccgaaaacgcacacaagcgctaaaaccctctccaccgtccacctcagctcccatatccgctcccctacctctccagcatctcccgtctccgtcgtctcgtctctgctcctcacctcgccgccagccatgggcaagatcaagatcggaatcaacggtttcggaaggatcggcaggctcgtggccagggtcgccctgcagagcgaggatgtcgagctcgtcgccgtcaacgaccccttcatcaccacggattacatgacctacatgttcaagtacgacaccgtgcacggccaatggaagcacagcgacatcaccctcaaggactccaagacgcttctcttcggcgagaagccggtcaccgtctttggcatcaggaaccccgaggagatcccgtggggtgaggctggtgctgagtatgtcgtggagtccaccggtgtcttcactgacaaggacaaggctgctgcacatctgaagggtggtgccaagaaggttgttatctctgccccaagcaaagatgcacccatgtttgttgttggtgtcaatgaggacaagtacacctccgatgttaacattgtttccaatgctagctgcaccacaaactgccttgctccccttgctaaggtcattcatgacaactttggcattattgagggcttgatgacgactgttcatgccatcactgccacccagaagactgttgatggaccctcagccaaggactggagaggtggcagggctgccagctttaacatcattcccagcagcaccggtgctgccaaggctgtcggtaaggttcttcctgaattgaatggcaagctcactggcatgtccttccgggttcccaccgtggatgtgtcagttgttgacctcactgtcagaatcgagaagggggcctcctacgaggaaatcaagaaagctattaaggctgcttctgagggcccactcaagggtattatgggctacgtggaggaggatctggtttccaccgacttcaccggtgacagcaggtcgagcatcttcgacgccaaggccgggattgccctgaacgaccacttcatcaagctcgtctcttggtacgacaacgagtggggctacagcaaccgcgtcgtcgacctgatccgccacatgttcaagacccagtagagagagatatttctgcctccctatcgagggtcgtccccgatggcctttggtcgcagaccatctttgctgcttgtctatgctgagaataaatgtgaacggtgcccctggacgctggatccatgctggttttggacacggttgtctttttgtgtttaacttatctgctgccgtcctgtaacgaattcgctaagttttagttcttttgtgctttgttaagaatataaacaatgaggtttcaattttggtggcgccaaaaaaaaaaaaaaaaaaaaaaaaaaaaaaagaaaaaaaaaaaaaaaaaagcggcc

SEQ ID NO: 179658 - DNA, 1587 bp, Zea mays
  Clone ID: MRT4577_9542C.1
ctcgagccggcacgggtacctcgaggccggccgggatcttcttcttgcagccgaagcaaagtgagggcggcgagatgaacggcggcggggaggacgggaagcagcagccgcacctggtactggcgcacaagctgttcctcctgtcgcactccgacgtcgacgacctcgccaaggtcgacctacgcgctgacgtgttcgcggcagtcaaatccgatgacatggcagctctgtacgagtcgttggcggcggacggcgtactggagacggacgcggcgctgctggccgagatgcgcgccaggatcgacgaggagatccggaagctcgacgagaagattgctgatgcagaggagaacttgggtgagagtgaagtgcgtgaggcccatctcgccaaatccttatatttcataagggttggggagaaggagaaagcactggagcagcttaaagttactgaaggaaaaactgtagctgttgggcaaaagatggaccttgttttctacacactacaaattggattgttctatatggactttgatctcatctcgaagtccattgacaaagcgaaaaacttgtttgaggaaggtggtgattgggaaaggaagaacagattgaaagtatatgaagggttgtactgcatggcaactagaaacttcaagaaagctgctagtttattcttggattcaatttcaactttcacgacatatgagctattcacatatgatacattcatcttctacacagtcctcacgagtgttatatctctggaccgtgtatctctgaaacaaaaggttgtagatgcgcctgagatcttagccgtaattggcaaagtacctcacctctcagagtttctcaattccctctacaattgccagtacaagtcattttttattgcattctctggcttgactgaaccaatcaagttagagcgttacttgcagcctcattttcgctactacatgcgtgaagtgcgcactgttgtctactcacagtttctggaatcgtacaagagtgtgacaatggaagccatggctgctgcatttggcgtcacagtcgactttatagaccaggaactgtcacgcttcattgccgctgggaagctccactgcaagatagacaaagttgctggcgtcttggaaacgaaccgacctgatgctaggaacgccttctaccaggcaaccatcaagcaaggagacttcctgctgaaccgcatccagaagctgtcacgagttatcgacctgtaggggagagcccttcatgcaggacaggagcttgccttggttcctggagtgtacgagcggtgcttgactttcaatgggtctcagttgaagaagcttttagggatatttgtgttctgagaaattgtgttttgcactttttagcctaactacatgaagcccccaaaaaaatttcatggcgttgcttgtagacgtttcttcattgatgaattcatcccttgttttttcttgctggatattgttttgctactaagagcctagcagatggtagacaagcagaatcacttgtgttctgttacgtcaatgctgttctgtttcagccaaaggaacaaaagaacagatcgcaagaaaa

SEQ ID NO: 179659 - DNA, 342 bp, Zea mays
  unsure (1)..(342): unsure at all n locations
  Clone ID: MRT4577_95430C.1
gcgtccgatttttatggaggagaaaaccccgtgtttgcgtggagaaggcaggtcggtcaacgctcgtcggatgttcatagcgatgcacaaatgggaatcgccatcgtccttaccaactccgattgggtttgtttatttaccgagagatgattattgagcccttttatgtgnttcctatttttttatggctttttttgtttccttatgnttgcttctctttatctggttttttatttttgtatagtttcttatttgttcttcattttttttttttgttgggtaggtggggaggtttatttaattgttatttttatatatttgtttttttatatatcttttttt

SEQ ID NO: 179660 - DNA, 387 bp, Zea mays
  Clone ID: MRT4577_95431C.1
acgattgtaatcgcacactatcaaaaccgggattttatctttcccctgcaatgtaaagagatcgacagagtcacaccactgtatacgctttatacttgactgtgcatatcactgtcccaatttcaggaggtctattatacatggaccacccattgacctctgcacccttcataatacgcaacataatcaaatttcatgtgttcctcacacacaagcacactttcctccacgtgtaccggaagaagacgacagatgatctcatctcgatgccgtatatctagactctattcagctgcacgctgaagatactgtactcactggtgaagaccaactccatcccgctgctgaccatcaacgccttctggtgcgtgataaaagcctgctaca

SEQ ID NO: 179661 - DNA, 222 bp, Zea mays
  Clone ID: MRT4577_95432C.1
atgcgcgggaggatggtacacctgtatggtcaccagtggagatagactacttcctgaatggtactcagataggggcattcaagtgatcttacctggtgatattgtcacagccgaccttgcttccgtacactggacagtgcatctgccgacagcttcacatatgagaccccactcggtgctacgggtgccacgctcatcgggcacgccgtcgtgggtgctgaa

SEQ ID NO: 179662 - DNA, 1411 bp, Zea mays
  Clone ID: MRT4577_95433C.1
ctgctatctatctcttttctgaaggaaaaaaaagttcagcgcgcagttaagcatagcaggacgaccacgacgatgtatcacccgcagtgcgagctcctgacgatggcgcacgaaacgccggacctggacgccggccagccgcacctaaccgtctccggcgtcgccagcatcccggcagagctgagcttccacctgctgcactcgctcgacgccgcggcggcggtcaatcccgtcacggcgccgccgcagtccaccatcgactacttcctcggcggcgccgatccccaccagcaggccatgcagtacgagccgctgccgcccgccgcgggcggccaccaccagtacaccatggacatgttccgcgactactgcgacggccactaccccaccgccgagccgtacatccgcgggacaatgactggagccctcgtgttcggggccaccgacgacgacgactcggccgctgcctacatgcccggggggcactttgagacctccccgccgccgccacgcgccaccggccgcggcaggaagcggggcagggcgctgggcggcggcttccatgcggtgctggccaacggcgtcgagaagaaggagaagcagcgccggctgcggctcaccgagaagtttacggccctcatgcacctcatacccaacgttacgaagactgatagggcgacggtgatctcggacgcgatcgagtacatccaggagctggggaggacggtggaggagctgacgctgctggtggagaagaagcggcgtcggagggagctgcagggggacgtcgtggacgcggcgccggctgcggtggttgctgccgccggtgaggcggagagctcggagggcgaggtggctcctccgccgccggccgtgccgcggcagccgatccgcagcacgtacatccagcgacggagcaaggacacgtccgtggacgtgcggatcgtggaggaggacgtgaacatcaagctcaccaagcgccggcgcgacgggtgcctcgcagccgcgtcgcgcgcgctggacgacctccgccttgacctcgtccacctctccggcggcaagatcggtgactgtcaaatctacatgttcaacaccaagattcacaaggggtcttcagtgtttgcgagtgcagtggccggtaggctgatggaagtggtggacgagtactaggctaccatgcacttgaatttctagctagctctacgtaccgcgctgctatgaatctagctatagcgtttcttggatgaaagactagttagttgttaccttctatctttgcttcaattaaatccgcttgctcgttacagactgagtttgtttctaaatgtcaaggttgttttggtcaaattgaataaattggcacactggcctgtgaggttattatatatatttatgtgtttattactggtct

SEQ ID NO: 179663 - DNA, 498 bp, Zea mays
  Clone ID: MRT4577_95434C.1
cttttttttttttttttttttttttttttttttttttttttttttttttttttttttttttttttttttttttttttttttttttggggggaaaaacggacccctggtatttcacccccccaaaaaaaaggggtccccaaaccccattttggttttgcccaaagggaaacattttaaaaaggcggaataaagcgggaaagaacccccaaaaaagggggggggggggggaaaaaacccccccccccagcgcaaagttagtacctaacaaagccgggggggggaaaaaaaaaaaaaagggggattggttttaaaaacatccccgaaaaggggggagggggggaaacatttaaaggggatttcacacggggggggggttaaaaaagccaaaaaacccgggcttaaaaaaacccccccccaaaaggaaaccatggacataggggggggcggccagttttttgcagttcgaaaaagttccggaccccccaaaaaggaccctgg

SEQ ID NO: 179664 - DNA, 1066 bp, Zea mays
  Clone ID: MRT4577_95435C.1
cattggtaccctcgaggccggccgggacctcgttctacccaccggccggcacaaattctccctttccacaagaacatcacacggcgatagcaaaaccttccgtcggaggatggcttccgccggcgctggagaaggcaaggagacggctgccgggagcagcctccacagcaagactctcctcaagagccaaccactgtaccagtacatactggaatccaccgtcttcccacgcgagccggactgcctgcgggagctccgcgtcgccaccgccacccaccccatggcgggcatggctgcgtcgccggacgaggtgcagctgctgcagctcctgatcgagattcttggcgccaagaacgccatcgaggttggcgtcttcaccgggtactcgctgctcgccaccgccctcgccctccccgacgacggcaagattgtggccatcgacgttacccgcgagagctacgaccagatagggtcgccggtgatcgagaaggccggcgtggcgcacaagatcgacttccgcgtcgggctcgcgctgcccgtgctggaccagatggtggccgaggaggggaacaagggcaagttcgacttcgcgttcgtggacgcggacaaggtgaacttcctcaactaccacgagcggctgctgcagctgctcagggtcgggggcctcatcgcctacgacaacacgctgtggggcggctccgtggccgcgtcccccgacgagccgctctccgagcgggaccgcgcgctcgctgcggccaccagggagttcaacgcggccgtggccgccgatccccgcgttcacgtctgccaggtcgccatcgccgacgggctcacgctgtgccgccgcgtcgcctgatccgtatccggttatccgcctcgaaatacagcagagctgtgggctgtcgctgacactgctgtgagctctgtgcttgaaatggccatggtctgtaataacgaactgggcttgagcgaaaataaatccaccagcgcgctagcgtgtgtcagcgatcaaaaaaaaaaaaaaaaaaaaaaaaaaaaaaaaaaaaaaaactattcctcgggaata

SEQ ID NO: 179665 - DNA, 1524 bp, Zea mays
  Clone ID: MRT4577_95436C.1
cggacgcgtggggtcgccatctcggctgtgggcctcatcgccttcttcgccgtgaggaaggcggccatgaaacgttgggaggcgagggcgcccacggtttcggaggaggagagttcttcgactgggtacccttccaagatgctcgctgatgcacgatacatatcgcagacgctgaagctgggcgccctggggatcccgtcatacagagcattttctctggtcgagcttgaagctgcaactaataacttcgagaactctcacctgctggggcaggactctcacggcgagatgtaccgaggaaggttaggcaatggcaccccagtgacgatcaggacgctgaagatgaagaggagccagaccgcccagagcttcaaccgtcacatcgagacgatctccaggctcaggcaccagaacctggtcagcgctctgggacactgcttcgagtacaatctcgacgagtccactgtgacccagctgtacatcgtgttcgagtacgtgcagaatgggaacctgaggagcaggatctcgcaagggaccgaagggtcagaggtgcctggcgaaggaggcgtcgcagcggccctcggtggaggacgtgctgtggaacctgtgcacggggggatcatacctggcctggtcggaaacgatctgcggatcacgaaccggaggaagcccagtgtcgtcgtcgtccagagccaccaggccatctcggcgatccttgagcaggccatgaggcccgagcagggaggatctccagtaaagcggtcacatgatctacccatagtctaccggggacaaggacaaggatctaaagaggggaacctgtggtcagcctacagtacggcaaccatcacggacatgtatgtggaaacgatactagaatcaactgcttgcatgggcgattgccgacgaggaccacgaatgtgctttgcgctactgagaccccgcggtgagcaaagggtgctccgtacgagtcgctgaggacggtcatggagatctgtccgaggtgcctggtcaaggaggcggcgcagcggccctcggtggaggacgtgctgtggaacctgcagttcgccgcccaggtgcaggacgactgggagacggatgcctggagcagcggcggaggaagcccagtgtcgtcgtcgtccagacccaccaggccgtctcggctacacttgagcagatagatgatcaggtgcttcaccaatctccagtaaagcggtcacatgatctacccatagtctaccggggacaaggatctaaagatgggaaatgctggtcagcctacagtacagcatctgcctctgatgggatgctgaaacccacagcaggatcagctcactgaaaactgtcccccctgtggtgcagactaatgtgctttgcgccactgtagagttcttttttggtttctctttatcatcacgtccctatctaagagtacaataatggtgtgccttttgtccattttcaaaaaaaaaaaaaaaaaagcggccccattggtattggtagcacaataatgatgtaacaggc

SEQ ID NO: 179666 - DNA, 348 bp, Zea mays
  unsure (1)..(348): unsure at all n locations
  Clone ID: MRT4577_95437C.1
cggacgcgngggcggacgcgngggcggacgcgngggcggcngcgcnngcaacaccanggacggcggggganccggcaangccnccggcggcagcggcggcgcancgacgngcagcnacnacgcgcnccncggcaaccgcaagaacgccnccgccaccgacanacgcgccgcnnaccggaggcncgcgangaagnggcacccggaccggngggccagcgaccccggcgcggccggcgaggccaagcagcggnnccagcgganccaggaggcagacnccgnncaggcggacaaggggaagaaggccangnacgacgccgggcncnnngacagccncgacgacaacgacca

SEQ ID NO: 179667 - DNA, 1068 bp, Zea mays
  Clone ID: MRT4577_95438C.1
ctcgacgagtccactgtcacccagctgtacatcgtgttcgagtacgtgcagaatgggaacctgaggagcaggatctcgcaagggaccgaagggtgcaggctgacgtggtcgcagaggatctcggccgccatcggcgtcgccaagggcatccagttcctgcacggggggatcatacctggcctggtcggaaacgatctgcggatcacgaacgtccttgtggaccagaaccatgtcgccaagatcggcagctacaacatcccgatcctggcggaggccatgaggtccgagcagggaggagctgggaacaagttccaggctgacagtcgggtgaagagcgataagacggacatcttcgacttcggggtgatcctgcttgaggttgtgtccgggaagaccatcacgtccatgtatgaagtggagatactgaaagaactgcttgcatgggcgattgccgacgaggaccgggtgaggaggaggagcttcgcagaccccgcggtgagcaaagggtgctcggacgagtcgctgaggacggtcatggagatctgtcagggtgcctgggcgaaggaggcgtcgcagcggccctcggtggaggacgtgctgtggaacctgcagttcgccgcccaggtgcaggacgactgggagacggatgcctggagcagcggcggaggaagcccagtgtcgtcgtcgtccagagccaccaggccgtctcggctacacttgagcagatagatgatcaggtgcttcaccaatctccagtaaagcggtcacatgatctacccatagtctaccggggacaaggatctaaagatgggaaatgctggtcagcctacagtacagcatctgcctctgatgggatgctgaaacccacagcaggatcagctcactgaaaactgtccccccttggtgcagactaatgtgctttgcgctggtgcagactaatgtgctttgcgccactgtagagttcttttttggtttctctttatcatcacgtccctatctaagagtacaataatggtgtgccttttgtccattttccccccattggtattggtagcacaataatgatgt

SEQ ID NO: 179668 - DNA, 501 bp, Zea mays
  Clone ID: MRT4577_95439C.1
cgtgctgtggaacctgcagttcgccgcccaggtgcaggacgactgggagacggatgcctggagcagcggcggaggaagcccagtgtcgtcgtcgtccagagccaccaggccgtctcggctacacttgagcagatagatgatcaggtgcttcaccaatctccagtaaagcggtcacatgatctacccatagtctaccggggacaaggacaaggatctaaagatgggaaatgctggtcagcctacagtacagcatctgcctctgatgggatgctgaaaaccacagcagtatcagctcgctgaaaactgtcctccctgtggtgcagactaatgtgctttgcgccactgtagagttcttttttggtttctctttatcatcacgtccctatctacgagtacaataatggtgtgccttttgtccattttcccccattggtattggtagcacaataatgatgtaacaggcattgccttctacgtcctgagttttgtgatcatcgtatt

SEQ ID NO: 179669 - DNA, 535 bp, Zea mays
  Clone ID: MRT4577_9543C.1
accgggcccccaaaaacatagccccctccgggcactggacgttaatatttttttcccgctaagcatatctaccctagacataaatacgcaatagcgatgcgctatcgatcagtttcgtttagattgttaaactaatgttttttattacttatcgaatattcacttcgttctaaaatagtatttgttttaattcttgttttttatgtctatattcaactagatgataaggaatccactagagaagcaaaataaattctgttttgatacagagaaagtattatttacggagagaagatttttaaaattgaaatattttttgaactatttaaggtcaacaatgacataagagaggttaaatagtttggcgattatacgtatctaaaagacgtagttggatgagattgatcttaatggtataagcgatgatttgtatcacaaaatgttagaagatattcttaatgacatcggataacaagtactccctccatttcttaatatatgtcgtccgttagtacaaatttgaactactaggcga

SEQ ID NO: 179670 - DNA, 475 bp, Zea mays
  Clone ID: MRT4577_95440C.1
gatttcctactatcctcgggcttccaccaagagggggggggatatgtaactgtacgtgagtgtggagatcctaatgtgcctggagcgggtatgaagaattcgatgccacagtacaagaggaggccacctgcttccagcctaccacagacagcatcactctctgggcctggcagggtcggaaatgcatataattatagctggaaattacagtctaaatacgggcgctgcattgtgggcctacaacttggggagttgatgaagctttaggcacacacattaaagaccccaatgactatgcagctatacagcagattgataattctggaatgtggattcatggaggcgctggttcaagaacagagtctgcaaattccgctggtaactataatggtcttcagggacagagccagcatggtggctaccatcagggacatcagcactttgaatacggaggtcttgcgtacccaagctttta

SEQ ID NO: 179671 - DNA, 970 bp, Zea mays
  unsure (1)..(970): unsure at all n locations
  Clone ID: MRT4577_95441C.1
gaccctcgggctggctaagagcctcagctcgctcgacctgtccacaacgcgctcaccggcgagatcccagcgagcttcgcggcgctcaggaacctcactttgctcaacctcttccgcaacaagctgagaggcagcataccggagctcgtcggcgacctgcccagcctcgaggtgctgcagctctgggagaacaacttcaccggcggcatcccgcgccggctcggccgcaatggacggctccagctggtcgacctctcgtccaacaggctcaccggcaccctcccgccggagctatgcgccggtggcaagctggagaccctcatcgcgctcggcaacttcctctttggctcaatccctgaaccactggggaaatgcgaggcactctcccgcatccgcctcggcgagaactacctgaacggttccatcccggatggtctctttgagctgccgaatctgacgcaggttgagctgcaggacaacctcctgtccggcggcttcccggcggtttccggcaccggtgcgccgaatctgggggcgatcactctctccaacaaccagctcaccggcgcactgccggcgtccatcgggaagttctcaggtttgcaaaaactgcttctcgaccagaatgcattcaccgngcgcagtnaccgccggtactcgggcggctgcagcagttgtctaaggctgacctgagcggcacacgcttgacggcggtgtgccgccagagatcgggaagtgccggttgctcacctacctggacctcagccggaacaacctgtccggggagataccgccggccatctccggcatgcgaatcctcaactacctgaacctgtcccggaaccacctcggtggagagataccggcaaccattgctgcgatgcggagggcggcggccgtggacttctcctacnncancctgtgcgggctcgtgccggcgnctgggctgtgtgcctgcttgggtgcctct

SEQ ID NO: 179672 - DNA, 595 bp, Zea mays
  unsure (1)..(595): unsure at all n locations
  Clone ID: MRT4577_95442C.1
gcccgcttgcgaggcgcactggcactccgcagctgacgacgacccggcagtccggcacaccgcctctttccgtgtaggctggccgccgccaccaggtcgaaccatggaagtcgcggccgtggcgtgccgcgccgggctgctcgcgcgggcccgtccaagcagcagggcgcgtacgtgggccgttgccgtcggccccgccccgtccgccgctagaagaaggttgctcgtcgcgtcgctcggggtcggggagccactcccggcgcaatccctgggcgaggaggccgtggcgctggaggtaatccgattccgatgccgtcttgccgtaggtctccttggcatgttaccgcaagcttcgatcgcgatcacacatttacatgtcctgatatccatgaagtcgattgattttgttgcaggtgggtgaggatgaggatgatctgaactcaattgtttccgtcgaaaacctgcctcccgctgctgctcacggtatgagctctctagccgtcagcggtggtggtttacacggacgacaaaaaagccactacacttaacgttggcacgncctcgtngaatctgaccgttgccagttcctgaggca

SEQ ID NO: 179673 - DNA, 109 bp, Zea mays
  Clone ID: MRT4577_95444C.1
cccacgcgtccgggccagtgatccccgaccccgagtgccgatgtcgacgccattcctgattccttcatcttgcgggccgtcgtaccgacgacggagatatagtcagagc

SEQ ID NO: 179674 - DNA, 1930 bp, Zea mays
  unsure (1)..(1930): unsure at all n locations
  Clone ID: MRT4577_95445C.1
tctgccgggacagccgccgccgccgcatcccagcctccataccgtttccgtctcgttgccatgggtaaggtgcacggatcgttggcgcgcgccgggaaggtccgcgggcagacccccaaggtggcgaagcaggacaagaagaagaagccccgcggccacgcgcacaagaggatgcagtacaaccgccgcttcgtcaccgccgtcgtcggcttcggcaagaagcgcgggcccaactcctccgagaagtaggcgccgctcggctcgtaccggttcctcatccttcctgctctccgtatgcttatgctcttgatggtactagtttcgttgttcgcaagcagaggaagaaccttctgtagattcggttttgttgtccatgtgctcagatgggaacttgagattgtatgaatttgagatatggtgatatgagctgatgatttttattatgcttaaaaaaaaaaaaaaaaaaaaaaaaaaaaaatatccgcatccgctgcctccgcctctcgagtctcgtccacccgtcgtcctcctagctcctctactcgccagtcgccatgggcaagattaagatcggaatcaacggcttcggaaggatcggcaggctcgtggccagggtcgccctccagagcgaggatgtcgagctcgtcgccgtcaacgaccccttcatcaccacggactacatgacctacatgttcaagtacgacaccgtccacggccactggaagcacagcgacatcacactcaaggactccaagacccttctcttcggtgacaagccggtcaccgtctttggcatcaggaaccctgaggaaatcccgtggggtgaggctggcgctgagtatgtcgtggagtccaccggcgtcttcactgacaaggacaaggctgctgcacatctcaggggtggtgccaagaagggttgttatctctgccccaagcaaagatgcacccatgtttgttgttggtgtcaatgaggacaagtacacctcggatgttaacattgtttccaatgctagctgcaccacaaactgccttgctccccttgctaaggtcattcatgacaacttcggcattgttgagggtctgatgacaactgttcatgccatcactgccacccagaaaactgttgacggaccctcagccaaggactggagaggtggcagggctgccagctttaacatcattccgagcagcaccggtgctgccaaggctgttggtaaagttctccctgatctgaatggcaagctcactggtatgtccttccgcgttcctactgtggatgtctcggttgttgacctcaccgtcagaatcgagaagggggcctcctatgaggatatcaagaaagctattaaggctgcttccgagggtccactcaagggtatcatgggttatgtggaggaggatctggtttctaccgacttccttggtgacagcaggtcgagcatcttcgacgccaaggccgggatcgctctgaacgaccacttcgtcaagcttgtctcgtggtacgacaacgagtggggctacagcaaccgcgtcgtcgacctgatccgccacatgttcaagacccagtagagggttttccccctgcttctcatggatggttgctgcttgtgtatgccgagaataaatgtggatgtcgccaggttcatgctgagtctggacatgttttgcacttttgtttccatttctgccatcatctgtggcagatccgctcgctaatatgggacctgagattagctttttgctgcttgtggtgaggttgcagttttgttatgtgtttctgtgttgttagtactcctatgatttaggtgttcgttatatagaattaaaccaccaaatatatgggacaagtgaatagatttaacccacaaaatatctgggcccccccccaaaaaaacacaaaaaaaaaaaaaaaaaaaaaagggaatntatt

SEQ ID NO: 179675 - DNA, 2071 bp, Zea mays
  Clone ID: MRT4577_95446C.1
cggccggcatatccgcatccgctgcctccgcctctcgagtctcgtccaaccgtcgtcctcctagctcctctactcgccagtcgccatgggcaagattaagatcggaatcaacggcttcggaaggatcggcaggctcgtggccagggtcgccctccagagcgaggatgtcgagctcgtcgccgtcaacgaccccttcatcaccacggactacatgacctacatgttcaagtacgacaccgtccacggccactggaagcacagcgacatcacactcaaggactccaagacccttctcttcggtgacaagccggtcaccgtctttggcatcaggaaccctgaggaaatcccgtggggtgaggctggcgctgagtatgtcgtggagtccaccggcgtcttcactgacaaggacaaggctgctgcacatctcaagggtggtgccaagaaggttgttatctctgccccaagcaaagatgcacccatgtttgttgttgcccgcggccgtaccgggctctcgccccacacgtccgtgacgcccgtcctgtccctgtccggcgcgatgccggtctccctcaccggccccccgcaagcgcagaggcacaaccacaacacctcgcctcgtcagatcgaccgggaagaagggagcagaagccaaccggctcgtccgcccgttgcctgtcgtcgctatggccgccgtggaggtgtgcgtgaaggccgccgcggggaaccccgacacgctcggcgattgcccgttctcgcagagggtgctgctcacgctggaggagaagaaggtcccgtacgaggtgaagctcgtcgacctcggcaacaagcccgaatggtttctgaacatcagcccagagggtaaggtgcctttgttcaacggtggagatggcaaatgcattgctgattctgatgtaatcacccaagtcattgaggagaagttcccgactccttctctggtcacccctccagaatatgcatcagtgggatcaaagattttcccagcctttgtcaagttcttgaagagcaaggatgctagtgatgggtcagagaaggcgcttctggatgagctgcaggcactggatgatcatctcaaagctcatggcccctacataaatggggagaacgtgtcagcgactgatcttagcctggggccaaagcttttccacctacagatcgcactggagcatttcaaaggctggaagatcccagaaaacctaaccaatgtccatgcctacaccaaggctcttttcagccgtgaatcttttgtcaagactaagccatccgaggagcacgtgattgcgggatgggcgcccaaggtgaatgcataagagccttgtgctttggtgctacctggtggactccatccatttatcttatcagtctttgtcagtggtgtggataggtgtcaagtctgtagcctagatgcatgattcagttggaattatgcagtgccgtgtctcgagtactcagttctggctgttgcggttgtgcatcttaccttctgttgctggttttgtttgaggccatgggcatctcttggtcctatgctgtgagagcgctgtaatgtgggtaccaaataatggagctgcttttatgcttgtggtgtggattctgttgtgccttgctttcatgattctgttttcctgtggtgaattggtgatagcctgagcagcaggttatcttctcctatatatcacatatttcggacctggtttttttcaagcacatgttaaatgaaaatgtttggtgcagtattcaacaatgtaagtgattgtcaaaaaaaaaaaaaaaaaaagtggttttgctcacatccatcttgctagggaacgctatgtttgaacattgggagattctctatttctcttaattcctaaggtgttaaacggtttgacttgaaacccccatgttctgaatggagcctaagttttgcaattattattataatttagctttgcatggaagtaactggatccttaaaccaaacacgctgttaattcctaggacggtacacagttcaacctgagggaatggagcctaagttctaaattattattatttattatcttttaaa

SEQ ID NO: 179676 - DNA, 1540 bp, Zea mays
  Clone ID: MRT4577_95447C.1
tgggaccctcgaggccggccgggactatgttgagtggcactgcagtctgactctcggcaacggatatctcggctcttgcatcgatgaagaacgtagcgaaatgcgatacttggtgtgaattgcagaatcccgtgaaccatcgagtctttgaacgcaagttgcgcccgaagccattaggccgagggcacgcctgcctgggtgtcacaaccgtccacctcagctcccatatccgctcccctacctctccagcatcctcccgtctccgtcgtctcgtctccgctcctcacctcgccagccatgggcaagatcaagatcggaatcaacggtttcggaaggatcggcaggctcgtggccagggtcgccctgcagagcgaggatgtcgagctcgtcgccgtcaacgaccccttcatcaccacggattacatgacgtacatgttcaagtacgacaccgtgcacggccaatggaagcacagcgacatcgccctcaaggactccaagacgcttctcttcggcgagaagccggtcaccgtctttggcatcaggaaccccgaggagatcccgtggggtgaggctggtgctgagtatgtcgtggagtccacccggtgtcttcactgacaaggacaagggctgctgcacatctgaagggtggtgccaagaaggttgttatctctgccccaagcaaagatgcacccatgtttgttgttggtgtcaatgaggacaagtacacctccgatgttaacattgtttccaatgctagctgcaccacaaactgccttgctccccttgctaaggtcattcatgacaactttggcattattgagggcttgatgacaactgttcatgccatcactgccacccagaagactgttgatggaccctcagccaaggactggagaggtggcagggctgccagctttaacatcattcccagcagcaccggtgctgccaaggctgtcggtaaggttcttcctgaattgaatggcaagctcactggcatgtccttccgggttcccaccgtggatgtgtcagttgttgacctcactgtcagaatcgagaagggggcctcttacgaggaaatcaagaaagctattaaggctgcttctgagggcccactcaagggtattatgggctacgtggaggaggatctggtttccaccgacttcaccggtgacagcaggtcgagcatcttcgacgccaaggccgggattgccctgaacgaccacttcatcaagctcgtctcttggtacgacaacgagtggggctacagcaaccgcgtcgtcgacctgatccgccacatgttcaagacccagtagagagagatatttctgcctccctatcgagggtcgtccccgatggcctttggtcgcagaccatctttgctgcttgtctatgctgagaataaatgtgaacggtgcccctggacgctggatccatgctggttttggacacggttgtctttttgtgtttaacttatctgctgccgtccgtcctgtaacgaattcgctaagttttagttcttttgtgctttgttaagaatata

SEQ ID NO: 179677 - DNA, 702 bp, Zea mays
  Clone ID: MRT4577_95448C.1
ctccaaacaggactgggatggattgtttaagatggatcagctgaaaaaggaactaggtaaagggtgcacatttgatggttgggttgaagggcctatcaccttccccccaacgtataaatacgagtttaactcagaaaaatatgtaagtgacgcgacgaaatctgggagaagaacacccgcatggtgtgaccgcatcctctcgtatggggaggggacaaggctactttcatacaacagggcggagcttatattatctgatcatcgaccggtgactgcagtttatatggcagatgttgaaattgtctgccccaggaggctgcaaagagctttaacattcagcaacgcagagggtgaggatcacctgttgtctaggaaggaagcacaccttgaacctaagaccaattaaccatgagccaggcaatttcctagctcgacgcaatgcaatgctgatccttgatttctgaatctgttagaaagattcaattgcccagcatagattagtagaagtagtaggatgtgcatttccatccttgcaacaaccttatttgatcaagggtatagtatttgtgagttgtgagaccaatattacagactccttttgagtcattgtatctgtatccttgccattaccgtattacgatgccattggtttgagtaaacaatcattaaattctttaaaaaaaaaaaaaaaaaaaaaaaaaa

SEQ ID NO: 179678 - DNA, 383 bp, Zea mays
  Clone ID: MRT4577_95449C.1
ttttgtacttgcacactaaaaggttaatatctgctagtgtaatttaaaaaaaaaaaaaaaaaaaaaaaaaaaaaaaaaaaaaaaaaaaaaaaaaaaaaaaaaaacccaaaaaaaaaaaaaaaaaaacttgtaccttccccgccctgtccgttcgaaaagggcaaaatattgcagaatatccaccacactggtgggccgttttaaccatccatcttaagagggccacaaaatgccctcaaatggagtcgccattacaacaaaataaggcgggcgttttaacaacaacgccggggaaaaaaaaaaccctggtaacaccaaaaaaaatcttcctagcacaaaatccttttttcaaaaggtggaaataacaaaaaaagaggcccaaa

SEQ ID NO: 179679 - DNA, 224 bp, Zea mays
  Clone ID: MRT4577_9544C.1
attctgaaaggtgcggtgcttaacaacatgagcaagatattttaattttcatctattttccctgtttctggatgcctgaccagtttattaagggatatattaatccacacatcgaatcctccagtggtgctatgaactctatattctatgtttcatgtgctatatggatttttcaacagaagttactcgtgtttgttactggaggaagaatttggctctacaat

SEQ ID NO: 179680 - DNA, 563 bp, Zea mays
  Clone ID: MRT4577_95450C.1
attggtagaagttattctcgagcattacggttttgaagctgatgaagcggcggtcacatgtttggtttgtctggttccagttgctttggatgtgtacataaaattttgggtatacaaataccttccaaggttatcacccagtgtgggcaacgttctggatgaaataaagcgtcattagagattttttgccttagaaattcactatgatctgcagcaattcactcctcgatgtccagagctgttagaactgaaacctgccgacatcttgaaggcttcagaaaatagaggcaaacagagttgctgggtcctgaaaccgagacgtcctatcaatttatgttgataggcctagggtggtattatatagtgatgggtatttttcaccgactccaccggtggagtttactagcagcaacttgaggcaaaaatatctcttgtttacatggttttatctcttgtaaaataagaagtcggatgattttgcgcgaaatgagacggaacgtgctgacggtcgtctgttctgatgaccaaccaagcaaatggcaggacagggacatctcagtccc

SEQ ID NO: 179681 - DNA, 848 bp, Zea mays
  unsure (1)..(848): unsure at all n locations
  Clone ID: MRT4577_95451C.1
ccggccgggagaattgctccttcaagcactaggaaatagccttgatatgttttgtttgattgtcttttcatttaagataacatttttatattattttattgttaactatggtttatagccaaattttatccactgtataaaatgaataactagctgcgctttttgcaggtaccattcagagtcaggttggcatacattggtagaagttattctcgagcattacggttttgaagctgatgaagcggcggtcacattttttgtttgtctggttccagttgctttggatgtgtacataaaattttgggtatgcctttttcatctaattaaacaatagcttctaaaagttaagtaacataacatagcttttttaaaaggaacctcttttttccccctgtcctacggtcctacctcaccattttatatgttctcaatacacattttagcaactccaatactactattttaatcaccttttatagaggagtaacttgcaactttcttttttgttggagacaaaattcaattttctattgactgcctgattttatggatctaaaacattgttcagtgttcctggtattatcagtttatatgaatntagaagttcacattgtaacctgaataaggtcgagatacttagttntttttcatatgttgcaggtatacaaataccttccaaggttatcacccagtgtgggcaacgttctggatgaaataaagcgtcattagagattttttgccttagaaattactatgatctgcagcaattactcctcgtttgtccctttncagtctgggtctgtcatttatcattggcaagcattttttgccttggaaattctctgcat

SEQ ID NO: 179682 - DNA, 377 bp, Zea mays
  Clone ID: MRT4577_95452C.1
agcagtggtaacaacgcagagtactcggtgactgatccgactgaggaagagacccaaaatcagaatgactgcagatatgacgtgacatcatgaggactcggacgcggcaacgcacggagagagtgatgccatgactgatgtggctacatataacacatatggtgcacgatgccgtggtggatcgacgttcgcactcttaaatcgtacacagccacagctgttgaattctgatataataatgtaggtaacttcgggtcgtactaccgctgcagatctattctcgcgcttttgtttaaacggcaacgaaaacgggggcaggagaggctggcggcggtaacggctcccccacggcttgcatttctcgcgcccaaagaatt

SEQ ID NO: 179683 - DNA, 324 bp, Zea mays
  Clone ID: MRT4577_95453C.1
acggcgctcttgcaaaggcgcacgtacaaaagggcaatctaccagcccagaaggccctacggtctgttcatgtgtggctgccgctacctgctaaccactcaaaccaatccaatccaatggaacgcacggtgattgacctcatgaacccgctcgcttttgtaccccctgaagaacgtggggctgttgctcatctggtgctacaaccatatacactcgatccaccccaccccgcattgggcgttagggtacatatacaacaacccggaccataacaagaagggcgctgctcctgggcttatgcttacgtcaccccagaaccaaagt

SEQ ID NO: 179684 - DNA, 293 bp, Zea mays
  Clone ID: MRT4577_95454C.1
ggcttggaacctttgggctgatttatgtgcttgttagatgtggtctggatctgaaccccccctccactagtgtaaactctacagtatacgggggggacgtcaaacaggttcaatggcagtacacttcgcctccccacaaaggatactatctgatccgtgaacgcaacatcagagtaagcggtcccagacgttaagataacacgcggacgatcgtaagaggcatagaagaacctggattcccacccaaacgatctccgatatagctcaggctgaagcccatctctgttatagtc

SEQ ID NO: 179685 - DNA, 223 bp, Zea mays
  Clone ID: MRT4577_95455C.1
ggcaggagctccatcagtcaacagacaagaggggttcctggtccatatgaatgctcaaatccgcggcgaggatgctatcacttacctacaccctctgcatacgaagattgtagtatgtcatttgcttcatacaaccgagacaagtctgaggatgttctacccttgatgggtgcatcttgaacttatggaacgtttgctaactacttatagaaacctttaaaca

SEQ ID NO: 179686 - DNA, 255 bp, Zea mays
  Clone ID: MRT4577_95456C.1
acccaccggcctagtagctctagccatccacatcagctgtagctacatgcaagggtcgcggtggaggtgcatgccacaaacatacgctcgcggactggatgtctggcgcgcggatgcgccagtcgcagtgggcggtgtctgaagagagtgagcacactgcctggcggaaaggcaccggctgatggtgccgtttcggacacgtgctcactgctctatttgtgatgcaattctttctaatcttctatactggttatt

SEQ ID NO: 179687 - DNA, 318 bp, Zea mays
  Clone ID: MRT4577_95457C.1
aaaccggcggagcgacgcgtccgctcattttactcatttttcatcctttgtattctatggagaggctccttgccggtcggcgggtcttcttcctattaatgatcgcctcagtaggaagccatgcaactcgtgctccaaaacagtactggaagtgtgttatttccgacactcccatgccgagctgcttctactaactcctcaacaccatagctggtctctatcactacttgatacacgatgtatatggatgctcgaacatcgtacaaacatatatacgtaataacaccgactgatctcttgaattccatgcttattcct

SEQ ID NO: 179688 - DNA, 396 bp, Zea mays
  Clone ID: MRT4577_95458C.1
ttttttttttttttttttcaatgactgctggtatattagtccttgtccaaaatagatcccatccctgtagaactaatacagctgacatatagccaacactaggcgcattctactcgaattacaggaattaaacccaatctgaatcgctgaagttctgaatcttcctacatcaccaccacttgtgcaggccttctgagaaaccctaagtggtcactggctagtacgtaatagctaactaacaccattagttcagagcatgcatggttcctcgctgtgcttggacgatcggcgtcccttctttgagccccggcgggatctcgcagctcttgcagcagctcagctgctccgtctcccacttggtcttcggcacgacctcctcgtgccggggggagtact

SEQ ID NO: 179689 - DNA, 180 bp, Zea mays
  unsure (1)..(180): unsure at all n locations
  Clone ID: MRT4577_95459C.1
tgcccatcacctttacctntnatntncagccacctggcaccccccagccccatgccgcgcccaanccatccgcgcacgctctncaacccatgcctttcaccaggcaccgcaccacacatnttctncattaaacccaaccaagccccctggccctttgcgccttgcctttcccaccaagca

SEQ ID NO: 179690 - DNA, 1059 bp, Zea mays
  Clone ID: MRT4577_9545C.1
aattggtggtgccggcgacaacggcggcgatgcggctgctctccggcgcctcggcctcccgcctcccctttttggcgcgggcaaggcctagatgtgtgtcgcgctattcctccgcctccgcttgccgggccgcctcctcgtcagctgcccccgtcggtgacggcggcgcgcggaagccgtggctgttcgttgggctcggcaaccccgggaagatgtaccagaggactcgccacaacgttggattcgagatgattgatgctatagcagaaacagagggtgtatcactcagcagtatgcagttcaaggcaatgatcggcaaaggtcgtattggagatgttcctatcatgcttgccaagccgcaaacatttatgaatgcaagcggtgagtctgttgggcagctggtttcatatttcaagataccacttaatcaagtcgttgtgatgtatgatgatctggatttaccctttgcaaaactgcgtctgctgccaaagggtggccatggtgggcataatgggatgagaagcatcgtcaaccatttgaaacagagccgtgattttccacgcctaagaattggcattggacgaccgcccgggaagatggatcctgccaatttcgttctccggccttttaacaagaaagagcagcaagagcttgattttgcgttgcataggggcttggaggcggtgcggataatggtgctggaaggattcaacaagagcgcgacttacgtgaacactgcccaatcatctgaaatgctgaataggtgatgggcccataaactgccatatgcgatttaattcccataccaaagggatttagtcgaggaagcagtcgcagcaagaaagttctgacagctgaattgcttgttagagcatactgtatgatctgagcaacttaaatactgtgaatccatcatcccatacgacatgcatgagatggtgcatcacgaatcaattcctcaaatttggtggaatgacctcattcctcatgttattactaactaattaactataaagaatgaggtggtgattgatcaatttttaaacatattaatatttt

SEQ ID NO: 179691 - DNA, 376 bp, Zea mays
  Clone ID: MRT4577_95460C.1
atattcggcacgaggcaaatggtcacaccaaccgaaaagccttaagtgtatcgagaacatcataggcggcctacaccatgactaagcgatcatcactagggctatgtcagataaaccagctgctactgctcatgctagggatcaagctggttttgatggacaccagaccagtcacctggagtggcggtgaaacattttatttgaacctacagctgaccttctggaaccatgccgacgagagagactgaaaagaaacgctggtacggcatgacacacacctgcatgattcggaggcacaaaattgacaagatgacagacccctttactattctggctgacaaggatgagatgactagacctgaactgatagagatcg

SEQ ID NO: 179692 - DNA, 400 bp, Zea mays
  Clone ID: MRT4577_95461C.1
ggccgcttttttttttttttttttactttattttttttttttttttttttttattttttttttttatggagataaatctcaaccaatatattgattatttttatggaaacacatgccgctgtgagggcaccattatcgaggacatctgatatgtaatctaaaagatggcaccaccaacgatgggttgctgccacgacaaggcagggttcatcaaagaaaactggttgtactggcaccaattgttgctgctgtaggaaggcagcgaccaatgggttagccaccgttagtggatcaagtaactgttggcgttgatgtaggttcccagcagagtccgacacagccagctggtctgaatggaagtagttgccgcaaggaggcagcagcgtttgccacagctagc

SEQ ID NO: 179693 - DNA, 371 bp, Zea mays
  Clone ID: MRT4577_95462C.1
ttctttatgttttttgaatctataaatgtactttcttatatctggaaagccacacacattagacgtaaaattttattatttaactataactcataataaatctaaaataagacaccaccaatgataagattttactaaaacacattcttatttttcaaatcaaattcatttaattgtaccaattgatgcaattttaagactgtgccaactatatgcacatcgtgctcgtataacggcaacaactatctatgtgttaacaatgtagcattacttacactagatatctcgctaaatcgtagtaattcatacttttgtcaatatgcattagacttcaattctttcaagagtttcaatcttacaaattactcctg

SEQ ID NO: 179694 - DNA, 491 bp, Zea mays
  Clone ID: MRT4577_95463C.1
tcactaccaacgagggcgcgcgagggcggccaacaaattaccccggggggcgctgcttgccgcgcttattagcaccacaaaaactgccatcattacacaacactgattacctgctactagcgtcattacacacacagctcctacctgcagctactaaaatggagctgaggagacgcggctgagccagcctacaggctacaacaagcgcttgcggcgagcgtattacaacaaccaatcgcccaattacaacaacaatccttggaacatataaccatacaaaccatcgcaacgcaacagcaacaacaattactaccagcactgagccaactagctgtggtgaaccctgtcgcctacttgcaacagcagctgcttgcatacaaccgacttgctctggcaaacatagctgactaccaacaacaacaccaattgcaacagctgctaccagcgctcagccaactagccatggcgaaccctgtcgttttcctacaaca

SEQ ID NO: 179695 - DNA, 811 bp, Zea mays
  unsure (1)..(811): unsure at all n locations
  Clone ID: MRT4577_95464C.1
gtaccccatcctctttcgaagcacagagagagatcttctagctacatactgttgccgtcgatccaggaaaaatgtgcggcatactggcggtgctgggctgcgctgatgacacccaggggaagagagtgcgcgtgctcgagctctcgcgcaggctcaagcaccgcggccccgactggagcggcatgcaccaggttggcgactgctacctctcccaccagcgcctcgccattatcgaccctgcctctggcgaccagccgctctacaacgaggacaagtccatcgtcgtcacagtgaatggagagatctacaaccatgaacagctccgggcgcagctctcctcccacacgttcaggacaggcagcgactgcgaggtcatcgcacacctgtacgaggagcatggggagaacttcatcgacatgctggatggtgtcttctccttcgtcttgctcgacacacgcgacaacagcttcattgctgcacgtgatgccattggcgtcacacccctctatattggctggggaattgatgggtcggtgtggatatcatcagagatgaagggcctgaatgatgattgtgagcactttgagatctttcctcctggccatctctactccagcaagcagggaggcttcaagagatggtacaacccaccttggttctccgaggtcattccttcagtgccatatgatccacttgctctcaggaaggcttttgaaaaggctgtcatcaagaggcttatgacggacgttccattcggtggtctactctctggtggnctagactcatcattgggtgcagccgttacagttcg

SEQ ID NO: 179696 - DNA, 375 bp, Zea mays
  Clone ID: MRT4577_95465C.1
ctacatcaattgctgctactgtttgttccagctctgactcagctagctgtggcaaaccctgctgcctacttgcaacagctgcttccattcaaccaactgactgtgtcgaactctgctgcgttcctacaactgcgacatcagtttcttaatccacttgctgtgcctaacccattggtcactgccttcctacagctgcaacaattgctaccatacagccagttctctttgatgaaccctgccttgtcgtggctgcaacccatcgttggaggagccatcttttagattacatatgagatgtaatcgataatggtgccctcataccggcatgtgtttcctagaaataatcaatatattgattgacatttatctcgaaaa

SEQ ID NO: 179697 - DNA, 462 bp, Zea mays
  Clone ID: MRT4577_95466C.1
ttatttgtgggaagcgcaccctcatcaccacagaaaactttattattgaactatcactcatttaaatcttaaaggaggcaccaccaatgatgggttgcaggtagaactgctgctgggttggtcaaaccacgttgattgaatggctgccatcgttgcccttgggagagggtgccagcgctaggcgcagcgtgctggcagaaccgccacaactggggttgagacaagtaaggtactacggctaacaccagctagctgtctgattggaactagttgctgctgctgacaataatcatgatagttcaatgctgctaccttgttgaatggaagaaattgctggcggtcggcagtatatatcttgctgaacggtagctgctgttgacgcctgattgatacttggttcaacgccaacttccggttgaacggaataaatttgtgctgctccgcaaaatttttcccattgaa

SEQ ID NO: 179698 - DNA, 669 bp, Zea mays
  Clone ID: MRT4577_95467C.1
cattgggtacctcgaagccggccgaggaagcatctcaactgctcgcacgtgtacacgttctgtaccaccacctgccgtgtcgatcccggttcgacgttgacgatgcgccctacgagatcaccactccgcagtgcaggtacatggagcggagaatctgtggacccctcgaccgctcctacgtctggatctacggagttggagaaatcagccccttccagctacccaaagcgtggacaaggaagctgctgagatcgaacaagtgggacttctaggacgcatgcatgctctacaagctcaaggatgagcgtgagagaggtatcaccagtgatatcactctgcgcaagcatgagaacacaaagtactactgaagggacaatgatgaacatggagaccgtgacttcatcaagaacatgatcactggtacctcccaggctgactgtgctgtccttatcattgactccaccactggtggttttgaggctggtatctccaaggatggccagacccgtgaacatgctctccttgcgttcacccttggagtgaagcagatgatttgctgctgcaacaagatggatgcaaccactccgaaatactccaaggcacgttatgatgagattgtgaaggaagtctcatcctacctcaagaaaggtgggtacaacccctgataag

SEQ ID NO: 179699 - DNA, 455 bp, Zea mays
  Clone ID: MRT4577_95468C.1
ccctcaataacaccagggtctgccatcactgaggggccttttcgaggagaacccggtcacctactcgcaacagcagctgcttgcattcaacccactgtgctctggcgagcggagctgcataccagcgacaacaacagctgcaacagtttatgccagtgctcagtcaactagccatggtgaaccctgccgtctacctacaactactttcatctagcccgctcgcggtgggcaatgcacctacgtacctacaacaacagttgctgtaacaaattgtaccaactctgactcagctaggctggggaaaaccctgatggctacttaacaaacagttgctttcattcaaccaactggatgtgtcaaactctggtgcgtacctacaacagcgaccacggttactaaatccatgggcgggggcttacccaatggtaggtaaccttctgcagtaaaaagcaaca

SEQ ID NO: 179700 - DNA, 181 bp, Zea mays
  Clone ID: MRT4577_95469C.1
acgcgggttttttcgcatgaaaattatagagaatgaagggagggggacaaacattgggcacgcatcaactgtttttaataaaaagatctaggagcgggacacacgacaactgtgtactgatgcatgtagacttacgcacgacaaggtcgctagatggtcgactcctctcctggggcgggcc

SEQ ID NO: 179701 - DNA, 1351 bp, Zea mays
  Clone ID: MRT4577_9546C.1
atgacagtgccggcccgcgcggcatcccaaaggtccaaatcattctccgaggagctgcggcgctgcggcgacggcggcagcgacggcgatgcggttgccatctgccgcctcggcgtcccgccttccctcttcccttttcttacaaccccgcgcaaggacaagatgcatcccatcctcctccctcgcctgtcgggcatcttcttcatcagccgctggcgctggtgacggcggctcgcggaagccgtggctcttcgtagggctgggtaaccccggaaaggtgtaccagggaactcgccacaacgttggattcgagatgatcgatgttatagcagaagctgagggtatatctctgagcagtatgcaattcaaggcaatggttggaaaaggccgcatcggcgatgcacctattatgcttgccaagccacaaacctttatgaatgcaagcggtgagtctgtcgggcagctggtttcatatttcaagataccacttagtcaagtcgttgtgatgtatgatgatctggatttaccctttgcaaaactgcgtctgctgccaaagggtgggcatggcgggcataatgggatgagaagcatcgtcaaccatttgaaacagagccgtgattttccacgcctaagaattggcattggacgaccgtcggggaccgcccgggaagatggatcctgccaatttcgttttccggccttttaacaagaaagagcagcaagagcttgattttgcgttgcataggggcttgggataatggtgctggaaggattcaacaagagtgagacttacgtggactctggacaatcatctgaaatgctgaataggtgttgggccaataaactgccatatgcggttttaatcccataccaaagggatttaatggagtatgcagtagcagcttcgcttgatgcatcgtttgttcggggccccccccccccctggcccagaaagttgtgacagctgaattgcttgttagagcatactggtatgatatgagcaacttaaatactgtgaatccatcatctccggtacaacattcttctgcagcatcccataacaccatgcatcacgaatcaattcctcaaaattcggggaactgcctcattcctcattttattcttccacgtacttttttgtttttatccatgcttgcatattgtctgctctcatagttcagcagtactactatcttgctcctgttgggtttgcaacagttggtggcagccatcccgtttagagcacgggatatttcggtccagactccagatagagaaagccgatcagaatacgcttcatcacatgtatttccattcatcagataaaggatgccgatcatatttccatcct

SEQ ID NO: 179702 - DNA, 489 bp, Zea mays
  Clone ID: MRT4577_95470C.1
gtcctaacaacaatggctaccaagaattagcccttcttgggcttcttggcctttttgggggggcaacaaatgcgttcattatttcacaatggttacttggttctaggggccttatttcacagtttcttccacccggttcttcaatgggctttgaacacctaactgtgcaagccaacatggaacaacaagcgcttgcggtgagcgtgttacaacaaccaattgcgcaattgcgacaacaattcttgtcacatctatcaatacaagcgatcacaacgcagcagcaacaacagttgctaccagcactgagccacctagccatggtgaaccctgccgcctacttgctagagcagctgcttgcatgcaacccacttgctctggcgaacgtagttgctgtccagccacaacaacagctacaacagtttctgcccgcgctcagtcaactagccatggtgaaccctgcccgctacgtcgacaacaacaactgctttc

SEQ ID NO: 179703 - DNA, 284 bp, Zea mays
  Clone ID: MRT4577_95471C.1
agcgcgtccagcagtgcgcattcctccaagtctgcgaagtccagcaccccatcctcgcccactggcacgtcatcctcagactcgggaggacatcacatcggcaggggtgagcggcagggccagtggctgcgcaggagaaggctggatggggccatcaacagggtccccgtgggattctaccagagggtgtggaagatcctccagaagtgccacggtctctccatcgatggttatgtcctcccatcctcgacgacccgagatatgacccgcatgatatcaagttt

SEQ ID NO: 179704 - DNA, 552 bp, Zea mays
  Clone ID: MRT4577_95472C.1
tacgcggggatcacccataatattttgagcattcagaaacacacctagcgaagcgcactagcaacgacctaacaacaatggctttcaagacattatccctccttgcgcttcttgccctttttgtgagtgcaacaaatgcgttcattatttcggggggctcacttgctccgggtgccattattccacagttcctccctccagttacttgaatgggcttcaagcacccagctgtgcaagcttataggctacaacaagcgcttgcggcgagcgtcttataacaaccaattgcccaattacaacaacaatccttggcacatctaaccatacaaaccatcgcaacgcaacaacaacaagcactgagccacctagccgtggtgaaccctgtcgcctacttgcaacatcagatgcttgcatgcaacccacttgctttggcatacgtagctgcctacctcgtcgacgacattcgcaacagtttctgccagcgctcagtccactatccatggggaaccctaccggctacctaccacagtagcatcgtctttcatctagccc

SEQ ID NO: 179705 - DNA, 605 bp, Zea mays
  Clone ID: MRT4577_95473C.1
tcgaggccggccgggccgggaacaatccataactcgaaagcttttcttgtgctctgtctgtgtgattccaaagtaaacaaataaggtcgaggatgtcttgcagatgcggatcaagctggaactgcggatcaagctgctactgctgcaagatgtaccctgacctggaggagaacagcggcgggggggctcaagccagcgccggcgccgtctgcctcggagttgcccctgagacgaacaacgcggggcagttctaggcggcgggcgagtctggggaggccgaccacggctgcagctgcggtgacagctgcaagggcatgccctgcaactgctgatgctgctgcggtgcttccgttgcgtgatgcatggatggcacacatttttttactggctgctttgtggttgtgccgagtccatgataatggatggactcatcgtctggtctgactctgagtctccgccatgaagggtatgcgtcgcctgctccttacatcatttttgacatatatatactcccttcgctccagcaatgtgagacgttctctctctagttatacgtacattgatgccagtgtatatacagaattaaatacatttttcgatctccc

SEQ ID NO: 179706 - DNA, 366 bp, Zea mays
  unsure (1)..(366): unsure at all n locations
  Clone ID: MRT4577_95474C.1
cagcattcagaaacacaccaagcgaagcgcactagcaacaacctaacaacaatggctaccaagatattagccctccttgcgcttcttgcccttttagtgagcgcaacanatgcgttcattattccacagtgctcacttgctcctagtgccattattccacagttcctcccaccagttacttcaatgggcttcgaacatccagccgtcaagcctcaggctcaacagcgctgggcagcgttacacaccaatgcaatgacacaatctgccattactaaacatgaccacacacacagttgctatacacaccgggactgcctatgacacactatgatcacatgttgcacggtgtcacacacacgtgaatat

SEQ ID NO: 179707 - DNA, 723 bp, Zea mays
  Clone ID: MRT4577_95475C.1
aactcgtcttctgccttctgctcctgctttgggcctctgtcccttgcaagttcaatctcacctccaaccatgggtcaagagaagtcccacatcaacattgtggttattggccatgtcaactttggcaagtcgaccacgcacaggacacacttatctacaaccatcgcaggcattgacaagcgtgtgttcgagaggttcgagaaggaggctgctgaaatgaacaagcggaccttcaagtacgcgtgggtgctagacaagctcaaggctgatcgtgagagagagctcaccatcgatatcgctctgtggaagcctgagaccaccaagcactactgcacggacaattgatgctccctggacaccgtgacttcatcaagaacatgatcactggtacctcccaggctgactgagctgtgcttatcattgactccaccactggtggttctgaggctggcatctcacacgatggccagacccgtgaacatgctctccttgcgttcacccttggagcgaagcagatgatttgctgatgcaacaagatggatgcaaccactcccaaatacttcaacgcacgttatgaagagactgtgaaggaagtctcatcctacctcaagaaagttgtgtacaaccctgataagattgcctttgctaccatatctggctttgagggcgacaccatgattgagaggtccaccaaccttgactggtacaaaggcccaaccctgc

SEQ ID NO: 179708 - DNA, 433 bp, Zea mays
  unsure (1)..(433): unsure at all n locations
  Clone ID: MRT4577_95476C.1
ccggattccggtcgaccagcgtcgtgctccaggtcaatattcacatntcttcacaagtcctaagggctggacaccactgtcaggctataggctcaacagcgatgcggcgagcgtgttacaacaaccaattgcccaattgcaacaacaatccttggcacatctaacaattcaaaccatcgcaacggaacagcaacaacaggttctaacacggcttagcccactataccatggagaaccctgtcgctaactggaaacagaatctgcttgcatccaacccacttgctatagcaaacgtagttgcaaaccagcaacaacaacaactgcaacagtttctgccagcgcttagtcaactagccatggtgaaccctgccgtctacctacaacagcaacaactgctttcatctagcccgctcgctgtggccaatgcacctac

SEQ ID NO: 179709 - DNA, 500 bp, Zea mays
  Clone ID: MRT4577_95477C.1
cggggagggctagacattatacacaaattacaggcgcagactggataacgagatcacctctaacgaattaggatctccccattgtgcaaacaaagacggcagacaatacatgacacgtgtggaatttagggaaatggggatgactcgaatctaaagtagctcgagttgggagaggacggcaaaaaaaagcatggggaacagagaaacggcccaaactttccagtaagcagaatctacgacccacggctgaaagatcgggacagaggaacctgctaaataattgaaccaacatatgtcatagcaaaggggacacagaattgctgtggggcggtcaatgtgggtaaacagaagctcaagaagaccccattgtgagatcagtcaggccaaggaagacagtaggcgggcatgtatacgtgccaagagactgcacataacaaatgtgatagtggaggaaccgatgcacagaggcgaaggaactggggatcaagctgaagcaagga

SEQ ID NO: 179710 - DNA, 317 bp, Zea mays
  Clone ID: MRT4577_95478C.1
aattcggcacgaggcatctccactcccacagcccacagcctctctggtctctccggcgccccgactgcgagacacaccgcgacgcctcaccgatatggcgacagccggtggcgccgcaccggcggcaatggacgagaaggcgcggcgcacgcgcgatctccttgctagcttctacaacaccgacccgtccgcggtcgccgggggtgccgaggaccccgcgttcctggcgcgcccgtgccctaccggcgcgcccgccccgtgtctctactgactcacttccacctcattccatccgcccatctacctgaatgttctgg

SEQ ID NO: 179711 - DNA, 418 bp, Zea mays
  unsure (1)..(418): unsure at all n locations
  Clone ID: MRT4577_95479C.1
ctggttttttttttttttctttttttttttttttttggcntcaaacctcatactatttatagatgggggtgtccatatgtttgttccataaggtaacagtgcctgaagacatgaccggggttgatccatgacgcacatgcgccttgttccggtntccanatttgagccccctctgcgcacagtttaagaggaaccctttttttancccttgttccggcccatgagatggttccctctgaatccgctggcttgactcttcctttccacgcccccgccgctacattctgctgaacttgacttccctctcccttcgctacaggttactgggccctgctgtcccccctggggttttttcttaccgcgccccttctctgggggctctccctgcgcttttcacctttcttggccttcaggtttc

SEQ ID NO: 179712 - DNA, 448 bp, Zea mays
  Clone ID: MRT4577_9547C.1
ggccacaagcccccataggttttccatataattggggggaaagggaacctggggccccccggggctgaaaaaaggggaaaggggtttacggggaaaaaataggaaaaaaggggtttgacaaccctcaaaggaagggggggcccaactcaaaaccaaaaactttaaaatggaattgacggaaagagactccttaagccggggaaccctttttaagcttggggaggttttgcctaaaaacaccgccccttttaattttcgccaggaaaactttgaacctaaaaaagggattgggggaggctttcctttttagaacaaaaaactttttgccccaaaagagggtttcccacttggggtacaaaaaaagagttccaccattgccttaataaggggagagctttttggggacaccctggaagccaaccttgatgggggaaaggaaaagcccctt

SEQ ID NO: 179713 - DNA, 206 bp, Zea mays
  Clone ID: MRT4577_95480C.1
aacatagaaatatatgtgtgtatataattttttcatgtacttcatgatttgtttatataactatgtatatataacgagagatcactttatagatgatgtgggcaacatataaatatgtgcgcatacatataggtttcctatgtgcttcgtgatttgtttgtattatcgagttatccctctttcgactggcggatgcgtcatctcaa

SEQ ID NO: 179714 - DNA, 308 bp, Zea mays
  unsure (1)..(308): unsure at all n locations
  Clone ID: MRT4577_95481C.1
ctacctcaactgccggcgcctgggcagaaggcctgctatatgctatcgccagatcaagaacaagccgtaccctaagtccaggtactgccgtggtgtccctgaccccaagacaggatctacnatgtcgggatgaagaggaagggtgttgatgagttcccctggggggggggccttgtctctagggagaaggagaatgtttccagggaggcgctcggggctgccctcattgcctgcaacaagtacatgaccaagtctgcgggaaaggatgccttccacctgagggggggggttcacccgttcatgtcctc

SEQ ID NO: 179715 - DNA, 732 bp, Zea mays
  unsure (1)..(732): unsure at all n locations
  Clone ID: MRT4577_95482C.1
gaaccgccagctctgccatcttatccttgcccatgaattgacgttcttggcgaccccatcaatctcctcgatttggatgtccacgagctcattgagttgttgctcctgcgtcctgagatattctggctgctgctcaacaacgcttcctgttagttccagaggcactgccaaggatctcccccttcatgaggtcatatatgcaggccctgaagttgtccatgctcttatgatcctgagagtcgaggcttaggaagatcagaatttcccagcaccggaggaactgtttcttcttttatcttcagcttctaacggatagtctccatcaggtcagccggtggaaccattctcaaactttgggccctttttgacaggttggtctccttcagagacgagacaatagcaccaagtgcaggtttgatcggatcaaacatgagcaaacagaggcagtcaacggatgatctcacatactgcagcgtgtatgacactcaaaaggccaccttagcttctactacaattgacaagtttttgccagatcaaatatactaccatgngttgtttgagataatttcaagctgccgcgtcccatgcactctgagtcaaagcanaaacggaggagccaatagttgatctggtcccttcctctcccttttcacctgcagcaccaccagccgcaaccgaacatgcgagcagctaccagtagtatgagccacagctgcattaggtgcatcaact

SEQ ID NO: 179716 - DNA, 349 bp, Zea mays
  Clone ID: MRT4577_95483C.1
ctctatcttctgcgactgcctagcacttactggtgacggcgtggttgccaatgccgggccatcgagcacccgatccccggatccgccttgccaccacccccttcccggagcgcgattccaccccctcttcacaccgatctcgacgatctttctgaattactcggggggcctaggactccatctattctgggttagcagcgttgttccggagcgctcgtaatgagtatcgacatagagggcctcggactctccggcggcgggggcggccgtcgaatgcacggaggacacatagacagattttctactaggggtctgggagatgctcaacgtaacctctcactcagggcga

SEQ ID NO: 179717 - DNA, 285 bp, Zea mays
  Clone ID: MRT4577_95484C.1
gcagcggctgccaagaacaggctccaggtcgttgagagccccccgccccatgagctctgggggcttcccatggcgagccccatcgccgccgcctatgacggaggcttgctcccctccctctccgtggccaacttcaaaaactaccaggaccgaactctctcgattctggaaagaagtgactacaccactatcagtgggagcccgcacataaagaagtcacggcggagaaacatatctagcttctcaatgtctagtcgaaatcaacgatcactccactgagttgat

SEQ ID NO: 179718 - DNA, 1688 bp, Zea mays
  unsure (1)..(1688): unsure at all n locations
  Clone ID: MRT4577_95485C.1
gatggaagtagcttttttaaaaattgaactaacaggccagattgaacgctaagagaaacatggacgggcaccaatcatttacaaaacgaggttagctgccaccaacaacccccttacatagtgcaggtttctgaaccgtgcaagtggtaagcccaagaagtacacaaatcagcaacaattggtaggagatactgggtttcatacatcagctaactttctgccaccaaaaagtttcaagacaccccagcgattcccagatgcaagcttgtccaacgcagccacctccataactgagctccaatcaccagattacaagctactagtttcatcagtcctcgctttcgtagtaggaacttgctctagttatgtagaccttgaactttgtttgctcaatcagctggaagaccaggcaatctccatccaccagcttctgctggacggcaaaccctctccatccagcactgagcccccgcttcattgcgaggtacagcgtgtcggactcgtcatcatcctcatccaccagggtgatcatctcgtcacgcttgggcagatacttccggcagaaatgaatcggaaggcccagccagaagcccccggtgacatgggactgggtcatgggcttgatgaagatggggaagctggagtccagctcttgctccagatcctccgccttagagatggcgtagctcctcgcatcgtcggtcgcgtacacccggttggtcagatctcttctcaccgatccgtacgtcctcctaatcttcatcccaaaatcgggaaccttctcgcggtacacgggcttatccgggaggttggcgagccggccggaccgccgtactggctccatcacggcgtcggcgacgtcgagaggcacccgcgccttccgcttcttgacctgcagtatgtgagatcatccgttgactgcctccgtttgctcatgtttgatccgatcaaacctgcacttggtgctattgtctcgtctctgaaggagaccaacctgtcaaaaagggcccaaagtttgagaatggttccaccggctgacctgatggagactgttcgttagaagctgaagataaagaagaaacagttcctccggtgctgggaaattctgatcttcctaagcctcgactctcaggatcataagagcatggacaacttcagggcctgcatatatgacctcatgaagggggagatccttggcagtgcctctggaactaacaggaagcgtctgttgcagatgccaaccagtttcaataaggaggcatcttttgctgtgtattggacacatgagattggggatgaggatgaacaaactgtttagcagcagccagaggatctcaggacgcaggagcaacagctcaatgagctcgtggacatccaaatcgaggagattgatggggtcgccaagaacgtcacttcacgtggcaaggataagatggcagagctggcggttcaatgaatctgggtgaggttcctacttcaaacgatgttaaaatgttgtcgtagcttatctggtgaggtctcttttacgagttggcttcttggtagaaagggaatgtcacggcataggcactgagtagattgtcacgacagattattatatacttcaattctggaatatttgatggaaatgctattttagattgcttggtnnanaaaaaaaannnaaaannannnnnnnnnnnnnnnng

SEQ ID NO: 179719 - DNA, 1500 bp, Zea mays
  Clone ID: MRT4577_95486C.1
gaactactctcaccattaactataacaaattttgtcaccaaaatttggtggctggtggatctacttaagaatcaaaagtcagacaaggtggacatcaccatccaaccggaggagcaggaagccatgaatgatgttctagcagccagccatgaccgcgtccacgtcatcaactttgacatcaagcaggggctacagtggccgggcctcctccagaaaaagaggaattgaagcagtatctgactcgaacatttttgtagaaaacttggtagaaaaagaggaattcctgcatacattttcgaaggaatgtgaatatatcagaactgcagtgacaaatggtagtgccattaagcatgatggctcatatgaatcagatcctgcagttgagattgttcgagttgaactccaaggtgctgctgcatttcttttattctcgtctggtacctcttgtacttcttctggttgaaggttccacgcctatatatattggagaacatggatgggaaatgcttctggtagtaaaaaaggcaacacaagaggctggttcaaaatttgaactgctaggttttgcatctgtgcataacttctatcattatcctgagagtattcgcttacgaatcagccagatacttgtgttgccaccttatcagggtgaaggccatggtcttggtcttcttgaagcaatcaattatattgcacagtctgagaacatttacgatgttacaatagaaagcccttctgattacctgcagtatgtgagatcatccattgactgcctctgtttgctcatgtttgatccgatcaaacctgcacttggtgctattgtctcgtctctgaaggagaccaacctgtcaaaaagggcccaaagtttgagaatggttccaccggttgacctgatggagactgtccgttagaagctgaagataaagaagaaacagttcctccggtgctgggaaattctggtcttcctaagcctcgactctcaggatcataagagcatggacaacttcagggcctgcatatatgacctcatgaagggggagatccttggcagtgcctctggaactaacaggaagcgtctattgcagatgccaaccagtttcaataaggaggcatcttttgctgtgtattggacacatgagattggggatgtggatgaacaaactgtttagcagcagccagaggatctcaggacgcaggagcaacagctcaatgagctcgtggacatccaaatcgaggagattgatggggtcgccaagaacgtcacttcacgtggcaaggataagatggcagagctggcggttcaatgaatctgggtgaggttcctacttcaaacgatgttaaaatgttgtcgtagcttatctggtgaggtctcttttacgagttggcttcttggtagaaagggaatgtcacggcataggcactgagtagattgtcacgacagattattatatacttcaattctggaatatttgatggaaatgctattttagattgcttggt

SEQ ID NO: 179720 - DNA, 1593 bp, Zea mays
  Clone ID: MRT4577_95487C.1
gaactactctcaccattaactataacaaattttgtcaccaaaatttggtggctggtggatctacttaagaatcaaaagtcagacaaggtggacatcaccatccaaccggaggagcaggaagccatgaatgatgttctagcagccaggtgacgcctgatgtctttgttcagttgatatagttgtctgattttttccttcttccaagttagaacggtctttcttgtacgtgtatttctacttcaccctcaacgaccgggtgctccgcgcgttcggcagccatgaccgcgtccacgtcatcaactttgacatcaagcaggggctacagtggccgggcctcctccagaaaaagaggaattgaagcagtatctgactcgaaaacttggtagaaaaagaggaattcctgcatacattttcgaaggaatgtgaatatatcagaactgcagtgacaaatggtagtgccattaagcatgatggctcatatgaatcagatcctgcagttgagattgttcgagttgaactccaaggtgctgctgcatttcttttattctcgtctggtacctcttgtacttcttctggttgaaggttccacgcctatatatattggagaacatggatgggaaatgcttctggtagtaaaaaaggcaacacaagaggctggttcaaaatttgaactgctaggttttgcatctgtgcataacttctatcattatcctgagagtattcgcttacgaatcagccagatacttgtgttgccaccttatcagggtgaaggccatggtcttggtcttcttgaagcaatcaattatattgcacagtctgagaacatttacgatgttacaatagaaagcccttctgattacctgcagtatgtgagatcatccattgactgcctctgtttgctcatgtttgatccgatcaaacctgcacttggtgctattgtctcgtctctgaaggagaccaacctgtcaaaaagggcccaaagtttgagaatggttccaccggttgacctgatggagactgtccgttagaagctgaagataaagaagaaacagttcctccggtgctgggaaattctggtcttcctaagcctcgactctcaggatcataagagcatggacaacttcagggcctgcatatatgacctcatgaagggggagatccttggcagtgcctctggaactaacaggaagcgtctattgcagatgccaaccagtttcaataaggaggcatcttttgctgtgtattggacacatgagattggggatgtggatgaacaaactgtttagcagcagccagaggatctcaggacgcaggagcaacagctcaatgagctcgtggacatccaaatcgaggagattgatggggtcgccaagaacgtcacttcacgtggcaaggataagatggcagagctggcggttcaatgaatctgggtgaggttcctacttcaaacgatgttaaaatgttgtcgtagcttatctggtgaggtctcttttacgagttggcttcttggtagaaagggaatgtcacggcataggcactgagtagattgtcacgacagattattatatacttcaattctggaatatttgatgg

SEQ ID NO: 179721 - DNA, 208 bp, Zea mays
  Clone ID: MRT4577_95488C.1
gccggcgcttccggttcttcctcggctttcgactccgcatccgcatccgccagcgccatacggctgagcgggctgggaccgaggcgccggcgcctggagaccgccgcctggcgccgccggaccacctccatctcgtcgcgccgccgcgccgcctcctcgtccaccacgaaccgccgcatcagcacgtcgtccgtcagcgacttgccgc

SEQ ID NO: 179722 - DNA, 812 bp, Zea mays
  unsure (1)..(812): unsure at all n locations
  Clone ID: MRT4577_95489C.1
cattgggaccctcgaggccggccgggataacaattttgtcccagtgaggattacatgattactgctcttttgggtgactatagttactggccaccctgatatttgatacaattgatctttttttatctcatgctaaagaaatttggtggctggtggatctacttaagaatcaaaagtcagacaaggtggacatcaccatccaaccggaggagcaggaagccatgaatgatgttctagcagccaggtgacgcctgatgtctttgttcagttgatatagttgtctgattttttccttcttccaagttagaacggtctttcttgtacgtgtatttctacttcaccctcaacgaccgggtgctccgcgcgttcggcagccatgaccgcgtccacgtcatcaactttgacatcaagcaggggctacagtggccgggcctcctccagaaaaagaggaattgaagcagtatctgactcgaacatttttgtagaaaacttggtagaaaaagaggaattcctgcatacattttcgaaggaatgtgaatatatcagaactgcagtgacaaatggtagtgccattaagcatgatggctcatatgaatcagatcctgcagttgagattgttcgagttgaactccaaggtgctgctgcatttcttttattctcgtctggtacctcttgtacttcttctggttgaaggttccacgcctatatatattggagaacatggatggggaatgcttctggtagtnaaaagggcacacaagaggctggttcaaaattgaactgctaggtttgcatctgtgcataactctatc

SEQ ID NO: 179723 - DNA, 594 bp, Zea mays
  Clone ID: MRT4577_9548C.1
ccggccgggaatctctaagcaattgctcgaggtcgctagttgacatgcacaacagggggaaaacaaaaatctaatctcccgaggagggagaggggttgaggagtaggcggcgctgaccgttattggacgcgcgttttccggggcctgccccgagctcgcagccgcctcctcgtcgtgctgctccgccctctacggacggtgaaaggaacatgttagttgtcgtccgagaccatcagacgatctctttcttttgttcgttctttctttcttaggaccagcgccggccatggcggggtcgagcagcgcccccggccagggccctagattagtggggcctcacccaatatattaaataacagtatatatatatatatattatatagatttatatgctaactttataaaaattttaaagacctaattataagtcaacaacacgatagtaataagcaaggataattaggcatagcctataaatcttgatttctatattctagtagtagtacttcatagtcaaagcccaaccatctaggctctcagcggacaacgagacaacgacgtttgacgttttatctctatttcttgcacagctgt

SEQ ID NO: 179724 - DNA, 2877 bp, Zea mays
  Clone ID: MRT4577_95490C.1
ggtggtcaactgccaaactgaacactaaaaatgaatccaacataaacgaggatcatttacaaaatgaggtcaattgccatcaacatccccttacatagtgcaggtttctgaaccgtgcaagtggtaagcccaagaagtacacaaatcagcaattggtagctactgggctgtgtaaacattttgtacatgagataactctgtaacccaaaaggttcaagacaccccagcaatttccagatgcaagcttgtccaatgcagcccacctccataaactgtgctccaaacaccacattacaagctattagtttcatcagtcctcactttcatagtaagaacttgctctaattatgattaccttgaactttgttacccccgggagttccaggcgaacccccactccctggttctgtgttctctcagtcagctggaagaccaagcaatctccatcaaccagcttgtgctggatagcgaaccctctccatccagcgctgaggcctcgcttcaatgcgaggtatagcgtgtaggactcgttgtcatcctcatccagcagggtgatcgtctcgtcacgcttgggcaggtacttccggcagaaatgatttgggaggcccagccagaagcctccggtgacatgggactgggtcatgggtttgatgaagacggggaagctggagtccagctcttgctccacttcttccgccttacagatggcgtagctcctcgcctcgtcggtcgcgtacacccggttttccagatcttttctcactgatccatacgtcctcctaatctttctccaaaaagttggaacctcctcgcggtgcacggacttatcggggaggttggcgagccggccggaccgccgtactggctccatcacggagtcggcggcgtcaagcggcacccgcgccttccgccggacgcgtgggatggcctcgaggccggccggaaccactcctatcaaatgtccttattttggagctcgcttcttccgccggcagccgaggtgcccgaacgcagctttcaaattcaccacttctttcccgcccacccactcccgcctttcatactcccgaaatctgaaaacccctagctcgctaacgaccccaggcagacgcgccgtcctcccctcccccatggcgctcaagcagaaggacaccgacgccgccgccgccaccgacaccggtaccaagaagcgccgccgcgtcttcttctccgacaccgatgctggtgttgaggcaaatgagtgtatgaaagtgtttctagtatggaatccaggcgaggtgagctctgtagactgcactgctattcagccatttgacctaaaccatttttttggtgaagatggaaaaatatatggttacaaaaatcttaagataaatgtgtggataagtgcgaaatctttccatggatatgctgatgtttcatttgacgaaacatctgatggagggaaaggaataacagatctaaagcctgttcttcagaacatttttggagaaaacttggtagaaaaagaggaattcctgcatacattttcgaaggaatgtgaatatatcagaactgcagtgacaaatggtagtgccattaagcatgatggctcatatgaatcagatcctgcagttgagattgttcgagttgaactccaaggtgctgctgcatttctttattctcgtctggtacctcttgttcttcttctggttgaaggttccacgcctatagatattggagaacatggatgggaaatgcttctggtagtaaagaaggcaacacaagaggctggttcaaaatttgaactgctaggttttgcagctgtgcataacttctatcattatcctgagagtattcgcttacgaatcagccagatacttgtgttgccaccttatcagggtgaaggccatggtcttggtcttcttgaagcaatcaattatattgcacagtctgagaacatttacgatgttacaatagaaagcccttctgattacctgcagtatgtgcgatcatccattgactgcctccgtttgctcatgtttgatccgatcaaacctgcactcggtgctattgtcttgtctctgaaggagaccaacctgtcaaaaagggcccaaagtttgagaatggttccaccagctgacctgatggagactgtccgtcagaagctgaagataaacaagaaacagttcctccggtgctgggaaattctgatcttcctaagcctcgactctcaggatcataagagcatggacaacttcagggcctgcatatatgaccgcatgaagggggagatccttggcagtgcctctggaactaacaggaagcgtctgttgcagatgccaaccagtttcaataaggaggcatcttttgctgtgtattggacacaggagattggggatgaggatgaacaaactgttgagcagcagccagaggatctcaagacgcaggagcaacagctcaatgagctcgtggacatccaaatcgaggagattgctggggtcgccaagaacgtcacttcacgttgcaaggataagatgacagagctggtggttcaatgaatctgggtgaggttcctacttcaaacgatgttaaaatgctgtcgtagcttatctggtgaggtctcttttatgggttggcttcttggtagaaagggaatgtttggttattgcactgtcatcgtagtgttagaaccaacacaagcataggcactgagtagattgtcacggcagattattatgtacttcaattctggaatatttgatgggaatgctattttagattgcttggtaagtggtaaccgcctcaaatcacagaagtagaaccagcttctgattcagccggaaccatttattgaattttatggtgatcactgattagtaatctgtttcctccccc

SEQ ID NO: 179725 - DNA, 262 bp, Zea mays
  Clone ID: MRT4577_95491C.1
agaacattagcttcactgtctgggatgtaggttgtcaggacacgatcaaacctctttcaagggattacttccagaacacccagggaattattatcattgaagacagctatgaccgtgaccatgctgttgaagacagagattatctccacaaaatgctgatctgttgatgagctacgtgatgctatgctgctcgtttttgccaacatgcatgatcttgccaatgccatgaatgcttgtgatattactgacaagcttgcattac

SEQ ID NO: 179726 - DNA, 1957 bp, Zea mays
  Clone ID: MRT4577_95492C.1
ggccgcttttttttttttttttttctgaacgctaagagaaacatggacgggcaccaatcatttacaaaacgaggttagctgccaccaacaacccccttacatagtgcaggtttctgaaccgtgcaagtggtaagcccaagaagtacacaaatcagcaacaattggtaggagatactgggtttcatacatcagctaactttctgccaccaaaaagtttcaagacaccccagcgattcccagatgcaagcttgtccaacgcagccacctccataactgagctccaatcaccagattacaagctactagtttcatcagtcctcgctttcgtagtaggaacttgctctagttatgtagaccttgaactttgtttgctcaatcagctggaagaccaggcaatctccatccaccagcttctgctggacggcaaaccctctccatccagcactgagcccccgcttcattgcgaggtacagcgtgtcggactcgtcatcatcctcatccaccagggtgatcatctcgtcacgcttgggcagatacttccggcagaaatgaatcggaaggcccagccagaagcccccggtgacatgggactgggtcatgggcttgatgaagatggggaagctggagtccagctcttgctccagatcctccgccttagagatggcgtagctcctcgcatcgtcggtcgcgtacacccggttggtcagatctcttctcaccgatccgtacgtcctcctaatcttcatcccaaaatcgggaaccttctcgcggtacacgggcttatccgggaggttggcgagccggccggaccgccgtactggctccatcacggcgtcggcgacgtcgagaggcacccgcgccttccgcttcttgaccagcgagggcttggcggcggcggcggcctctctgatggcagcagagaggtggtggagctgcagctcctccagcttccgtttgttcgcctccacctgcctccgccgctgctcctcgtacggcgtcgcttccgccatctctcttctctctcccgtctttgtgtatattgttattgctgcagtatgtgagatcatccgttgactgcctccgtttgctcatgtttgatccgatcaaacctgcacttggtgctattgtctcgtctctgaaggagaccaacctgtcaaaaagggcccaaagtttgagaatggttccaccggctgacctgatggagactgttcgttagaagctgaagataaagaagaaacagttcctccggtgctgggaaattctgatcttcctaagcctcgactctcaggatcataagagcatggacaacttcagggcctgcatatatgacctcatgaagggggagatccttggcagtgcctctggaactaacaggaagcgtctgttgcagatgccaaccagtttcaataaggaggcatcttttgctgtgtattggacacatcagattggggatgaggatgaacaaactgttgagcagcagccagaggatctcaagacgcaggagcaacagctcaatgagctcgtggacatccaaatcgaggagattgctggggtcgccaagaacgtcacttcacgtcgcaaggataagatggcagagctggtggttcaatgaatctggggctagttgatcgaggtcgggactcgatgtcaacgagagcatggttgaactcatggagttcggatagattcaaggatggaaagctccatgcttgatggcggcacattgaacctcaagggcgcgcagcatggcagccaggcgccagggcctttcggtgctttttcgttcttcaaatccataggctatataaaacataatactccctctgtttataaatatatgacaccgttattttttttaaaagatttgaccactcaccttaatttaaaaaaataatgagctatcatttatttgaattttatattttaaataaatattttgaataagatgaagtttttg

SEQ ID NO: 179727 - DNA, 885 bp, Zea mays
  Clone ID: MRT4577_95493C.1
ttgggaccctcgagggcctcgcggggagacgggcccggttcctaacacgaccaaactttgtgccgccgcctcctgtttgcacagaggggaagagagagagagagacggaaagggggagatgagccggagcctggggatcccggtgaagttgctccatgaggcagcgggtcacgtggtgacggtggagctcaagaccggcgaagtgtaccgggggtccatggtcgagtgcgaggataactggaattgccagctcgagaacattaccttcaccgccaaggatgggaaggtttcgcagctggagcacgtcttcatcagaggaagcagagtgagatttatgattatacctgatatgctcaagaacgctcccatgttcaagcgcttggaagcgagaattaggggcaaaggatcagctattggagttgggcgtggacgtgcagttgcaatgcgtgctcgggctgcttctggtcgtggtggtggtcctgttgggcgaggcagcgcgcctcctgtgaggaggtagattttatggtgtcatggggcttttcttgtctggctgaggatgttgcagtctgatgttaggacgctgtcttggtagtcaaaactgccgtaatgtataattcaacggcttaaggagtatgagtgtgcaacctcttattgttgaatgtaatgtgttgacggtggttgttttccttgctctattcggatggctggaccaaaaaatatcatgtgttctcgtcgacaaaaaaaaaaaaaaaaagcttttgtcttagtcctgcaggtttttttttgtgtagatgttttgatttgtcataaactcatgatacatgtacctgagcctgagtatttcttctctcgataaggtgatatggtacatatgctacacgggtg

SEQ ID NO: 179728 - DNA, 376 bp, Zea mays
  Clone ID: MRT4577_95494C.1
ctcggaggggtcctcctctatcttggcgagcacgttttcgacaataatctcatggccgccgcgcaggccatcatggaccaggtcttcggcagctagaatacgagtgacttcacgggcgccgatccaaccgcgctgcctttaacctatacacctataacgtgggagaccagaaccaggacatccagaccaaggactatgccgacggggaggacgcgggggagatgcgcaagctgttccggcagaaagagcccaagaagaaccacgactactactaacatgggccgggcgggtgctggttcaacaaggcaccagttgcggagacgaggatcttctccccagtcttctggttcaaccgataagaacgcaatcactggag

SEQ ID NO: 179729 - DNA, 726 bp, Zea mays
  Clone ID: MRT4577_95495C.1
tgggaccctcgaggccggcctgctcgtgccgcctccccctgtttccacgagctggggttttagcggcgaaaagagggaaaagaaagccagcgagagagacggaaaggggaagatgagccggagcctggggatcccggtgaagttgctccatgaggcagcgggtcacgtggtgacggtggagctcaagaccggcgaagtgtaccgggggtcattggtcgagtgcgaggataactggaattgccagctcgagaacataaccttcactgccaaggatgggaaggtttcgcagctggagcacgtcttcatcagaggaagcagagtgagatttatgattatacctgatatgctcaagaacgctcccatgttcaagcgcttggaagcgaggattaggggcaaaggatcagctattggagttggtcgtggacgtgctgttgcaatgcgtgctcgggctgctgctggtcgtggtggtggtcctgttggacgaggtagcgcgcctcctgtgaggaggtagattctaaatggcggcttttctcgtctggctgaggttgttgtctgatctcaggacgctgtctcgtagtaaaaactgtcctaatgtaaaattcaacggcttaaaggagtatgcaacctgtgattgaatgtaatgtattgactgtatttggtagcttgcatacagtcttttccttgctcaaaaaaaaaaaaaaagggcggccaccgacaagagagctc

SEQ ID NO: 179730 - DNA, 462 bp, Zea mays
  unsure (1)..(462): unsure at all n locations
  Clone ID: MRT4577_95496C.1
tgagcattcagaaacacaccaagcgaagctacctagcaacgacttaacaacaatggctaccaagatattagccctccttgcgcttcttgcccttnttgtgagcgcaacagatgcgttcattattccacaatgctcacttgctcctagtgccattataccacagttcctccgaccagttacttcaatgggcttcgaacacctagctgtgaagcctaaggctcaaaagcgctggggaggctacacaccataacaatgaacacaatctggcattacatcaacatgacacacagacacagtcacacatgacatgagggactgcctatgacaaggtgtcacatgttgaagctgtcacacacacatgaagttgaggtatatactggactcctacaaaacactgtattacttgtggatgctctctacacatggcatgcattgtatgtggaactgtcatgaatgtataca

SEQ ID NO: 179731 - DNA, 430 bp, Zea mays
  unsure (1)..(430): unsure at all n locations
  Clone ID: MRT4577_95497C.1
gcattcagnaacacaccaagcgaagcacattagcaacaactctaacaacaatggctaccaagatattatccctccttgcgcttcttgcgctttttgcgagcgcaacaaatgcgttcattattccacaatgctcacttgctccaagttccattattacacagttcctcccaccagttacttcaatgggcttcgaacacccagctgtgcaagcctataggctacaacaagcaattgcggcgagcgtcttacatcatccaatttccccgttgcttctgcattccttggctcatttaacactgcaaaccatggctgcgcagctgcggctgctgttcctgccggctctgtgcctcctgggcctggttgaaccctgccgcctgcttgctgcggagtttggttgcgtgattccagcttggtctgggcgtcgtgggtg

SEQ ID NO: 179732 - DNA, 321 bp, Zea mays
  unsure (1)..(321): unsure at all n locations
  Clone ID: MRT4577_95498C.1
aaggganncaccaaagagggggngaagaacaagaagnaccnngcagnngcngggccagaggagggngcccagacccggcnggnncaggccanngaggcnnnnggngggaagngcaacccngaggcgccgaaggaggnncccgnngnccncaaagcccncaacgaaggagananccnggacgaggaaaccanngnggacnggnacaangangcngncgcagcngggaaggacncccaggnngncaagaangccaagcacgncgncgaggggcnccagagngccgagncngangaagaaggngacgacgagngaagaagccac

SEQ ID NO: 179733 - DNA, 488 bp, Zea mays
  Clone ID: MRT4577_95499C.1
caacaaatgcgttaattataccacaatgctcacttgctcctagtgccatcattccacagatcctgccaccatatacttcaatgggcttctagcacctagctgagcaagcacaacatgcaacaacaagctgctagcggcgagcgtcttacaacagccaattgcccaattgcaacaacaatccttgccacatgtaacaatacaagtcatcacaacgcaacagcaacaacagttcctaccagtactgagccacctatacatggtgaaccctgccgcctacttgcaagatcagctgcttgcatccaacccacttgctctggcgaacgtagttgcagaccaaccacaacaaccgctacaacatattctgccaacgctcagacaactagccatggcgaaccctgccgcctacctacaacagcaacaactgctttgatctataccgctagctgcgggcaatgcacctacatacctgcaacaacaattgttgcaac

SEQ ID NO: 179734 - DNA, 1110 bp, Zea mays
  Clone ID: MRT4577_9549C.1
aagaagctaaggcaccttttagctgacaggtttgctgatgagaagcagacggagttcagatatttcatcggagtggaagcacctaaaggtctgttgaacctggaagaactacagactcttgaaacagtgcaagcgagcaaagacttgcctgaacagctgaagaaactgatgcaactcagaagcttatggatcgacaatgtaagcggtgcagattgtgataaccttttcgcgactctttcaaccatgccacttctttccagcctcctaatctccgcaagagatgtgaatgagacactttgcctccaagcccttgctccggaatttccaaagctccacaggctaattgtaaggggccgctgggctgccgagacactggaatatccaatattttgcaaccatgggaaacatctaaaatatttagcgcttagctggtgtcagcttggtgaagatccattgggggtccttgctccgcacgtgccgaacctcacctatttgagcatgaacagggtcagtagtgcaagcactttggttctttctgcagggtgctttcctcacctgaaaacactcgtcctgaagaaaatgcctaacgtcgagcagctggagattggacatggtgctcttccatgcatccaaggtctgtacatcatgtccctagcgcagctggataaggtccctcaaggcatcgaatcgcttctctccctcaagaagctttggcttctgtacctgcacgcggagtttagaacgcagtggctaacgaacgggatgcaccagaagatgcagcatgttcctgagattcgtgtctaggacacaggaaagccagatggttatttctgcagtactatgctggtatatatggtgtgtctgtgaaaaaactattttttgtaccttttcttcccttaagtcctgagttgttgtatgtggacttcacttgcagacacaaacgctcgctttgggtagctcgttagacccatatatatacgtgttgtgttggttcagttgctttaagttacttgtttgttcgaggcatttgccttctgtattgaacttcatgcaaatgatgttatgatcaaacttgtatgtccatgtattttaaatttttttacatgcctc

SEQ ID NO: 179735 - DNA, 1102 bp, Zea mays
  Clone ID: MRT4577_954C.1
ccggggtgagtgtgagtcagcctctcgatctgggttgggttttggtctataaaataccccggcctccatctcttctctgggttgtggttgtggcctcctatccttgcacgcacacgcaaacgcatcccatcctgtcctcgcgttactactagttagttagagagagacagagaggatcgatctgctggcggcgtctaagctggagaaaggcggcgccaccgccgagggcgacgagataggcatcgacccagcggcggagactccggagcagcgcaacaagttcctggtcctccgcctgtacgaggcgctcaacgcccgggaccacgccgccgtgcagtcgctgctggcgcccgacctggagtggtggttccatggcccgcccaagcaccagcagcacatgatgcgcctcctgacaaccaccaccaccaccaccaccggcagcttccgcttcgtgccccgctccgtggacgccctcgccgcctcgtccggcaccgtgatcgccgagggccacgagaggggttgctactgggtgcacgcctggaccgtgggacccgatggggtgatcacccagctccgtgagtacttcaacaccgacctcaccgtcacccgcctcgccgccgccgtcgccgccaagtgcgtctggcagagccgccgccccgacagcgccaccaactccctgccgggactcctgctcgccctctgatcactctgagggataaattaaataccatctctatctatatactacgtatcatccttgtcgtcgtcagtcagtcagtgcaaccgtgtgtatgtatctatctatgtatctacgtattgtatttgtatcccatccatggccgtatgtcactattatatatatacagtattacagtatatctcatcaaaaaaaaaaaaaaaaaaggcggcctagtgggttggttgttagactggactgttgtgcttgtgcgggcgcgttgttgtggtggtgttttttgttgtttttctttttcttggctttgcgattgattggtttaacatgtagtgtagcgcgtcgcgcactttgtttttttttgtttttttttactctcgccttatcttgtaactgtcgtcaccccaaaat

SEQ ID NO: 179736 - DNA, 289 bp, Zea mays
  unsure (1)..(289): unsure at all n locations
  Clone ID: MRT4577_95500C.1
tctccttantcatcctccaccaggtacaaagggtgtggtcatctcttctccggggaggaacccctattctcccaccanatcacttgtttaactttgttgaggggtgatggcgttttttttcgcaaaccttaacacctagtcagttcttaaaaagcttgatgagtaccttcttactctcagctacatcactgtctaccaagcttccaaggatgacttggctgactacacttcgttttcgtctgctccctcatccaagtatattatacttatcacgtgttgtttaatctca

SEQ ID NO: 179737 - DNA, 1800 bp, Zea mays
  Clone ID: MRT4577_95501C.1
tggggcacgagcaagtcgccgtcgtcttctgcggttcctgcccgtctacgccctccaatttggcctctctcccttgcaagtttaagcttcatcttcagccatgggtaaggagaagtcccacatcaacattgtggtcattggccatgtcgactctggcaagtcgaccaccaccggccacctgatctacaagcttggaggcattgacaagcgtgtaattgagaggtttgagaaggaggctgctgacatgaacaagcggtccttcaagtatgcttgggtgctcgacaagctcaaggctgagcgtgagagaggtatcaccattgatattgctctgtggaagtttgagaccaccaagtattactgcaccgtcattgatgcccctggacaccgtgacttcatcaagaacatgatcactggtacctcccaggctgactgtgctgtccttatcattgactccaccactggtggttttgaggctggtatctccaaggatggccagacccgtgagcatgctctccttgcgttcactcttggagtgaaacagatgatttgctgctgcaacaagatggatgcaacgactcccaaatactccaaggcgcgttatgatgagattgtgaaggaagtctcatcctacctcaagaaagttgggtacaaccctgataagattgcctttgtccccatctctggttttgagggcgccaacatgattgagaggtccaccaaccttgactggtacaaaggcccaaccctgcttgaggctcttgaccagatcaccgagccgaagaggccttcagacaagcccctgcgtctccccctgcaggatgtgtacaagattggtggtattggaactgtaccggttggtcgtgtggagactggtgtcatcaagcctggtatggttgtcaccttcggtccaactggcctgactactgaggtgaagtctgttgagatgcaccacgaggcacttcaggaggctcttccgggtgacaatgttggcttcaacgtgaagaacgttgctgtcaaggatctcaagcgtgggtttgtggcctcaaactccaaggatgaccctgccaaggaggctgccagcttcacgtcccaggtcatcatcatgaaccaccctgggcagataggcaatggctatgccccagttctggactgcctcacctcacacattgctgtcaagtttgctgagctcgttaccaagattgataggcgatccggcaaggagctggagaaggagcccaaatttctcaagaacggtgatgctggtatggtgaagatggttcccactaagcccatggtggtggagaccttttctctgtatcctccccttggtcgatttgctgtccgtgacatgaggcaaacggtggctgtcggagtcatcaagagtgtggagaagaaggacccaactggagccaaggtgacgaaggctgctgccaaggtgacgaaggctgctgccaagaagaaatgatctatctggctggtgctgtgcttgcttgttggttacctcgtggaagcttaaaatatctcgtcttgttgacatccttgcagttgtcgcgtgaacaagtaatctatgatggcaatgtttgcctggtcatgaagtattattactttcgttgaaaccgtgatgctattaagacttaattttttttatggaacatcgaatgtaaggcatacatggttatgagttttgtactacccttgttgcagtgtgttcctgtttaccttttgtgctgatgattcgcttgtctttgtgtcttaaagttaatcttgcacttaaatgtttttaatatgccagatcgtttc

SEQ ID NO: 179738 - DNA, 402 bp, Zea mays
  Clone ID: MRT4577_95502C.1
ctcttttaggcggcgggggcggggagccagaggtgactgtgaaatctatcttcatataccctattaagacctgcaggggggttgccgtggcacaggcgcccattgcctgcactgagctaagagtagatctggtagcaatgagggcgaacgccaaacgatgatcgtacacgcagagggtggaaccaaagcttgctctggataggccggatctctctcgtatgtctaaccttacaactggtggttaatgctcgactaccacttggatatgagagaaccagcattggacacactggctagactgtcttataacagaacaatacattcatgaggatatctcagcatgtgatatgcgagagtaaacttatgaggaaaatgcattagcggctcttaaacttggcactt

SEQ ID NO: 179739 - DNA, 493 bp, Zea mays
  Clone ID: MRT4577_95503C.1
cctccctttttttttttatcgagataaatctcaaggaatatattgattatttctaggaaacacatgtcggtatgagggcaccattgtcagtcatctattgtctaaaagatggcacctccaacgatgggttgctgcaaggcagggttcatcaaagagaactggttgaatggcagcaattgttgttgctgctgcaggaaggtagcgaccaatgggttagccactgtcaatggattaagtaacttgtgtcgctgttgtaggtacgcagcagagtttgacacagccagttggtgaatggaagcaactgttgtaagtaggcagcagggattgtcacagttagcttattcagaactggtacaattttgtgcagcaactgttgttgtttgtacgtaagggccatgcccaccgtgagcgggctagatgaaagtagttgtacgtagacggcaaggttcaccatggcttgttgactgagcactggcataaactgttgcaactg

SEQ ID NO: 179740 - DNA, 635 bp, Zea mays
  unsure (1)..(635): unsure at all n locations
  Clone ID: MRT4577_95504C.1
accatccttcttccccctccccgcactcaatcctagccggcggctagccaccagtgtcgcccatcttcctcccccgctgcctttaccttccctccccttcccccacctccacccgccaccaccttccgccgcgaggctgcatataacagcttgtagggattgacaccnccctgatcgacaggttcgagaaggaagccgatgagatgaacaagtgctcgttcaagtacgccctgagtgcttgaacaagctgaaggccgagcgtgagaggtgcatcaccattgatattgccctgtggtagttcgcgaccaccaagtactactgcaccgtcattgatgcccctggacaccgtgacttcgtcaagaacatgattactggcacctcccaggctgactgtgctgtgctcatcattgactccaccactggtggcttttgaggctgctatctccaaggatggtcagatccgtgagcacgccctcattgctttcactcttgaagtgacagagatgatctgctgctgcaacaagatggataccaccactcctaagtactccaaggctcgctatgaagaaattgtccaggaagtctcttcgcacctgaagaaggtggctacaaccctgacaaggttcccttcctcc

SEQ ID NO: 179741 - DNA, 408 bp, Zea mays
  Clone ID: MRT4577_95505C.1
cagaaacacaccaagcgaagctacctagcaacgacttaacaacaatggctaccaagatattagccctccttgcgcttcttgccctttttgtgagcgcaacaaatgcgttcattattccacaatgctcacttgctcctagtgccattataccacagttcctccgaccagttacttcaatgggcttcgaacacctagctgtgcaagcctacaggctacaacaagcgcttgcggggagcgtcttacaacaaccaattaaccaattggaacaacaatccttgggacatttaaccattcaaaccattgcaacacaacaggaacaacaggttctaccaacactgggcccacttaatgtggggaaacctggtggcttctttgaacaacaaggggttgtgttcaaaccacttggtt

SEQ ID NO: 179742 - DNA, 364 bp, Zea mays
  Clone ID: MRT4577_95506C.1
tctgttccagatagtgatacagcaggtagctcgagcgagaatgagccaggagcagccgaggaggccgtccggccatgaggagacgagcggcggcggagagcagggcgccgtccgctacggcgacgtgttcccggcggtgagcgggggcctcgcggagaagcccgtggcgccgcaggacgcggccacgatgcagtcggcggagaacctggtgttcggccagacgctcaagggcggcccggcggcggccatgcagtccgcggccaccgccaacgagcgcatgggcgccgtcgggcacgaccaggccacggacgccaccgccgtgcagggcgtcaccgtctccgagacccgcgtcccgggcggtggt

SEQ ID NO: 179743 - DNA, 284 bp, Zea mays
  Clone ID: MRT4577_95507C.1
aaagccgcttgatgccccatgatttaaacagaatgcaattgcggtttctaaaaaaacaaagaggggacccaaaaaaaaaagagggaacgcgaaaataacccagttttttgtatttacccaacaggtcaacttaactcacttggcattacaagggggtcacaaccgattgggttggcctgggaatgctttggcaaacgatttttacagggggcccggacttccacaggaatggggggtgcccccagtttttttaattaccagcccctttagctttttccaggctt

SEQ ID NO: 179744 - DNA, 495 bp, Zea mays
  Clone ID: MRT4577_95508C.1
tcaagcggccgcccgggcaggtcaacaatggctaccaacatattacaccctccttgcgcttcttgccctttttgtgagcgcaacaaatgcgtacattattacacaatgctcacttgctcctagtgccattattccacaggtcctcccaccagttacttcaatgggcttgggacacctagctgtgcaagcctacaggctacaacaagcgcttacggcgagcgtcttacaacaaccaattgaccaactagctgtggtgaaccctggcgcctacttgcaacagcagctgcttgcatccaacccacttgctctggctaacgtagctacataccaacaacaacaatggcaacacattctaccagcgctcagccaactagccatcgggaaccctgactgctacctacaacagctacagactgctttgatctagccctcttgctgaggctaatgcacctacatacctgcgggcacagttgctgcgacagattgtactcttgt

SEQ ID NO: 179745 - DNA, 788 bp, Zea mays
  Clone ID: MRT4577_95509C.1
acttgcatctcagcgactgtcgttctgtgactccctccccccctctgtttcgtgtgaggtcgctctcccgccacccgtgatcagagagacgtgccgcactcaccagttagcgtctataggccacgttcattccgtctcgtctacccccacgggacacctgatctaccacctaggaggcattgacacgcgcgtgtatcgagatgtatgagaacgaggctgctgaaatgagctgctgctgctgcccgtcacgatcggtgctcgacaagctactcggctgaccgagtatacaggtatcaccaacgatatctatctgcggaagtgagagaccacccagtactactgcgcagtcattgatgcccctgcacaccatgacttcatctacaacatgatcactgttacctcccagactgactgtgctggccttatcattgactccaccactgtgtggatgtgaggatggtatctccaaggatggccagacccgagaacacgctctccttgcgtgcacccttggagtgaaacacatgatttgctgctgcaacaagatggatgcaaccactccaaaatactccgaggcacgttatgatgagattgcgaaggaagtctcatcctacctcaagaaagttgggtacaaccctgataagattgccttcgttcccatttctggttttgagggcgacaacatgattgagaggtccaccaaccttgactggtacaaaggcccaaccctgcttgaggctcttgaccagatcaccgagcccaagaggccttcggacgagcccctgcgt

SEQ ID NO: 179746 - DNA, 564 bp, Zea mays
  Clone ID: MRT4577_9550C.1
aggaaatagccatggattgtccaaagcaaatcaagatcacatacactcgaaacgcaagatcacagaagcttactaaacaatatcttcttgctaaaacccacaagaaggggaagcccgtgaaaaatcaatgatgagaagagtggtaacacaatgagcaagagcacccataactacaaacacatggaaaatctgatggctatgtcccgccatatcaaacgctccaggcttccatctctcaggcacacggctgacataaaacgttgctcccacaaaatacgacaaagccgtggcaatctcgtaaccgagggcgatgaagacattagggtgatcccagtaaaggcaaagcacatgtgtagcaggtatcacagcagatgatcccattgcaaggaaaagattagctctgaaaggtctaaaacgcggcgtaaagagagcgggagagaggagagtgatgatagcgaggagaccgaggatcgagatcgaggataagtagagtaaacggaagttagggtggcaggagaatgcgtagtaaattggtgcaaagaaagaagcgacgatcataagtga

SEQ ID NO: 179747 - DNA, 387 bp, Zea mays
  Clone ID: MRT4577_95510C.1
atcgagtaaattcatcaatatattgattatttttaggaaacacatgccgcttgagggcaccattatcgagtcatctcatatgtaatctaaaagaggcaccaccaacgatgggttgctgccacgacaaggcggggttcatcaaagagaactggttgtatggcagcaattgttgctgctgtaggaaggcagcgaccaatgggttagccaccgctagtggattaagtaactgttgtcgctgttgttggtacgcagcatagttcgacacagtcatttggttgaatggaagtagtcgttgcaagtaggcagcagggttcgccatcattagctgtgtaagagctggttcaatttgctgcagcaactgttttctgtaacaactgttgtttcagg

SEQ ID NO: 179748 - DNA, 496 bp, Zea mays
  Clone ID: MRT4577_95511C.1
cggggtgtgcccctgccttcacatgctagcttagatcagagggttgccgcatgccgcagttgtgatattcgagtgcataccacacgcgagactgggtttgaagccgggggccgggatatatgcttgccctactgcgacaccatcgaggggacttagatacacgcgcaggtcgtcgccctagctagggccgcgttgatggtgaccagctccgcggcatcgtacgatgtcctcagctgctgtgcacgtcagaacgccttagctgttgatgagctaagccttagtatcaatggcgacgtcgatcagcaccgtctctgcgtcaacatctagcttgatccccgacgcggaggacgttgatgtctagatgatgaaagacaccataaaatttatctggaagggactcttgtctattatcaaggatgctgctgccccctctatgtgcgagcattgttataagatagaaacctaacacgcactacaattcttgtatagtggggag

SEQ ID NO: 179749 - DNA, 129 bp, Zea mays
  Clone ID: MRT4577_95512C.1
accaactacctgcgcccggacatcaagcgcgggcacttcacccccgaggagcacaactctatcctccagctccacgccatcatcggcaacaggtggtccacgatcgcggcacagctgccgggccggacg

SEQ ID NO: 179750 - DNA, 1185 bp, Zea mays
  Clone ID: MRT4577_95513C.1
gtttctctccttctagcaccactgccacctcgcgaccggccgggctagctcacctccatggatagccacggccacgtctctggcggcaagcgcaagggcaagcgcgcccgcaagccggagccgccggtactcgcctctcccgacaacagccacgaccacaagcaccacgacaccgcaccatcctcctcgcccctctccaccgccgccgtcgcggcgtcagactccccggaccccgagccggcgtcatcctccccagctccccgccgccggggccgcaagtcccgccgcatccgcaacgggacccactccgaggtcgatgccgccccctcaccctcgcctccgccgcgtcggggcgggcctaagggggcgccgaacggtgcggtggacgttgcggagccgtctcggcgggagctggcggttaagatggtggaggttcccgcggcggtggagcccctgcgttgggaccaggtggtgaaggtggtgccgtcgatggacgccgtggtgaaggtgttctgcgtccacacggagcccaacttctccctgccgtggcagcggaagaggcagtacagctcgagcagcagcgggttcatcattgggggccgtagggtgctcactaacgcccactcggttgagcattacacccaggtcaagctcaagaagcgtggctcggacaccaagtaccttgcgactgtccttgccataggcaccgagtgtgacattgcaatgttgaccgttgaggatgatgaattctggaaaggcgtttcacctgtagagtttgggtcgctgccagcacttcaggatgccgtcactgttgttggttacccaattggaggcgatactatctcggtgactagtggtgtagtttctaggatagaaatactttcatatgttcatggttctacagagcttcttgggttacagatagatgcagctataaattcaggaaattcaggggggcctgctttcaatgataagggaaaatgtgttggtatagctttccaatctcttaaacatgaagatgcagagaacataggctatgttatacccaccccagttattaaccacttcattgaagattacaaaaaatctggagaatacacaggtttccctatacttgggaatagaatggcaaaaaatggaaaatcctgatctccgcaggccaatgggaatgaaaactaaccaaaa

SEQ ID NO: 179751 - DNA, 452 bp, Zea mays
  Clone ID: MRT4577_95514C.1
acaatataaaacaatgggtcgtttctcttttttttttccctctaaatcaaaaccaaaacctgcatgctttccacccttacctatacaaaatcttattacaccttctccaaattatcctcataacttcttttcttaaaaaaaaaaaaattcattcacaaattcatacaacattcgaaccttaagcaaaaacataaaacccaaaaatccccaaagagaaaattaactcacattaaatacctttcactaatttccccccttccagtcctaaaacccatttttcccactgccttaataaaccatccaaaactcgataaaacttccttttcaaatatattaccaacatctcttttctcttaaccaaaaaaaaattcaacaaatgaattccctcatcttcctttccctacaaaaaaacctcaaaccctccacccctcttttccccaacaacctaaaaa

SEQ ID NO: 179752 - DNA, 273 bp, Zea mays
  Clone ID: MRT4577_95515C.1
tgtagatcgcgagcggccccccttttattcttattttttttcgcacgatgacactgagtatatttcacaggcatgtggaagagatcccctagccttacgacagggtgccacagaggattagtagcagtgtcccaatgtcggcgtgtgcagcaacacacgtagtctcctcgggtgtcagagtccacaacgagacattgctgacatataagccccgtctggtttatgatcccgacgcggggattgactgcgtccaggctgccagtactttgccgc

SEQ ID NO: 179753 - DNA, 162 bp, Zea mays
  Clone ID: MRT4577_95516C.1
ccgctgcaaacgccaacccaatttcgaagttctaaacatctattgccgggataaaaattctccatatgaatctcctcccgaattcgagcttcaggaacacctagataaaaggagggattagacctatgccagacaaagctctcaccaaattcctggaccata

SEQ ID NO: 179754 - DNA, 677 bp, Zea mays
  Clone ID: MRT4577_95517C.1
ccggccgggagctcgacgcatcttcgccgccgctcaaccttccccccacgccccaacctatccactcgaaaccttctttcccccgggagacgattcgtcagggagaggaaagaggcaagaggggccatggacgctgccaagttggtgacgccgatcgctgtgtctcacattctggcgcacccgtcggcgggctccgacggcgcagtgaccgatctcgtcgttcaggtcctcgacctgaagtccgtcggcacgggcagccggttcagtttcacagcaactgacgggaaggataagatcaaggcgatgcttcccaccaacttcgggtcggaggtccgctctggcaacctgaagaacctcggcctcatccgcatcatcgactacacttgcaacgtcgtcaaaggcaaagatgacaaagtcttggttgtcatcaaatgcgagcttgtgtgccaagcgcttgacgccgagatcaacggcgaggccaaaaaagaggagcctccaattgtgctgaagcctaaggacgaatgcgtgggcgtgactcccccactcgctatgaagcccaagcaggaggtgaagtctgcgtcccagatcgtgaatgagcagcgtggaaatactgctcctgtcaagcccctttccatgacaaagagggtccatcctttgatcactctgaacccctacca

SEQ ID NO: 179755 - DNA, 737 bp, Zea mays
  Clone ID: MRT4577_95518C.1
aaaaaaaaaaaaaaaaaaaaaaactgccctccttcccttggcttcttatctagtgcttcatgcatggttaagtgaagctacccccttgcccttaggctctagccaaagcttgctgtggagtgtggtgattcttggtcttcaagtcgatgttaaccctctcccagccaccaactttgctctgcccttgtgctgtgcgtgccatctcccttgtttggtgaccgcgtcggctagttttcaccctcaccgtggccagggcgtctcaaggagttgcttgctcgtgtgatgcttgttccctactctctttagaacaccaagaagaaatggtctttgaagaaggagcctgctctccagtgctgttgatccagtagttggttccatctaactggttatcgtgatagaagatctggaatctcctcctgtaataaggagatccttgggaatgatgagttcgagctgatgaactcgatagccttgttaagttacccccgtgcacatgtatagacatctgagaccaatatgagaaatgttggtgcatgtgggtccgataacttaggaggtctgtcacacatggtgtcattgaaaggcttatgagttgggtgtcaatttcaaaacctctcgttccaaatgctccagcaataatggaagaataaagccctagaagtgttgtgctggtaaaaaaaaaaaaaaaaaaaaaaaaaaaaaaaaaaaaaaaaaaactcgaggaagggcgccggtac

SEQ ID NO: 179756 - DNA, 675 bp, Zea mays
  Clone ID: MRT4577_95519C.1
cggacgcgtgggcgcgcgcgtccagcgtgcgcagaggcagcgtccctccctctgtcgtgcgtggcggtggcgccccctccctctcgaccacgtgagcgggtgtgaggcgagagatagacgatggttgactgcctcgagcatcgaagagcggggaatccaagggcgagatgatgatccagtttgtgttgttcatcaacaaacagggctagacacggctagggcggtactacgagcacctccatcgacgagcgacgagccctcgagggtcagatcgtccacaagtgcctcacccgcaccaactggcagcgatgagcttacttgcggaatagctggttatgattaccagtctgttaggagatggacaacattcaagaggctgggttatggccttgtcgagtgtgagaaaatctttgttccagtgcatagaaatgcacattggtgcacatagatatgacaatgcactggttccggatggccttccctatgaaattgttggagttgagccaggttatatatggtttcagccaaacctatcctggcgaattttcagctctatgtgcagttactcgatcttattattgttgaaatagaagtgtgctccatttacaaagagctctacaggtatggcctctataatgcatgagatgtgaaggacaatatcagagagcttatgaa

SEQ ID NO: 179757 - DNA, 332 bp, Zea mays
  Clone ID: MRT4577_9551C.1
gggcaaatattggggtcaaatgattcagccttttataacatcaaactggttcttgactgtttttagcagtgcaaatttaacagtttttcaaaccagagcggttagagaactgcaaagcacaatgtgtttttttattttaaatgacagggtgcgttttaccaaaacaattgcctttttgcattgtaacagcgggctttccaggtttgcttttttcccaggagttggccatgtttgcagcttaggagcatgttttgaaaatttaatgtttaccattacagggcagctttaacaatttttttgtgtagagaatgtgatcaatgcaaacaccaccc

SEQ ID NO: 179758 - DNA, 277 bp, Zea mays
  Clone ID: MRT4577_95520C.1
cggtcgcgtgggcggacgcgtgggcggacgcgtgggcggacgcgtggggcgctgaacgagtggctcttttttaatcacaactcaaatattttatcttttggtcttttttatcttttgggaaagttgactttctaaaagcgatgtattcttttactttggagagcacagaaggagggaaatggggtataagaggacggttgccggtgcggatgggattacaacttccaggtagctgtcaggttatagatcggcattaatgaaactatgtggccctttc

SEQ ID NO: 179759 - DNA, 356 bp, Zea mays
  Clone ID: MRT4577_95521C.1
agccgcggcgttattgccgggacccacgcgtccttcgttcactcgtccgagcacgcgtgcaaggcttgctgtgcgttaaggacggctgatgcggagtgcacaagtacgcttttcacagagaggtgatggtccgactactttgactggaagactctctggcctcaaggcaggtcttcatggacttcatgggcacgctcttggagacgacacgcgcggttgcatggcgcattggccacacttaagttctgatgggaaggatcatgtccaaccctgagattggacccgcactggctgatgacattggcaatgtcacagctggagcagatggagtagtgactgagacccatactgagaga

SEQ ID NO: 179760 - DNA, 231 bp, Zea mays
  Clone ID: MRT4577_95522C.1
gccggctcttatacgactactataaggaaagctgccgcgctccgcaggctccgaatcggaataatgagaggtgtactagctatctagtctgccggcagctgtcattcagaagaccagtgagccttggggaccttctggcgttcgacgcagcacacatggagtctgtcacgacagtgatgaccagagtctggaacatcactagttcattgctggagctgactacaagtcgct

SEQ ID NO: 179761 - DNA, 309 bp, Zea mays
  Clone ID: MRT4577_95523C.1
cccatccaaatcattgttcaccattttcgaatccggatccggacgaatttttttcaaaccattttacatccttacatgtggccataccctacttctagttcagttcaagctaggccttggggcccacaacaaagcaggacagattggccctggggttgaacaccagcagtttttccaggttggagaaaaatcccaccgaccccaccaccgacttatgctccttgtcgtcggggtcggcctcctcctttgccgctgttctttttccttgggccactacacccttcctgtaacgttgtccttgagccgaat

SEQ ID NO: 179762 - DNA, 409 bp, Zea mays
  Clone ID: MRT4577_95524C.1
gccactgtcaccggcatgaagcgcagccttcgggccatctacacgacggtggacggcatcctcgaggagatcatcgcctagaggaagggcatccgcgacgagaagatcagcggcggcgcggagaacgttgacgagaaccttgtggacgtgctcatcggcctccaggggaaaggtggctttggattccaccttgacaacagtcaaatcaaggctatcatcctggacatgtttgccggaggaacggggacatcggcgtcggccatggagtgggggatgtcggagctgatgcggaacccctccgcgatgaaaagactacaagcagaaattcgcgaagtgctccgagggaaggcgatggtgatcggggcctatatgctagcaggcaaccttcggtacctgaagatggtgatca

SEQ ID NO: 179763 - DNA, 431 bp, Zea mays
  unsure (1)..(431): unsure at all n locations
  Clone ID: MRT4577_95525C.1
aaggcacagcaggggaccaacaacggcagcgaaaacagacagcccccggacgcgccggggccanggcgcaagcgcggccacggcgaccacgggcccacaacgcacacaagcgccgagagcgaggctaacagcagcggaccgcgcaccaacggcgncggggggaggggaaaacccaacgcgccaacccgacaggagccaacaggcagccgcagcgggcagcggaccgcaagcacccgggggcccccaacaaccaccagccccaggacagcagggaccgccggcgcagggaggggcacaaaacaccagggcacaacaacgacaacaacgcgagcgagcaagaccggcagccgacgcccagcaacagcagacgcggccagncaaccaaccagcggcanggaacgcgggcgcggaagggcaacaacaacaaccac

SEQ ID NO: 179764 - DNA, 493 bp, Zea mays
  Clone ID: MRT4577_95526C.1
gaaataaggtaagaaggttataggttcggtatcaagaacaaaacatcaagtacaagaccaagtttgtaactagatcttccagaacgtgcaaatgagtgtcaacttcctcgtgtcgctcttgaaaaagaattggcagaatgtatgttcctcaatgttcctcacatctgtataaaattaatgcttatgttctaaaatatgactatccactgggctaactgtcatcttgtgtgtttgcaggtgagatgcttgtacctgaagagcactatgggaaaggtgtaccggctgttctaaattttccaattaggcttagaatttccaggagactcgagtgcttggacacttgccattttccctaccatccattttttttgagcaactatggattaactagttaaaaacttggtcttgtactggatgttttgttcttgataccgaacctatgaaattggtaccttatttcaaaaaaaaataataaataaaaaatttggggcgg

SEQ ID NO: 179765 - DNA, 840 bp, Zea mays
  Clone ID: MRT4577_95527C.1
gatccgcgcggcacttaacctgaacattcttgctctacccacatcacataattgacgctctgagccctgcttttgtttaacaccgatagatccgtccatcagcagcatggcattcaggtcttgtctagtacggctgctgctccctatggcagcactgcttctgctctccaagatcttcgcggcgaaaggcctcgacctcaaggacctggccgtgctctccggcgcgcacaccctcggcacggcgcactgcccgtcgtacgccggccggctctacaacttcagcagcgcctacagcggcgcggacccgtccctcgacagcgagtacgccgaccggctgaggacgcgctgcaggagcgtcgacgacacggccacgctctccgagatggaccccggcagctacaagaccttcgacacgagctactaccgccacgtcgccaagcggaggggcctcttccagtccgacgccgcgctgctcgccgacgccaccaccagggagtacgtcctgcgcatggccaccggcaggttcgacggcgtgttcttccaggacttcggcgagtccatgatcaagatgggcaacgctggcgtgctcatcggtgctgctcagggggagatcaggaagaaatgctacatcgtcaactaactagctagttattatatatacaagctagctatactacgaaagcttttaatttgtttgtttgccgcaacggaattgtagcttgctgtattaattaatcaatcagttctctacatatgttatttgcatgcttatgtatagcctattattaatggacgatagactataatatataaaaaaaaaaaaaaaaaaggggcgccccc

SEQ ID NO: 179766 - DNA, 402 bp, Zea mays
  unsure (1)..(402): unsure at all n locations
  Clone ID: MRT4577_95528C.1
aaagcggcacgggcannccanncaaggggggcaaaagcagccnaagggcacgaagaaggggaaaaccaagaacggacaaggcnangcccagggagagggggcagccnnccccgacanaaagcaggcgaaccngcggccccgacaggacccggagggcacgccggccaccgngagcagncggacggcgagagggacgngggggagncnaaggccanagaacggcggaggaggggaacggcggcgagganggagncccngcgggcgaggccgcanncaaggcggcgcgccagcggggccgacgccnngggcgncgccgccggccancggcccgacgggcgcgcggncncggcccccggcacgggggagacgcccnnccggcgccccggcgngggcccccggcgc

SEQ ID NO: 179767 - DNA, 628 bp, Zea mays
  unsure (1)..(628): unsure at all n locations
  Clone ID: MRT4577_95529C.1
ggnctatagaatcaatttgagttcagtttgttgatattaaaggaaagatcaggattcatacttaaatacttaacaaggattcatacttaaatttatctgatgcaatttttcaactgaacgtgaacttggcaggggtgagtacggagtagtgtacaagcgagttctgcattgagctgtcgtagagagcgtagacagacactctagccaacgttgttggctgggattggaacacaaaagcgagacaagggatgagaagcacaggaggagccaggtgaggtgaggtggcgacacacaggagtcgggcaagctcagctcatctcatctcatgctctactaaaaaggattagcccatctcaagagaaaagagtaacattgtcagcccactgcaataaccacactattaccagtcttgaaattcactttttgtttgtttgtcatagaaccagggattcatgacaggaaatgatctccttctcaagataagaaaattgcatttaagttactaatcagtgtatggtttactagtttggcggaggcctcaatccgggtctagaccaaggtcatggtggcgacgaaagtggaggcccgagtggagggtgatgcttccactctcagtcttggggtgggg

SEQ ID NO: 179768 - DNA, 271 bp, Zea mays
  Clone ID: MRT4577_9552C.1
tatttatggaggtaaacgaccacagatactagaaacagtgacatctggaagctctgtatctctagctagcttgcaacataaattaggctaaaatgaaacccagggatgtagatatgaacttgtacaagatttgagatattttttttgcaacatatcgaactggcgatgttgcagagcaagtttttgctgcactagaaaatgctacaggaacttagggcccagaggaaatgaaagccttactaattggtgctcaaacactaaaaataaccaa

SEQ ID NO: 179769 - DNA, 1685 bp, Zea mays
  Clone ID: MRT4577_95530C.1
ccaggagaagccgacgcgccgccaccgtatccgcggatcagcggcgagccgtaaccacgccacactgcttgccgcccgacgagcagggtaacagtttccttcagccatggggaaggagaagactcacatcaacattgtggtcattggccatgtcgactctggcaagtcgaccaccactggccacctgatctacaagcttggcggtattgacaagcgtgtgatcgagaggttcgagaaggaggctgcggaaatgaacaagcgttcattcaagtatgcctgggtgcttgacaagcttaaggctgagcgtgagagaggtatcacaattgatattgccctgtggaagttcgagaccaccaagtactactgcacggtcattgatgcccctggccaccgtgacttcatcaagaatatgatcactggcacttctcaggctgactgtgctgttcttatcattgactccaccactggtggttttgaggctggtatctccaaggatggccagacccgtgagcatgctctccttgctttcacacttggagtgaagcagatgatttgctgctgcaataagatggatgccaccacacccaagtactcgaaggcccgttatgatgaaattgtgaaggaagtctcttcctacctgaagaaggttggatacaacccagacaagatccactttgttcccatctctggttttgaaggtgacaacatgattgagaggtccaccaaccttgactggtacaagggcccaaccctgcttgaggctctggacttaatcaatgagccaaagaggccttcagacaagcccctgcgtctcccccttcaggatgtgtacaagattggtggtattggaactgttcctgtgggacgtgttgagactggtatcatcaagccgggtatggttgtcaccttcggtcctagtggccttacaactgaggttaagtctgttgagatgcaccacgaggctctccaggaggcccttcctggtgacaatgttggcttcaacgttaagaatgttgctgtgaaggatctgaagcgtgggtatgtggcctccaactccaaggatgaccctgccaaggaggctgctagcttcacctcacaggtcatcatcatgaaccaccctgggcagattggcaatggctatgccccagtgctggactgccacacctcacacatcgctgtcaagtttgctgagcttgttaccaagattgataggcgatctggcaaggagcttgagaaggagcccaaattcctcaagaacggtgatgctggtatggtgaagatggttcccactaagcccatggtggtggagaccttctctgagtatcctcctcttggtcgctttgctgtccgggacatgaggcaaacggtggctgttggagtcatcaagagcgtggagaagaaggacccaactggagccaaggtgaccaaggctgccgccaagaagaaatgaggtgtctgtctggctggttctgtgttttctcgatggatacctagttgaaacttaaaatttatcgtcattgctgctatcgacgtgagcaactaaactgtgctggcaatgtttgtctggtcgatttagtattgttattttcgttaaaaccagggtactattaagactcaatttctgttaatttttgtatcgaacatcgggtgttggccatatgtggttatgagttttgttactaccc

SEQ ID NO: 179770 - DNA, 670 bp, Zea mays
  Clone ID: MRT4577_95531C.1
ccggccgggactttcacttctctccctcgtcccggccggtcctccatggtcaatcgctcgatctgaaggaggaggaggcggcggcactccaaactttagcgacatggcaatgcggttggcggctgcggccacgttcgtgcggcgcctggcgccggcgcgcccaccagtacgcatcctgggcggtctacggcgcagtgagtgcgggcacaaaccaagcgcgcggttcaagggctccttcggcaacgcacggagaagaagattgagcgcatcaagaccgcgtcgaggtgccccgctccacaccctggcccctccccttcaagcttatctgagttggagactccctcccccctcggttcgcgagggcacctagggtttactgcaacagttgctgctacttggccgtttccaattagctgcaaccctgcatgggcgtgtgtttgctttgttttaacttgtttctcaattgtgtggtgttagatatgtactgtcgaactgctgtagttcaactttgacccatgcaatatccttttggatggaagtgaaatatgtttcttccaaaaaaaaaaaaaaaaaaatggatggaagtgaaatatgtttcttcccatcattttgttattgtatgcaaactggaaaataattctgttctttatccgcaaaaaaaaaaaaaaaa

SEQ ID NO: 179771 - DNA, 416 bp, Zea mays
  Clone ID: MRT4577_95532C.1
gcggggtaactgagtgtaacccatcaccatgggtggaagtgttagcattgaactgtatgaatcattatggttgaatggatgaacgatggcataaaatgttgcggctggtgttgttgctggtatgtagctacgttcgccatagcaagtgggttggatgcaagcagatgctgttgcaagtaggcgacagggttcaccactgctaggtggttcagtgatggcagaaaatgttgtcgttgttgtgttgcgatggtttgtagggttagatgtgccaaggattgttgttgcaattgggcaattggttgttgtaaggcgctggccgcatgcgctagttgtagcctataggcttgcacgggtggatgttctaagcccattgaaggaactggtggtaggaactgtgaaataatggcgctaggggc

SEQ ID NO: 179772 - DNA, 585 bp, Zea mays
  Clone ID: MRT4577_95533C.1
gggtgttggttttttttttttatttttttttcgaggaaaatctcaatcaatatattgagtatttttaggaaacacatgccgctatgaggggaccattatcgagtacatctcatatgtaatctaaaagatgggaccaccaacgatggggggggggcggacaatgtatgttcatcaaagagaactgggtgtatggcagcaattgttgctgctgtaggaaggcagcgaccaatgggttagccaccgctagtggattaagtaactgttgtcgctgttgtaggtacgcagcaaagttcgacacaggcagttggttaaatggaagtagttgttgcaagtaggcagcaggggttgccacagctagctgagtaagagctggtacaatttgttgcagcaactgtggttgcgacaactgtggttgcaggtatgtaggggcattgcccatagcgagcgggctagatgaaaaaattgttgctgttgtagggaggcgataggggtcaccatgggtagttgactgagcgctgggagaaactggggcaactggtggtgggggtgggatgcaactacgtgttgccaaagcaaggggggttg

SEQ ID NO: 179773 - DNA, 601 bp, Zea mays
  Clone ID: MRT4577_95534C.1
gagcaacaagaatcattaagaaaccagaggaaattgcaggttggtactggtgcccgatccgagaagataaggacgtacaactacaaggataacagagtgacagaccatcgcttaaagatgaactttgagctgacaagcttccttttaggagacatcgaatcggctattcagtcttgtgctacgatggagcagcaggagctgttggaggaaatggccagttccgtgggcgcagtaaacgtatgattcaggcaaattcggcgttgaggccaggccatcaaactgaaccgcgaaactcatgacgtgctcggactcggtgaagatgattgatagctgtacatgaagaaaactgacaagatgaactccccccataggaactttttttccccctgtagtccgcagggtacaacacacacacccatgcatctcagcttccttgacggcagcagagttactagaaaatatacatggtttgtgcagttcaacgcttcaactgctccagtattcacagtttaatgcattttaggtatattgctccagtttctcaacaaatcactgcttgcaattaaatctacagaacaaaaaaaaaaaaaaaaaagcggcc

SEQ ID NO: 179774 - DNA, 333 bp, Zea mays
  Clone ID: MRT4577_95535C.1
ctcacttgctcctacagccattatttcactttttctccgaccagttacttcatggggctgggaacacctagctgtgcatgcctacaggctacaacaagcgcttgcggagagcgtcttacaacaaccaattaaccaattgctactacaatccttggctcatctaaccattcataccatctcaacacaacatcaacaacagttcctaccagcactgatccaactagatgtggtgaaccctgtctcctacttgcaacagcatgtgcttgcatccaacccacttgctctggcaaacgtagctgctataccaacaacaacaacaattgcaacagtttc

SEQ ID NO: 179775 - DNA, 278 bp, Zea mays
  Clone ID: MRT4577_95536C.1
attttgagcattcagaaacacaccaagcgaagcgcactagcaacaacctaacaacaatggctaccaagatattatccctccttgcgcttcttgcgctttttgcgagcgcaacaaatgcgtccattattccacaatgctcacttgctcctagttccattattccacaggtccttccaccaggtactttaatggccttcgaacacccaagtgggccaggcttttaggttccaccaggcgatggcgggaggcgtttaacaccacccaattgcccaattgca

SEQ ID NO: 179776 - DNA, 551 bp, Zea mays
  Clone ID: MRT4577_95537C.1
ggccgggaccttcctccccaactcgccgatcgccttctgcggttctgccgtctacgcctccactttggcctctctcccttgcaagtttaagcttcatcttcagccatgggtaaggagaagtcccacatcaacattgtggtcattggccacatcgactctggcaagtcaaccaccaccggccacctgatctacaagcttggaggcattgacaagcgtgtaatagagaggtttgacaaggaggctgctgagatgaacaagcggcccttcaagaatgcttgggtgctcgacaacctcaaggctgagcgtgagaggagtatcaccgttgatattgctctgaggaagttttatatcaccaagtattactgcagcgtcgttgatgcccctggacaccgtgacttcatcaagaacatgatcactggtacctcccaggcagactgtgctgcccctatcattgcctacacaactggtgcgtattgaggatgcctatccccaacgatggcaagaaccgcgagcacagttctcctagcgcaaaaactagcaagcgaaacaaa

SEQ ID NO: 179777 - DNA, 644 bp, Zea mays
  Clone ID: MRT4577_95538C.1
cattgggtacctcgaggccggccgagctcccaactctccgactgacttctgagcctccatttcggactgctgtcccttgctggtccaatctcacctccaaccatgccgaaagagaagtcccacatcaacattgtggctattggccacgttgactgctggtaagtgcgaccaccacaggacacctgatctacaagtttgcaggcattgacaagtgtgcgatctcagaggcttgataaggaggctgctgaaatgaacaagcgctccttcaagtacgcatgggtgctcgacaagctcaaggctgaccgtgagagaggtatcaccattgatatcgctctgtggaagtttgagaccaccaagtactgctgcacgtccattgatgcccctgcacaccgtgacttcatcaagaacatgatcactggcacctcccaggctgactgtgctgtgcttatcattgactccaccactggtgctgttgaggctgtcatctccaaagatggccagaccctgttaacatgctctgccttgcgttcacccttggagtgaaacagatgatttgctgctgcaacaagatggatgcaaccactccactatactccaaggcacgttatgatgagattgtgaaggaagtctcatcctacctccag

SEQ ID NO: 179778 - DNA, 247 bp, Zea mays
  Clone ID: MRT4577_95539C.1
agctcacggtaggcccacggggctggacaggctgaagccaccattgggctcgaggtccaggggtcgtcagcatgattatttgttctttctcccggaccctaactcctacctcccatagagtgtatttttacccctaattcctgtctgaataagccagggcggcagacactggtcccacacctttcccagccacaagcctctcattttcagggtaggcagcaggactcaggtctcttgccttgagatc

SEQ ID NO: 179779 - DNA, 373 bp, Zea mays
  Clone ID: MRT4577_9553C.1
tcgaggcatcgaatcgcttctctccctcaagaagctttggcttctgtacctgcacgcggagtttagaacgcagtggctaacgaacgggatgcaccagaagatgcagcatgttcctgagattcgtgtctaggacacaggacagccagatggttatttctacagtactatgctggactaaactattttttgtaccttttcttcccttaagtcctgagttgttgtatctgggcttcacttgcagacacaaacgctcgccttgggtagcttcgttagacccatatatgtgttgtgttggttcagttgctttaagaatacttgtttgttcgaggcatttgccttctgtattgaacttcatgcaaatgatgttatgatc

SEQ ID NO: 179780 - DNA, 484 bp, Zea mays
  Clone ID: MRT4577_95540C.1
aaatatattttgtcggacggataattcaaggcctacaccagaaggaataacctaccccttgtgcggcaggccaacagctctctccatctctctctgcagtgttatttggtttactatatgcaattgcaggggagaaaactaaagaaccgttcactgcagttagaagcagcaactgctgtagccgcagcaggcttcttctacagtattttcggtttggaagttgcatgcggagagagacttttgtgtttacatctagttgacctttaaatctgcagctatgttataggtcaaaaaatcatcagttaacaggggcaaggacttgccttgatgacacagttattttggtctatctttcacttctcctgatatttaacttttttgagtaagtgtgcagattaggtcttaaaaagggattgggattaatattttattgccagagcttgagctgtataattatccatttacacagtgggctgtacagggg

SEQ ID NO: 179781 - DNA, 495 bp, Zea mays
  Clone ID: MRT4577_95541C.1
atatcgagataaatctcaatcaatatattgattatttctaggaaacacatgtcggtatgagggcaccattgtcgagtacatctcatatgtaatctaaaagaggcacctccaacgatgggttgctgcaaggcagggttcatcaaagagaactggttgtatggcagcaattgttgttgctgctgcaggaaggtagcgaccaatgggttagccactgccaatggattaagtaactgttgtcgctgttgtaggtacgcagcaaagtttgacacagccagttggttgaatggaagcaactgttgtaagtaggcagcagggtttgccacaactatctgagtcagagctggtacaatttgttgcaacaactgttgttgtaagtacctaagtgcattgcccaccgaaagcgggctatataaaaataattgtatgtagacagcaaggttcaccatggcctaattaactgagcactggcataaactgttgcacctgctgttgcta

SEQ ID NO: 179782 - DNA, 212 bp, Zea mays
  Clone ID: MRT4577_95542C.1
gcgcgccttcctttttttttttttttttttttttttttttttttatgaagaacatgtgtccgaaaattgtagagagagaacatacagaggttctagcgagaaccacaaaacaaaagaagggtctgaccaagggccaaccaggttccagtattgtaaaatctggcagaatgacgcaatctggaaccattagagcccaccaggacaacaacagg

SEQ ID NO: 179783 - DNA, 551 bp, Zea mays
  Clone ID: MRT4577_95543C.1
aaatctcaatcaatatattgattatttctaggaaacacatgccggtatgagggcaccattgccgagtacatctcatatgtaatctaaaaaaggcacctccaacgatgggttgctgcaaggcagggttcatcaaagagaactggttgtatggcagcaattgttgctgctgcaggaaggtagcgaccaatgggttagccactgccaatggattaagtaattgttggcgctgttgtaggtacccagcagagttcgacacagccaattggttgaatggaagcaattgttgtaagtaggtagcagggtttgccatagctagctgatgagttagagctggtacaatctgttgcagcaactgttgttgtaggtacgttggtgcattgcccacagtgagcggtctttttgtaagcagtttttggttgacggttggtttctccatggttagttttctgagcgctggtttttactgttgtagtttgttgttgttgttgttttgtttcttcttttccttgtctttggttttctgttttttctttcttttttttttttgtttt

SEQ ID NO: 179784 - DNA, 268 bp, Zea mays
  Clone ID: MRT4577_95544C.1
aaaaaaaaaaaacagaaaaaaaaaaaaattaaataaaaaaaaaaaaaaaaaaaaaaaaaagaaaggataaaaaaaaaggggcggccgttttaaagatcccaatttaacttccccttccttccaacttaataccttttttatagggccccctaatttaaattcattgcccgttttttaaaaacttcttaactgaaaaaaccttggctttcccaaattaaatccctttgaaaaaaatccctttttccccagttggcttaataccaaaaag

SEQ ID NO: 179785 - DNA, 768 bp, Zea mays
  Clone ID: MRT4577_95545C.1
gccggccgggccgcactcatcaccacactgaaacttcatctcccttaatatttccactattcagaaacacaccaagcgaacggcactatgaacgagctaacaacaatgcttaccaagatagttacccctccttgggcttcttgcccttttacagagggcaacatagatgcgtgtcattatacccacagtcggtcacattgatccgtagcggcatgtattccgcagtctcctgcccacacagtgtacatttaatggggcttctaacatccaggcgtgaaaggctataggctacaactatggcttggggggagcgtcttacaacaaccaattgtccagattgcaacaacaatgccttggcacatctaaccctacaaaccatcgaaacgcaacaacaacaacattttgtgccatcactgagccacctacaagtggggaaccctggcgcctacttggaacagcagctgcttgcatccaacccacttggtctggcgaacgtatgtacataccaggaacaacaacagctgcaacagtttatgtcagcgctcagtcaactagccatggtgaaccctgccgtctacctacaactgctttcatctagcccgctcgctgtgggcaatgcacctacgtacctacaacaacagttggctgcaacagattgtaccagctctaactcatcagctagctatggcaaaccctgctacctacttacaacagatgcttccattcaaccaattgactgtgtggaactctgctgcgtacctacaagag

SEQ ID NO: 179786 - DNA, 405 bp, Zea mays
  Clone ID: MRT4577_95546C.1
gccggccggtcacgaacacctttcgttacatagaaggtatcgcactccctttcgccttcgaatcctccctggagcggtcagaaggcaactgtggcccgcacgggctctggactcttcgatctctgacgtacgacctagtacgcgctccgatgccttcgctcagtgcaatcgactaccagtggccggaaaccagcgagaacccgatggtgaaccaggcgtccctcggggaggccgttcaagccggtctttcggttcaagaggagaccacgtgaggagatggattggcgacaaggtggatgtgtctttttatgtcgccttctacagtaaaagatgacggaataaaaccccctctagagcaatctagaacatcatcggcaacaaaaaaaaaaaaaaaggaccctatgt

SEQ ID NO: 179787 - DNA, 266 bp, Zea mays
  unsure (1)..(266): unsure at all n locations
  Clone ID: MRT4577_95547C.1
gccggccggatcggaccgttcacgcgctcagttcttggcacagagccaaatttttctccactcaatcactgcagccatggacgccagcggagccggtagcaaggcgaagaagggggcggctgggcgcaaggctggcggccccaggaagaagtcggtgtcgcggtccgtcaaggccgggctgcagntccccgccggccggatcgggcgctacctcnngaaggngcgggacgngcagcgcgtggctacccttccccccccgtttatct

SEQ ID NO: 179788 - DNA, 622 bp, Zea mays
  Clone ID: MRT4577_95548C.1
ttggccgcggcgggcctgggctcgccgtcgttggtggagccccggaagttgtagtacttgggtacagcggggtcgtgctccaagaagcggtacaggttctggttcccgtcctcgaagtcgttctccctgaagacatggtggatgaagtgcttccttgccagctccttgccgatctccacagccttcttcctgctgcagtccaggtggttcacgatgccgtccaccatgtcggttccggagaagcagttcttgacgagcttcaccctgacgaacctgtcctggatcggcaggcggtggcggagcaccctgacgatgcccaccatggcgtcctcggcctcctcgtccgccttgccggcgtcgtcgtcgaacccgtacacgggcacgcgcggcgccgagtcggggcaccggcggcccgcgaggtcgcgcacgcggcgctcgaactcgccgccgttgcgcagggagttgagcaccacgaggccgcccagcagcttctcgttgaggaagatctggggcacgcgggccgcggcgcccgcgcgggagcccagctcggcctcgcgctccgggaacacgtccaggttgacctccacgtagggcaggccggactgccggaagaatgcgcgca

SEQ ID NO: 179789 - DNA, 178 bp, Zea mays
  Clone ID: MRT4577_95549C.1
cctgccgtaaccgtgcctcatttacaggggcgacccacgctttcgtttttgacttagtaaggtttcttgtgggaagtttgttgccaatcaggggtaagcttttatattctgagttaatggcgcacaactacgttctcaccggggaggtggaaggcgtactcaactgccacagcaacgt

SEQ ID NO: 179790 - DNA, 342 bp, Zea mays
  unsure (1)..(342): unsure at all n locations
  Clone ID: MRT4577_9554C.1
atccgactccgccgaggctgttcttcgtcgccacatctgtctccatccactccggctgttgacggcatcctcagatccggatttccccccttcgcttctgacacttggaccacaaatcttgccttccttagcacctccgagtccgacgtccagtcgaccagtcggcctacatgacgactgcatcccgggctctaaccgctccacacgtgacgacgtgacacgtcggtgggggtctcttcgtccgagaagtgctgcagagtagtatagcagcagcagatgcagccagggctacggtcgcggncgccagtcgccgtcacaagcaattagtcgcacggtcagtcg

SEQ ID NO: 179791 - DNA, 498 bp, Zea mays
  Clone ID: MRT4577_95550C.1
aaaacgagcaatcgcattccattttccattcagggaggacaacacgcccgaaatacccaaataggcccggcataaaaaagcccccaccaccatatacttaaaacattacaacgacgaacagcagcagcgcgacagcaaaagccctctcccccctgatgcggggggcgagctggatgtcctggggcatgaaggggaccctcttggcggggatggcccaaaggttggggtcctcaaaaagccccaccaggaacccctccggggcctcctgaagggccgccacggccgaggactggaaccgaaggcccgtcttgaagccctgcgcgatctcacggacaaggcgctggaaggggagcttgcggatgaacagccccgggctcttcgggaacttgcggatctcgcggagcgcgacggggccggggcggaagcggggcggttttttcaccccgcccggggccggggccgacttgcgcgccgccttgggggccagctgcttccggg

SEQ ID NO: 179792 - DNA, 109 bp, Zea mays
  Clone ID: MRT4577_95551C.1
gctgaactagtttgtctgtccgcatccagtggaagtttggtgccctttagcaatcgtattccatggctaaagggcaccaaacttccactggagcgacagcaaatagttc

SEQ ID NO: 179793 - DNA, 347 bp, Zea mays
  Clone ID: MRT4577_95552C.1
cttgtgttgttttttttttttttttttttgttttttttgttgtttgtttgttcccttgttattttttttttttttaccgcggtgttgtgcttttttttttgggttgaaaaaaccccccccccgccttttttagaaaggcccaaacgggttgttccccccggggggggcgtttttttttccctaagaaaaaaaaaaccccgggagggccctccttaaaaaggggccggcggggtaccctacctgtttctattctagagaaccctccaaaaccaaggaggtggatgcttggggtccccaaacaaggggtttgggcccaccaccccttcccaatattgggggggcccccc

SEQ ID NO: 179794 - DNA, 2722 bp, Zea mays
  Clone ID: MRT4577_95553C.1
acgtggcttcccgaccaaccgccgtggtcccctcactcgcggacactctccgggcgcccaccacctccgcctcttccgccgccgtgtgtgccggcgacgatgccgcgcaaggcctcctccaactcagatgcgcgggccaagtcgcggaagcggaagcgcgccgccgccagcgcctccccgtccaagcagccggacgaccactcagacgactccgacaccgccgcggcggcgaacggcgacgatgagacgtcccgcgcagcatccgttaacgggggcggaggaaccctagccggcgtcggcggcgatgacgaccccgtgctcgaccttcgtgcggcggaggtgctctcctcctccgccgagcccgtttccgccttccccgccgccgtccgccgtgccgtgagccggcctcacccctcggtgctggctgtaatcgccgccgagcgtgcggcggccagttctgacgatgctccggtcaccccagcctcggtacccgttctcgagaatatttcgcacgggcaactccaggtgatctcggcgatgctgcccgaccatccgtccctgtcctacgaccctgacaagccgtccacgtatgtctgcaccccacctccactgatggagggatgcggagtgcacaaacagttctatgacaaacttcacatcgtgcccaggcactcagattggtttgtgccacagacagtgcacaggttggagaggcaggttgtgccacagtacttctctggaaaatctcaggggcaaacaccagagaagtacatcatgttgaggaacaaggtgattgcgaaatatttggagcgacctgggaaaaggcttgtgtttgctgagtgccaggggcttgtcacaagcacacctgaattgtatgatcttagtaggatagttaggttcttggaatcttgggggatcattaattaccttgcaacagggtcagtgtaccgtggcccgaggacggcatcatctctgatcaaggaagagacaacaggggagcttcagctggtctctgcaccaatgaaatcaattgatggtttgattttgtttgatcggcccaaatgcagtatccaggcaaatgatatatcttcgttggtgtcaacttcatctgctccatttgtggttaatcatgacggtgattcagcaaatttggatgagaagatttgggagcgcttatcagagagttcttgtagtttctgctcacaaccttcccacgcgtccgactatgagtcacaaaaggagacagacattgctctttgttcagactgcttccacaatgcaaaatttgttactgggcattcaaacttagattttcagagagtggatgcgatgaaagatggatcagacactgatggggacagatggacagatcaggaaactttgctgttgttggagggcatagaaaagttcaatgataactggaatcatatcgcaggtcatgttgggacaaaatcaaaagcacaatgtattcaccatttcattcgtctcccggtggcagatggtttgttagagaacattgaagtgccagaagcatcccttccatctggaatgcaaagcagtggatttttgcattcagattccaatggcagtacttcaggtagccaacctggaaaccagattccattcattaattctgctaatccagtcatgtcactggttgcatttttagctgctgaagtaggaccaagagttgcagcatcctgtgcaagtgcagcattatcggttttgacaagggaagattccaggatgaatgcagaaggcattgatgctatgggccatggtactcatctcaactatggaccctcatcatccatttcttctgaaactgtgaaaaatgctgcaagctgtggcttgtcagcagcagcaacaaagtccaagctttttgcagaccaggaggagcgtgaaattcagagattatctgccaccatcataaatcatcagttaaagagactggagttgaaactgaagcagtttgcggaggttgagacaatgctcttgaaggaaagtgagcggttagatctgatgaggcagcagctggtaactcagcgtatccggatgttatcaacccggttcacttccacaggtggtacaatacctggaggcagcagcggtatggtttcaaacctgatgaatcaggccagcggccttagaccgccgctgatgatgccaggctcggtgacccagtccagcatgccggcaatgtatgcaaataacatgcaggggcatccccagatggctctgctgcaacagcggcaacagatgctctcgttcggacctcgtttgcctctctcggccatcaaccccggctcatcctcgtcggcacccaacatgatgttcaaccatggcatgcccaactcggcagctcctaatcatcaccctttgctgagatcaccctcaggggacaattcaaatgtaggttagtgagatgagtttttcattttttgggtcttagattcctgagctgtagcccttgactcgtgatcattaaccattgtaattcgattgcacaatcacatatagaggttgttaccagcgataggttctcattttctcttaggctgtggaccgtgtgtgcgtgactgtttgctcggatgagattgatgttgctagtggcttaggcgatgcacagaggatgtagagtttctttcaccctgactaattgttattactgcgccaccttagaatgatgtaaaaaatgaatccgcatgaattcccccttctt

SEQ ID NO: 179795 - DNA, 299 bp, Zea mays
  Clone ID: MRT4577_95554C.1
ttcggcacgagagtacatgtgctcgggccccggcgcgctgccgcacaagcggatcggctggtcgctcgtgctcaacgacgcccaggccaagcccttcaccggcatccacttcatctttggcgactcgtggatcctgccgccgccaagcctggtgggctagcgcggaacggagcggatcatgcagtgttaccaataccatatagcggctagcactactttattaatctcttcagagttcagacgttgcagaacgcgatccatcagttgttggcgtcaaaaaaaaaaaaaaaaaaaaaaaa

SEQ ID NO: 179796 - DNA, 290 bp, Zea mays
  Clone ID: MRT4577_95555C.1
ggctaccaacgaaaataggctggccggcgagctgctgtccgcgcgggtgtcgcgcgcggcggggctggtgcaggacgccgtgcggatggtcaccgacgactacatgcgctcggcggtggactacttcgaggcgacgcggtccctttttctttcgcgtccacgctgcgggggggcacctggtcgcggttcgagttccacggcgccgacttcgggtggggcgagcccgacatgacggacccgagcacgctgccggagaaggaagacataactgagcctgacacaccgaaagg

SEQ ID NO: 179797 - DNA, 543 bp, Zea mays
  Clone ID: MRT4577_95556C.1
cattgggtacctcgaggccggccggactctctctcgcggctgtctgaaatggcgacctccaaaaacatgcacacccgactatgactccgcatgtccgtcttcctcctcgggctgcgtactccaaccgcgcagctcctcttcttcctgagatcgacggagacgcccgagcggaacagcatgggagggcgagcctgcctcgtggtcagcagcgcgcgctgcacgagtaatactccacgaacaaacggcacgatggtcgtccacggtctagagcaacacgccgactgagtacgagttcctccatcgaacgacgcgtccgggtccggcctccgatgatgacgatgcgctgcttgcgcgaatgctgggacgagcgacgatggaggaacggacgacgatcatgacgtcgaggaacaaggcgtggtcggggccgggctcgctgactgtactcgtccctggagagctcccaggcgtgagagaacgtgtagcagttcagaaagaacgccgtgacgatggccatgaacgacgatgcatgcccaagatgtcatg

SEQ ID NO: 179798 - DNA, 359 bp, Zea mays
  Clone ID: MRT4577_95557C.1
gtaaaccagagctcctgactgttcctctctccctcctcacgggcgggctcagtatggtcagtccatccaccgccccgtgcgagtgccggccagatccctctcctgcaaggtttctatgcggaatggtcgggtctctgttgtttctcttctgaatgtgctggagcgatgatgcagcgttgatttgtgttcgctttcacagatctggtctctcacatagtgaccggagaagatgatcggccggttcctttccaggagactgctgctgtctactggctatgcctatcctgcctatgaatgctacaagacctgtgcactgaacacaccacagattgaacacctcatatgatggagtcagtatt

SEQ ID NO: 179799 - DNA, 696 bp, Zea mays
  Clone ID: MRT4577_95558C.1
attgggtacctcgagccggccgggatccttgttgttacggcagtctgtttcttacgacggatccacgggcgcaaaatctctccagagcgcgagagttctccacgaccgtcgctggcggcgaggtgggcacggctgacgctgccacggtcggcgctgggcgacggcgcgctgtcggacatcgtggggcagacgaggcaggccaggatggagctgcagtaggtgatgtgggagtatgtcggcatcgtgcgctcaacggggcggctgaagggcgtcgaggtctgcgagatgcgcaacctcttctgctgcgccaagctcgtcgtcaggagcgcgctggccaggcgcgagagccgcggcctgcacttcaccgaggacttcccgtacctggaggagagcaggaggaaacctacggtcatcttcccggccgccgtgcaggagctcacgtggagctccaagccgttgcagaggcagctgcaagcagatgacaatgcatgcagttcatccggctgggccttggggattcgttaattcattaatttttaagaactctcagttaacagcatacacaaaatccagatagttaggctgtagtagcctgcgtatctttgcaattcttgccagttccagctgttgcaacttgtaaaacggtgttgttggagctgcattatggtttataaaaaaaaaaaaaaaaaagcggcc

SEQ ID NO: 179800 - DNA, 397 bp, Zea mays
  Clone ID: MRT4577_95559C.1
acaccattaaagattgtttaaatgggagccaccccattagccttacaccttttgggaggccgaccccccccaccaccacaaaaggcccgggatggcaaagcaaccctgtgggggaccagttcggttcggggctttctggttttattcatcaaaagacattgtgggcaatgtgttttttaagcttttttgcatttttttaaaggggagactcccgacaagttatgggacttccaagttttcttaactcaataccataagggggcaactgttcacacctttcttttttacgggaaaatccttattaagaccagcagagttcccccttttctttaaaacccccgggggggggtgggtgccaacccccaacggggggggccttattgggcggtttttgggg

SEQ ID NO: 179801 - DNA, 687 bp, Zea mays
  unsure (1)..(687): unsure at all n locations
  Clone ID: MRT4577_9555C.1
ccccgtcccctccctctgcctctcccacccgccgcttccggattccgccgcccgtgccctcgccaccaggaattccactcggaccgctgcgtggattcctcggctcgccgtccggatctggcctcgctgagctgcagctgccgcgaatcccgactcgattcggccgcgctcggatctcgccggactagcggggaccgaggcctctcgattcgcctcgggggtgagatggatcatgtggtcggaggcaagttcaagctcggcaagaagatcgggagcgggtcgttcggggagctcttcctagctgtgaacgtgcagaccggagaggaggtcgccgtcaagctggaaaatgtcaagacgaagcacccgcagcttcactacgagtccaagctatacatgcttctccaaggaggaactggcattccgcacctgaagtggttcggcgttgagggggagtataacgtgatggtgatcgatcttctcggccctagccttgaggacttattcaactattgcagtagaaagttttctctcaagaccgtgctcatgcttgctgaccaaatgattaatcgggtcgagtacatgcatcanaaggggtttctgcaccgtgatataaagcctgataattttcttatgggggcttggtagggaagccaatcaggtatatataatagactatggactcgcaag

SEQ ID NO: 179802 - DNA, 531 bp, Zea mays
  Clone ID: MRT4577_95560C.1
ctggcctcctttcggccctctggccttgcgagttccatctcacctccaaccatgggtaaagagaactcccacatcaacattgtggttattggccatgtccactctggcaagtcgaccaccacaggacaccttatctacaagcttggagggattgacaagcgtgtgatcgagaggtttgagaaggaggctgctgaaatgaacaagcggcccttcaagtacgcgtgggtgctccacaagcccaaggctgagcgtgagagaggcatccccattgatattgctctgtggaactttgagaccaccaagtactactgcacgggcattgatgcccctggacaccgtgacttcatcaagaacatgatccctggcacctcccaggctcactgcgctgcccttatcattgacccccccactggcggctctgaggctggtatctccaaggatggccagacccccgaacctgctctccttgcgttcacccttgcagcgcagcagacgattccgctgccgccaccagatggatggcacccctcc

SEQ ID NO: 179803 - DNA, 1468 bp, Zea mays
  Clone ID: MRT4577_95561C.1
ccctacgtaagtgacattgcttgcatcaggaggagttggccatatatatcccacaaccaccaatccaccggtagctactggggacggaatcgcaatgtgtcatcgtgctcaggctgtaatatccaatatggagtttgtgcagttccatccaactgcactttcagatgagggcctgccaataaagccaaagacaagaagagagaatgcatttctcataacggaagcggtgagaggagacggagggattctttacaaccagtccatggagagattcatgccgatgtacgatgaccgctcggagctggcgccgagagacgtggttgcgaggagcatagacgaccagctgaagaaacgaggcgaaaagtacgtcctcctggacatcagccacagaccaagagacaaggttcttgcccacttccccaacatcgccgccgagtgcctgcggtacggcctggacatcacccggcagcccatcccggtggttcctgcggcgcactacatgtgcggcggcgtccgggcagggctgcagggggagaccaacgtgaagggcctgtacgtagccggcgaggtcgcgtgcacggggctgcacggcgccaaccggctagcgagcaactcgctgctggaagcgctggtgttcgccaggagggcggtgcagccgtccatcgacctcatggtggatgccgacggagatgccagaccgtcgctggcggcgaggtgggcacggccgacgctgccgcggtcggtgctgggcgacagcgtgctgtcggacttcgtggggcggacgaggcaggccaggatggagctgcaatcagtgatgtgggagtatgtcggcatcgtgcgctcgacggggcggctgaagcaggccgagtggaggatcggtgacctggagtcggagtgggaggagttcctgttccggcgggggtggaagccgaccacggtgggcgtcgaggtctgcgagatgcgcaacctcttctgctgcgccaagctcgtcgtcaggagcgcgctggccaggcgcgagagccgcggcctgcacttcaccgaggacttcccgtacctggaggagagcaggaggaagcctacggtcatcttcccggccgccgtgcaggagctcacgtggagctccaagccgttgcagaggcagctgcaagcagatgacaatgcatgcagttcatccggctgggccttggggattcgttaattcattcattaatttttaagaactctcagtcgacagcatacacaaaatccagacagttaggctgtagtagcctgcgtatctttgcaattcttgccagttccagctgttgcaacttgtaaacggtgttgttggagctgcattatggtttatgaaccttgatccgtagtatatgtatgtggtgattggctgattgcacaccaactgatgaccattgtgatgtcatgcagaaaaaattgcgagaacttctgaatttcatttaccacaaaacca

SEQ ID NO: 179804 - DNA, 381 bp, Zea mays
  Clone ID: MRT4577_95562C.1
cattcagaacacaccaagcgaagcgcactagcaacgacctagcaacaatggctaccaagatattagccctccttgcgcttcttgcccttttagtgagcgcgacaaatgcgttcattattccacagtgctcacttgctcctagtgccattattccacagttcctcccaccagttacttcaatgggcttcgaacatccaggcgggcaagcctataggctacaactagtgcttgcggggagcgccttacaacaaccaattgcccaattgcaacaacaatgcttggcacatgtaaccctacaaaccatgggaacgcatcaacaacaacattagtctgtcattactgagccacctagcagtggagaaccgtgacagctacttccaa

SEQ ID NO: 179805 - DNA, 744 bp, Zea mays
  Clone ID: MRT4577_95563C.1
acttcccccccgcctctctccctcctcttctgactatgccccttgctcggtctgtctcacctgcatcctgggccaatcagaagtccctcctctccattgcggccattgcccatgtccactctgccaagtccaccaccatcaggacaccttatctacaaccttgcaggcattgacaagcgtgcgatccataggtttgagaaggaggctgctgaaatgaacaagcggtccttcaagtacgcgtgggtgctcgacaagctcaaggctgagcgtgagagaggtatcaccattgatattgctctgtggaagtttgagaccaccaagtactactgcacgttctttgatgcccctggacaccgtgacttcatcaagaacatgatcactggcacctcccaggctgactgtgctgtccttatcattgactccaccactggtggttttgaggctggtatctccaaggatggccagacccgtgaacatgctctccttgcgttcacccttggagtgaagcagatgatttgctgctgcaacaagatggatgcaaccactcccaaatactccaaggcacgttatgaagagattgtgaaggaagtctcatcctacctcaagaaagttgcgtacaaccctgataagattgcctttgttcccatttctggttttgagggtgacaacatgattgagaggtccaccaaccttgactggtacgaaggcccaaccctgcttgaggctcttgaccagatcaccgag

SEQ ID NO: 179806 - DNA, 628 bp, Zea mays
  Clone ID: MRT4577_95564C.1
gggtccccaacgacgcaattgacatcccctcgcctaccccagctctacccgcgacgaagcatcaccaggaaggatgacgtgctcaatggatctcccggccaagggcgggttcagcttcgacctgtgccgccgcaacagtatgctggagaagaacgggctcaaactcccgggattcaggaagaccggaacaaccatcgtcggcctcgtctttcaggtgcgaccgcctacactcgttgcgtcgccttttcgttatccggatggggttgttcttggggcagacacaagagcaactgaggggcctatagttgctgataagaattgtgagaagatccactttatggcgccaaacatttattgttgtggagcaggaactgctgctgacactgaggctgttacagacatggtcagctcgcagctacagctgcaccgttacgcaacgggtcgcgaatctagagtcgtaactgctcttacactgctgaagtcacatctctttaggtatcaaggccatgtcagtgctgcccttgttcttggtggagtggattgtactggaccgcatcttcacactgtttatccacacggctccactgatactcttccttttgccacgatggggtctggatcccttgct

SEQ ID NO: 179807 - DNA, 523 bp, Zea mays
  Clone ID: MRT4577_95565C.1
aggaaacaggtcattggttcattagacatcgggggacccactttactgggaacattcggaaagggccccccccccccacaggggaaaaaaatcacaccactcacatagctcccaacgggtccatggttacccattctgcaaaacatggaccccccgccctttgggggtttagaaaaactgggggggggggtgctacttcgtcttgggaaaagggggggcaagcagctttgaaacaggaaagccggggaacggttcaacccctaaaagggccctcagtttctcaacgcaaaatattttcccccgggcaaaaggaacccgcagggtggtctcttttatggaggcccacatttttttaacaacaaccgagcgggataacatgctctcaccagggcccgaaaatttcattaaatcatcccaaaggtgaaggggcccaaaaagaccagatccagctcctcgaagagccacccttttggttttttccttcatacccggctttcttttgggggttctcctttggggggtg

SEQ ID NO: 179808 - DNA, 307 bp, Zea mays
  Clone ID: MRT4577_95566C.1
cccacgcgtccaggcgccattctggataagacagtatttcctactggtgaagcagaggaaaatgtttttacaccggttcatttcgagccagtagacctgtggattcattacaccggggagcaagcttaaacgaactatataacccaacttaattgaatgaaaaagaatgttcttgatcgaatccagctttaacggaccggcggtcacggggctagcacctcataaaagcagcagctggaatgcctaattgtactctccctgcagcgaagtactaaacacagggggtgttgtgataacaaggaacttg

SEQ ID NO: 179809 - DNA, 653 bp, Zea mays
  Clone ID: MRT4577_95567C.1
gcctgcgtgtaccgggcccctattacacgggctccctttttcattattttcactagtttcctttccactctagtttacttttattgtgtcttttgtttctcccgggataagcacgcaccctatgtttcgactagttattgggaacagcgtccgacatcaggccaccgtccaattgcaacaacaattcttggcacatataacaggacacaccatcgcagcgcagctgcctcaacaggtcctaccagctctgagccacctagccgtggtgaaccctgtcgtctacttgcaacaacggctgcttgcatgcaacccacttgctctagcaaacgtagatgcaaaccagcaacaacaacaactgcaacagtttctgccagcgcttagtcaactagccatggtgaaccctgccgactacctacaacagcaacaactgctttcatctagcccgctcgctgtggccaatgcacctacatacctgcaacatgaattgttgcaacacattgtaccagctctaactcaaatagctgtggcaaaccctgttgcctacttgcaacagctgcttccattcaaccaactaactatgtcaaactctgttgcgtacctacaacagcgacaacagatacttaatccattggcagtggctaacccattggtcg

SEQ ID NO: 179810 - DNA, 1583 bp, Zea mays
  Clone ID: MRT4577_95568C.1
ccccagaaccctaatccaagcgacttttgttcggatctcacccgattacgagggaaaaaaaaaaaaaaaaaaaaaaaaaaaaaaaaaaaaaaaaaaaaaaaaaggggaaaaaaaaagcccccccgggagcgcacccccccccctacccgcgacgaactggacgcaagccggcatccagtgggaaaaaaaaaacaaaaagggtaccggaagcggcgaaagcctcgcccccccgccgctctcgcatcgtctccggagcgcacgtcagatcaggtgcgccgcgcccccctcgcctaagctgcgacgaccatccatcgaacaggaaggatgacgggctccatggatctcccggccaagggcgggttcagcttcgacctgtgccgccggaacaacatgctggagaagaacgggctcaaggtcccgggattcaggaagaccgggacaaccatcgtcggcctcgtctttcaggatggggttgttcttggggcagacacaagggcaactgagggccccatagttgctgataagaactgtgagaaaatccactttatggcaccgaatatatactgctgtggagcaggaactgctgcggacacggaggccgttacagatatggtgagctcccagctacagcttcaccgttatgcaacgggccgcgaatcaagagttgtaactgctcttacactactgaagtcacacctcttcaagtatcaaggccatgtcagtgctgcccttgttcttggtggagtggattgtactgggccacatttacacactgtttatccacacgggtccactgatactcttccttttgccaccatgggctctggttctcttgctgcaatgtcagtgtttgaatcgaagtacaaagaaggccttactagggaggagggaatacagattgtgtgcgaagcaatctgtgctggtattttcaatgacttgggtagtgggagcaacgtggacgtctgcgtgataaccaaggggaagacagaatacttgagaaaccaccagttgccgaatcccaggacttatgctagttcaaagggatacagtttcaccaaggggcagactgaggtactgtcttcaaaggtcacacttctaaagcagaaggttgaggtcgccgagggtggtgatgctatggaggagtgatcttgcatgcctgcattcatacaagcatattctgaatctgtgtaactttgcttagtggatcagctagaacaagaaaaaagaaaatttggagatctttgctgtactcgctggaccaaagccagggttcttatgctaaatgtgtttctaatgtttggcacattttaaattgcttgttgtttccgaatgtttaaaaccggtgaaggtatggtatttgcttggagatgttattactgtcgcgtcggttgtttgtcgaacgactaggtaatggcgcaatgaaaatcatgcctgatgcagtggtttacatgaaaactagttctctctctctctcttcgtgccagcctgatgcagtggttttcttgttaatgttcttttatttagtggaggagttaggtcaaggcagcaatgcagatatatgttgagtccgtcgggccggccgc

SEQ ID NO: 179811 - DNA, 393 bp, Zea mays
  Clone ID: MRT4577_95569C.1
tcgaacacaccaagcgaagcgcactaacaacaacggtaacaacaatggctgcgcaagggattaaccctccttgcgcttgttgcccttttagtgagcgcaacaaatgcgttcattattacacagcgctcacttgctcctagtgccattattccacagtatctaccaccagttactgtaatgggcttcgaacattcagccgtgcaagcctacacgctacaactagcgcttgcggcgagcgtattacaacaaccaattgcccaattgcaacaacaatgcttggcacatataaacctacaaaccatggcaacgcaacagcaacaacagtttctgccatcactgagccaactagccgtggtgaaccctgtcgcctacttgcaacagcagctacttgca

SEQ ID NO: 179812 - DNA, 2755 bp, Zea mays
  Clone ID: MRT4577_9556C.1
cattgcggcgctcgacccgggccgggaatcatcgtccccctccggcccctcctttcccttccgcgcctccctcgtcttcttctcgtctccactccccctctcccaagtcccacccgccgctcccgcccccgtgcgctcgccgacacggtcagtagttccactcggagaaaggaacgcttccccctgcctgtctcgccggatccgttgccccgctgcagtttcgcccgccgctttcactttcgctttcactcgatttagattccatttccgttcgttcgttcctgtttcccttgctcgttcgttcgattggagctagccgccgcctggatctggcctagccgagccccggctgctctgaatcccgattcggttcggctcccttgctctgcggtcgcttccgaggcgtgctcggatctcgtcggagtagagggcctcgcggctcgcttcgggggcgagatggatcatgtggtcgggggcaagttcaagctcggcaagaagatcgggagtggatcgttcggggagctcttcctcgccgtgaatgtgcagaccggggaggaggtcgccgtcaagctggaaaatgtcaagacaaagcacccgcagcttcattacgagtccaagctatacatgcttctccaaggaggaactggcattccgcacctcaagtggttcggcgtcgagggggactacaatgtgatggtgatcgaccttctcggccctagccttgaggacttgttcaactactgcagcagaaagttctctctgaagactgtgctcatgctcgctgaccaaatgattaaccgggttgagtacatgcatcaaaaggggtttcttcaccgtgatataaagcctgataatttcctcatggggcttggtaggaaagccaatcaggtctggtcctatatatgtgcttaattcttgctgtccaactcgttatatttgaaccaaaagtttttacatgcattctgcctcttgctttgcttgtgctgcacttgaggatccccaaagatcctgcactactgatttggatgggtggggtttagtgcgttatgtgatgtattgcttacattcgatgatgatttcctttttaatgtgcctgcattttacagtctgctacccataatttatttcttttatctttggctaatgctgtatggtttccttatctatttagctgctattatgttatgttccagaaaacacctcttctctggaattgagatctcttggtactaattgttgttgaacttttactggcttttgtggcaggtatatataatagactatggactagcgaaaaaatatagggaccttcaaactcataagcacatcccgtacagagagaacaagaacctcactggaactgcacgatatgcaagtgtcaacacccaccttggtgttgagcaaagcaggcgagatgatttagaatccctcggttatgttcttatgtacttccttaggggcagcctaccatggcaggggctgaaggcaggaaccaagaagcagaaatatgacaagatcagcgagaaaaagatgctcactcctgtggaggtactctgcaaatcgtacccatcagagttcatctcctacttccactactgccgttcgttgcggtttgaagacaagcctgactattcttacctgaagagactattccgcgatctctttatccgggaaggataccagttcgactacgtgtttgactggaccattctaaagtatcctcaaataggctccaacccacggaccagggccggtgaaagaactagtggcgctgctggaccctcaatggataggattgagaagaccccaggagaagcgtccggtagaaggaaccctagtggtcctgtgaatcagagcgacagttacgcgcaacggccacgcgagaccgtatccatgtcgctaaaggagattatgcatagcactgaccggtctggggaaaggactgtggagagaccacgcacgtcctcacgcacaggcagcgcatcccgcagagccgttgcgtcaagcagcaggccagcaacctcgtccatggaaccaagcgagcagcagtatagccgggcgagcagactgttctctagcaacagtggcagccggccatccagcgcccagagagtcaaccctgcgccgggcgagtctagggccacctccctttcgcgggcagcggtcgcgagaggctcccgcgacgagccactccaccgcagcctggagctcctttcccttggcagcggcaagaggaaatagcgggaaggaagccgatctgatagcggaagggaaaagaatgcctgttggcgactctgtaaatgacggggcatgtcacctgttcttcgccagcagttcttcccctggggcatcccgtaatttcatggtgcccgccccggccttttaccatggctccgtagatagcaataattcgttgttgaatgtgcgtgctgtgttgcagtcgcgttagggccaagtcctagcctttgtggtgattagatttagggggtggtcaagattcacatatttatgtttcttaaccctctcctggacttggcgactcttttttttaccccctcccgagacaagtgcccgtgcgtttcttgttgaactctgaatttgcttattcaacagaagttgataatgataataaaagaagaggcatcctgtgtaaatcgatgcctcattttcttaaaaaaaaaaaaaaaaaaaaaaaaaaaaaaaaaaaaaaaaaaaaaaaaaaaaaaaaaaaaaaaaaaaaaaaaaaaaaaataaa

SEQ ID NO: 179813 - DNA, 1765 bp, Zea mays
  unsure (1)..(1765): unsure at all n locations
  Clone ID: MRT4577_95570C.1
gaaaatttcaaaaaagagaaaaaaaaaaaaaaaaaaataacaaggaaaaaaaaaaaaaaaaaaaaaaaaaaaaaaaaaaccaaaaggggtaccggaaggggggaaagcctcgccccccggccgttctcgcatcgtctccggagggcacgtaaaatcaggggggcccaacccaaacaccataccattagaaagtcgggatgtaacgacgcaatcgacatcccctcgcctaccccagctctacccgcgacgaagcatcaccagtaaggatgacgggctcaatggatctcccggccaagggcgggttcagcttcgacctgtgccgccgcaacagtatgctggagaagaacgggctcaaactcccgggattcaggaagaccggaacaaccatcgtcggcctcgtctttcaggatggggttgttcttggggcagacacaagagcaactgaggggcctatagttgctgataagaattgtgagaagatccactttatggcgccaaacatttattgttgtggagcaggaactgctgctgacactgaggctgttacagacatggtcagctcgcagctacagctgcaccgttacgcaacgggtcgcgaatctagagtcgtaactgctcttacactgctgaagtcacatctctttaggtatcaaggccatgtcagtgctgcccttgttcttggtggagtggattgtactggaccgcatcttcacactgtttatccacacggctccactgatactcttccttttgccacgatgggttctggatcccttgctgcaatgtcagtgtttgaatcgaagtataaagagggcctcactagggaagagggaatacaactggtgtcagaagcaatatgtgcaggtatcttcaatgacttgggtagtggaagcaatgtggatgtctgcgtgataaccaaggggaagacagaatacttgagaaaccaccagttgccgaatcccagaacttatgttagttcaaagggatatagcttcaccaaggggcagactgaggtgttgtccgcaaagatcacacatctcaagcagaaggttgaggtcactgagggcggtgatgctatggaggagtgatcctgtatgcttgcatccaggtaaaacagtcatactcttttttatattattttacttagtggaggagctaggaaaagacagaatggagatctttgttgtactttctcgactgaatccggactttcatgtcaaaggtgtttccaattaaatgcttgtttctgaatgtttaaactgcaatggtatgttacaactttctttgagatgttattgctactgctgcatctgttgcttggtgcatgaaggaaggggtagccttgaacgtcaggttatgaaatggcgctacnnnnntcatgcctgatgcagatgcactagttgtctagttgcatttatttggattacaatacagggctctgtcaaatctgcctgaatggtaaattatgttaagttcgtcaatatacttgtggtacagatcgcaaagatcacacatctcaagcagaaggttgaggtcactgagggcggtgatgctatggaggagtgatcctgtatgcttgcatccaggtaaaacagtcatactcttttttatattattttatttagtggaggagctaggacaagacagaatggagatctttgttgtactttctcgactgaatccggactttcatgtcaaaggtgtttccaattaaatgcttgtccctgaatgtttaaactgcaatggcatgttacaactttctttg

SEQ ID NO: 179814 - DNA, 1178 bp, Zea mays
  Clone ID: MRT4577_95571C.1
atggattttatagttggtttgcctcacacttgtgctggttatgactccatctggatagtagtgggccatttaacaaaggcggcccatttcatacccgtcaagaccacctacaatagtgcagtgttggcagaactatatatgtctcggattgtgtgcttgcatggtgtcccaaagaagatagtatcatacagaggcacccagttcacttctcacttttggcagcagctacatgaagctttgggcacacacttgaagttcagttcagcttaccacccgcagacaaatggtcagactgagagaaccaaccagattcttgaagatatgttgagagcttgtgcattgcaagacaagttaggttgggacaagaggctaccgtatgcagaattctcctacaacagctaccaagacagtctgaagatgtcactgttccaagcactctatgggaggaattgcagaactctgttgcattgggatcaacttggcgaaaggcaggtgttcgctccagatattctgcttgaggctgaagagaacgtcagaatggttcgagagaatctgaagacagcgcagtccagacagcgaagctatgctgacacccgaagaagagaattgagttttgaagtgggagattatgtttacttgaaggtgtcacccatcagaggaatcaaaaggttcggagtcaaaggcaagctagcacctcgatacatcggaccttaccagattcaagcaagacgtggagaggtagcatatcaacttagcctaccagaaagtctatcagctgtgcacgatgtgttccatgtgtctcagctaaagaaatgcttgagagtgccagaagagcagttgccaacggaggaccttgaagttcaagaagatctaacatatattgagaagccaactcaaattctggagacagcagatcgggtcactcggagaagtaccatcaggatgtgcaaagtcaaatggggtcaccactcagaagaagaagcaacctgggaaagagaagatgatttaaaagccaagtaccctgagctcttttctagccagccctgaatctcgagggcaagattcttttaagggggataggtctgtaacaccctgattttgggggtataaaatttctttctaattatcacccaaaatcatgtgttactcttctttttctcactctaggttttctctct

SEQ ID NO: 179815 - DNA, 423 bp, Zea mays
  unsure (1)..(423): unsure at all n locations
  Clone ID: MRT4577_95572C.1
cctnccggcctctggcttttgcgccttcattttcggctttggtccttgcaaggtcaattttggcttccaacattggttaagaggaattccaacttaaccatgggggtaatggtcaatgtcaactttgccaagtcgaccacaacaggacacctaatctacaaccttgaaggcattgacaagcgtgtgatcaagaggttcaagaaggaggctgctgaaatgaacaagcggtccttcaagtacgcgtgggtgctcgacaagctcaaggctgagcgtgagagaggtatcaccattgatatcgctctgtggaagtttgagaccaccaagtactactgcacggtcattgatgcccctggacaccgtgacttcatcaagaacatgatcactggtacctnccaggctgactgtgctgtccttatcattgac

SEQ ID NO: 179816 - DNA, 329 bp, Zea mays
  Clone ID: MRT4577_95573C.1
gattaagggctttaaccgggggggaaaatcaagctatatatttatatataacataggggttcacactttttatgcatgggaacaccaggggcgttattttatgcattgatatttgttacagggaggcaagaagtatgcattcttattttggatgtctgcagaaaacccgacccactggtttagatattaaggggggttcacgataagcccgatagggttcaggcaatattaagagcgggcaaaaaaaccaagaacttggcccggttttaataacttgacaaggaaggggggtgcctatgccctattttaaggtcctaaaaaacattttt

SEQ ID NO: 179817 - DNA, 812 bp, Zea mays
  Clone ID: MRT4577_95574C.1
cctcgaggccggccgggccggggttcccaactcgtcgactgtcttctgcgcctccatttctgcctctgcgccttgcaacgacaatctcacctctcaccatgagtaaacacaagcaccacctcaacattgtgcctattggccatgtcaaatctggcaagtccaccaccacaggacaccttatctacaagctctggatgcattgacaagcgtgtgaccgacgaggatcgagaacgaggctgctgaaatgtacaactcgaccttcaagtacacgagggtgctcgacaagttcaaggctgagcgtgagataggaatcaccattgatatcgctctgtgcaaacctgagaccacccacgtactactgctcgtccattgatgcccctggacaccgcgacttcatatggaacatgatcactgtcacctcccaatctgactgtgctgcacttatcattgatctccaccactggatgatatgatgctgcgtatctccaaagatgcccagacccgtgaacatgctctccttgcgtcacccttggagtgaagaagatgatttgctgctgcaacaagatggatgcaaccactcccttatactccgaggcactgtatgaatagattgtgaaggaagtctcatcctacctcaagacagttgggtactaccactgataagattgcctttgttcccatttctggttttgagagcgacgacatgattgagaggtccaccaaccttgactggtacaaaggtccaaccctgcttgaggctcttgaccagatcaccgagcccaagaggccttcagacaagcccctgcgtctgc

SEQ ID NO: 179818 - DNA, 1723 bp, Zea mays
  Clone ID: MRT4577_95575C.1
ggagagtaacgaggatcacacatcattttaggcaacaccagccaaagtttacaagtagttcggcaggacccagattgagatttggtagaaatataaaccagacaaaattggagatccttctcaagcactcctactgcagtgccaacagggtctgcactctacagtgctacccaaaaccatcttgttctactttgggtggatgaactgaaataagtactacttgatgccatcactggcagaacacaaccatgatgttatggcggaggtggctttgatgcctcatcctcattgccatgttccttctgctcctgatgatgatgatgacgaccaccaccaccaccaccttctccaccatgagccttctcctgcagctggtccttgagcccctcctggtacgtctccacgaaattcttcatcgcgtcagtgtacgtggacgcgcgggccatgtaaatccgccgcagggcaggcttcagcgtctctgcgccacccctagcggcgacagcgaggtcctccagcacagttggctcgctgctcgccttccccttcctgtcactgccagagctgggatggctgccattggacgactgctcctccacgtcctcggctgccttcttgtagtcgtcaggcctcagctcagggccgatgttccggacccatgacgcgccgtacagccgggtggcctccttgaggatgcaccagcgttcatgccatgtgagcttgggccgcttcttgatatgaggagggtccgggagtgacgacgggaaggctatctccttgaggtcataccgcacatagtcatacagcttcctgcacacgactctgagcttcatctccctttgtttgctcccttctgcagcgacttggatctgatagcaagttattaggggcaccgtgctgaattaatcttaatcctctgagtcacctaaaagatggcacctccaacgatgggttgctgcctcgacaagacaggattcatcaaagagaactggttgtatggcagcaattgttgatgctgtaggaatgcagcgaccaatgggtttgccactaccagtggattaagtaactgttgtcgctgttgtaggtacgcagcagagttcgacagagtcagttggttgaatggaagcagctgttgcaagtaggcaacagggtttgccacagctagttgagtcagagctggtacaatctgttgcaacaattgttgttgcaggtatgtaggtgcattgcccacagcgagcgggctagatgaaagcagttgttgctgttgtacgtaggcggcagggttcaccatggctagttgactgtgcgctggcagaaactgttgcagctgttgttgttgctggtttgcaactacgttcgccagagcaagtgggttggatgcaagcagctgctgttgcaagtaggcggcagggttcaccatggctaggtagctcagtgctggtaggaactgttgttgctgttgcgttgtgatggcttgtattgttagatgtgccaaagattgttgttgcaattgggcaattggttgttgtaagacgctcgccgcaagcgcttgttgtagcctgttggcttgcagagctgagtgttcgaagcccattgaagtaactggtgggaggaaatgtggaataatggcactaggagcaagtgagcattgtggaataatgaacgcatttgttgcgctcacaaaaagggcaagaagcgcaaggagggataatatcttggtagccat

SEQ ID NO: 179819 - DNA, 617 bp, Zea mays
  unsure (1)..(617): unsure at all n locations
  Clone ID: MRT4577_95576C.1
aatctgttgcagcaattgttgttgcaggtatgtaggtgcattacccacagcgagagggctagatgaaagcagttgttgctgttgtaggtagacggcagggttcaccatggctagttgactgagcgctggcagaaactgctgcaattgttgttgttgttggtatgcagctacggttgccagagcaagtgggttggatgcaagcagctgctgttgcaagtaggcgacagggttcaccacatctagttggctcagtgctggtaggaactgttgttgctgttgcgttgcgatggtttgtatggttagatgtgccaaggattgttgttgcaattggttaattggttgttgtaagacgcttgccgcaagcgcttgttgtagcctgtaggcttgcacagctaggtgttcgaagcccattgaagtaactggtgggaggaactgtggtataatggcactaggagcaagtgagcattgtggaataatgaacgcatttgttgcgctcacaaaaagggcaagaagcgcaaggagggataatatcttggtagccattgttgttaggttgttgctagtgcgcttcgcttggtgtgtttctgaatgctcanaatattataggtgatccccgc

SEQ ID NO: 179820 - DNA, 715 bp, Zea mays
  unsure (1)..(715): unsure at all n locations
  Clone ID: MRT4577_95577C.1
ccgggccggcgccggtacctctacttgggtgagcattcctaaaccaccatgcgaagcacatgcacaagaacctaaccgccatcccgagcaagatattatgccgtccttgctcttctggcgcttgttgcgagcgcaaccaatgcgttcctattgcacaatgctgccttggtccaaggtccattattaaacagccgcctcccaccagatacgtcaatgggcttcaaccacccagctgcgcaagcctataggcgacaacacgacattggggggcgcgtcttccaacaaccaatttccaagttgcaacaacaatccttgggacatcgaacaattcacaccatcgtaccgcaacagcaacaacaatgcctaccagcagtgagccacctagccatggcgaaccctgccgcctacttgcaacagcatgtgcttgcatcaaacccacttgctctggcaaacgtagttgcaaaccagccacaacaacagctgcaacagtttctgccagcgctcagtcaactagccatggtgaaccctgccgcctacctacaacagcaacaactgctttgatctagcccgctcgctgtggccaatgcacctacataccttgcacaacaattgttgcaacagattgtcccagctctgactcagctaggtgaggaaaaccctgctgcctacttggcacagttgnttgcattcaaccaactgactatgttggaactct

SEQ ID NO: 179821 - DNA, 212 bp, Zea mays
  unsure (1)..(212): unsure at all n locations
  Clone ID: MRT4577_95578C.1
attattggtctctgttccgttcaagtatagtactgtaattaatcatgaaagggtccctactatacttttgtttgcacacatgagtgacacatcgactgcatgctgcttagtaccatcatcagcgccccatgcatgcatgcatcctggacttcctcagcagtcaaattgaagcgcacnnctctcttgctacgtcatgtatcccgtttaagttt

SEQ ID NO: 179822 - DNA, 317 bp, Zea mays
  Clone ID: MRT4577_95579C.1
aaaaaaaggggggggggcaacccaatttttttgctgaaacttttgttacaaacattcagtaacacaggccccggttttttgacggccccttaaatccccttccattggtttaggataaatttttcctccattcgcactcatttcctgtttaaccaaatgatattgaatttcctttttttgaaaaccttgcctgcactgaatactttttttccctgaatcctgaccaaatgggtgtattccaccccccatggaacaatccctttttgttttttgagctagttcggggtaaaaacatacatttttcaatcgtggggggg

SEQ ID NO: 179823 - DNA, 1593 bp, Zea mays
  Clone ID: MRT4577_9557C.1
gttcttaaattcagtttccttatcggctgctgcccatttcgccccctcccgtcttttcccttccgcgtcggtctcctcccccactcttctacttcttgctgtcgtcgtcttctctcgactccccgtcccctccctctgcctcttccacccgccgcttccggattccgccgcccgtgccctcgccaccaggaattccactcggagtaaggagtgtttccccccgctgcttgcttcgcttctccggtcccggcacccgccccgctttcgcccgacttagattccacttctgtccgttcgttcgctcgctcgctcgtttgctcttatcccccttgctttgctcgttcgttcgattggagctagccgctgcgtggattcctcggctcgccgtccggatctggcctcgctgagctgcagctgccgcgaatcccgactcgattcggccgcgctcggatctcgccggactagcggggaccgaggcctctcgattcgcctcgggggcgagatggatcatgtggtcggaggcaagttcaagctcggcaagaagatcgggagcgggtcgttcggggagctcttcctagctgtgaacgtgcagaccggagaggaggtcgccgtcaagctggaaaatgtcaagacgaagcacccgcagcttcactacgagtccaagctatacatgcttctccaaggaggaactggcattccgcacctgaagtggttcggcgttgagggggagtataacgtgatggtgatcgatcttctcggccctagccttgaggacttgttcaactattgcagtagaaagttttctctcaagaccgtgctcatgcttgctgaccaaatgattaatcgggtcgagtacatgcatcaaaaggggtttctgcaccgtgatataaagcctgataattttcttatggggcttggtaggaaagccaatcaggtatatataatagactatggactcgcaaagaaatatagggatcttcaaactcataagcacatcccatacagagagaacaagaacctcactggaactgcacgatatgcgagtgtcaatacccaccttggcgttgaacaaagcaggagagatgatttagaatctcttggttacgttcttatgtacttccttaggggcagcctaccatggcaggggctgaaggcaggaaccaagaagcagaaatatgacaaaatcagcgagaaaaagatgctcactcctgtggaggtactctgcaaatcgtacccatcagagtttatctcctacttccactactgccgttcgttgcggtttgaagacaagcctgattactcttacctgaagagactattccgcgatctctttatccgggaaggataccagttcgactacgtgtttgactggaccattctaaagtatcctcaaataggctccaacccacggaccagggccggtgaaagaactagtggcgctgctggaccctcaatggataggattgagaagaccccaggagaagcgtccggtagaaggaaccctagtggtcctgtgaatcagagcgacagttacgcgcaacggccacgcgagaccgtatccatgtcgctaaaggagattatgcatagcactga

SEQ ID NO: 179824 - DNA, 108 bp, Zea mays
  Clone ID: MRT4577_95580C.1
ttgaacccgatcagaaggaaattccctgtttccaggaggttgttcgttccagggcctcgggcttggaggcttccaatttgttgaaaagggacccccgattgtttcttt

SEQ ID NO: 179825 - DNA, 406 bp, Zea mays
  unsure (1)..(406): unsure at all n locations
  Clone ID: MRT4577_95581C.1
taaaaaaacttgacctcgatgcccccctaccttaacctcgaatttcggttcaagcaaaccactacttttncccaatccgcaacggcctattcccgttggcgcccgcctcattcnatatcctccttttccaccaaaccctctaccactccttcctcttcgacaacatagctttctacgaccgcctaaccgaggtgctgtccaccgacgaggacctcgtctggatccactattaccacctcctcacgctcccaaccttcctccacaagcgctttcctcgcgccaaggtcagattcttactccactcacctttcccctcatctgagatcttacgtactatccccgtgcgagatgacctcatacgatcactactcaacaccgacctcattggcttccacaccttcgacta

SEQ ID NO: 179826 - DNA, 705 bp, Zea mays
  Clone ID: MRT4577_95582C.1
ggccgcttttttttttttttttttcgtaatacagtttgcttactgaacgtagcaaaagaacgaaaggaaaaaaaagcatatatctaatcgtgccaggtcgtttactcatcagacgtgattcactccaactccaactcttactactcccctctggcaccgctagcttgcacatcaccagtcggtatactctccttcctcgactgctcgggtgccctggcctcgttgcccttcttgatacccctcgctccaggcgtcaggtatgtgttatccagcgcgggcagctcctcgttggcgggcggctcccaatgcttgctcttccacggtgtgacgtgtagaatgtacattgtgtcgatttcctcgagggtgcggccgtgggactcgcagacgaaaaagtagacgactactgcgccggtgaaacagcatgcggcgaagacgtagccgtagcggtagtcaatagccgatgtgatgtatggtgtgaagaaagagatgaggaaattccaggtccagttgctggcagtggcgagagccatgcatttagcacggtatctcgaaggatagatttcgccaacaacagcccagatgatggggccccatgtcattgcgtatccggcgatgaagagacaggcgaagatgatcatggcgtagccgatgccttgtttggacgttccatccgcgtttgtgagagcatagtgaccaagcgaggcg

SEQ ID NO: 179827 - DNA, 209 bp, Zea mays
  unsure (1)..(209): unsure at all n locations
  Clone ID: MRT4577_95583C.1
gatcctctatagccgccccccttcatctttcatttattttaatttttnacaaaacaaaaaccaccaccaccttgggccgttcaaatttaactaaaactctctatcccattacatctttacttttattttacccctaaaaaacaatgtataacaattctttgtcttctttatctaacctacactacacacatacttatcacattacataa

SEQ ID NO: 179828 - DNA, 470 bp, Zea mays
  Clone ID: MRT4577_95584C.1
ttttttttttttttttttttttttttttttttttttttttttttttttttttttttttttttttttttttttttttttttttaaagcaaaaaacccccacaaagggaagaaaaaaaggagtttatttttttgtcataaaaaaaagagggtaaatcggcacaggcgaacaaatggggtcctgacagaccatgaacaagccaaattattaattttcacttggaaaaacactttttttctgcagtttcattttcttttgggggggggtatttccttttccaaagctttaaaatttatttcgttcttccatgggcacttatgaaaattgatgggccagtttcctacaaattttccattcacctccttcaaggcaaaaataaaaacaattgctttagcaaaattaaaaaaaaaagtttattcagttttaccaagccacttgtcctttttgccgtaaaaaaaaaggggggatcgac

SEQ ID NO: 179829 - DNA, 245 bp, Zea mays
  Clone ID: MRT4577_95585C.1
cccacgcgtgcgcgcacgcgtccgtgtacgcattcgtggcgtgatctcgtacatgctacggtgggaccagtacgggcacctcctgtgctacatcacgtacggcgtttacaaggacagggccatgtaccatcgcgccttctgcgactgctactgtctggctcgcttgctacaaacacgcgtttagttaattgtacatgtcctgcgctcgcttacgttcatgctctgtggtatgtactccatgatac

SEQ ID NO: 179830 - DNA, 708 bp, Zea mays
  Clone ID: MRT4577_95586C.1
cttgttcaaattccaatcgcggggcaagcaaaggaggaaagcaaccaaaggcatttcgcttctcctccgacaaatccatatccagaagatagcaccagtgcgtctcctcccaagctctcggatccaacccaatggaaggcgcggaggcgcttttccccggcgacggatgcggcggtgaccccatggacttctcgtggaccgctgacggggagaagcacccggacccggcggcttgcgccagccccggccgcgacgacgaggctacctcggcctcgaccccggttccttcgccgcaggagatggcggagtccatgattctcgtgcccgggccgcgcgtcgtcatgtctggactcaggctggctgattgccgttcagatgactgtgttctcttcattaatgctggtggtggtgcaatcgaaagctgtgatccctgtgtgaaggtttctggtgattcattctttgaaggaggggatgtgatagaaacaaatgagagcatagccgaaggtggtgattgtccatttatttatcactcagcaagatacggcagtttcagctacaagttcgacggtcttgcccccggagcttattttctagatctgcattttgctgaaatttatacacgtgtgggccaaaaggaattagcatgttcgatgtcctggtgcaggacgagaagatactgtctcagctcgatgtatatgcctgtagttg

SEQ ID NO: 179831 - DNA, 1343 bp, Zea mays
  Clone ID: MRT4577_95587C.1
ttttttttttttttttctcctttttttttttttttttttttttttttaaagccaagcaaacatgtttttttttaaactttataattttgatacaaatgttgcctttgtttaatataatatcaacaagttataaaattatgacacaaaacagctaattagtactggcacattcaaaccaaaaataaacttcactcgggatgaattatgacgaacaatgttctgcattcccaatggtttggtcgccagtacagccaccacaagacgccaattaataagacgaacattggagctttatttggagtaggtgccatgtctcactcagccgacgtagtacatggggtcgggcaccttgaaggtgcggtcgccctccggcgcgccgatgaggtcgctccactggtcgcccatgttgcccacgatgcggtacccggcgtccacaagcttctgccgctcgccggacttgtacggcaccaccgacgaacccagggacgacggcttgagcacaagcttatcccaggtgtggtagccggcgctgcggaggttcttgatggtgggctccttctcgtagtcgtgcctgccggtgatgaacaccaccttgatgcccagcgacagcagcgtctcgtatagctgcagcacctccggcagcggcggcgccgtcgcgttcgctacgtactcgtcgaagtaggtggcgttgtacggctcagccccgaatccggtgtcggcgtagtaggggaggttgctgagggtggtgtcgtcgacgtcaaacacccacacctctttcccgtcgccgccgagctcgagcccctctgcgtaggcggcggcctcacgtgccaccaccgcgcagtcctgcctgaacaggtcgccgtacatgtagtcgcggacgtagccccggcactccgcggggatgctgtaccagtcccggatgttgttggtctccaccccgagtcgccagctcgcacacgacggcacggcgcgcgccgtcgcggcggaggtggtcaccatctccaggtgcaagtcgcgcgcgcgcgccgcgctggccgcgtgaaccagcagcagcagcagcacgagcagcgacaccagcccatggcggaggggctcgagcgccatgacgtacaactgttgcttcgttggaactactactagctagataggaacaggaaacgtttgagtgagcgtatcttcaccccaggtctttttttctactggcgtataggttgtgctaatactatgatcctacggataaaagggaattgatggtagcggtgccgcgaggagagggatagatggtggcacgagtgaggaggagaggatgacgttcgaggagagggtggacgacggagcggagt

SEQ ID NO: 179832 - DNA, 601 bp, Zea mays
  Clone ID: MRT4577_95588C.1
cacgcctgcgtgtaccgggccgctaatacacggccgacctcagcgttcgggcaaacgtatttgcaaaccagccacaacaacagctgcaacagcatctgccagcgctcagtcaacaagcacatggcggaaccgtggcgcctacctacaacagccacaactgctttaatctaacccggtcgctgtggacaatggacctacatacctgcaacaacagttgttgcaacagaatagtgccagctctgactcaactagttgtggcaaaccctgctgcctactagcaacagctgctctcattcaaccaactgactatgtcgaactctgctgcgtacctacaacagcgacaacagatacttaatccactagcagaggctaacccattggtcgctgccttgctacagcaacaacaattgctgacatacaaccaattctctttgataaaccctgtcttgtcgaggcagcaacccatcgccagaggtgccatcttttagataacatatgagatgtactcgataatggcgccctcattcccgcatgtgtttcctagaaatctcaatatattgattgaaatattgttgtggctggtttgcaactacgtttgccc

SEQ ID NO: 179833 - DNA, 466 bp, Zea mays
  Clone ID: MRT4577_95589C.1
cccattttctccattgatcctagctccataattccagggtttcttttaccagtttcttgaatggcctttgaacacccagctgtgcaagcctataggctacaacaagcgattgcggagagcgtcttacaacaaccaattgctccaattgcaacaacaatccttggcacatctaacaattcaaaccatcgcaacgcaacagcaacaacagttcctaccagcactgagccacctagccatggtgaaccctgtcgcctacttgcaacagcatgttgcttgcatccaacccacttgctctagcaaacgtagttgcaaaccagcaacaacaacaactgcaacagtttctgccagcgcttagtcaactagccatggagaactctgtcgctacctacaacagctacaactgtattcatcttgcccgatcgctggggccaatgcacctacataccctgcacaagaattggtgaac

SEQ ID NO: 179834 - DNA, 205 bp, Zea mays
  Clone ID: MRT4577_9558C.1
gcgcgactcaaagcttcttccaggtcctaccggcgatgctggagctccacaccattacgtcgacacaatgatggagtgtatctcgatctacatcggacaagtcggtatcgaggtcggtaacgagtgctgggaggtctaatggttcgagcatggcattcaggctgttggtgcagatgccaggtgataagaccattgggggttgtga

SEQ ID NO: 179835 - DNA, 305 bp, Zea mays
  Clone ID: MRT4577_95590C.1
gaatacccgccgggacccacgcgtccgcggacgcctcctcccaccccttcggcttcgcgtgcgttttttttttggagcttaacagcagtttttaacacattggcatggcgcgcgagtgcatgatgcgtgactacacagcatgatacatgcttgtacaactagaggctacacatgttacgactggataccctatttactagctctgacgtacattactagtgctggaagataagtggtaacctgcaggaaaaatatagaccaaactcatcgcagggaaataagaaaattggacagatcgaaatcgc

SEQ ID NO: 179836 - DNA, 572 bp, Zea mays
  Clone ID: MRT4577_95591C.1
gccacacgcactatcaactacctagcaccaatggctaccatataattcatccctccttgcgcttcttgcccttttagtgagcgcaacaaatgcgttaattattccacagtgctcacttgctcctagtgccattatttcacagttcctcccaccagatacttcaatgggcttcgaacatccagccgggcaagcctacaggactacaactagcgcttgcggccatcgccttacaacaagccaattgcccaattgcaacaacaatacttggcacatctaaccctacaaaccattgccacgcatcaacgacaacaacaacggtttctggcatcactgacccacctagccgtggggaaccctgtcacctacttgcaacaggagctgcttgcatgcaacccacttgctctggcgaacgcacatgcataccagcaacagcaacagctgcaacaggttatagccagtgctcattcaactacccatggtgaaccctgccgtctacctacaactactttcatctaacccgctcgccgtgggcaccgcacctaccttcctacaacaccagttgctgcaacaaa

SEQ ID NO: 179837 - DNA, 286 bp, Zea mays
  Clone ID: MRT4577_95592C.1
gaccagtaagattacctgtttcatcaaaatcaatttaggccaaggaggttacaacgagggctgaccaccactcataaaaatttagagagtttgaaaaaaaaacaattattttctgatttaggtgcttccacgacaaaatcacctgagttgctcttgagcaaacacctccatacatttattgggaccggacaaacattggtacaaaaggcagcagcccgcttgtgttgtttcacaagaaaacattcccatcctttttcttttttagtagggcttcactggtgccctg
